United States Patent Application Publication US 2006/0134663 A1 - sequence listing, part 126

SEQ ID NO: 417665 - DNA, 847 bp, Homo Sapiens
  misc_feature (79)..(114): n is a, c, g, or t
  misc_feature (152)..(256): n is a, c, g, or t
  misc_feature (289)..(341): n is a, c, g, or t
acaacttataatcactattaggggcctaggtttagaggccgaagacgagcgcagggagtagtgagcgaggaagcggcgnnnnnnnnnnnnnnnnnnnnnnnnnnnnnnnnnnnnagtcgacggtaccggacatatgcccgggaattcggccnnnnnnnnnnnnnnnnnnnnnnnnnnnnnnnnnnnnnnnnnnnnnnnnnnnnnnnnnnnnnnnnnnnnnnnnnnnnnnnnnnnnnnnnnnnnnnnnnnnnnnnnntaataggcgaagaagccccggttctccaagacnnnnnnnnnnnnnnnnnnnnnnnnnnnnnnnnnnnnnnnnnnnnnnnnnnnnnatgtgtgtgtgcgggcggcacctggccccgggaaaaggttttaaagaaccacatcggtggggcgcggcggcccctcttggctaccgggccccggtggccaaggggtgttcccaaaggaaactcggggcaaggcaaagggggcggggattccccccaagataaaaagccgccgggggaaacaccgaggttctggaaaaacaccccaagagggaatcacggcgggcacacgcgggactcatacaccgggagtcccaagagcgacgcgcgaaattacacaattaaggcccgcagagagggagaagcccagctagagataactcggaggacgagccgagaaagacaggacggcacgagaatacgactcgaaaccgccgagagcacagcggagagcacaaccggacggagcagtcgccgcgcggcaacacacgaggcagcacgccaacggcgctgggacacagggcacgctccgatgagcagtctaacggggagacgacgcagcagcgagg

SEQ ID NO: 417666 - DNA, 895 bp, Homo Sapiens
  misc_feature (61)..(75): n is a, c, g, or t
  misc_feature (210)..(218): n is a, c, g, or t
ttttgtggggcgcggtttgggccttagagagaaagggttttttataaccaatttcgtgttnnnnnnnnnnnnnnnccccaaatgtgggttatggtgaaccactgtgggggaccattaagagttggtcccaaaaggggaagatccccgggcgccatgtgaactaagtgtggtctgggggtttttttcagcacacataaaaaaagggcgccnnnnnnnnnaaacccgggagggtgtttctgggaaaaaaatttctcaagagagtggggaggttccgggggggagacaatagggggtgatctcttaatttaaacaggagggagtgtcacaaaggggagaggcttgagattatattaaaatttagtccgcgggcggcggaggggaatagggaagtagagtatatttggagtgagaaaataaagtaaaggtatatcggagggtgaacattgagaagaagcaatcgacagaaagaggcggacatagatataatacataaagtatgggagccaaggggtgacatcaaaccagacgcgtacgcgaccgtatgcgggatgatagaaagcatcgaggagacaagtgcggcgtcgcacaaaccagtcgaagggcaagcaacaaacgggggtgacaagcatggaggacactgagttaggagactaaaaatcggggtttatagcaaagactggaggtgaattcgtggggaaccaagaaaaagttatttcgcagcagcgcgtatacggagaataggcgagagaatacggaaacacgaacagatctggggaaatattgggtaaaaaaggcgcgtaattcagggaatgtcacccagacagagagacaaattgaggattgggacaagtgggtacagggaagacgaagtcaggcaccgtaaggataatatagg

SEQ ID NO: 417667 - DNA, 464 bp, Homo Sapiens
  misc_feature (49)..(151): n is a, c, g, or t
  misc_feature (181)..(218): n is a, c, g, or t
agtcgacggtaccggacatatgcccgggaattcggccattacggccggnnnnnnnnnnnnnnnnnnnnnnnnnnnnnnnnnnnnnnnnnnnnnnnnnnnnnnnnnnnnnnnnnnnnnnnnnnnnnnnnnnnnnnnnnnnnnnnnnnnnnnnatataggcgagaacccccggtttcctcccnnnnnnnnnnnnnnnnnnnnnnnnnnnnnnnnnnnnnntttttggtgcgggcgcgcaccttttgggggccccttgagaaaaaaggttttcttaaaacaccatatcgcggttgggaggccgccgaggggggcccccaaaggagggcgcacaggtcgacaccagtggcgcgcaaaagagcgtggtttcctcccaaagaggggagagacacccccgggggcggccaacgtggacactaagaggggcgtcagtaggggagaatatttctctctcacaccaaaattgtg

SEQ ID NO: 417668 - DNA, 630 bp, Homo Sapiens
  misc_feature (66)..(101): n is a, c, g, or t
  misc_feature (150)..(260): n is a, c, g, or t
  misc_feature (280)..(308): n is a, c, g, or t
tgatctaatgggcctagggtttaagcgaacgacgagcgcagcgagttgtgagcgaggaagcggcgnnnnnnnnnnnnnnnnnnnnnnnnnnnnnnnnnnnnagtcgacggtaccggacatatgcccgggaattcggccattacggccggnnnnnnnnnnnnnnnnnnnnnnnnnnnnnnnnnnnnnnnnnnnnnnnnnnnnnnnnnnnnnnnnnnnnnnnnnnnnnnnnnnnnnnnnnnnnnnnnnnnnnnnnnnnnnnncccgttctccagaaaagtcnnnnnnnnnnnnnnnnnnnnnnnnnnnnnccacttttgggcggactggacccttggaaaaagtttttataaccccaatttgttttgggagcgccaggggcccaaaaaggtaaaaggtgcgacatgggcacaaaggatggtaccaaaagagaaaacccgggcaatgaaacatagtggattgggaaatatctacccgaatattaaaaaaatcggccgggggtaacacagaacgatgtttgtggaacaacactccaacagatgcgagtatcacagagaggaacataaaggggagttaatccaagaggggttccaagggagagatggaattatcaaattaagcgaccgcacgggg

SEQ ID NO: 417669 - DNA, 172 bp, Homo Sapiens
ctttttgggccggattcggccatggaaagggtttttaaaaacacaatgtgtgtgggagcaggggaccccaactatagggtgaacaggaacaacttggggcacaaaggcgtgacacagaggagagagccacggggagcaagacaaagtcagcggtaggcaatacaccccatat

SEQ ID NO: 417670 - DNA, 680 bp, Homo Sapiens
  misc_feature (71)..(106): n is a, c, g, or t
  misc_feature (155)..(235): n is a, c, g, or t
  misc_feature (237)..(253): n is a, c, g, or t
gactgaatatatatgggcctagcgctgaagcgaacgacgagcgcaggagttagtgagcgaggaagcggcgnnnnnnnnnnnnnnnnnnnnnnnnnnnnnnnnnnnnagtcgacggtaccggacatatgcccgggaattcggccattacggccggnnnnnnnnnnnnnnnnnnnnnnnnnnnnnnnnnnnnnnnnnnnnnnnnnnnnnnnnnnnnnnnnnnnnnnnnnnnnnnnnngnnnnnnnnnnnnnnnnncaaaacaaacaaacacgttgttggcgaccgccctgagaccctaggaaaagagttttccaacaaccaactcggttggggcgacgcggcccagtataggtatcagtggcaccgttggccacaaggcgtgcttccaagaggaaaaccgtggtcaaggaacattgagcggtgtgggttctccacaagtaaaaaacagccccgggggtgacacacggagtggtttgggacacaaaatcccaaaaagggagctccgagggcacctaaaacgggaaacataaaaacgagggatgccaaggcgcaagctcgaaattaaaaaattaaggccccgccgcgggggacacgaagagagaaaacatagaaaacgaacagcaaaacaaacaacgacggaaacagtgtatggacaagaaaataaagaacaaaatacaacaag

SEQ ID NO: 417671 - DNA, 989 bp, Homo Sapiens
  misc_feature (69)..(104): n is a, c, g, or t
  misc_feature (154)..(249): n is a, c, g, or t
  misc_feature (289)..(349): n is a, c, g, or t
ggatacatatatggtccatcggtccagcgaacgacgagcgcagcgagctattgagcgaggaagcggcgnnnnnnnnnnnnnnnnnnnnnnnnnnnnnnnnnnnnagtcgacggtaccggacatatgcccgggaattcggccattacggccgggnnnnnnnnnnnnnnnnnnnnnnnnnnnnnnnnnnnnnnnnnnnnnnnnnnnnnnnnnnnnnnnnnnnnnnnnnnnnnnnnnnnnnnnnnnnnnnnngcaaatatagcgagacccccgcttctccaggaaaagaggnnnnnnnnnnnnnnnnnnnnnnnnnnnnnnnnnnnnnnnnnnnnnnnnnnnnnnnnnnnnnatgtctgggcgcgcatatgaaccacaccgaaaagagttattaaaacaccaacctagtgtggaggcggaggggccccaagagaatcaggcggacccaggccacacacgacgcgtccccacagggaaccgcgcgccagcaacaacgaacgcggcgaaacaccacccaactaaaaaacgacgcccgggagcaaaacacggaacagcttatgagaacaaacacccgagcgaggatgaagatctagagaggcacaacacggaggggaatcactaaacacagaagaggaatacacacaacgagaaagccgcgcatattcaaaaataataggcccccccgacgctggggagatgacagacagaaagcagccacagcaggaagacgaagcaaccagcaagaagaacagagagacacacgaaacagaagccagccaacacgaaccgacaacaaggaagacgcagacaaaaggaagaagccagaacagaaaagacaaggacaaaaacggccacaaccgaaaacacagcacctacaaaagggacacaaacaagaccaacacgcagagaaagactaatagaacagaggaaaagacgaacaaaggccacagagacgaagcaaaaacggcagaccggcaggcaaaaagggtcac

SEQ ID NO: 417672 - DNA, 898 bp, Homo Sapiens
  misc_feature (52)..(494): n is a, c, g, or t
caagcgagctcgatatcaaattacgccccgccctgacatcatcgagtactgnnnnnnnnnnnnnnnnnnnnnnnnnnnnnnnnnnnnnnnnnnnnnnnnnnnnnnnnnnnnnnnnnnnnnnnnnnnnnnnnnnnnnnnnnnnnnnnnnnnnnnnnnnnnnnnnnnnnnnnnnnnnnnnnnnnnnnnnnnnnnnnnnnnnnnnnnnnnnnnnnnnnnnnnnnnnnnnnnnnnnnnnnnnnnnnnnnnnnnnnnnnnnnnnnnnnnnnnnnnnnnnnnnnnnnnnnnnnnnnnnnnnnnnnnnnnnnnnnnnnnnnnnnnnnnnnnnnnnnnnnnnnnnnnnnnnnnnnnnnnnnnnnnnnnnnnnnnnnnnnnnnnnnnnnnnnnnnnnnnnnnnnnnnnnnnnnnnnnnnnnnnnnnnnnnnnnnnnnnnnnnnnnnnnnnnnnnnnnnnnnnnnnnnnnnnnnnnnnnnnnnnnnnnnnnnnnnnnnnnnnnncacgactgtcactaacggccggatgaactggtgccttatttcctttaccggtccttaaaacaaggccgcaatatcacgctgaacggctggtaaatggcatcctggacacactgactggcatgccctaccaaaggtcttacggagcccttgagcaatctgcaagggggatattcacagcgacttccgccaataagccccgtaactctgaaagacgaaaattgtgcgctaatatacaagagtcgccgcaccaggaagactgcgtccattcgcgtgttctccgacgcctaaacgtatacacatcttgtcggtccacagcctcatggtgcgtctctctctcgtaccatccgcagcagatgacaccgaccacaccgtggtactataccctgatatgatatagtacatcg

SEQ ID NO: 417673 - DNA, 1737 bp, Homo Sapiens
  misc_feature (95)..(130): n is a, c, g, or t
ccaccacgaccaagaacccctttatatctatagggcgcctacgttttgagaccgaacgacgagcgcagcgacgtattgagcgaggaagcgggcgnnnnnnnnnnnnnnnnnnnnnnnnnnnnnnnnnnnnagtcgacggtaccggacatatgcccgggcaattcggccattacaggccgggggtgtgcgtgtctcaagggatctactggcggcgctcaccagatggaagacatctcggaaatctgtgcaggaaacgcgcttccaggatagctggcaggactcccctggatccttcagatcctccaagcgctccttcacagcattctcgctaccgggcaggcattccagcgagtctggctggaactgcccaggtcggacagagagacgcagtagatgattcatctcaggacttgaactcatatcagtagccagtaggtttgacaaagcatttgtcatgtccaccacgcttgccaccctctacatacctatgagtgcagggacaacgtcacgcgacgcgtgacacatggatcaacactcatacaggcaccttagtcctagaaccacctgctaccacttatggaccaggacgagaccaacactagcaaaaccttgatattatagacagcctgtgagactaatgtcactgagcattcacatacacgcaatattctgccccggtaacgtaccaaattcccttgacatggagagcaaaagtaactcgcgcgcacacgcattcctcttcaccgcttctcagtatttaacaccaggacattgtacgccttatgcggctgctttgcggacacttaactttcaccgcacttagaaaggagcacccccaagagatcccaaagacatcgaccacattacaggcggacattggcttaacacaggaagcccctgtggccaattacacttagtcggcgctaggactccagtatcagcaggatagcgtacccaggcacacgccacgtggacttatctcctggctcattccgccgtcatttcgtcaagacagaattctacaccgtctcggaaccaccggctatggacatccgccaatatgggtaccaactccgacacacgtatcactgcaagcggcacaccttattgatgcctgcgccagcggagcacagacaccgttaaaacacacggcacattgcacctatgccggacaacaaaaggcccctgtggacataaagagtccaaggctcaagcctcgttccgagttgttctggtcttccaacgtctttgtctgtgcatacaagagtctatcaaacagagacagatccacgatccccgcgtcagctgtttcctcgcgcgttaacacaacaacccagtacaaatcgtcccgtttgcgaccttctcagagcgaggatgacactccacactcgagcacatctgatttctcacaacaactcacatccaactagtcccccctattaccagtccacaaacatcccaaccaattttttcccctatccattcaaccattctatatcccaaattccacgtaccatattttgacactccaatcatcaaacaacaccgtgtgatcaactgcgtctaacatagctcagtcaaccacttgtccccgccacaatcatttattgtcacaccactcacacacaccaatcacgatgcaataacacaactacatcagaactcattcacacatcttatcatcacagaacgaccaatataccccacaatcaacaaatgtatggtctatctcataca

SEQ ID NO: 417674 - DNA, 968 bp, Homo Sapiens
  misc_feature (65)..(560): n is a, c, g, or t
agtcgacggtaccggacatatgcccgggaattcggccaacaggagtccaagcgagctcgatatcnnnnnnnnnnnnnnnnnnnnnnnnnnnnnnnnnnnnnnnnnnnnnnnnnnnnnnnnnnnnnnnnnnnnnnnnnnnnnnnnnnnnnnnnnnnnnnnnnnnnnnnnnnnnnnnnnnnnnnnnnnnnnnnnnnnnnnnnnnnnnnnnnnnnnnnnnnnnnnnnnnnnnnnnnnnnnnnnnnnnnnnnnnnnnnnnnnnnnnnnnnnnnnnnnnnnnnnnnnnnnnnnnnnnnnnnnnnnnnnnnnnnnnnnnnnnnnnnnnnnnnnnnnnnnnnnnnnnnnnnnnnnnnnnnnnnnnnnnnnnnnnnnnnnnnnnnnnnnnnnnnnnnnnnnnnnnnnnnnnnnnnnnnnnnnnnnnnnnnnnnnnnnnnnnnnnnnnnnnnnnnnnnnnnnnnnnnnnnnnnnnnnnnnnnnnnnnnnnnnnnnnnnnnnnnnnnnnnnnnnnnnnnnnnnnnnnnnnnnnnnnnnnnnnnnnnnnnnnnnnnnnnnnnnnnnnnnnnctttcacgcgccggataacacttgtgcttatatccctttcaccggtcctctaacaacggccgactattcagctgaaccgcgcctgattatagggtaccttgagccaacctgatcgggaattgcctcaaacatgtcctttaacgactcgcattggggtatatatcaacgggggaatatcccaggaacttcccccatatacgcatccctagtccgtacagaatcatacgctcggtagcataacttacacaaggtatgcggcggcaccagtcgccacgaattcgcctatctgtcgtaacttggaacactacattcgcgcacagctgctggcgtgtcaccaactgtctggctgtattcaagcagacacattgtcttcaccctgtatactcagcactctctggtcaggcgcac

SEQ ID NO: 417675 - DNA, 1073 bp, Homo Sapiens
  misc_feature (436)..(531): n is a, c, g, or t
  misc_feature (718)..(747): n is a, c, g, or t
tctccaaatacaaaacacatagaataaccaacaaaaagttgttggacagccatcgaccaccataggaaagagttatctgagaccacattgcgtagtggagccgccggaccacatatagtttaagttgaaccagttggatcaatagacgtgatacccataaggaaaaaccgtgggcacagtgaaataagtcgactgggatatgctccacccaattataaacaacgccctgtgtgtcaaccacaggacgtgtttcgtgaacacacaaaccccacagagcagcgagagactacagggagagagcaaatcaaagagggcaggcacgaattcaacaaagggaggagtacaccaagacgagagctccggaatagataaaaagtttacagccacctcggtcgatggggagtagaaggaaagctacacaaacggatacaagcannnnnnnnnnnnnnnnnnnnnnnnnnnnnnnnnnnnnnnnnnnnnnnnnnnnnnnnnnnnnnnnnnnnnnnnnnnnnnnnnnnnnnnnnnnnnnnncaaggcaagagacagaagtaacagacaagaatgaaaaccaaacaaaaagtaacgacaagtagagagaacgcgcagagggaacgtagaagcaggagacgctagcgggagacggagttatcgagaaaggatgagagtgaccaaggcagcaggcagagatgactatgaggaatcagcgattgatcagcannnnnnnnnnnnnnnnnnnnnnnnnnnnnngaagtgatgcaaagagatgagcaaggcaagacgaacagccacagaagataaggaacgaagtaaagacgatatgacgagagtgagaccgtgtaggtcgcgagcacggtgcgagtgatagagggacgtcataagacgaaagagcagtacagatagaagcaagagggagagtagtaagggatgatacgtaagtgaacaggactagatgacagaggccacgagggaatgtcgacgagagcagcgactagtaaagcgatggaactgagaaggtcatccagcagttgttacggcatagagatactacgggtgcagatagagtgcgtacagag

SEQ ID NO: 417676 - DNA, 783 bp, Homo Sapiens
  misc_feature (43)..(85): n is a, c, g, or t
  misc_feature (88)..(123): n is a, c, g, or t
  misc_feature (161)..(282): n is a, c, g, or t
  misc_feature (289)..(356): n is a, c, g, or t
  misc_feature (526)..(538): n is a, c, g, or t
  misc_feature (572)..(580): n is a, c, g, or t
aagggaaggactttgactatcatatagggcgctagctttttgnnnnnnnnnnnnnnnnnnnnnnnnnnnnnnnnnnnnnnnnnnncgnnnnnnnnnnnnnnnnnnnnnnnnnnnnnnnnnnnnagtcgacggtaccggacatatgcccgggaattcggccnnnnnnnnnnnnnnnnnnnnnnnnnnnnnnnnnnnnnnnnnnnnnnnnnnnnnnnnnnnnnnnnnnnnnnnnnnnnnnnnnnnnnnnnnnnnnnnnnnnnnnnnnnnnnnnnnnnnnnnnnntctccannnnnnnnnnnnnnnnnnnnnnnnnnnnnnnnnnnnnnnnnnnnnnnnnnnnnnnnnnnnnnnnnnnncctctttgtggcgggcggccttgggccctgtggaaaaaggtttttatacacacaatcgcgcggtggggcgcgcggggggcccccaagataggccataggtgaaacaggtggcgccacaaagagcgggttcccaaagaggagaacacccgcggggcacagaggcacaagannnnnnnnnnnnnaattctccccacaaaatacaacacaagcgccccnnnnnnnnnaaaccaccacgaaaggctgttcttgttgaaaacaaatatttctcaaaagagaggggggggcatcaccgaggaggcgccacaataacacggggggggactctctatattccacacaaggggggggtgtccccaaagagacgaagatcgctacagataatcctccacaatattaaacacccccccctgtcctcgggtgggttaga

SEQ ID NO: 417677 - DNA, 509 bp, Homo Sapiens
ttgtgtgtgggcgcgccctcggcccgagaaaaaagttttttgaaaacccccttcgcgtgggggggcgcgggggccccaggagttaaggcgcgcaccctgtggcacacaaggtggccccaagaggagaatccgcggccccgtgacacatgggtggctgtgggttttcccccaccaataaaaaagcggccgcggggggaacaacccgaccgcggttttcgggagaaaaattccaaaaggatgggcggcgtcctgaggacgccaccatacccggggggctttataccaacccaggggagtgttcccaaagcggaggcagctcaggatattaaaaaattttaccgccccgcggaaccgggtggggagagagacacacattcacatagcactatagtgaacatccactcatatctcagattgacaactacacatccctcatatgcgactataccaatcaatcaacagagctaatcatatatctacacaacagcacagacacagtactagctcat

SEQ ID NO: 417678 - DNA, 1173 bp, Homo Sapiens
  misc_feature (75)..(110): n is a, c, g, or t
  misc_feature (147)..(267): n is a, c, g, or t
  misc_feature (275)..(288): n is a, c, g, or t
  misc_feature (630)..(697): n is a, c, g, or t
  misc_feature (1057)..(1108): n is a, c, g, or t
aactgtattcatataggggcaggttgtagagcgaacgacgagcgcaaggagtccagtgagcgaggaagcggccgnnnnnnnnnnnnnnnnnnnnnnnnnnnnnnnnnnnnagtcgacggtacggacatatgcccgggaattcggccnnnnnnnnnnnnnnnnnnnnnnnnnnnnnnnnnnnnnnnnnnnnnnnnnnnnnnnnnnnnnnnnnnnnnnnnnnnnnnnnnnnnnnnnnnnnnnnnnnnnnnnnnnnnnnnnnnnnnnnnntctcccgnnnnnnnnnnnnnncaacacaacaaacacaacttttgtcgggccggccttcgagcctaggaaaaggtttcatagaaccatctcgtgtggggcgcccggcggcccgcaggatagggttatttgacactggacataacggggaccaagaggaaaacccggcgccaagaaacaaggtgcgtggggtttcctcaccaaataaagaaaaacgcgccggcgggaaaacgcagcgcgttttttgaccacaaatcccagagtggggttttcgggcaggcccatagcggggtttaatccaaacaaggggcgaggttcaaagggcagaggcccggaaaaatacaaaattttaccccccgcggcggnnnnnnnnnnnnnnnnnnnnnnnnnnnnnnnnnnnnnnnnnnnnnnnnnnnnnnnnnnnnnnnnnnnngagcataaaacggtataacaagacggaggaacacgaacaagagaagcataggcgagagcgacgcaaaacaaacatagaccacacaagaagcaaaaacacagatagacaagcaagtcgacataatagacaaacacagagcgacaaacacaacgaaagcaaaacaacagccacagagggacgacagacgaggaaaccgagagagcagacccaacagaaaacacaagccagacgaagaggagcaggagctagaaagaagagcgaacagagaacgcaagaaggaccaaagaaagagagcgaagacgagggacagaggagacccggggaacacacaagacagaagccgaaagagcgagaaaaacnnnnnnnnnnnnnnnnnnnnnnnnnnnnnnnnnnnnnnnnnnnnnnnnnnnncacagcaggcacaggcgaccgagaaacaagcaggagagagagacaccacgacgccggcgcagcgt

SEQ ID NO: 417679 - DNA, 377 bp, Homo Sapiens
agatcaagtgatctcagggttcacatcttcaaaatgctgctgaactaaggtagatcttacttgccgggaaagccgttacttttgaaggacattttgaacatgacgagttcatattcacgttggtaatactcacttttcggaagagaatggagaaacagaagttcaaggccttagagcggttgggattcggtatacttcacagggcgggagggccaaaatttaccgcacttgtgcccaggcgaatttcggcaagtgtcaccggcgacatgtggcgttgaaacacataggggggacacacacgtgacggagagccacgggtcgagactcggaggtgttaacaaaaagtcacttgcggcctgacgcaatgagagccatga

SEQ ID NO: 417680 - DNA, 1222 bp, Homo Sapiens
  misc_feature (52)..(96): n is a, c, g, or t
  misc_feature (100)..(135): n is a, c, g, or t
  misc_feature (185)..(300): n is a, c, g, or t
  misc_feature (308)..(341): n is a, c, g, or t
  misc_feature (506)..(514): n is a, c, g, or t
ccccccacacccacccaccgacaagctgatgtcatatagggcctagctttgnnnnnnnnnnnnnnnnnnnnnnnnnnnnnnnnnnnnnnnnnnnnnccgnnnnnnnnnnnnnnnnnnnnnnnnnnnnnnnnnnnnagtcgacggtaccggacatatgcccgggaattcggccattacggccgggnnnnnnnnnnnnnnnnnnnnnnnnnnnnnnnnnnnnnnnnnnnnnnnnnnnnnnnnnnnnnnnnnnnnnnnnnnnnnnnnnnnnnnnnnnnnnnnnnnnnnnnnnnnnnnnnnnnntctccacnnnnnnnnnnnnnnnnnnnnnnnnnnnnnnnnnntttttgggcggcccggggccctgaaaaggttttaaaccccattgggttggggcggccccggcaccccagtatggtttagtgtaacactggggccacataaggtggtcccaaagaagcaaactcggggccagagacttggcggcggtgggtttcctcccccaaatnnnnnnnnncgcccggggggaacacccggaccgtgttttggaacacaatccaagaagggggagtgtccgagggcgggcaatacagcggggctctctcatccacacacgggagtttgccaagggagggcgcgcagtaatatacaatttaaccgccgccgtgcggtgggggaaagacccacacgacgacgaatcatcagcatatgatctgcaacagagcagagtgagcaaacagcgcaaagaacgagactcagcgcaaactcaactatatgcagtgaatgcacatgaagcatgcagagcaggatacatacaataagcagacacctcacgcagagagcacgagcaggagaccagtgacagccgaggtgagaggccgggagcaagagaaagagcagaagaaggcacaggaggagcagagcgagaggagaggttgctcgccgccacgaacgaggaggggtgcgaggagagtgagacgtagcgggagatgagacagcaagcgagtgacggcagaagggaggcgcgggtaccaaggggcgcgaggagaagtaacgaagtagagggagagaaggagcgcagataatgtagagagcaatggagtatgaattagagagcgagcacagtcgtcagcaaattgaagagagggcaggtaggacgatagaagacagagaggacatgagcggatctagacacgtgcgacgaaaacgacaagagaggagtgaa

SEQ ID NO: 417681 - DNA, 184 bp, Homo Sapiens
  misc_feature (64)..(107): n is a, c, g, or t
  misc_feature (111)..(141): n is a, c, g, or t
tcacaccgcaccacacgggcaaagaagagacttcggatgatcatatagggcgctagcttgttgnnnnnnnnnnnnnnnnnnnnnnnnnnnnnnnnnnnnnnnnnnnnccgnnnnnnnnnnnnnnnnnnnnnnnnnnnnnnngttatcagtcgacggtaccggacatatgcccgggaattcggcc

SEQ ID NO: 417682 - DNA, 940 bp, Homo Sapiens
  misc_feature (72)..(104): n is a, c, g, or t
  misc_feature (670)..(670): n is a, c, g, or t
ggagagtgatatatatagggcgctaccgtcgagcgaagacgagcgcaggagtcagtgagcgaggaagcggcnnnnnnnnnnnnnnnnnnnnnnnnnnnnnnnnnaatcagtcgacggtacgcggacatatgcccgggacattcggccattacggccggggggaagggtgatgtggctgcggcatcgcgggcctcggtatgtctgccatttccaatttacagaagtctatcgagtgtacatctgtgtgcttatattgtactctgtgctatatattcagatcctgtgcacccagcctccgtgaccagaaataaacatggatggtggggtatatttggcaatgtgtgccagaatgtgctgaccggaaggagtcctttatgtgcgcagtatctggtatagtaaatggccttcaagatccttcttcatacaggtacgtgggggaacaaatgcccagattgttagttggccactcatgatttgtgattgtgtcgacacaaggggatctgaggtgcacgacaacatacgtggaaggggatggtttaaccctcctttttattctccggaactatgtggaagtggagatcaaattttccaggatggctggtctcataatttcacagtgttattgggacccaagtgtctctggtattaacacaacttacggagtgttacncattttaactatgttctgtgtagacaagatcaaaccttcaaggtaagtggtcacttaccacattattttactaattttctggcacaagtgttacacttccgtgtctgtactccagactacacaacatttcacggtgagggtatctcctaaggggcaccatacgttagaccacacaacaatttggctgtcatacactacaagttccctttcactggtgaatgtcgccaatggcatttaatccttaatagaagtggaagacatcttttgtgg

SEQ ID NO: 417683 - DNA, 905 bp, Homo Sapiens
  misc_feature (50)..(286): n is a, c, g, or t
  misc_feature (288)..(307): n is a, c, g, or t
agtcgacggtaccggacatatgcccgggaattcggccattacggccgggnnnnnnnnnnnnnnnnnnnnnnnnnnnnnnnnnnnnnnnnnnnnnnnnnnnnnnnnnnnnnnnnnnnnnnnnnnnnnnnnnnnnnnnnnnnnnnnnnnnnnnnnnnnnnnnnnnnnnnnnnnnnnnnnnnnnnnnnnnnnnnnnnnnnnnnnnnnnnnnnnnnnnnnnnnnnnnnnnnnnnnnnnnnnnnnnnnnnnnnnnnnnnnnnnnnnnnnnnnnnnnnnnnnnnnnnnnnnncnnnnnnnnnnnnnnnnnnnnggggggtaggggggacaaaggagacactccaggggaccacaagcccggggctggttgaacacagcgggcggtgggggccgcccacaacggggcagtcgtcaaaagcgacgccggagctcctcaccagagggggggaggcaccatttcctcacattggaacttcggaaagaaatagcagggacataataatccgcagaaatctctgtgtgaatttttgctctgaaaaaccccttggacttgcggggccgcttaaaaaaccggacgtgtggtctgggcgcgtgcgtcacccatcacacacttcgtggtgttttccgcggattaaaacaccctctttccttccaaaaagaggagataataaattgggcgcgcggcctcacacaacgcttgggttaattccccccaggcactcttgtggggaccacacacggagagcggcacaatcacaccctgggaaaatcagcggattttcgaaggacccaggcctgggcacacaaacagcgcggaaaacaccatttctgggttaaaaaattcacaaaatgtagcgcggggcgtcgtgtgggggtcaactgcctgtgaaatccccaggtaaacttggaac

SEQ ID NO: 417684 - DNA, 396 bp, Homo Sapiens
  misc_feature (50)..(149): n is a, c, g, or t
  misc_feature (176)..(213): n is a, c, g, or t
agtcgacggtaccggacatatgcccgggaattcggccattacggccgggnnnnnnnnnnnnnnnnnnnnnnnnnnnnnnnnnnnnnnnnnnnnnnnnnnnnnnnnnnnnnnnnnnnnnnnnnnnnnnnnnnnnnnnnnnnnnnnnnnnntcatagcgagaacccggttctccaggnnnnnnnnnnnnnnnnnnnnnnnnnnnnnnnnnnnnnncttggtgtcgggccggcctcggggcccttggagagaagagtttctgaaacaccaatcccggttgggcggcggggggggccccaagaagggtgaaggggaaacctgggggccaaaaaggcgggcccacaagggaaacacccggggcccacggcacaaggtgcgcgggagcttctcccccccagt

SEQ ID NO: 417685 - DNA, 2200 bp, Homo Sapiens
  misc_feature (48)..(122): n is a, c, g, or t
  misc_feature (130)..(191): n is a, c, g, or t
  misc_feature (605)..(654): n is a, c, g, or t
  misc_feature (1413)..(1423): n is a, c, g, or t
cagtcgacggtaccggacatatgcccgggaattcggccattacggccnnnnnnnnnnnnnnnnnnnnnnnnnnnnnnnnnnnnnnnnnnnnnnnnnnnnnnnnnnnnnnnnnnnnnnnnnnntctccagnnnnnnnnnnnnnnnnnnnnnnnnnnnnnnnnnnnnnnnnnnnnnnnnnnnnnnnnnnnnnnctgtctgtggcgcaccgccctcggcccccctgagacacctttcctagaacaccaatctgaagggggacggcgggcccccaacctgagcctctcgcggaccacggggcccaacgaggggtccccagaaggaaaaccaccgacggggcccacgagccaaaccgcgcacggagcatcctccaccagaaataaaaacacggccccgggggcgtaacacccagcacgccgttttcctcgagaaacaaaacacccccaagactgagcacatcatccagcaacagcgaccccaaaccccagcggcgacccaaccaacaaacgcagcgctgccacaacaggacaaacgtctccgcgacactccagacattcagcgccacgggacagggggaagaaacaaacacgacaaagaaccaccgccannnnnnnnnnnnnnnnnnnnnnnnnnnnnnnnnnnnnnnnnnnnnnnnnnggcaaagagaacacgaagaagctcagaccaaccatgagcagcagacagaacagagaagaagacaacatacgacagcacagaccaaagaaacaacacagacaaccacaccaaagtcaacacaaaaactgacgacgaaagaacagaccaaaaaaacgcgaccaccaacgaagacaagtgacaacaaaaaacaaccacatcgcccagaaaagaccaacaggacacagccgagagcacagccggaaccaccaacacacaagcgcaaccgacagcgacgaagagcgacaacagaagccaaagcccgatgcgacgcaccggacaaccgacccacgagagaacaaagaaacagcggacgaggccatatcgaaacagaaatgagacgacacgcctgcatatcccccccggcaacccgccgtgtagaatgcaaaaacgccgaggaggctcgtgcggcataagtctccaacaggagacaagcactgtacgacagcactgccgagaggcaacgagaaagaagaagccaggaacaagcagccagagacatcagcaacgacaacgacgtcactagcgaaccaagcaagagcctaggcgacaagagcacaagacgacaccaccacgcagacgcaacaacgcaccaagccagggacgcagcaagaacgcagaacgcgagagcacagagcagtgcaatgatagtagtgaggcaagacgcgaagccgcacgcactgcgacgggagcacacagcgcagccgggcacgacagaagtannnnnnnnnnncacgaggaggacgtgcaggggtaggtgagcggagcggatgcaggcggagggtagggagccaggcgcgggcaggcgatggaggaagatcagagcagagcaagcagaggacgcagccagcgcaggactgggcgcgagaacggggacgagagtcataaggcgcagtctgaggcgcgcgagagcagcgtacgcgggctgggacaggcctcaaggacgacgacatgagaaggagagacgtgagaggggaggcaacagcaggagcgagcggcagagagcagggaggcaacagatggtggactgcagaggcggcgtcaggggcggcgacacagagattacatacggcagcacacagggcgccgagcgaacgcacgcacaaccagaagatagcgagcacgcgaaccggaggcaaacacggagagcgacacagccagcgcaggcacaacaaacgaccaggcgcgagggcggtggtaagaggagacagctgaagcaggagcaacacaaacggacagagacacaggcagagcggaccacacgcgcgcaaccacagacctcgcaagccaaggacagacacgagacacagagaggcagcgagcaacagccagcgcagactccgacatccgactgccaagagcaatacgaagaccgacaaccaaacacacacatgaccagcacaacatcagaactcgcaaaacagcagagaacaggatagaacagtcagcaacaggtagacgagaagcacagcagagggacagaggaaaccacgagaactagaactcgagg

SEQ ID NO: 417686 - DNA, 886 bp, Homo Sapiens
  misc_feature (53)..(352): n is a, c, g, or t
agtcagacggtagcggacatatgcccgggaattcggccaattacaggccgggnnnnnnnnnnnnnnnnnnnnnnnnnnnnnnnnnnnnnnnnnnnnnnnnnnnnnnnnnnnnnnnnnnnnnnnnnnnnnnnnnnnnnnnnnnnnnnnnnnnnnnnnnnnnnnnnnnnnnnnnnnnnnnnnnnnnnnnnnnnnnnnnnnnnnnnnnnnnnnnnnnnnnnnnnnnnnnnnnnnnnnnnnnnnnnnnnnnnnnnnnnnnnnnnnnnnnnnnnnnnnnnnnnnnnnnnnnnnnnnnnnnnnnnnnnnnnnnnnnnnnnnnnnnnnnnnnnnnnnnnnnnnnnnnnnnnnnnnnnnncgcaaaaacctgggaaacagtgacagtatggctgtaagatctcatggttcacgtcctagcaagaagcgagaattctgagatcctccagcaaagtccgagcagcacacacctacaacctcggggccagagtctcaggccttaccggggacctgccgagctggaactaactgtggagggctgcagcgcaaggcatccctgggcgccacagacgagacgagccaggacagggcttcggacggcacaagctcagcgcaggccaggcactgatgtggcgaggggccactaccaaggacagctggcccaagaccaagtaccagacgggaagccctgaggcagaaagagaggagagcagacggaacggcaaattgcaggaagaatgatcaagcgccaaacagagagtagcaagcgaccggggcaacccggctacacaacgatgcacggaaaccgaagagaagagggaaactcaaaaaggcgacaaacagacagaaacgccgacaaaacacatacaacacaaagaaggcaacgaggaacaca

SEQ ID NO: 417687 - DNA, 2032 bp, Homo Sapiens
  misc_feature (45)..(80): n is a, c, g, or t
  misc_feature (130)..(240): n is a, c, g, or t
  misc_feature (253)..(285): n is a, c, g, or t
  misc_feature (705)..(797): n is a, c, g, or t
  misc_feature (845)..(954): n is a, c, g, or t
  misc_feature (968)..(1013): n is a, c, g, or t
  misc_feature (1121)..(1183): n is a, c, g, or t
  misc_feature (1185)..(1246): n is a, c, g, or t
  misc_feature (1281)..(1335): n is a, c, g, or t
  misc_feature (1409)..(1471): n is a, c, g, or t
  misc_feature (1473)..(1567): n is a, c, g, or t
  misc_feature (1570)..(1630): n is a, c, g, or t
  misc_feature (1701)..(1788): n is a, c, g, or t
  misc_feature (1916)..(1916): n is a, c, g, or t
gaacggaccgagcgcagcgaagtatgtgagcgaggaagcggccgnnnnnnnnnnnnnnnnnnnnnnnnnnnnnnnnnnnnagtcgacggtaccggacatatgcccgggaattcggccattacggccgggnnnnnnnnnnnnnnnnnnnnnnnnnnnnnnnnnnnnnnnnnnnnnnnnnnnnnnnnnnnnnnnnnnnnnnnnnnnnnnnnnnnnnnnnnnnnnnnnnnnnnnnnnnnnnnncccgttctcctgnnnnnnnnnnnnnnnnnnnnnnnnnnnnnnnnncatcttttgggcacgccccttgggccttctgggaaaaacgtttttaaaaacactttggttgggagggccggggcccccaggtagggtgaacagggaacacctcggcgcacagtaggacgtggcccaccaagaggaaagacgccggtggcaaacgacgacaaggggctcgggcgctcccccacccaaattaaaaaagccccccgcggggacaaccaagacgggtgattctgacaacacctcccgagagggaggcctcacgacggacaacaccggcggcctcaaccacacagggggccaacacgcaagacaccggaaatacaaagctacggccccccggactgggggggaaagcgaaaacgaaaaccgagaacgagcgcacagaagaagacgagacagcgacgacaaaacacaccacgcaannnnnnnnnnnnnnnnnnnnnnnnnnnnnnnnnnnnnnnnnnnnnnnnnnnnnnnnnnnnnnnnnnnnnnnnnnnnnnnnnnnnnnnnnnnnncgaagcaagaacaaggatgaggcaatgagggagataggaaaacaagcnnnnnnnnnnnnnnnnnnnnnnnnnnnnnnnnnnnnnnnnnnnnnnnnnnnnnnnnnnnnnnnnnnnnnnnnnnnnnnnnnnnnnnnnnnnnnnnnnnnnnnnnnnnnnntgggggagatacannnnnnnnnnnnnnnnnnnnnnnnnnnnnnnnnnnnnnnnnnnnnncatatgagggtggaagaagcgggagggagaagagatgaaggcaaggggacggacggacgaggaagaaaagagggcgagcggcgcaacgaggcacgagaggaagagagnnnnnnnnnnnnnnnnnnnnnnnnnnnnnnnnnnnnnnnnnnnnnnnnnnnnnnnnnnnnnnncnnnnnnnnnnnnnnnnnnnnnnnnnnnnnnnnnnnnnnnnnnnnnnnnnnnnnnnnnnnnnnaagcgaggagcaggcggaagagaagcgacggacannnnnnnnnnnnnnnnnnnnnnnnnnnnnnnnnnnnnnnnnnnnnnnnnnnnnnncagcacacgaagaagagaaaaacgaggacagaggagccaaacgcgaacagagacacaaagatgacagagacaannnnnnnnnnnnnnnnnnnnnnnnnnnnnnnnnnnnnnnnnnnnnnnnnnnnnnnnnnnnnnngnnnnnnnnnnnnnnnnnnnnnnnnnnnnnnnnnnnnnnnnnnnnnnnnnnnnnnnnnnnnnnnnnnnnnnnnnnnnnnnnnnnnnnnnnnnnnnnctnnnnnnnnnnnnnnnnnnnnnnnnnnnnnnnnnnnnnnnnnnnnnnnnnnnnnnnnnnnnncgagcgacgaagggagcaagaggcgagaggactagagcagcgagagggtcaaaggacgagcaggaggggannnnnnnnnnnnnnnnnnnnnnnnnnnnnnnnnnnnnnnnnnnnnnnnnnnnnnnnnnnnnnnnnnnnnnnnnnnnnnnnnnnnnnnncgcgagcgaggcccacagagagcacagggaagcctagtacgggacgaggcggtcgagcggcaaggcaggtagcagtccgagtcaggcgaggggcagagcgaagtgcagcagaagaagggacggagacnaggggatagcggtcgagagagcggagaacggagcggagagcgaaaggtcaggtacaagagcaaagacgcaaggagagaaaagagagagcaagacgaggagcgacggaggcgaaggc

SEQ ID NO: 417688 - DNA, 1908 bp, Homo Sapiens
  misc_feature (63)..(108): n is a, c, g, or t
  misc_feature (112)..(147): n is a, c, g, or t
  misc_feature (185)..(279): n is a, c, g, or t
  misc_feature (297)..(701): n is a, c, g, or t
  misc_feature (1186)..(1307): n is a, c, g, or t
  misc_feature (1345)..(1405): n is a, c, g, or t
  misc_feature (1537)..(1629): n is a, c, g, or t
  misc_feature (1665)..(1821): n is a, c, g, or t
aaaagaacacaccacccgggccaagacctttgttaaatcactatagggcgcctagcgtcttannnnnnnnnnnnnnnnnnnnnnnnnnnnnnnnnnnnnnnnnnnnnnccgnnnnnnnnnnnnnnnnnnnnnnnnnnnnnnnnnnnnagtcgacggtaccggacatatgcccgggaattcggccnnnnnnnnnnnnnnnnnnnnnnnnnnnnnnnnnnnnnnnnnnnnnnnnnnnnnnnnnnnnnnnnnnnnnnnnnnnnnnnnnnnnnnnnnnnnnnncaagcgagctcgatatcnnnnnnnnnnnnnnnnnnnnnnnnnnnnnnnnnnnnnnnnnnnnnnnnnnnnnnnnnnnnnnnnnnnnnnnnnnnnnnnnnnnnnnnnnnnnnnnnnnnnnnnnnnnnnnnnnnnnnnnnnnnnnnnnnnnnnnnnnnnnnnnnnnnnnnnnnnnnnnnnnnnnnnnnnnnnnnnnnnnnnnnnnnnnnnnnnnnnnnnnnnnnnnnnnnnnnnnnnnnnnnnnnnnnnnnnnnnnnnnnnnnnnnnnnnnnnnnnnnnnnnnnnnnnnnnnnnnnnnnnnnnnnnnnnnnnnnnnnnnnnnnnnnnnnnnnnnnnnnnnnnnnnnnnnnnnnnnnnnnnnnnnnnnnnnnnnnnnnnnnnnnnnnnnnnnnnnnnnnnnnnnnnnnnnnnnnnnnnnnnnnnnntttattcccagtattcaccagtcaacaggacgatcaattgccatacgagaatccggatgacattcaatcagggcgcacgaattgaataaggccggtacaactgggctaatgagtttagggcctaaacaagcggaaaaacaggaacgccgcaaggcgatcgccactgcggaagcccacacgttaaggagcatggcatctaagagaacacgacatgtaagagcactctgaggccgaaacctacgacaacatagacgggggagcgacagacatgtgcgtgaagttgcctttcttcgtgtcgcgtgttggctcttttccttctgcttacatctgaacaaaagcaacaacgagaacacgagtgtcaagacacgacaagatggtgagacgatcgagtacgtacgaaacgacagagcagtacgcatcagataacaagcacagacaacgagacgaggagcggaatcacgaaacaggggaggaaggcgggggcnnnnnnnnnnnnnnnnnnnnnnnnnnnnnnnnnnnnnnnnnnnnnnnnnnnnnnnnnnnnnnnnnnnnnnnnnnnnnnnnnnnnnnnnnnnnnnnnnnnnnnnnnnnnnnnnnnnnnnnnnncgaaaacagaggtcacggagagagggcgagaaggcggnnnnnnnnnnnnnnnnnnnnnnnnnnnnnnnnnnnnnnnnnnnnnnnnnnnnnnnnnnnnncgaggacgagtcacggagcaaaggaaagacgcagacagacacgaagacgggcaacaccaggggacaagagagggcacagcagcagagacgaaggcaagcaggagagacggaacgaaagcagcaaacaaagcnnnnnnnnnnnnnnnnnnnnnnnnnnnnnnnnnnnnnnnnnnnnnnnnnnnnnnnnnnnnnnnnnnnnnnnnnnnnnnnnnnnnnnnnnnnnncaggaaagggagcagacagcagaaagacggagcggnnnnnnnnnnnnnnnnnnnnnnnnnnnnnnnnnnnnnnnnnnnnnnnnnnnnnnnnnnnnnnnnnnnnnnnnnnnnnnnnnnnnnnnnnnnnnnnnnnnnnnnnnnnnnnnnnnnnnnnnnnnnnnnnnnnnnnnnnnnnnnnnnnnnnnnnnnnnnggagaaacaacagaacgaacgagacaacggacgagcacacgacaggcgaggagcaaggagagacacagacagaacggcggagcacgt

SEQ ID NO: 417689 - DNA, 904 bp, Homo Sapiens
  misc_feature (49)..(731): n is a, c, g, or t
agtcgacggtaccggacatatgcccgggaattcggccattacggccggnnnnnnnnnnnnnnnnnnnnnnnnnnnnnnnnnnnnnnnnnnnnnnnnnnnnnnnnnnnnnnnnnnnnnnnnnnnnnnnnnnnnnnnnnnnnnnnnnnnnnnnnnnnnnnnnnnnnnnnnnnnnnnnnnnnnnnnnnnnnnnnnnnnnnnnnnnnnnnnnnnnnnnnnnnnnnnnnnnnnnnnnnnnnnnnnnnnnnnnnnnnnnnnnnnnnnnnnnnnnnnnnnnnnnnnnnnnnnnnnnnnnnnnnnnnnnnnnnnnnnnnnnnnnnnnnnnnnnnnnnnnnnnnnnnnnnnnnnnnnnnnnnnnnnnnnnnnnnnnnnnnnnnnnnnnnnnnnnnnnnnnnnnnnnnnnnnnnnnnnnnnnnnnnnnnnnnnnnnnnnnnnnnnnnnnnnnnnnnnnnnnnnnnnnnnnnnnnnnnnnnnnnnnnnnnnnnnnnnnnnnnnnnnnnnnnnnnnnnnnnnnnnnnnnnnnnnnnnnnnnnnnnnnnnnnnnnnnnnnnnnnnnnnnnnnnnnnnnnnnnnnnnnnnnnnnnnnnnnnnnnnnnnnnnnnnnnnnnnnnnnnnnnnnnnnnnnnnnnnnnnnnnnnnnnnnnnnnnnnnnnnnnnnnnnnnnnnnnnnnnnnnnnnnnnnnnnnnnnnnnnnnnnnnnnnnnnnnnnnnnnnnnnnnnnnnnnnnnnnnnnncaccaagatggcgaaacccacgcgaaaaacggaatcttaaatccgagggccttcctcctcaaggagcggtcctcacagcagggccagcggtgggatgcgagttgtgcagagggcagagaacctcgggagaggagcgccgcgcaagtgccgcaaaggtggcggacacacgagcc

SEQ ID NO: 417690 - DNA, 1015 bp, Homo Sapiens
  misc_feature (50)..(176): n is a, c, g, or t
  misc_feature (184)..(218): n is a, c, g, or t
agtcgacggtaccggacatatgcccgggaattcggccattacggccgggnnnnnnnnnnnnnnnnnnnnnnnnnnnnnnnnnnnnnnnnnnnnnnnnnnnnnnnnnnnnnnnnnnnnnnnnnnnnnnnnnnnnnnnnnnnnnnnnnnnnnnnnnnnnnnnnnnnnnnnnnnnnnnncaggaacnnnnnnnnnnnnnnnnnnnnnnnnnnnnnnnnnnntaaaggggtagtgtcccctctaagggaaacctttccaccttccggggtccaagcgcggatcctctcgggcataaaggcccccaagaggcaggggaaccccggggttccgttgccaccatagtgccggcgcaaagtttgggcatttttaaggataaaaccaggggaggtttccccccatggttggggcaaggggcgggccttcagaatcccgtggacgctcaaggttgggaatccacccacaacttttgggctcccaaaaggggggcacagagcgcaatggggttgtagagcccaccgtgtgtgtctgagccggggcttcaaccattttttcttggacgacaaaatatccatttgccaacaccgtgcttcaaaagtgggagccggggccaccgcaccagggggcttccaacaacttggaatccccaaggcacggggggagaaggcgtagagcgcaaattctcgttggtactaaaattccgttcacactcctgtacatttcaaacgaaaaatattttggtgggccacctcgggagccgtgaggccggaccaaacggccaaacctggggggcgcacgacctgcggggacccggaaatggccccgggacccagggcggggaacaaaggcgaaactcctccgccagaagagagggatttccccagtgtatcacccagggggggaagggtccccatgggcccaccaatgggcgggagaactccaaggtcaggcggcaaatccgggcgactcggaaggacgcgacccatgggcgccggggccatagaccggctgagacagaaga

SEQ ID NO: 417691 - DNA, 933 bp, Homo Sapiens
  misc_feature (44)..(178): n is a, c, g, or t
  misc_feature (505)..(651): n is a, c, g, or t
  misc_feature (827)..(866): n is a, c, g, or t
agtcgacggtaccggacatatgcccgggaattcggccattacgnnnnnnnnnnnnnnnnnnnnnnnnnnnnnnnnnnnnnnnnnnnnnnnnnnnnnnnnnnnnnnnnnnnnnnnnnnnnnnnnnnnnnnnnnnnnnnnnnnnnnnnnnnnnnnnnnnnnnnnnnnnnnnnnnnnnnnntaaaaaataattcgacacttgagaaagaccatcttttggtccgagtgtttgctgtgaaaatactaagatatacgtggtcccttggagtcgtggccgtgacgctagtgaggatctctcagggtatgggtagtggctgagaggaaatgggttcatcgatgagctggtgttacatccgataagaataggccggtggggcgacggagagattgtttgtataatcctcatagagcgtttgaggtgcaaagagggggtttgtatgctgagtacgtcaacgtggtggcggattgttcagatgtccgtccgctggggtgtaaccgggagaaaacnnnnnnnnnnnnnnnnnnnnnnnnnnnnnnnnnnnnnnnnnnnnnnnnnnnnnnnnnnnnnnnnnnnnnnnnnnnnnnnnnnnnnnnnnnnnnnnnnnnnnnnnnnnnnnnnnnnnnnnnnnnnnnnnnnnnnnnnnnnnnnnnnnnccgcgattttgatagacatgtatcgatgtgtatcgatttaggattccgtatgaagagatggggtagcgtgatgtggaagtgcgcagttgatgcgtgtcccaaggtcagccttggcaaagatttaatgggggcaatcaacgcgatgaatccatgggtcgggtggaattcgggtgtannnnnnnnnnnnnnnnnnnnnnnnnnnnnnnnnnnnnnnnaagattggtgttgagagacggattatggaggaccgtggagaaaacggggggtgggcgtagagtttat

SEQ ID NO: 417692 - DNA, 1111 bp, Homo Sapiens
  misc_feature (77)..(112): n is a, c, g, or t
  misc_feature (150)..(269): n is a, c, g, or t
  misc_feature (275)..(343): n is a, c, g, or t
  misc_feature (705)..(768): n is a, c, g, or t
  misc_feature (952)..(1024): n is a, c, g, or t
attggaatgcatataggggctagcgtttagagccgaacgacgagcggcagcgagttcagtgagcgaggaagcggcgnnnnnnnnnnnnnnnnnnnnnnnnnnnnnnnnnnnnagtcgacggtaccggacatatgcccgggaattcggccnnnnnnnnnnnnnnnnnnnnnnnnnnnnnnnnnnnnnnnnnnnnnnnnnnnnnnnnnnnnnnnnnnnnnnnnnnnnnnnnnnnnnnnnnnnnnnnnnnnnnnnnnnnnnnnnnnnnnnnntctccnnnnnnnnnnnnnnnnnnnnnnnnnnnnnnnnnnnnnnnnnnnnnnnnnnnnnnnnnnnnnnnnnnnnnccattggtgcggcccggacttggaccctagataaagacgtttattaaaccacatcgggttggggcgcgaggcgagagccccaaggaagggataggcggaaccacgtgggcctaatgctccgtggtcccacagggagacccccggcggccaggaactaatgcggcgctggggctccctcccaactaaaaaaacccgccgggggagacaccgcaacggttctgaacaaatcccaggaggggagtccagaagggaccaaaagggggctcccttcacacaacggggagccacaaagcagagaccggtaatacaatatacagcccgcgccgagggaagaacagcacgacaccagcagcacgacaagnnnnnnnnnnnnnnnnnnnnnnnnnnnnnnnnnnnnnnnnnnnnnnnnnnnnnnnnnnnnnnnnagcagaaaaaaacacgagctagcacagacacgccacatacactacaacgacaatacatacgacagaaagagaagcagagccagggacgagaagacccggcggggagccagacgaggccaagaacgcgcgcaaccaacaggagcacagaagacagacgaccaagacacgagcgagaggcaaacgnnnnnnnnnnnnnnnnnnnnnnnnnnnnnnnnnnnnnnnnnnnnnnnnnnnnnnnnnnnnnnnnnnnnnnnnngaacaccaagcggaagcagagacgaggaaggacgagaagcagagggaagcggcggagaaggaaaagaggagcggaggcggaaaaaga

SEQ ID NO: 417693 - DNA, 992 bp, Homo Sapiens
  misc_feature (74)..(109): n is a, c, g, or t
  misc_feature (147)..(304): n is a, c, g, or t
  misc_feature (838)..(874): n is a, c, g, or t
atttggatctcctatagggcccaggcttcgagcgaacgaacgagcgcaggagtagtgagcgaggaagcggccgnnnnnnnnnnnnnnnnnnnnnnnnnnnnnnnnnnnnagtcgacggtaccggacatatgcccgggaattcggccnnnnnnnnnnnnnnnnnnnnnnnnnnnnnnnnnnnnnnnnnnnnnnnnnnnnnnnnnnnnnnnnnnnnnnnnnnnnnnnnnnnnnnnnnnnnnnnnnnnnnnnnnnnnnnnnnnnnnnnnnnnnnnnnnnnnnnnnnnnnnnnnnnnnnnnnnnnnnncctgttgttgggccgccgtgggcccctgcgaagaaaagcttctctaaggacccaattccgttggggcgcggcgggcccaagtcaaggtaagcgtgaacctggggctcctagagcggctaccctgaaggagaatcctggcgacaggaacaagagggtgtgggcttcctcacccaaattaaacaacggccggggcgcaacacggagcggtccggaccaactccaaggaggagcgtcgacggcacatcaccggggcgcttcaacacaaccggggggtgctcaaaggcgaaggcctcgaagaattaaaaataacccgcccggccgggcggggaaggcaaaccgaaagaaggaagacacacaacaaacaacaactacgcaaagcaaaaagatacgacagcacaaaacaggaatatacgacaacacacagacgacacagaactaacaacaagacaggacgacgaaacacagcaacactgaagcgaacacaatcaacaaacaagagaacaacaacacagcgacagagcgggagcgacaacnnnnnnnnnnnnnnnnnnnnnnnnnnnnnnnnnnnnncacgaagggcgcagcggcacgacggagcagcgtacggaaaacgagcgcagcgagcgcaggagccgaggcgaggcaggggcgcaggaggcgggagaagcgcgcagcagcgagaggacag

SEQ ID NO: 417694 - DNA, 333 bp, Homo Sapiens
  misc_feature (76)..(111): n is a, c, g, or t
  misc_feature (161)..(279): n is a, c, g, or t
aagcaaattttatatatataggccttgttttagagcgacgacgagcgcaggagtaagtgagcgaggaagcggccgnnnnnnnnnnnnnnnnnnnnnnnnnnnnnnnnnnnnagtcgacggtaccggacatatgcccgggaattcggccattacggccgggnnnnnnnnnnnnnnnnnnnnnnnnnnnnnnnnnnnnnnnnnnnnnnnnnnnnnnnnnnnnnnnnnnnnnnnnnnnnnnnnnnnnnnnnnnnnnnnnnnnnnnnnnnnnnnnnnnnnnnnccagacaaagggaagacaaaaacacaaagggacaagaaaaacaaaatcacacac

SEQ ID NO: 417695 - DNA, 1542 bp, Homo Sapiens
  misc_feature (49)..(152): n is a, c, g, or t
  misc_feature (261)..(284): n is a, c, g, or t
  misc_feature (404)..(422): n is a, c, g, or t
  misc_feature (623)..(746): n is a, c, g, or t
  misc_feature (750)..(832): n is a, c, g, or t
agtcgacggtaccggacatatgcccgggaattcggccattacggccggnnnnnnnnnnnnnnnnnnnnnnnnnnnnnnnnnnnnnnnnnnnnnnnnnnnnnnnnnnnnnnnnnnnnnnnnnnnnnnnnnnnnnnnnnnnnnnnnnnnnnnnntatcaccgcagaacccccggatctccgtgaacaccaccaaacacaaccacaacaacactcaccaacaaactcttgccgacaccgccactgagcacccaccacaaacaannnnnnnnnnnnnnnnnnnnnnnntaggcgccgcccgacgcacccccacagacaccaaacgcgcacacacagtgagccacccaggcggagaatccaaaagcgaacaccccggggacccagagcaacacgcgcactggagatctnnnnnnnnnnnnnnnnnnnaacgcccccaccgagggagacaacaccaccgcgacacgagatcacgacgagaaagacacaaacccccgaaaagataggcagaacaatccgcagagagagctctaataacgcgcgggggcacacaaaaacaaaccagcagaagcaaccccacaaaacgagaaagcatccagacaacccagacaaatatgcaccccccccgtnnnnnnnnnnnnnnnnnnnnnnnnnnnnnnnnnnnnnnnnnnnnnnnnnnnnnnnnnnnnnnnnnnnnnnnnnnnnnnnnnnnnnnnnnnnnnnnnnnnnnnnnnnnnnnnnnnnnnnnnnnnngacnnnnnnnnnnnnnnnnnnnnnnnnnnnnnnnnnnnnnnnnnnnnnnnnnnnnnnnnnnnnnnnnnnnnnnnnnnnnnnnnnnncgcgcgaggaagttggcgcggcgggggactgagaggaaaggagggcgacccacagagcaatcatgagacgagcagagctaagtagaactcgaacccagagcacccccacacagagagaccaacatcagcagcggagctagagcgctggccgagagcacaagcggaatccaggcgcagcgcgaagccttgatgctagcagcatacgccaccggccaggcgcgcggactaggaggaaagaaagaggccgctgccgcctacgagagctcaccgcccacagtcagtgcaggacaaagcagtgagcacagagcgaacgatagaggcgtcgctcacagatcacgagaggggcatgcagaagcacagacagcggccaccgattcgagataggcgtatcaggagaagcgccgtgagcatgagagtcagcaggagaggagggcaggggtgcgagcaggagagcgatagccgaagctgcacaggggcacaaagcgaggcggaagagaggagcgggacaggaaacgctgtggatgagcgggcaagattatcggcaggaacagcaaagagaagcgttccgagcccagtcacgagtgagcgccagcggaggaggcggcgctgcacgcagtcggagtgcgcagatccaggaggcgaggacagcgaagccgaggagaaacggagtggcacgtcggtgcgcgaacgaaactagttgccaaggagga

SEQ ID NO: 417696 - DNA, 963 bp, Homo Sapiens
  misc_feature (56)..(96): n is a, c, g, or t
  misc_feature (100)..(135): n is a, c, g, or t
  misc_feature (173)..(466): n is a, c, g, or t
  misc_feature (472)..(498): n is a, c, g, or t
cacaaccaacccggagaaacaacacgtagcatatatggcgcgtacgctgtttgaannnnnnnnnnnnnnnnnnnnnnnnnnnnnnnnnnnnnnnnnccgnnnnnnnnnnnnnnnnnnnnnnnnnnnnnnnnnnnnagtcgacggtaccggacatatgcccgggaattcggccnnnnnnnnnnnnnnnnnnnnnnnnnnnnnnnnnnnnnnnnnnnnnnnnnnnnnnnnnnnnnnnnnnnnnnnnnnnnnnnnnnnnnnnnnnnnnnnnnnnnnnnnnnnnnnnnnnnnnnnnnnnnnnnnnnnnnnnnnnnnnnnnnnnnnnnnnnnnnnnnnnnnnnnnnnnnnnnnnnnnnnnnnnnnnnnnnnnnnnnnnnnnnnnnnnnnnnnnnnnnnnnnnnnnnnnnnnnnnnnnnnnnnnnnnnnnnnnnnnnnnnnnnnnnnnnnnnnnnnnnnnnnnnnnnnnnnnaacacnnnnnnnnnnnnnnnnnnnnnnnnnnnccttgggtgggcccgcccgtgggacccttgagaaagagttttctaaaaccattcgggttggggcgaggggccccaagattgggtataggtgtgaccgttgccaaagggtgtccctaagagagaaaccccgggcgcacgtggacaaagagaggggctgggagatttcttcccccattttaaaaaaaccgcgcgcgggggggaacccacggagcggtgtcctcggaacaaactccccagaagggggcgtcccgagagaggacactaacgggggacactacacaacccacgaggagaggggcccaaaaggggaagctccaggattacacaatttaaggccggagccctcggcgggggtggacacacacaatgaaacccaaatagagaatctaagacaaaaccgacagacagacgactcaaaacaaatcagacaaaacaccactacagaaagaaacacaaaacagacaa

SEQ ID NO: 417697 - DNA, 385 bp, Homo Sapiens
acgtacagtggctcatggcaacaccggtgtaaacaagggtgacacattatccgatatcaccaggctccaccgtctttacattgtgccataccgagaattccggatgacgcattgcatcaggcgtggcaaagaatgtgaaattaaagggcggattaaaactttggtgcttaattcacttaacggactttaacaaggcgtaataatccaagtgaaaggactgataattaggatacaattgagaaactgattggatatggctaaaaatggtttaaggatggcaatgggaatttattaacgggggatattcagggaattttagcatcacttgagttcttagtgggaaaatccaaaattggagaaaatatacgagttgtgagaggaacag

SEQ ID NO: 417698 - DNA, 991 bp, Homo Sapiens
  misc_feature (49)..(93): n is a, c, g, or t
  misc_feature (96)..(131): n is a, c, g, or t
  misc_feature (169)..(477): n is a, c, g, or t
gaaagaggaggagaacgaacttgaatatcatatgggcgctagcgctctnnnnnnnnnnnnnnnnnnnnnnnnnnnnnnnnnnnnnnnnnnnnncgnnnnnnnnnnnnnnnnnnnnnnnnnnnnnnnnnnnnagtcgacggtaccggacatatgcccgggaattcggccnnnnnnnnnnnnnnnnnnnnnnnnnnnnnnnnnnnnnnnnnnnnnnnnnnnnnnnnnnnnnnnnnnnnnnnnnnnnnnnnnnnnnnnnnnnnnnnnnnnnnnnnnnnnnnnnnnnnnnnnnnnnnnnnnnnnnnnnnnnnnnnnnnnnnnnnnnnnnnnnnnnnnnnnnnnnnnnnnnnnnnnnnnnnnnnnnnnnnnnnnnnnnnnnnnnnnnnnnnnnnnnnnnnnnnnnnnnnnnnnnnnnnnnnnnnnnnnnnnnnnnnnnnnnnnnnnnnnnnnnnnnnnnnnnnnnnnnnnnnnnnnnnnnnncacgtgttttagcccaattaggaattcaccttattacttgaggatacacaggattcggacttaatctggtaactttttattaaaattgtggcggcttattgttcacaaaagtaggtcatttaaggtcttggaagagagacccaaggagtaaaattatacggggttcttaacaaagtggttttgggagggcacgggtggagtggggctcggggccacattaaatcctaagacttctgtgaaaagacccaaagggaagggcgagatcacaatttgagcgcgccaggagtgtctcggaaaccaagcgttgagcaaattttaggaaaaacctggtgttctatttaagaattccacttattttaggttggggcatggggggggaatcgctggaaattccagggatcattggggagggttggggcacaaaacatacttgagacccaggggggtggcgggtacaggtgcgatggagttgggccatggcatgatcacagctgggtgagaaaaagcctttttc

SEQ ID NO: 417699 - DNA, 883 bp, Homo Sapiens
  misc_feature (48)..(92): n is a, c, g, or t
  misc_feature (95)..(130): n is a, c, g, or t
  misc_feature (168)..(293): n is a, c, g, or t
  misc_feature (295)..(325): n is a, c, g, or t
  misc_feature (730)..(793): n is a, c, g, or t
aaaaaaaaggaacttggatgtccatatagggcgcctagcgtttttgannnnnnnnnnnnnnnnnnnnnnnnnnnnnnnnnnnnnnnnnnnnncgnnnnnnnnnnnnnnnnnnnnnnnnnnnnnnnnnnnnagtcgacggtaccggacatatgcccgggaattcggccnnnnnnnnnnnnnnnnnnnnnnnnnnnnnnnnnnnnnnnnnnnnnnnnnnnnnnnnnnnnnnnnnnnnnnnnnnnnnnnnnnnnnnnnnnnnnnnnnnnnnnnnnnnnnnnnnnnnnnnnnnnnnngnnnnnnnnnnnnnnnnnnnnnnnnnnnnnnnctcttgttgggcgcgccttgggccttcgagaaaagagtttttaaagaaccaattcgttgggggcgcggggcccccgtttgggtatagtgaaacaggtggccaatgagggggttccccataggaaaaaccggtggggccaagggaaacatgagtgtgcgtgggttttttctcccccaaaatataaaaaaagccgcgccgggtggggacactccggagcgtggtcctgagaacaaactctccaaggagggggtcgtcccagggagggcaccataaggggcgagccatcaccacagagcggcgggccccaggcgaagacgccagaaatactatccaaatttaacgccccccggcgcatggtgtggttagagaacaacagccacaacgagcggatgaggaacagcacgnnnnnnnnnnnnnnnnnnnnnnnnnnnnnnnnnnnnnnnnnnnnnnnnnnnnnnnnnnnnnnnncaggaagaaaactgactaggagaaaagacgacaatagagcaacaacagccaaaagacaaaaaacgaacaaagagaaaacacaaataagag

SEQ ID NO: 417700 - DNA, 752 bp, Homo Sapiens
  misc_feature (77)..(112): n is a, c, g, or t
  misc_feature (162)..(278): n is a, c, g, or t
  misc_feature (284)..(314): n is a, c, g, or t
  misc_feature (543)..(543): n is a, c, g, or t
gactgaataatcatatagggggctagcttgcgagcgaacgacgagcgcaaggagtagtgagcgaaggaagcggccgnnnnnnnnnnnnnnnnnnnnnnnnnnnnnnnnnnnnagtcgacggtaccggacatatgcccgggaattcggccattacggccgggnnnnnnnnnnnnnnnnnnnnnnnnnnnnnnnnnnnnnnnnnnnnnnnnnnnnnnnnnnnnnnnnnnnnnnnnnnnnnnnnnnnnnnnnnnnnnnnnnnnnnnnnnnnnnnnnnnnnntctccnnnnnnnnnnnnnnnnnnnnnnnnnnnnnnntggtgtgcgggccgccagtgggccctatagaagaaaggttttaaaacaccattccggtggggccggcgcgggccccagaggggcagtggagcacgtgggccaaaaacgcgcgtccaaagggggaaaccccggggccatagagacaagggcgggggggtttcccccaaattaaaaaaacgccgcgggggggaacaaccacgagacggggtccttggaaaaacacatcccnaaagtgaggaggtcagcgaagagccaaaaacgggcggagctgtaaccaaagcggggggcgcccacagggaggacgccgaggattattaaagtttaagccccaggcgctggggggagcaagccaacacacgcgcgagcgacaaacagagcacacaagcacacgacaaaagagaaccacgacacaacaggcgcgtcacaaacacagaaagg

SEQ ID NO: 417701 - DNA, 853 bp, Homo Sapiens
  misc_feature (50)..(173): n is a, c, g, or t
  misc_feature (178)..(212): n is a, c, g, or t
  misc_feature (297)..(305): n is a, c, g, or t
agtcgacggtaccggacatatgcccgggaattcggccattacggccgggnnnnnnnnnnnnnnnnnnnnnnnnnnnnnnnnnnnnnnnnnnnnnnnnnnnnnnnnnnnnnnnnnnnnnnnnnnnnnnnnnnnnnnnnnnnnnnnnnnnnnnnnnnnnnnnnnnnnnnnnnnnntaggnnnnnnnnnnnnnnnnnnnnnnnnnnnnnnnnnnntttgggggttagttcccttcaggtggaaccttcaacctccgggggttcaagggggatttctctctggctttagggcccccaagannnnnnnnnaacccggggttagggtgtgccacaatgtgccgggccaagatttgtggcattttttaaggatagaaaaccggaggtgttcagccccattgtgggccacagggcgtgggctttgagaacttctgtgaacctttaggatttggttcaagcccaaatcttgggcgcccaccaaaaagggcgcagggagcccacatgggttgttgcgcacaccggtggttgggacggggcatacacttttttatttggaagccaaattttcatttttaaaaaaccggattttcaaacatgttgatgcagggacaaggccataggggggttaaacactttggtaattcccagaaacgggggagagctgaggaaatttttggggtactgaaaatgtgggttaattacaagaattctgtaagaaacaatgtgggtggacactggggaaggagtgaggaggaaaattgcaaacctgttgggcaaggtttagtgaacgaatgggcatggtacgagcggggaaaagaggatttgtttaaaaaagagggttttgcccatttattattgag

SEQ ID NO: 417702 - DNA, 1146 bp, Homo Sapiens
  misc_feature (105)..(140): n is a, c, g, or t
  misc_feature (178)..(333): n is a, c, g, or t
cacaccacacccgaccaagccacccatatgggcgcccccgcggctgtttactagccgggaaacgggaaccgagcgcagcgagcctattgagcgaggaagcggcgnnnnnnnnnnnnnnnnnnnnnnnnnnnnnnnnnnnnagtcgacggtaccggacatatgcccgggaattcggccnnnnnnnnnnnnnnnnnnnnnnnnnnnnnnnnnnnnnnnnnnnnnnnnnnnnnnnnnnnnnnnnnnnnnnnnnnnnnnnnnnnnnnnnnnnnnnnnnnnnnnnnnnnnnnnnnnnnnnnnnnnnnnnnnnnnnnnnnnnnnnnnnnnnnnnnnnnncttgtgttgggccggccctgcggcccctggaaaaagttttttagaacccattggttgtgggggccggcggccccagttggtttaggtgtgaacacgtgggcccaaaagaggtgtgttccccaaagagaaaacccgggccacgagaaccaggggccttggggttttcctcccaaattaaaaaagcgcccgcggggggaaaacccggaggtgttcctggaaacacaaatctcccagagaggggaaggttccgagagcgccattaagcggggcttcttctacaacaggggagggctccaagcggagccgctcggaatattacaagattttacgcgccccgacctgtggggaggagaaagcacaacaagcagtagaacgcaaccctaaacaagtcaacagagcacacagcagcaagctacacatcgcatagcacgcaactgaggcagatcaacgacacacacacacgcggcgacgagcgaaaacgacctacaacgaagcgacgcgagtcgacgacaccagagcagaccagagccgacggcaggagcaagcggagcgaacctcgtggggtcgagagcgagagagcggagttcgatgcatagaatccagcagagagcaagacagacggacagacgcgccagctgaagaaacacacacacacagcgccacagagagcgaggacgcgacacgaggagacccacacaaggcacggagacgaaacgagcaggacagacgaacgacacgacaaggagagatgagagagaatggaggacaaggcgagaaggcggagagagaagaacgagcagcgagaagagaaca

SEQ ID NO: 417703 - DNA, 992 bp, Homo Sapiens
  misc_feature (81)..(116): n is a, c, g, or t
  misc_feature (161)..(264): n is a, c, g, or t
  misc_feature (789)..(789): n is a, c, g, or t
agggaaccgggttgttatatatagggcctggcttaaagcgaacgacgagcgcagcggagtctgtgagcgaggaagcggcgnnnnnnnnnnnnnnnnnnnnnnnnnnnnnnnnnnnnagtcgacggtaccggacatatgcccgggaattcggccattacggnnnnnnnnnnnnnnnnnnnnnnnnnnnnnnnnnnnnnnnnnnnnnnnnnnnnnnnnnnnnnnnnnnnnnnnnnnnnnnnnnnnnnnnnnnnnnnnnnnnnnnnntagcattatacctcttcctggtctcaacccgccatgaaaattctggaacactccaaattcagtggaataatccaaaacaaaatttataagtataaaataatttacttcttatagtaatagtatactttaaaaagcctcagggtatattatcttctaaacagctacaatccagtggcagctacattaaccaactatgttctctagttgagaacaactaggcctatttcactgctgtgtagcctcagggcctaacatggggtgccaaataaatattcgtagaattacactgaatggtaaaaacccattcgtttttgtttacaattgccaaaaatctcaaaggccctgtatttatgtaattcttgaaattattatttatttaatttctcagttatgactgctgggtgtgacttagtacataagtactcaatattataaaaagctcaaataatggactgggattttacacaacatccttcccttttctacaagttaatttttacaaatccttgtgggttatctcctaanaagggtatatttatgcgcttctagaacatgttcacatatttgtgttatcaggatactcggtaattttccccaacaagttctatttcaggaaaatttggcgagaattgcgggaagggattcaattggttttaacatgtgggggtgccggtttttggcgcatgtagcgacattgatactgggaggccgcacagggagggttaagg

SEQ ID NO: 417704 - DNA, 943 bp, Homo Sapiens
  misc_feature (64)..(99): n is a, c, g, or t
  misc_feature (138)..(355): n is a, c, g, or t
  misc_feature (363)..(797): n is a, c, g, or t
atatatgaggcctggcgtaggcgaacgacgagcgcagcggagttgtgagcgaggaagcggccgnnnnnnnnnnnnnnnnnnnnnnnnnnnnnnnnnnnnagtcgacggtaccggacatatgcccgggaattcggccannnnnnnnnnnnnnnnnnnnnnnnnnnnnnnnnnnnnnnnnnnnnnnnnnnnnnnnnnnnnnnnnnnnnnnnnnnnnnnnnnnnnnnnnnnnnnnnnnnnnnnnnnnnnnnnnnnnnnnnnnnnnnnnnnnnnnnnnnnnnnnnnnnnnnnnnnnnnnnnnnnnnnnnnnnnnnnnnnnnnnnnnnnnnnnnnnnnnnnnnnnnnnnnnnnnnnnnnngcgcgccnnnnnnnnnnnnnnnnnnnnnnnnnnnnnnnnnnnnnnnnnnnnnnnnnnnnnnnnnnnnnnnnnnnnnnnnnnnnnnnnnnnnnnnnnnnnnnnnnnnnnnnnnnnnnnnnnnnnnnnnnnnnnnnnnnnnnnnnnnnnnnnnnnnnnnnnnnnnnnnnnnnnnnnnnnnnnnnnnnnnnnnnnnnnnnnnnnnnnnnnnnnnnnnnnnnnnnnnnnnnnnnnnnnnnnnnnnnnnnnnnnnnnnnnnnnnnnnnnnnnnnnnnnnnnnnnnnnnnnnnnnnnnnnnnnnnnnnnnnnnnnnnnnnnnnnnnnnnnnnnnnnnnnnnnnnnnnnnnnnnnnnnnnnnnnnnnnnnnnnnnnnnnnnnnnnnnnnnnnnnnnnnnnnnnnnnnnnnnnnnnnnnnnnnnnnnnnnnnnnnnnnnnnnnnnnnnnnaccgggtggactcaagagatattacggataagggcacggcggctgaagggggtttgtgcacacagcagttgagggaagctacgaatggaacctagggggtagaagccgtcgaggaagggaggtcgagctaacggcaggctaacgcg

SEQ ID NO: 417705 - DNA, 489 bp, Homo Sapiens
gggactttttaacattaatttaccaaaggaaacctattacgaataatttgctgtaacggtgttacaccagtctttaaaatggcagctatatacgggcttggacatttttgggcagcaataaagataactttacccaagtggagattcatacagtccaggttttcccagatgcttaggagacgcacagtttggcctagcatttctgttcaagaaaggtttggcggtctgtggtgacataatcttacatgagttgtttctccccagaaatggagttctccacacgacacccttgggcaacaaggggcttggcgttgggggtatcccggtgcggccttccaaagggcggacctttcttcctttccaaattcaaggtcatggaaacctctcggaatttgagaaccttagctatgcaaaccttcattgctgaggaacatggtgaaagccccaccactttggcctagaagccttgcattggtaattttaactggt

SEQ ID NO: 417706 - DNA, 746 bp, Homo Sapiens
  misc_feature (44)..(85): n is a, c, g, or t
  misc_feature (88)..(123): n is a, c, g, or t
  misc_feature (173)..(287): n is a, c, g, or t
  misc_feature (303)..(354): n is a, c, g, or t
gggggagagaactgatagctcactatagggcgctaggttgacgnnnnnnnnnnnnnnnnnnnnnnnnnnnnnnnnnnnnnnnnnncgnnnnnnnnnnnnnnnnnnnnnnnnnnnnnnnnnnnnagtcgacggtaccggacatatgcccgggaattcggccattacggccgggnnnnnnnnnnnnnnnnnnnnnnnnnnnnnnnnnnnnnnnnnnnnnnnnnnnnnnnnnnnnnnnnnnnnnnnnnnnnnnnnnnnnnnnnnnnnnnnnnnnnnnnnnnnnnnnnnnntctccagaacaaaggnnnnnnnnnnnnnnnnnnnnnnnnnnnnnnnnnnnnnnnnnnnnnnnnnnnncgtgtgtgggggggctggggccccgggaagaagcttttataaacccactagggatgaggggaggcgggggcccacgaaggaggtaaggtgaaaactgtgggcacaatagagcggtgttcccaagggagagaacccggggcaagagaaaaagggggtgggttttttctctcaccccattgtaaataagagcgcgccgggggagaacaccaggaggggagtttttctgtggaaaccaacattcccaaagatggagggtcttctaagagggggggcgacaatcaacaggggggctctctattctacacaagaggggagtgctccacaaggggcggagagcgctctcaaagttgtacacaactattaaggagcccagagcctctggggggggctga

SEQ ID NO: 417707 - DNA, 621 bp, Homo Sapiens
  misc_feature (50)..(121): n is a, c, g, or t
  misc_feature (183)..(268): n is a, c, g, or t
agtcgacggtaccggacatatgcccgggaattcggccattacggccgggnnnnnnnnnnnnnnnnnnnnnnnnnnnnnnnnnnnnnnnnnnnnnnnnnnnnnnnnnnnnnnnnnnnnnnnnccccaggaggttcgaggacctgccgtggcgcaactatagccgagaaccccgttttctcccannnnnnnnnnnnnnnnnnnnnnnnnnnnnnnnnnnnnnnnnnnnnnnnnnnnnnnnnnnnnnnnnnnnnnnnnnnnnnnnnnnnnnactctttgtttctcgcagcgcggccactcgcagaccccccctctgggcagaaaaaacgatgtctctctatcaaaagaacacaccacccatcaagcggcgataatgtgacggccgccacagcgagcgccccccacaacggaggcatcaacagacgattggaacacaccatcgcggcggcccccccaccagaccacccaccgccggtgtccccccacacaaaggaggagcacaccaacccccggggggcccacacaggagccccaccaccgccgccgcgcacaccccccggaagcaagccacacaccccacccaaaacaccccgcaaccaaaaactaacaaagaaacaaacagcg

SEQ ID NO: 417708 - DNA, 972 bp, Homo Sapiens
  misc_feature (47)..(91): n is a, c, g, or t
  misc_feature (95)..(130): n is a, c, g, or t
  misc_feature (180)..(512): n is a, c, g, or t
  misc_feature (626)..(654): n is a, c, g, or t
gcgcggggggaagacgtggtatgactactatagggcctcgcgttcannnnnnnnnnnnnnnnnnnnnnnnnnnnnnnnnnnnnnnnnnnnnccgnnnnnnnnnnnnnnnnnnnnnnnnnnnnnnnnnnnnagtcgacggtaccggacatatgcccgggaattcggccattacggccgggnnnnnnnnnnnnnnnnnnnnnnnnnnnnnnnnnnnnnnnnnnnnnnnnnnnnnnnnnnnnnnnnnnnnnnnnnnnnnnnnnnnnnnnnnnnnnnnnnnnnnnnnnnnnnnnnnnnnnnnnnnnnnnnnnnnnnnnnnnnnnnnnnnnnnnnnnnnnnnnnnnnnnnnnnnnnnnnnnnnnnnnnnnnnnnnnnnnnnnnnnnnnnnnnnnnnnnnnnnnnnnnnnnnnnnnnnnnnnnnnnnnnnnnnnnnnnnnnnnnnnnnnnnnnnnnnnnnnnnnnnnnnnnnnnnnnnnnnnnnnnnnnnnnnnnnnnnnnnnnnnnnnnnnnnnnnncggttggttctcaccgtgtgtaatccccgaacattgggggggagaacccgcggggcccagaggaatctggaaaacacccgcgggacaaatgtggaaaacccctttttttatttnnnnnnnnnnnnnnnnnnnnnnnnnnnnnccgatgtgtggcggacaactgagccctctgaaaagctttttagcacacacgtcggtggtgggcggcgggggcaccaggggtcctggcggacacggggacaaaaggggacccccagagaacaactccgcggaaaccaacacgaggcgagggaagcacccccgccgactatatagaaaaacgcgcggggggagagaaaaaacggcgaggtcttgcggaaaacacacccgaggagggaacagagagcggccaccgggggggcatcccaagagggggctcacaaggagacgcgaatataaaaccggcggccgcgcgggggag

SEQ ID NO: 417709 - DNA, 871 bp, Homo Sapiens
  misc_feature (43)..(315): n is a, c, g, or t
  misc_feature (445)..(633): n is a, c, g, or t
  misc_feature (732)..(792): n is a, c, g, or t
atatcagtcgacggtaccggacatatgcccgggaattcggccnnnnnnnnnnnnnnnnnnnnnnnnnnnnnnnnnnnnnnnnnnnnnnnnnnnnnnnnnnnnnnnnnnnnnnnnnnnnnnnnnnnnnnnnnnnnnnnnnnnnnnnnnnnnnnnnnnnnnnnnnnnnnnnnnnnnnnnnnnnnnnnnnnnnnnnnnnnnnnnnnnnnnnnnnnnnnnnnnnnnnnnnnnnnnnnnnnnnnnnnnnnnnnnnnnnnnnnnnnnnnnnnnnnnnnnnnnnnnnnnnnnnnnnnnnnnnnnnnnnnnnnnnnnnnnnnncaaggtgaacagtccgtgtctcacacaaatcacccagggcagcacagggcagggcagatgtgcccacttattccagagcctacgtcacaaagaaggttttatacataggcaaaaaccgcgcacccagcgnnnnnnnnnnnnnnnnnnnnnnnnnnnnnnnnnnnnnnnnnnnnnnnnnnnnnnnnnnnnnnnnnnnnnnnnnnnnnnnnnnnnnnnnnnnnnnnnnnnnnnnnnnnnnnnnnnnnnnnnnnnnnnnnnnnnnnnnnnnnnnnnnnnnnnnnnnnnnnnnnnnnnnnnnnnnnnnnnnnnnnnnnnnnnccaaagatcgccagccagccaatcaacgcgaccagcccccacgccggccactacaccgacagaaaccccgagccgcaccaaaccgggatagagagcacnnnnnnnnnnnnnnnnnnnnnnnnnnnnnnnnnnnnnnnnnnnnnnnnnnnnnnnnnnnnngcagggcgtcgtcggccacacagtgggagcacacgcagggcggcaccgaggcgcgacaaaaaacacgcgcccgcggcga

SEQ ID NO: 417710 - DNA, 835 bp, Homo Sapiens
  misc_feature (71)..(107): n is a, c, g, or t
  misc_feature (156)..(270): n is a, c, g, or t
  misc_feature (278)..(311): n is a, c, g, or t
  misc_feature (368)..(379): n is a, c, g, or t
aagaatgtatgattaggggtagctcgtcgagcgaagacgagcgcagcggagtagtgagcgaggaaggcggnnnnnnnnnnnnnnnnnnnnnnnnnnnnnnnnnnnnnagtcgacggtaccggacatatgcccgggaattcggccattacggccggnnnnnnnnnnnnnnnnnnnnnnnnnnnnnnnnnnnnnnnnnnnnnnnnnnnnnnnnnnnnnnnnnnnnnnnnnnnnnnnnnnnnnnnnnnnnnnnnnnnnnnnnnnnnnnnnnnntctccgtnnnnnnnnnnnnnnnnnnnnnnnnnnnnnnnnnnctgtgttggggccggcgtccgggcccccggaaaaagtttctcaaaaccaatcgcgtnnnnnnnnnnnnccccaagtaggggcaaaggggaacacggggcacaaagggcgggtctccccgagagaagaaaccgcggggcccaaggaacaagagggcgggggattccccacccaattaaaaaggcgccccggggcgcacgcacacgcaaggggggtttggtcgggaaaaccaatctcccagagaagggggagttctgatgagagggccaatcacggggggacctcctaacaacaggagggggctcccaaaggcgcgagggtcggaatatatcaaaatttagcccgcgagggtgggggggacacagtatgccaacccacacaggcaaacaaaccgaacagtcacacaatactctgcatacgacacacaacacgaatccgagcaacacacggcacgaaacatgtcagagaacgtcatcaccccgaccacgccacgatcgacgacactcacatcaacaactcacgatat

SEQ ID NO: 417711 - DNA, 523 bp, Homo Sapiens
  misc_feature (79)..(114): n is a, c, g, or t
  misc_feature (164)..(268): n is a, c, g, or t
aagcctgatgtcactatagggcgcctagctcgccgagccgaacgacgagcgcaggagtagtgagcgaggaagcggccgnnnnnnnnnnnnnnnnnnnnnnnnnnnnnnnnnnnnagtcgacggtaccggacatatgcccgggaattcggccaaaaaaggcgagnnnnnnnnnnnnnnnnnnnnnnnnnnnnnnnnnnnnnnnnnnnnnnnnnnnnnnnnnnnnnnnnnnnnnnnnnnnnnnnnnnnnnnnnnnnnnnnnnnnnnnnnnacgcggtgtaagaagacggccaagtagaatctgtaatacgactacactatagggcgctagctcgccgaagcccgaaaagaaccggagacgctaggaggaggttcagtgaagcgaggaaagagggctgaataacatgtccgttataggcgatagcatttataccgaaagtaaatccagatcggacggttaccccggaactatgttgcccgggaaatattcgggggaaaaaaggcgcgggcgcggggggacctccaa

SEQ ID NO: 417712 - DNA, 1035 bp, Homo Sapiens
  misc_feature (41)..(79): n is a, c, g, or t
  misc_feature (82)..(117): n is a, c, g, or t
  misc_feature (167)..(415): n is a, c, g, or t
accaccgacagacttatacatatagggctaccgttgagagnnnnnnnnnnnnnnnnnnnnnnnnnnnnnnnnnnnnnnncgnnnnnnnnnnnnnnnnnnnnnnnnnnnnnnnnnnnnagtcgacggtaccggacatatgcccgggaattcggccattacggccgggnnnnnnnnnnnnnnnnnnnnnnnnnnnnnnnnnnnnnnnnnnnnnnnnnnnnnnnnnnnnnnnnnnnnnnnnnnnnnnnnnnnnnnnnnnnnnnnnnnnnnnnnnnnnnnnnnnnnnnnnnnnnnnnnnnnnnnnnnnnnnnnnnnnnnnnnnnnnnnnnnnnnnnnnnnnnnnnnnnnnnnnnnnnnnnnnnnnnnnnnnnnnnnnnnnnnnnnnnnnnnnnnnnnnnnnnnnnnnnnnnnnnnnnnnttcttcaatttctcttttggtggttcgagcttttggtcgttttcaagaaatttcggtcttacttagaggtcatacaacgacatttccctgtatttctgtcctattagcttggcctttgtaccactttaaaactcttcgaagctaggctgggattgcgcaatgtggtattatttggtgaccacaggatttcggcgttctcacctgttgtttcccttttaacaccgctgcggattaaggttattcccccaagaacccccatttttacttggcacggtctgcctatattgtcccccccgagttggaccctttagtacgccacccctaattgatttgggtccgcggtttttccccattggtgggcggacggtcctgggttcgcctagtgggtttccctcctagtttgtatttcccagtttaacgggtttattgtggtcctgggtacccttgagggctaaagtaagtagccagccctttgttttgggattcaccggtattttcgtgaacaagtctgtttttgtgggtctcgtctcttttgggaggggcagcgggcctcctcccctgtgtggtctcccagggtttgcgtgtttgccgtctgtttttggcctgggcaccactttggc

SEQ ID NO: 417713 - DNA, 1076 bp, Homo Sapiens
  misc_feature (45)..(86): n is a, c, g, or t
  misc_feature (90)..(121): n is a, c, g, or t
  misc_feature (165)..(221): n is a, c, g, or t
ccagtcaggaagacttgatcgtcattatagggcgcagctctttgnnnnnnnnnnnnnnnnnnnnnnnnnnnnnnnnnnnnnnnnnnccgnnnnnnnnnnnnnnnnnnnnnnnnnnnnnnnnaatcagtcgacggtaccggacatatgcccgggaattcggccatnnnnnnnnnnnnnnnnnnnnnnnnnnnnnnnnnnnnnnnnnnnnnnnnnnnnnnnnnaagttgaacggccccttccaagctttcggagtcggtactgtgctctcccgcaggggccgcggaagaacgatccccatttaccaggcggacccccagtgttaccccaaatgtggcctggtttttatccacccattcaacaaggggaagaccccaacaacatttgggggcaaaacccttccttttaaatctccacaagttctttaagaagaggacgccggaaaagggttcgcataatttggcggcgtgggccataccaaaaagtggtccccccaaaacccccttttttggaggcacaagaggcttacatctcaaatccagggattgtggaaagaaccaaaacgcgccgggagaacttaagacatgccccccagaggagaagggccttttaaaacccaaggcgggccaatacacagccgggagacctctcattccaaggtcggaagtcgtgggcacccttgtcgtttggaaagggaaaaagcagctatacgcgggggggtggggcgccaattaacagagtaggacataatgacaaggggcagagcgggaatttggcggcgttaaggcgggggccccaagcagagggggggcgcctccgtagctcgcgggggccctggtgttagcagcccctacgaggttacccatattaacctctggtgttggcccttaggacaccctctattccggggttttccaggaggggtgtacaccacacacacaccccaggagtgaggaaaagaagggcgagagcccggagtcaccacaaaaggcacatttgtgtgccctccgtgccttttttggtgggcgcacaagccccttttaagcacttggtggaaccacacgagagtggttagtccc

SEQ ID NO: 417714 - DNA, 1028 bp, Homo Sapiens
  misc_feature (42)..(85): n is a, c, g, or t
  misc_feature (88)..(123): n is a, c, g, or t
  misc_feature (167)..(448): n is a, c, g, or t
  misc_feature (486)..(589): n is a, c, g, or t
  misc_feature (954)..(954): n is a, c, g, or t
gtacaagaaggtttgatgatcatataggggctagcttttagnnnnnnnnnnnnnnnnnnnnnnnnnnnnnnnnnnnnnnnnnnnncgnnnnnnnnnnnnnnnnnnnnnnnnnnnnnnnnnnnnagtcgacggtaccggacatatgcccgggaattcggccattacgnnnnnnnnnnnnnnnnnnnnnnnnnnnnnnnnnnnnnnnnnnnnnnnnnnnnnnnnnnnnnnnnnnnnnnnnnnnnnnnnnnnnnnnnnnnnnnnnnnnnnnnnnnnnnnnnnnnnnnnnnnnnnnnnnnnnnnnnnnnnnnnnnnnnnnnnnnnnnnnnnnnnnnnnnnnnnnnnnnnnnnnnnnnnnnnnnnnnnnnnnnnnnnnnnnnnnnnnnnnnnnnnnnnnnnnnnnnnnnnnnnnnnnnnnnnnnnnnnnnnnnnnnnnnnnnnnnnnnnnnnnaaaaaggggcggggcttgggggtttgggcactgtagtnnnnnnnnnnnnnnnnnnnnnnnnnnnnnnnnnnnnnnnnnnnnnnnnnnnnnnnnnnnnnnnnnnnnnnnnnnnnnnnnnnnnnnnnnnnnnnnnnnnnnnnnacagagtggagacccttctttgattcaaaacaaaaaacttggtttctcctctctctcgtggtttaatctctatccattggatgtagtgattctaaatgcttggggaagttaattcttaaccaaaagagacttgtagtgggcccacccattaagtgaggtgcgcaattaaaacccggggtagtatggggtgcggaacattgggttttcaaaagataattctagattaggaacttcatattaaaaggttttttggggacattacggttaatcaccaggtttaaggaggtcgttgagcctttaggaggagggttggcgactacggggcgcaggggtataatgaagaggtgcggttaaaattgtcaganagagaggcgaaggcgtttgtgttatagcaaggtataaatggaagggggggaaccaaaaacggacaaaaagaggg

SEQ ID NO: 417715 - DNA, 1047 bp, Homo Sapiens
  misc_feature (72)..(108): n is a, c, g, or t
  misc_feature (148)..(573): n is a, c, g, or t
gaagattgatatcatataggccctaggctagagcgaagacgagcgcaggagtattgagcgaaggaaggcggnnnnnnnnnnnnnnnnnnnnnnnnnnnnnnnnnnnnncaagtcgacggtaccggacatatgcccgggaattcggccnnnnnnnnnnnnnnnnnnnnnnnnnnnnnnnnnnnnnnnnnnnnnnnnnnnnnnnnnnnnnnnnnnnnnnnnnnnnnnnnnnnnnnnnnnnnnnnnnnnnnnnnnnnnnnnnnnnnnnnnnnnnnnnnnnnnnnnnnnnnnnnnnnnnnnnnnnnnnnnnnnnnnnnnnnnnnnnnnnnnnnnnnnnnnnnnnnnnnnnnnnnnnnnnnnnnnnnnnnnnnnnnnnnnnnnnnnnnnnnnnnnnnnnnnnnnnnnnnnnnnnnnnnnnnnnnnnnnnnnnnnnnnnnnnnnnnnnnnnnnnnnnnnnnnnnnnnnnnnnnnnnnnnnnnnnnnnnnnnnnnnnnnnnnnnnnnnnnnnnnnnnnnnnnnnnnnnnnnnnnnnnnnnnnnnnnnnnnnnnnnnnnnnnnnnnnnnnnnnnnnnnnnntccggaaaaaaaccacgttggtagagggggaatggaggtttgcaaggcagcaggattaggcgcggaaaagggttctcaggaagatcctttgattctttctagggggtctgacgctaagtggaaagaaaactgcacgtaagggaattgtcgctcagtgagattctcacaaggggattttaacctaagatcgttttaacttaccaatgacgtttcaaatccagtcttaaggatttatgggtaacttggtctgacagttaccagtgttagggggcaatattactggcgccatatattagggaagggatatgacgaattgcgactggtaaaggattatgcctgaaagaattaaatgggtgggagacagaggttcaattaagccggtgaactttagtttacaaaggaatacggcccagggtttaagggcaaaccggtgtgacagcacatgtggattgcgccattttttagtcaggaggc

SEQ ID NO: 417716 - DNA, 543 bp, Homo Sapiens
  misc_feature (49)..(173): n is a, c, g, or t
  misc_feature (179)..(232): n is a, c, g, or t
agtcgacggtaccggacatatgcccgggaattcggccattacggccggnnnnnnnnnnnnnnnnnnnnnnnnnnnnnnnnnnnnnnnnnnnnnnnnnnnnnnnnnnnnnnnnnnnnnnnnnnnnnnnnnnnnnnnnnnnnnnnnnnnnnnnnnnnnnnnnnnnnnnnnnnnnncagggnnnnnnnnnnnnnnnnnnnnnnnnnnnnnnnnnnnnnnnnnnnnnnnnnnnnnntacttgtgtggcggcgggccccgacccgaggagaagaggtgttctaaaacacactctcggttgtgggcgcggccggcgcgccccatagattgagtatctgggagaaccgctgcccacacagcgggcgccctcgaaggaacggtcgccggggccagagagacaaggggcggcgtgtgcgtttctccaccaattgaaaaaaacgcgcgggggcggagacacgaggcgcgctttgggacgcaacacccgaagagggggttcgagggcaggctagacagcgggcccaaccaaacgggtggtcccaacggacctgg

SEQ ID NO: 417717 - DNA, 1090 bp, Homo Sapiens
  misc_feature (79)..(114): n is a, c, g, or t
aagactgatcatcatatgggcctagcttgcgcagccgaacgaccgagcgcagcggagtagtgagcgaggaagccggcgnnnnnnnnnnnnnnnnnnnnnnnnnnnnnnnnnnnnagtcgacggtacccggacatatgcccgggaattcggccattacggccggagacatggagcggagccggggtccggagggcacgcgtgccctgagtctctcctgctctcccctgccgctaggcgagtcatgctcgatgcctaggtcgtggccctcagtcacatgcaaagagcaggccgagtagcggcgcgctttgtgacagggtgtccacggatgtaacgtcgagagagtctctttggggatcgtagtcactgttgaggtaccgcgggcgcatcgtgagctcaaatgacgtccgccgctcctgcttgggcgcctgtccccggggaaaacacgttcggtcaacatcacgcccagttgaggttgggtgttccctgtttggcaaaaggaccgggcaacgttttaccgttgaatgcggcctgaccactgtggcgggccaggaaaatggttcggtgatccggggacccactggctggcaggatggggacattagcatggcttcttcgtaccaagaagcaccggtgggcccccaactttcactgtcactgtcaaccaagatgacaagacgctagtctggctgatgcccaaccacgcgtgtcccgcggggttcgactcaacaagaatgtatgacactgcctccaccttcgccgtcccatactgacctcgtttgtcctttcccttaacgctcccaaagtttgaccctttcttcccattataacacaaacatttatttgtgcgcattacccataccttattggtgcaaaaccaattgctggggccaagctggatgaagaacttcccttacaattctcccgtgtgtggtgcaaccattgcatgggcgtcattccgacacacagtcttctcaacaccaaccagcgacatctacacagtcacagttgcacgcctcgcaacagaaaacaaaaacatgccgcgcgatactcgggccagcagacccacgtcgctcacacggcagtttctcct

SEQ ID NO: 417718 - DNA, 1182 bp, Homo Sapiens
  misc_feature (43)..(89): n is a, c, g, or t
  misc_feature (93)..(128): n is a, c, g, or t
  misc_feature (178)..(291): n is a, c, g, or t
  misc_feature (386)..(386): n is a, c, g, or t
gggagggcaaaaaagagtataatcatatagggcctagctctgnnnnnnnnnnnnnnnnnnnnnnnnnnnnnnnnnnnnnnnnnnnnnnnccgnnnnnnnnnnnnnnnnnnnnnnnnnnnnnnnnnnnnagtcgacggtaccggacatatgcccgggaattcggtcattacggccgggnnnnnnnnnnnnnnnnnnnnnnnnnnnnnnnnnnnnnnnnnnnnnnnnnnnnnnnnnnnnnnnnnnnnnnnnnnnnnnnnnnnnnnnnnnnnnnnnnnnnnnnnnnnnnnnnnntcctccagaaaagcgggaccaacatccagagaacggccataagggacaacacacacaaccaacattaccggctgttacttccccttcagtggaanctttccaaccttccggggggtccaacgcaagattcctctcctgggctagaagccccccccagcagagcgggaactctggttactgtgcccacctatggcccgggccaaggttttcggctttctcagggaaagaacgcggggtgttctccccattgttggccaggcctgggcctttgcactccgttggaacctcagaaagtgatccacccaacctgtgggcttccccaaaggcgccagagacaccacagtgctgtggaccccccggtggtcagacctggagcaaaacctttttttcctgccgacaattttcatctcccacaaccgggtcttccaaaaggtgctccgggcaaacccacgcgtggttcacaacttgcaaatcccagggcaaccggaggcagacgctgacacgccatatttctgctggcactgacgaattacggttgactctcaaaattcccacaacactattctgtgggccttcgggccgtcgccgtggcaagctcggcctactgtgtggcacacgttcgttccccgacctgggcctgcccacgcggggcacacgcgagtcccctcaaagaaagggttttggcccttactcactccggcgcggaacgccccgcgggccccacctggctggcgcctcaacggggcgtgtggccactcgggcaccccggcggcggcccgctcgtggccttgtgcgccgaccaccgtcttcgttcccggcctggcggggcatatgtctgccagcgggctgaattgtgtggtacatttgccaggttcctttgttgttcgtgca

SEQ ID NO: 417719 - DNA, 1028 bp, Homo Sapiens
  misc_feature (50)..(175): n is a, c, g, or t
agtcgacggtaccggacatatgcccgggaattcggccattacggccgggnnnnnnnnnnnnnnnnnnnnnnnnnnnnnnnnnnnnnnnnnnnnnnnnnnnnnnnnnnnnnnnnnnnnnnnnnnnnnnnnnnnnnnnnnnnnnnnnnnnnnnnnnnnnnnnnnnnnnnnnnnnnnncgggagcaaacatcaaacaacctagaagaggacagaaaaaaaatataagccgtagctgtccccttcaatgtgtgaaccttccaccttccgggggttgaaaggcagatttctctcgtgtgcatatagggcccccccaaagaggacggggaaaccactgggttccggttgccacaccaaatgcccgggccacgtttttgggcctttcttacgcagaccggggtttttcccctttgttgggccagggcgtgcgtctctgtggactcctcttggacctcgaagttggatgcccaccccaacttgcgggcctcccacaaagaggggcgccgggggcccactgcggttttgacgccacacgggtggttctgggcgtggcgctaaacttgtttttttggcagcacacactttttcactgttcacaaacacccgcttgcaacacgccttgtggcgcaggggaacacgcactgcgggttccccacaaccttggaaactccccagagcacccgggagagggctgggacgcatatttcttcgcggttgaccgaccattgcggttaaccttaccgcaacattcccctcagagcaaccatttggtgctgcccctcgggaggggcctggggcgccgcgacatctcggcacgaactctcgtgtggcgcaacgcggtgcttgttgagcccgcactgtgcccactggtcccacgctgggaccgacgcgcagctcttctcccacaacacagggcgtcgttgccccctttttttctccccagcggggcaaggcgctctcggtgggggccaccactcgtgcggggcgcccttccagcggcctcggtcgcaccatccgggcgcgcccgacgggg

SEQ ID NO: 417720 - DNA, 815 bp, Homo Sapiens
caccaaaacaacaaaaactttgtgggccgccctggccactggaagaagagttttgaagacaccattccggtgtgtggcgcgcggcccccaagtagggtgttatgtggacacaggtggccataggcggtcccctaagaaagaacccggggccacggaacactgggctgtggggatctcacaccagatataaaaacaagcccgggggggacaccggaggcgttctggacacaaaccccacagtggccgtcccggagaccactacgtgggcgctctaccccaacggggggtgcaccagggcagaggctgatatataaaattaaccgccccgccgtgggggattctaaaacacgaggatcgagagaaacgaacacaaagaagacagagaaaccagagcacgaagacaaatgacacgaaacagcagcgatctgacagacagctagtcccaaataacgagcaatagacactacacgtcagagcacccacgaacgacatcgaaacaagcataagcacagccatcagcagcgagcccacagggcgggcagcaacgggcgccggaggaagggcaccgactgaacggacgcgaggcgagacgcacgagggacacgcagaggagccgcaccaggagccacgggagcgggcgaagggcggagccccgacaccacgcccagaccagcagcggaggcgggcagaaggagagcgcgagaagaacgagcaggcaagagcaggacgcggacgctggaggaggcagaagacagcaggccgacgcggggcaacgaccggagcagagcgacgagtgagaagaaaggcggcatacg

SEQ ID NO: 417721 - DNA, 860 bp, Homo Sapiens
  misc_feature (150)..(150): n is a, c, g, or t
  misc_feature (215)..(223): n is a, c, g, or t
  misc_feature (509)..(560): n is a, c, g, or t
  misc_feature (624)..(624): n is a, c, g, or t
  misc_feature (669)..(726): n is a, c, g, or t
  misc_feature (798)..(798): n is a, c, g, or t
tgtgttggtgggggccgggctctggggggccctagaagaaaaaggttcttctcaagacccctttctcgtgtcgggcggcgggcggcgccccccatcagtgttcaatgtggttcagcacctgtgcgggcaacaaaaaggtggtctcgccanaaaggagaacaccgtggcggcatcgagcactcggctgcgtcgggcggtttctccccccacaattnnnnnnnnngccgccgccgcggcggggcacacccggaggcgtgtgtttctgtggaacacaaccctccagagaatggggggacggtccgcagagagggaccacatcaggcgcgggggttctctataatccaaccagccggcggctgccccagcggaggacgggccgcagagatttatcaaataatatactcggccccggcagcagtggggtgggtaaaatgataaagaatagagatgataaggaatgagaggatgagataaaggataggatgtgaataattaatagagaagaatgnnnnnnnnnnnnnnnnnnnnnnnnnnnnnnnnnnnnnnnnnnnnnnnnnnnnttaagtaagatatataagagtggtgagcataggaagtacatagagagaatataatggaaatgangacaaagatagaatgaggagtagagaagacgaggattatgataannnnnnnnnnnnnnnnnnnnnnnnnnnnnnnnnnnnnnnnnnnnnnnnnnnnnnnnnntaaggtggacgaggaaaaaatatagacagaagatatagaatagaaatcgagaaaagaggaaaagatgaaagnatagcatatgaaaacataagatgatgatagaatagatgagacaaagaaaatgaaaagagata

SEQ ID NO: 417722 - DNA, 794 bp, Homo Sapiens
catcgaaccctacaaagaaaaacctttggtcggcgcgcgcgctaggagcccgcgaaaaaagttttgagaaacccattctgttgggcgcgcggcgggcgccccggatgggtaacgtgggacattggggccatcgggttggtgccaagaggagaatcgggcgcccatggattaaggcgttgggttgtctccaacctaatgaaaaaacggccgggcggggaccccgggggtgtcttggaacaaatcccagaagggggtccgggggggccataagacggggcttctgacaaaggggggtgccccaaggagagaggtcgggatgttaaaatttacgccggcgaggaggggattgggcggccagcccatgtcaacagcatggtattcagagggagcacacaaacagtagcatggtgcatgagagagcaacaaccacagccaacacttgagcaacctcaccacgactaatcggtgaataccccacctggcacagggtgtatagcacatagctatgaacgggagattacaagtggcgccaaagtaaattcgggactgttggggaccggcatgaagctggacgagggggttaagaccgcgatcaaggggccgaatcgaggcctattccagaagacacaacagcagcaccagggaagttggtgcacgacccaaggccgtccggagtgacgacagtgcacacaggcgacggggaccggtaggcacagagaggaagcagattaccggagggtacggcgacaatacaggcacaaacaggcacgaacatgaacgatagacgaacaacg

SEQ ID NO: 417723 - DNA, 879 bp, Homo Sapiens
  misc_feature (67)..(102): n is a, c, g, or t
  misc_feature (140)..(268): n is a, c, g, or t
  misc_feature (284)..(300): n is a, c, g, or t
atatatatgggcctagtcgttgacgaacgacgagcgcaggcggagtagtgagcgaggaagcggccgnnnnnnnnnnnnnnnnnnnnnnnnnnnnnnnnnnnnagtcgacggtaccggacatatgcccgggaattcggccnnnnnnnnnnnnnnnnnnnnnnnnnnnnnnnnnnnnnnnnnnnnnnnnnnnnnnnnnnnnnnnnnnnnnnnnnnnnnnnnnnnnnnnnnnnnnnnnnnnnnnnnnnnnnnnnnnnnnnnnnnnnnnnnntaagaaggcacaaggnnnnnnnnnnnnnnnnncctttttgttggcgccggccttgggccctcgaaagaaggtttttacaacacccttccggtttgggcgcgcggggcccctggtcgcgtttatggtaacagttgggccacatggggggttccatagaggaagaccctggggtcaagaaccatcgggtgcgggggttctcgccgcaagttaaaaaagacgcccgcggggggagaccacggagggggtcgtgtgacacaatttccagatcagtggggttcaaggaagggcgagcatagaggggggattttatcacaacagggagtgtgccaagaggagatgtcggattattagaaatttgacgcccccggctgttggggagaatgggacaactttcaggaacatattcacttccagattcatccccaagggatctctaagagggcaagccaagccaaacggtggcctaagtggcagggttctgatgcaataagttaacccacgttaagcagccgagataggacgcaggacctcgggctttttacaagaaaaaactaggtggtcaaaggtccacgttttaatagagaaccctttatattctaacaataggataa

SEQ ID NO: 417724 - DNA, 1047 bp, Homo Sapiens
  misc_feature (79)..(114): n is a, c, g, or t
  misc_feature (164)..(281): n is a, c, g, or t
  misc_feature (721)..(730): n is a, c, g, or t
aagcgtgatatcactatagggcgctagctgttgagcgaaggaccgagcgcagcagagtagtgagcgaggaagcggccgnnnnnnnnnnnnnnnnnnnnnnnnnnnnnnnnnnnnagtcgacggtaccggacatatgcccgggaattcggccattacggccgggnnnnnnnnnnnnnnnnnnnnnnnnnnnnnnnnnnnnnnnnnnnnnnnnnnnnnnnnnnnnnnnnnnnnnnnnnnnnnnnnnnnnnnnnnnnnnnnnnnnnnnnnnnnnnnnnnnnnnntctccagaacagggaacagcatgaccgaagaacaggctttaaacatcggatgaccactaatgaaaggcactttgtggggcccctcctgggtctccgggcagtaactgttttgtagaaccccgttgtgtttaggaggctagggcgggcccaattaaggtaaagctaagcctgtgtacaaaacggagggccccgcacaggagaggactgctggggggaaagaatcggaggagagcttgtgacaatctgttccacccataatttgaagaacctcgcgctggcgcggggcaccaaaacgcgggaaggcggtttgtcagagagaaaacccacgagaaaggaggcgatggcctgcgtggagacgggccccacagaccgggcgaaatgcaactacaggacggcgaggtaccaaggaggggaagctcacgaatatctaattggagagnnnnnnnnnngccgcgggtgtggggccccaagcgacacacggtaagctttaagtggttaacacttaaacgttgggcactgttccaagaacaggctttacgaggggctcactattatgtgggaaaccttagtcattgtttaaaagttaacgtttgtaggagggcagactaagggggattggcacaaagttggtttatcacggttaagaacacgcccgtttaatttaaccgtttgtgggaacatttgggagacaaggacactgtgcattcttgtccttttagaaacaccgtggggagaagttaattagggagtggtagagcgtaaacac

SEQ ID NO: 417725 - DNA, 410 bp, Homo Sapiens
  misc_feature (50)..(164): n is a, c, g, or t
  misc_feature (173)..(203): n is a, c, g, or t
agtcgacggtaccggacatatgcccgggaattcggccattacggccgggnnnnnnnnnnnnnnnnnnnnnnnnnnnnnnnnnnnnnnnnnnnnnnnnnnnnnnnnnnnnnnnnnnnnnnnnnnnnnnnnnnnnnnnnnnnnnnnnnnnnnnnnnnnnnnnnnnngtttctccnnnnnnnnnnnnnnnnnnnnnnnnnnnnnnncattgtgtgtgggggcgcgccttggggcccattggaaagaaggtttttaataaacccccttccgcgttgggggggcgcgcgcggggcccccgagtttgggtcaaggtgtgaacccgtggggccaagagacgcggtgttccccaaggagagaaaccccggggggccaggacaatctggtggctggtggggtttttcccccccaactat

SEQ ID NO: 417726 - DNA, 1408 bp, Homo Sapiens
  misc_feature (52)..(93): n is a, c, g, or t
  misc_feature (97)..(132): n is a, c, g, or t
  misc_feature (170)..(433): n is a, c, g, or t
  misc_feature (445)..(471): n is a, c, g, or t
  misc_feature (533)..(533): n is a, c, g, or t
caggcaaaaagagaagagacctgatatcactataagggcgctagctcttagnnnnnnnnnnnnnnnnnnnnnnnnnnnnnnnnnnnnnnnnnnccgnnnnnnnnnnnnnnnnnnnnnnnnnnnnnnnnnnnnagtcgacggtaccggacatatgcccgggaattcggccnnnnnnnnnnnnnnnnnnnnnnnnnnnnnnnnnnnnnnnnnnnnnnnnnnnnnnnnnnnnnnnnnnnnnnnnnnnnnnnnnnnnnnnnnnnnnnnnnnnnnnnnnnnnnnnnnnnnnnnnnnnnnnnnnnnnnnnnnnnnnnnnnnnnnnnnnnnnnnnnnnnnnnnnnnnnnnnnnnnnnnnnnnnnnnnnnnnnnnnnnnnnnnnnnnnnnnnnnnnnnnnnnnnnnnnnnnnnnnnnnnnnnnnnnnnnnnnnnnnnnnnncccaaaaacccnnnnnnnnnnnnnnnnnnnnnnnnnnntttggggggggcctgggcctgggaaagggttttttaaaccaactccggtgggcgggcgcggngccccaggtggcgtccgggcgacacgtgcgcaaaagcgtgtcccaatgaagaaccgggcgtcatgactaagtgcgcgcgcgtttcctccacccaataaaaaaaacgccggggcggcgcagccggagacgttccggaaccaactccaggaaggggacgaccggagggccaataaggggtatcctaatcaacggggggttccacaaggcgaagctcgaacaatacaaatagccgcgcggccgccgcgagagcgacacaacacacagcagacgaagcgacaacgagacaacgcgagcagacagcagcgaaagcaggacaccgaggagctagcgacagcagagagcagggagcagacacgatcagacgcgacacagcgacgacgaccgacgacgaacaacaagagcaagacagaaagaggcaacaccaggggtagcacccacagagcaagtaagaaaggaacaagcaaacggacaagacgagagcagcgcacgggaccgaacagaggaaggcagacgacgaaggcgagaaagaagagaaacaaggagacgagccacgtcacacgtagctccagcggagtgtggaggcgagagagaaagcaagagcacgaggcgagaacagcacgacgacagggacgaggaacgagaagaagcgaagagagaggaccacgaagaaagacaagacagcaaagaccagaggagagcgaagagtcacagcaggcgcccaaaaacggtaacaagcagcagagaagggaaatagacgacgagcgacaagaaggaagcgagaaacaaagcaaagagcgagaagcagaaggaagaggagggcgaaacgaaaagaggaagcagaagacagacaaacacaggaaaggagaggagggcaa

SEQ ID NO: 417727 - DNA, 1045 bp, Homo Sapiens
  misc_feature (41)..(86): n is a, c, g, or t
  misc_feature (90)..(125): n is a, c, g, or t
  misc_feature (174)..(299): n is a, c, g, or t
  misc_feature (303)..(356): n is a, c, g, or t
  misc_feature (736)..(750): n is a, c, g, or t
  misc_feature (769)..(832): n is a, c, g, or t
  misc_feature (897)..(951): n is a, c, g, or t
acgaaggaactgatgatcactatagggcgctagctcgtcgnnnnnnnnnnnnnnnnnnnnnnnnnnnnnnnnnnnnnnnnnnnnnnccgnnnnnnnnnnnnnnnnnnnnnnnnnnnnnnnnnnnnagtcgacggtaccggacatatgcccgggaattcggccattacggccggnnnnnnnnnnnnnnnnnnnnnnnnnnnnnnnnnnnnnnnnnnnnnnnnnnnnnnnnnnnnnnnnnnnnnnnnnnnnnnnnnnnnnnnnnnnnnnnnnnnnnnnnnnnnnnnnnnnnnnnnnnnnnngggnnnnnnnnnnnnnnnnnnnnnnnnnnnnnnnnnnnnnnnnnnnnnnnnnnnnnnttttggggggcgccgggcccaagaaaaacggtttataacacacctcggtgggggcggcaggggcccagtgtggtacacggcgacactgcgccaaacggcggggccagaagagacacccgtgacaagcaatagggggtgcgatctcccccaattaaaaaagcccgggggagagcccgcggcgtcttgaccaaatcccaaaggaggccgcaggggcagcacagggggcctacaccaacgggcgccacacgagagacaagaacaatcacgccggcagggggggcccacaaccagcgaagataacaccagcgcacgagacagacaccaaagcaagaccacacgcgagagaagacaaaacaggaagggggggaggcccgaaggtnnnnnnnnnnnnnnnagaggcagaatgcggagannnnnnnnnnnnnnnnnnnnnnnnnnnnnnnnnnnnnnnnnnnnnnnnnnnnnnnnnnnnnnnngaaacagcggggagcggacggcgacacgacacacgccctaacaaacgtgatataagaggaaaccnnnnnnnnnnnnnnnnnnnnnnnnnnnnnnnnnnnnnnnnnnnnnnnnnnnnnnngacgacccacaaccagacgagacgagaaaaaagaaacgaaaaacaagcaaaagcacaacggaaacaggaagaacgaaaaagcagaccaaaagca

SEQ ID NO: 417728 - DNA, 1874 bp, Homo Sapiens
  misc_feature (60)..(176): n is a, c, g, or t
  misc_feature (745)..(787): n is a, c, g, or t
  misc_feature (826)..(879): n is a, c, g, or t
agctcgacggtaccggacatatgcccgggaattcggccattacgtgccggtggcgccggnnnnnnnnnnnnnnnnnnnnnnnnnnnnnnnnnnnnnnnnnnnnnnnnnnnnnnnnnnnnnnnnnnnnnnnnnnnnnnnnnnnnnnnnnnnnnnnnnnnnnnnnnnnnnnnnnnnnntctccagaacaacggaaccaaccctctcccaaccacccaccgagcgaacacagaccaccccaaccaccacacggtgtggcggaccgccaacgccctctccgaacacacgcctgtagaagaccacgccactggcagcccgagcgccccacggggccgcgttacacctgcgctctccccccgggcccatagaacactcctcgcgccccaaccaacacagcgacagcagagcagcatccccccccatatgaaaaaaaacgcgccagaggggaagaacagacccgcgcttccgtcccacaccagccacgaagcaggaggcagtcatacggcgacgcatccacacggtgggccctcgcccaccccccggcggagcccccagccgcgagcgcgaaggcgaaaaatgcgccccccactgctattgtgttatttactctcccttcttactttctctttatattacacaatcacacaaaacaacaaacaaccatagactacatctttatctacatcatccttcctccttcaccataccccaccatacataacaacacaataccaagaacaaaatatannnnnnnnnnnnnnnnnnnnnnnnnnnnnnnnnnnnnnnnnnnactcacgctagcacaacagcgaaagtcgattgtatttannnnnnnnnnnnnnnnnnnnnnnnnnnnnnnnnnnnnnnnnnnnnnnnnnnnnnataactacgagaaagcgcacaaaccgaccaacaccctcttcctcctttccccctctccttcttttcgcccctgccaacgcaccacgaacggcagcaaattcggaccctcatcgtgtcttctccccgctccgctcctcacagccttccacttccacgcaaccacgaccactcagatatgaaacctcctgctctaattactctctcaattactatttactctcctctctatcctccgtcccgccccttcctgtacacaatacaagcagaacaaacagactagtatctcccttcactcacttccccttttctcgtctattccttctcctactgcctgcgcgcctcgtcactgcgctatacacgagtagaggaatctgatgataacgccagcttccatcagctgctttctctcttctcctagcgccccacccgctcgaatgacgcgcgtcccctgagcaatacagctgcccctgcccccttctctgtcccctccagctctccatcacatccgctctgccatccaagcgcccatacatacacatcaaacatcacccatctcatacgcctccacttaccctctcactaactcactagtaacacacactgacacaagatctcctcgtgcgtcaccactccgccgcctctcctactccccacgacaagccagcaacaaacactctgtcttcctcttactatctcactcctcactccaatgtcccctgagccacttgccatgctactcacattgagtcagacacacagtcaagaaattaaatactatactattctttcttgctcttcctcgcccttctcgatcttccattaccctgcatacacatcgacgaaccatcatcattatggcactctctcagttgctacacgccatcatccctgactccctactatccaccacctacgccaaccaccctactcgtactgtctttcgcacctcattcttctctcctcgcatctcctcatatgcctctatatctaaacac

SEQ ID NO: 417729 - DNA, 574 bp, Homo Sapiens
  misc_feature (392)..(392): n is a, c, g, or t
tattcgtccccaagcttcctaattttaagctacaacatttcctaacccttaagttttcacgccctaacttggttgcctttccaaagtccatgttgttgaatatgatatggtaaaaaccaatatctatttggagacagtggaggggatggtagtaattgagagacagtgtcagatggagcagtgactttacaattttttgactgcaatccacaattagacatttcacattgctcccccatgacaacatccctatcgacccctgcccaaaaacaagttatttaccaatcttgctataagcaatgatgactgattttcttttttctactttatctaccacgaaacttatagtctcaactcttatataattttacacacattattctaccgatgtnctagcacttagaactacaacgtgttccagacttgcttttggtcacctctctgggtaagcccaagtgtgctgacctttcctggttcccatgttatcggactacactggggtgtgcacaggtgctttcaccccttttttaccttttttgaatggctcaccctggggaatggtttgtgccaccca

SEQ ID NO: 417730 - DNA, 939 bp, Homo Sapiens
  misc_feature (17)..(17): n is a, c, g, or t
  misc_feature (84)..(183): n is a, c, g, or t
  misc_feature (245)..(850): n is a, c, g, or t
tatcagacatccgttgnctggcgcggccagtaggtagtgaacatggtcatagctgtttcctaggagatcctggtcatgactagnnnnnnnnnnnnnnnnnnnnnnnnnnnnnnnnnnnnnnnnnnnnnnnnnnnnnnnnnnnnnnnnnnnnnnnnnnnnnnnnnnnnnnnnnnnnnnnnnnnncaagcgagctcgatatcaaattacgcccgcccgatcatcgaatgtgttcatagcatctgcgnnnnnnnnnnnnnnnnnnnnnnnnnnnnnnnnnnnnnnnnnnnnnnnnnnnnnnnnnnnnnnnnnnnnnnnnnnnnnnnnnnnnnnnnnnnnnnnnnnnnnnnnnnnnnnnnnnnnnnnnnnnnnnnnnnnnnnnnnnnnnnnnnnnnnnnnnnnnnnnnnnnnnnnnnnnnnnnnnnnnnnnnnnnnnnnnnnnnnnnnnnnnnnnnnnnnnnnnnnnnnnnnnnnnnnnnnnnnnnnnnnnnnnnnnnnnnnnnnnnnnnnnnnnnnnnnnnnnnnnnnnnnnnnnnnnnnnnnnnnnnnnnnnnnnnnnnnnnnnnnnnnnnnnnnnnnnnnnnnnnnnnnnnnnnnnnnnnnnnnnnnnnnnnnnnnnnnnnnnnnnnnnnnnnnnnnnnnnnnnnnnnnnnnnnnnnnnnnnnnnnnnnnnnnnnnnnnnnnnnnnnnnnnnnnnnnnnnnnnnnnnnnnnnnnnnnnnnnnnnnnnnnnnnnnnnnnnnnnnnnnnnnnnnnnnnnnnnnnnnnnnnnnnnnnnnnnnnnnnnnnnnnnnnnnnnnnnnnnnnnnnnnnnnnnnnnnnnnnnnnnnnnnnnnnnnnnnnnnnnnnnnnnnctcccattaaagttcttagtcctgaagaacaaagttggtagcataaaaatagaggtaggggggagcaagacaaagaatcggaatatgga

SEQ ID NO: 417731 - DNA, 704 bp, Homo Sapiens
  misc_feature (41)..(80): n is a, c, g, or t
  misc_feature (84)..(119): n is a, c, g, or t
  misc_feature (157)..(276): n is a, c, g, or t
  misc_feature (282)..(311): n is a, c, g, or t
  misc_feature (358)..(373): n is a, c, g, or t
  misc_feature (645)..(653): n is a, c, g, or t
aaaagtggaatgatcactatagggcgctagctcgtccgagnnnnnnnnnnnnnnnnnnnnnnnnnnnnnnnnnnnnnnnnccgnnnnnnnnnnnnnnnnnnnnnnnnnnnnnnnnnnnnagtcgacggtaccggacatatgcccgggaattcggccnnnnnnnnnnnnnnnnnnnnnnnnnnnnnnnnnnnnnnnnnnnnnnnnnnnnnnnnnnnnnnnnnnnnnnnnnnnnnnnnnnnnnnnnnnnnnnnnnnnnnnnnnnnnnnnnnnnnnnnntctccnnnnnnnnnnnnnnnnnnnnnnnnnnnnnngaggtgtgggggggccggggccccggagaaaagttttaagaaacaannnnnnnnnnnnnnnncccagggggtaagaggagaaacaggggccaaagaggtgtggtcccctgagaggagaaaccggggccagagagaaaagaggggggggaattctctctcacaccaaataaaaaacgccccggggggaacaccggagaggcgtttggggaaaacaatccaagaggggagagtctgggagaggctccattagggggactctttataaaagcgggagagcccaaggcggaagccggaagaaaatacaagaatattgaccgcgcccccgcgggtcgcnnnnnnnnncccacgccgacggacagcaaagaacgccaacacaaacacgaaaaaaaccac

SEQ ID NO: 417732 - DNA, 596 bp, Homo Sapiens
  misc_feature (50)..(164): n is a, c, g, or t
  misc_feature (170)..(200): n is a, c, g, or t
  misc_feature (248)..(258): n is a, c, g, or t
agtcgacggtaccggacatatgcccgggaattcggccattacggccgggnnnnnnnnnnnnnnnnnnnnnnnnnnnnnnnnnnnnnnnnnnnnnnnnnnnnnnnnnnnnnnnnnnnnnnnnnnnnnnnnnnnnnnnnnnnnnnnnnnnnnnnnnnnnnnnnnnntctccnnnnnnnnnnnnnnnnnnnnnnnnnnnnnnnttgggggggcgggccggggcccgaaaaaggttttaaaacacacaatcnnnnnnnnnnncgggcgcccaaacgacaggagaacaggtagacacacgtggcggcgcaaaacgcgcgtgggtccccctataggagagagaccgcggggaacatgcgagaacaacagggggcggagggagatctctcacaccaatataaaaaacaaccgcgcgcggcgggggagcaaaccgccagagcgcggtcccggagacaccacatctctcacagaatgagggggaggctcctcggaggggggcacactacaggggggctctcatatatcaaacagggggaggacatgccacaagagagagagcgcccgagatatatctaacaattacgcgcccccggatcgggggg

SEQ ID NO: 417733 - DNA, 450 bp, Homo Sapiens
  misc_feature (50)..(152): n is a, c, g, or t
  misc_feature (215)..(249): n is a, c, g, or t
agtcgacggtaccggacatatgcccgggaattcggccattacggccgggnnnnnnnnnnnnnnnnnnnnnnnnnnnnnnnnnnnnnnnnnnnnnnnnnnnnnnnnnnnnnnnnnnnnnnnnnnnnnnnnnnnnnnnnnnnnnnnnnnnnnnnatatttagcgagaccccgttctcccagacaaaaggcaaacacaaaaacaacacaagaagcacnnnnnnnnnnnnnnnnnnnnnnnnnnnnnnnnnnncaaattggcggggcgcgcgggctctcgggcgcccctcgagaaaaaaacgtttctaaaacacacaccactttcgcggtgggggcgcgccgggggcgcccccagagaacgcggacagagctgtgagacactgtggggtgccagatcagcgatgtggtcccccaacaaggagagaacactctggggcgcaaatcgaacacgaaa

SEQ ID NO: 417734 - DNA, 782 bp, Homo Sapiens
  misc_feature (41)..(92): n is a, c, g, or t
  misc_feature (96)..(131): n is a, c, g, or t
  misc_feature (181)..(295): n is a, c, g, or t
  misc_feature (303)..(336): n is a, c, g, or t
accgcccatcagaaactgagtagatcactatagggcgctannnnnnnnnnnnnnnnnnnnnnnnnnnnnnnnnnnnnnnnnnnnnnnnnnnnccgnnnnnnnnnnnnnnnnnnnnnnnnnnnnnnnnnnnnagtcgacggtaccggacatatgcccgggaattcggccattacggccgggnnnnnnnnnnnnnnnnnnnnnnnnnnnnnnnnnnnnnnnnnnnnnnnnnnnnnnnnnnnnnnnnnnnnnnnnnnnnnnnnnnnnnnnnnnnnnnnnnnnnnnnnnnnnnnnnnnntctccagnnnnnnnnnnnnnnnnnnnnnnnnnnnnnnnnnncaatggtgtgggcgcgcgcgcccgggcgcccccgggaagaagtttctttaaacaccaatcgcggtggggcgcgcgcgcggggcgcccaagaagaggcaaaggggaacaagtgggccacaaacgggtggtccctaaggggaaaacccggggcacagagaccaagggcgggggaatccccacccaatacataaaaaccgccccggggggcacaacgagagggttcgtgtgaaaccacactcccgagaatgggggttctcggagggtctcatatagcggggcgatcattattacacggagggggagtctcaagagaggagacctggcgaaatatctaacaattaagcgccccgggacggggggggatccccgaacgcgcatttctccctgcaccgacacaactacatcgcagacacgacctaccgctcaattaaccacgataacacccg

SEQ ID NO: 417735 - DNA, 1010 bp, Homo Sapiens
  misc_feature (50)..(177): n is a, c, g, or t
  misc_feature (180)..(234): n is a, c, g, or t
  misc_feature (383)..(391): n is a, c, g, or t
  misc_feature (401)..(409): n is a, c, g, or t
  misc_feature (561)..(561): n is a, c, g, or t
  misc_feature (609)..(609): n is a, c, g, or t
agtcgacggtaccggacatatgcccgggaattcggccattacggccgggnnnnnnnnnnnnnnnnnnnnnnnnnnnnnnnnnnnnnnnnnnnnnnnnnnnnnnnnnnnnnnnnnnnnnnnnnnnnnnnnnnnnnnnnnnnnnnnnnnnnnnnnnnnnnnnnnnnnnnnnnnnnnnnnggnnnnnnnnnnnnnnnnnnnnnnnnnnnnnnnnnnnnnnnnnnnnnnnnnnnnnnngtgtgtgggggcgcgcgccctgggccccgggaaaaggtttttaaaacccatcgcggtgtggggcgcgcgcggggcccccaaggtgtacacggaacactggggcctcaacggcggtgttccccgagagaaaacccggggccagaacacannnnnnnnnttttcccccnnnnnnnnngcgcccgggggtgaaccccaggcgcgttttgagacaacacccacaaggggagagttcagagaggcgctcagaaagggggcgtctctaataacaaccgagggtgctcccaggcaggaggcgccgcagtattaaaaattaaccgcccgcgcgtngtgaggttacacaacacgtcactcgcacatacatccaccaatcagcangcctaccatcaccaatcactatctcagctacgcgcaccaactcagcacaccacgcaacctctagcaaattagctcaagtcagcacaacccttcactacaacacccacactacacagctcacgcaccgacacccccaacacaacgtcccgcttcaaccaacaccacacttactactccctctcctcacaaaccccagacccactaactacaaaaccactaactctaccaccgaatactaacctccccaactggtagccacacatcccaacactacaatccactacccctctactgtagcacacccgatcaagacgcagagaatacactacccaacccacaacaagtccacactcagactcacacaccctactatccactccagtcaacactaccaaacctat

SEQ ID NO: 417736 - DNA, 537 bp, Homo Sapiens
  misc_feature (50)..(164): n is a, c, g, or t
  misc_feature (172)..(200): n is a, c, g, or t
agtcgacggtaccggacatatgcccgggaattcggccattacggccgggnnnnnnnnnnnnnnnnnnnnnnnnnnnnnnnnnnnnnnnnnnnnnnnnnnnnnnnnnnnnnnnnnnnnnnnnnnnnnnnnnnnnnnnnnnnnnnnnnnnnnnnnnnnnnnnnnnntctccatnnnnnnnnnnnnnnnnnnnnnnnnnnnnncgtgtgtgtggggccgcctctggggcccctggaaaaagttttctaagaacccacccgcggtgggggcgcgcgcgcgggccccgaggagaggagaaagggaaacgaggggccaagagcgcgggttcccagaggagagaaccgcggggccaggaacaaggggcgggggattctctcccccaatataaaaaagccccggggggcaaacgcgggcgggttcggaaacaaattcccaagagggggctccgggagggccaataaggggggacccatacacaacggggagctccaaaggagagagggcccagagattctccacaatttaacggccccgggtccc

SEQ ID NO: 417737 - DNA, 643 bp, Homo Sapiens
  misc_feature (50)..(163): n is a, c, g, or t
  misc_feature (172)..(234): n is a, c, g, or t
  misc_feature (248)..(273): n is a, c, g, or t
agtcgacggtaccggacatatgcccgggaattcggccattacggccgggnnnnnnnnnnnnnnnnnnnnnnnnnnnnnnnnnnnnnnnnnnnnnnnnnnnnnnnnnnnnnnnnnnnnnnnnnnnnnnnnnnnnnnnnnnnnnnnnnnnnnnnnnnnnnnnnnntctccaagnnnnnnnnnnnnnnnnnnnnnnnnnnnnnnnnnnnnnnnnnnnnnnnnnnnnnnnnnnnnnnngtgtggtgtgcgcnnnnnnnnnnnnnnnnnnnnnnnnnnaagaaaagagcctttttataacacaccaccttcgcgtgtgggggcgcgggcgcgcggcccccgaggggatacaggggcacacacgtggggccaagagcggcggttctccccgcagagaggaaaaaccgcgcggggccatccgaaacaaatcagcgcgtgcgtggaggaattctctcaccaccacaaatataagacaagacagcgccgcgggggggacacgcgcgcgacggtcgtcgcgagcgaaaaaccaaatccccccgaaagaaggacgattcaccgagggggctcatccaagcggggggacctcctacacccaccgggagcgtcctccccacgccgagaacccccgcgactacacaaattaagaccc

SEQ ID NO: 417738 - DNA, 736 bp, Homo Sapiens
cattgttcgggccgcctccggcgcccctgaaaaaagctttccaaaacaccaattccgtgtggggcgcgcccgggggccccaatgtgggttagggctgacccgtgggctaatacgcgggtccctaagggaaaacccggggccaagggcaccaagcggctgtgggattccctacccaaaataaaaaaacgccccggggggaacaccggagcggttctctggaaccaaccccggagatggggagcgtccggaggggcgctcatattccggggcgagctcatacctcaccgagggaggctccaaagcgaaagagcgcctcgagaaattttaaaaattaccgccccgcgcggggggttccagcaaccatcactcataaaaagtactagcatcataaaaccagtcaatacatgactaagtacaacactacaactaacacgacgagccaacgtacacggagagcgacagacgaacaacaacagagcacagatgacacccgaaagaagaccacaagaacagaaacaaaccaggcaacacaccacaagaccgaaacacagcgcaaggaaacaatagaacagaaaacaccgaaacaacaccaagcgacacgcgaacaacaaacacacagagacgaagacaccacggatagcgacggagacccaacaacatcacaggcgagagaatacagggagtaatgaagcaccagacagaaccaagacacaaagggcaaccatgacaaaaccaa

SEQ ID NO: 417739 - DNA, 759 bp, Homo Sapiens
  misc_feature (50)..(164): n is a, c, g, or t
  misc_feature (172)..(198): n is a, c, g, or t
  misc_feature (383)..(395): n is a, c, g, or t
  misc_feature (480)..(522): n is a, c, g, or t
  misc_feature (615)..(625): n is a, c, g, or t
agtcgacggtaccggacatatgcccgggaattcggccattacggccgggnnnnnnnnnnnnnnnnnnnnnnnnnnnnnnnnnnnnnnnnnnnnnnnnnnnnnnnnnnnnnnnnnnnnnnnnnnnnnnnnnnnnnnnnnnnnnnnnnnnnnnnnnnnnnnnnnnntctccccnnnnnnnnnnnnnnnnnnnnnnnnnnncaaacaactgtgtgctgcggcgcgcgcgcccgcgggccctccggagaaaacgtttctaaaacaccaatcgcggtggggcggcgcgggggcgcccagaggaggtgaaagtgggacaccagtgggcgccaaaaaggactggtgtgcccaccaaaggagagagcacccgggggccaatagagacaaannnnnnnnnnnnnttctctctcccccaatataaaaagaaccgcccccggggcggcgacacaccgagagcgcggtcttgtgagcccaaacccccaagannnnnnnnnnnnnnnnnnnnnnnnnnnnnnnnnnnnnnnnnnnagttctttatctaacacgcgaggggaggcctcccagcgcgcgagagcgtcccgagatattatctccacaatttgaccgccccccggtgccctnnnnnnnnnnnataaggacgtaatcatacgcacatgaccaaacaaacaactatcataaagcaaccaaccggccacggtaaacaccagaacggtaactaccaaactacatcaagcacagacacaacatgacaagacgaaaaccagg

SEQ ID NO: 417740 - DNA, 446 bp, Homo Sapiens
ctgtgggtcgggccgccccgccgggccccgagaaaaaggtttttatcaaaacacacaccgcgcgtggggggcggcgcgcgggccccacagaggggtagaggcgaaaaagcgggcgcaacagcgcggggtctcccaccagaaagaagatcgcgcgcggggcacagctaaaaacaagcgagggcggggggataacttcaatcacccgacagacaataagaaagcagccgcgcgcggagaggcaacccaaccgaagcgcgcgctcttcgatagaaaaacacacatctcaaccacaaagagggcgaagcctccagcgagagaagcactaccaatcaaagaggggggaactctatacaccaacaagaaggaggagacgacgtcacccaacggaggcagacgcgtcgagtaaatgatcaaatcaaataacgcgcccccgcaaggaggagggt

SEQ ID NO: 417741 - DNA, 667 bp, Homo Sapiens
  misc_feature (48)..(108): n is a, c, g, or t
  misc_feature (193)..(256): n is a, c, g, or t
agtcgacggtaccggacatatgcccgggaattcggccattacggccgnnnnnnnnnnnnnnnnnnnnnnnnnnnnnnnnnnnnnnnnnnnnnnnnnnnnnnnnnnnnnagtttgagcccaggagtacgagaactgccatgggcaaacaatacgctgaggacgcccagttcgtccaaggaacaaatggaaagcnnnnnnnnnnnnnnnnnnnnnnnnnnnnnnnnnnnnnnnnnnnnnnnnnnnnnnnnnnnnnnnnccaatatgtagagccgcagctgaagcgacgccagcaaagacagagaaggctgcacaatacacccactacagatcgcgtggcgcacgcggaggcgcgccataaaccgcgccagaagacgtcataacggaggaccacccagacggtgcggtcgcatcgtaggaagggcgacacgaggcgcgaagccgtggccaaaggaagtgcggagcgagcatgatgccccacaaagcattgaaaacctaggcccgcaaccccgggggagcaactccccgggcggcccggatggaaccaacctggccacagatgagagtcctcatggaagggcgaccccgcgcggcgccgacatcataggaacggggggagccactccagcccggcgtctcggcccccgaggatatccccccacgcctggag

SEQ ID NO: 417742 - DNA, 406 bp, Homo Sapiens
gagtgtgtgtgtgcggcgcgcgcgccgcgcggccccgcgagaaaagagttttatacaacaaccactacctgcgcgtgtggggcgcgcgcggggcgccacagagagagagtgataagagagaaaagcgggcgcccacaagagcgggttctccaagagagagagaaaccgcgcgggccgagagagataagaggaggcgcggggatttccccacccatatataaaaagagcgcgcgcgggggggcgaaaccgcgagagagcggtcgcgcgagaaataaacctccccaaggagggagaatccagagagaagaggccacaatatcgcggggggcactctatacaacaagaggggagagccccaaaggggagagacggcgagagaatctataaaatattatcgcccccccgc

SEQ ID NO: 417743 - DNA, 437 bp, Homo Sapiens
  misc_feature (50)..(172): n is a, c, g, or t
  misc_feature (174)..(207): n is a, c, g, or t
agtcgacggtaccggacatatgcccgggaattcggccattacggccgggnnnnnnnnnnnnnnnnnnnnnnnnnnnnnnnnnnnnnnnnnnnnnnnnnnnnnnnnnnnnnnnnnnnnnnnnnnnnnnnnnnnnnnnnnnnnnnnnnnnnnnnnnnnnnnnnnnnnnnnnnnngnnnnnnnnnnnnnnnnnnnnnnnnnnnnnnnnnncaacatgtggcgcggcgcgcgcgccgcggggccctcgcgaagaaacacgctttctctcagacacacacaaccgcggtgtgggggcgcgcgcgcgggggcccccagagagagaggataagaggcaaacactgtgggcccaatcatagcgtgtgtttctcctatgaggagaaacactcgcggggccagagagaacaatgagcggcgtgtgggagaaatctctctcacacacc

SEQ ID NO: 417744 - DNA, 634 bp, Homo Sapiens
  misc_feature (50)..(168): n is a, c, g, or t
  misc_feature (170)..(223): n is a, c, g, or t
  misc_feature (436)..(444): n is a, c, g, or t
agtcgacggtaccggacatatgcccgggaattcggccattacggccgggnnnnnnnnnnnnnnnnnnnnnnnnnnnnnnnnnnnnnnnnnnnnnnnnnnnnnnnnnnnnnnnnnnnnnnnnnnnnnnnnnnnnnnnnnnnnnnnnnnnnnnnnnnnnnnnnnnnnnnngnnnnnnnnnnnnnnnnnnnnnnnnnnnnnnnnnnnnnnnnnnnnnnnnnnnnnngtgtgtgggggcgcgcgcctggggccccggaaaagcctttggtgaacccattgtgcgtgtgtggggcgccgggggccccaagagagagtgtaagaggagaaaagaggtggcccaagagaggtgtgttcccacgagaggagaacaccgcggggcacgagagaaaagagaggacgggggagttctctgtcaccacaattgataaaaacaccgccnnnnnnnnncaacacagagcgagcgcgcgctatcgtcgagaaaacaaacattctcaacagggggggagacaacaagcgagagggagcgccaaaacagaggggggcagactctatatacacacagacgaggagaagtccaagaagagaggagcaccgcgaatcatctacaatattaaggccccctcgcgcggggggggag

SEQ ID NO: 417745 - DNA, 435 bp, Homo Sapiens
  misc_feature (314)..(314): n is a, c, g, or t
  misc_feature (366)..(375): n is a, c, g, or t
ctgtgtgggcgggcgcgcccggggccccgggaaaaggcttttcaaaaaccacttcgcggttgggggcgcgcgggggccccgagggaggataagaggaaacgaggggccaaagagcgggttctcccaagaggagacaacgcggggccacgaggaactagagggggcgggggatttcctccccaatataaaaaaagcggccgcggggggaaacgcggaaaggtgttcggagagaacaaaatatcccaaaaagggagggtctacaggggggggccactacagcgggggacctatatataaaagggggaggcgtccanagggagagagcgcgcggaatttatacaaatatttagcgcccccgcgaacgcnnnnnnnnnnttgacacggaaaagactgaagagcgatagatacagagacgaaaaagaagaaatgagaaac

SEQ ID NO: 417746 - DNA, 734 bp, Homo Sapiens
  misc_feature (37)..(38): n is a, c, g, or t
  misc_feature (44)..(45): n is a, c, g, or t
  misc_feature (54)..(54): n is a, c, g, or t
  misc_feature (60)..(103): n is a, c, g, or t
  misc_feature (106)..(141): n is a, c, g, or t
  misc_feature (179)..(297): n is a, c, g, or t
  misc_feature (305)..(335): n is a, c, g, or t
caaaaagtgaaagaaaacccttttgtaataatcactnnataggnngcgcctagncgtctnnnnnnnnnnnnnnnnnnnnnnnnnnnnnnnnnnnnnnnnnnnncgnnnnnnnnnnnnnnnnnnnnnnnnnnnnnnnnnnnnagtcgacggtaccggacatatgcccgggaattcggccnnnnnnnnnnnnnnnnnnnnnnnnnnnnnnnnnnnnnnnnnnnnnnnnnnnnnnnnnnnnnnnnnnnnnnnnnnnnnnnnnnnnnnnnnnnnnnnnnnnnnnnnnnnnnnnnnnnnnnntctccggnnnnnnnnnnnnnnnnnnnnnnnnnnnnnnnggggtctgggccgccttgcggcccctcgaaaaagttttctaaaaccattcggttgtgggcgccggcggccccagagggtataggtgtaaacgtgtggccaatagcggtttcccaaagggaaaaccgcgggccaggaactgagtgcggcgtgcggtttctcctcacacaattaaaaaagagcgccggcgggggggacaaccaggaggcgttctcgtgaaacaaactccaaggagggaggttccggaggggccgatacggtggagctctatcacagcggggagcttccagagggaagctagcgacatattcaaatctaacggccccgcccagctggagaaaaaactaagaggacacagtaaccacacacacagagcaccagacaaacgggagacgagagat

SEQ ID NO: 417747 - DNA, 549 bp, Homo Sapiens
  misc_feature (49)..(182): n is a, c, g, or t
  misc_feature (186)..(210): n is a, c, g, or t
  misc_feature (266)..(306): n is a, c, g, or t
agtcgacggtaccggacatatgcccgggaattcggccattacggccggnnnnnnnnnnnnnnnnnnnnnnnnnnnnnnnnnnnnnnnnnnnnnnnnnnnnnnnnnnnnnnnnnnnnnnnnnnnnnnnnnnnnnnnnnnnnnnnnnnnnnnnnnnnnnnnnnnnnnnnnnnnnnnnnnnnnnncacnnnnnnnnnnnnnnnnnnnnnnnnncatggtcgggccggccccgggcccctcagaaaagcctttcaagaaccattcgcggnnnnnnnnnnnnnnnnnnnnnnnnnnnnnnnnnnnnnnnnnccaatacgcgtggtgcccaaggagaaacccggggccaagagacaaggggcggggggtttcctccccaattaaaaaaccgccgggggggcaaccggaggggtcccgggaacaaatcccaaaggggaggtccaggaggggcaatcaccggggactcttttcaacggggaggctccaaggcagcgcccagatatcaaattaaccgcccggcctcggggggggcaaacaaaaacaacaaggacacgg

SEQ ID NO: 417748 - DNA, 325 bp, Homo Sapiens
cccgaggagggtgaagaggtgaaaagtggggccaaagagaggtgtgttcccaagaggaaaacacgggggccaagagaacaagaggggcggggaattctctctccaccaaatataaaaagacgcccgcgggggacaacacgcgagagacgggtttcttgagagacaacaaatatctccgagagagtggagagattatcgaaggaggggataaatatatacgcgggggatcttatatactacaagagggggagagcttcacagaggggagagccctcgaatattctccaaaatttaagagcccccgtatgtggggtgggacaaggcg

SEQ ID NO: 417749 - DNA, 1045 bp, Homo Sapiens
  misc_feature (50)..(164): n is a, c, g, or t
  misc_feature (172)..(226): n is a, c, g, or t
  misc_feature (442)..(450): n is a, c, g, or t
agtcgacggtaccggacatatgcccgggaattcggccattacggccgggnnnnnnnnnnnnnnnnnnnnnnnnnnnnnnnnnnnnnnnnnnnnnnnnnnnnnnnnnnnnnnnnnnnnnnnnnnnnnnnnnnnnnnnnnnnnnnnnnnnnnnnnnnnnnnnnnnntctccagnnnnnnnnnnnnnnnnnnnnnnnnnnnnnnnnnnnnnnnnnnnnnnnnnnnnnnncagttgtttcggcgcgccgccttctggcgccctacgagaaaaagcgcttttcctaagaaccaattccggttgggcgcgcgcgggggcgcgcagcttagggttgggagcgaccttgggcgcagatttacgtggtggtcccctacggagacgactccgggggccatcgaactaacgcgcgctggggagttccctacccaatataaaaaaaagccgccnnnnnnnnnaagccgaggagcgtgtgttcgtgagacaaatcctcccaacagtgggagggtcctaaggaggcgctcctcacggggggcttccatctcacaagggagagtctcccagcgggggaggcccagaatatctaaaattaaccgccgccgccgtcggtggggtggacaccgaaagaaaaagaatagagcagaagcgcgatcagaacagtagccagaggagacacaatgagagaccgccgggcggcgagggacagcaacgcaacaagacagagcgggcgacgtaggcgatgacgagagcatggaaagggagggtagcttgagtgcacactgagaaagaaagaaacgatacggggaggcccacgagtatacacacgaggacgaaagttaacaagacgcactcaagacggagaggagaatgaatcaggtgaacgagcgtcgaggagtcgacgagcgaacaggagacgacaggacatggcaaatgaaggacaaggtcaaagcgcagaagacacaagaagaagcataaagatggcaggagcgacgcggagagacaacagggcgagaaaacgaaaagccaacgagacgacgccgaatagtgacagca

SEQ ID NO: 417750 - DNA, 1295 bp, Homo Sapiens
  misc_feature (162)..(162): n is a, c, g, or t
agtcgacggtaccggacatatgcccgggaattcggccattacggacgggtactctagacctattctccaagcccgtgcttgaggttgctaggagcatgtcgagaggacatgctccttcatgcggacggacataacgccgcattacgtgtgtactatggaatngaggtgacctagagattgaatgcctaccatattcattgacactgaccgagtatggtagagccagtataagcttatcttgtaggttcactcgatcactgaagtgggcataagaggctaggatatcttgagttactatacaggagaccgtggatgataggggatatgtccgtgtcattctgccttgagtgcgctcgcgcgacacgcctgcaggtaaacctggcgaaaccaacaaggatgagtgctcactgtcagggaacagccgggaggcgccagttttggccccaaacgtggtccgagtgatgggtggacacatacttcctctacgaagactcgtggaggttgttaggcagtagtgcagatagtcctgaggcattcgcgagacagcgactgacagctgtcgaagtgaagagacagtccttaagtgagctggcacatctaggtgttccaagttcgagcctgagctagcttgccaagtagctgagtatgtgtcattcatggtcgggtcagcaactgatagatagtcggaaagtgcgtcataggtagttggattgggttgggcctttgaaggcgttggttgggggaaattcttgggaaggactggattccccactgggggtaaggacaccatggccaaagagtgggtatctcccaaagggttgcttgcaggtcccttcggattacgacatgcaaaaggggcccagcaggtcaggatgactgagacattccacggtgagactattctcactaccacctggaacagcgctggcggtccaaccctttccggataaccacccggtcggaaagcacacaaggtggagccccaccccagcgtatcacctgtcgggcccgggaaaaaaggtcgctccgaaaaaagcgtggcccaagaacaacaccccgggggttaaaaatgagcagtgtgaaagggcgcaacaagagacacggggacaaaacagatcaaggacacccggacaaagcgggacaaatagaaaacagatgtgggagggtgcatcggaaagaagcagaccgcgaagaaacgagccagcgacagcgtgctgcacaacgccaaatgaggacccgacaatagagcaggcacacaacacacgcagaatggaagccccactcacgcgagcccg

SEQ ID NO: 417751 - DNA, 880 bp, Homo Sapiens
  misc_feature (50)..(164): n is a, c, g, or t
  misc_feature (170)..(198): n is a, c, g, or t
agtcgacggtaccggacatatgcccgggaattcggccattacggccgggnnnnnnnnnnnnnnnnnnnnnnnnnnnnnnnnnnnnnnnnnnnnnnnnnnnnnnnnnnnnnnnnnnnnnnnnnnnnnnnnnnnnnnnnnnnnnnnnnnnnnnnnnnnnnnnnnnntctccnnnnnnnnnnnnnnnnnnnnnnnnnnnnntttttgggcgcgccttgggcccctcgaaaaagtttttaaaaccttcggttgggcgccgcgcggcgcccaggaagggaaaggtgagacactggggccaaatacgtgtggttcccaaggagaaacccggggccattggatcaagcgcgtggggtcttctcaaccaaattaaaaaaccgcccggggggcaaccgagacgggtcctggaacaattcccagaaggggaggtccagggagggcgcaatacggggggcccttatctaacagagggaggcccaggcgggacgcccgaaaatcttaaaattaacgcccgcgcgtggggggaaccaagacacaagcccacagagcgccaccaaaacatcagcacgcgacaaaagagagagggaggggagagaacacgggagagcgagggagcacagcggaagcgccgaaccgagaggacgggcggaagcgagccacagggcccgaagagcaggaaggaaggcagagaggagaccacacgggaaacaagacggcggacgaacagagaacgggcaaccacaagggagcaggcacaacacaaacacaaacggaaggaggaagacaagaaagacacaggcggagcgggagcgcggagcgggggggagcgtggctgggacacgaggggaggagacaggaggaggggcgacgaggcgggcggtgcggc

SEQ ID NO: 417752 - DNA, 307 bp, Homo Sapiens
  misc_feature (50)..(64): n is a, c, g, or t
ctttggggggcgcggcttgggccctggaaaaaggtttaaacaccaatccnnnnnnnnnnnnnnncccaagtaggtgaaagggaacactggggccaaagcggggtcccaaagagagaaacccggggccaaggaaaaggcgggggggtttcccaaccaattaaaaaaaccgcggggggagaacagagggggttcgggaacaaaattcagaaagggaggaaccgagaggacacaaacgggggaaccttatccaagcgggggtccaagggcaagcccgactatcccaattaaggccccgggcccggggggg

SEQ ID NO: 417753 - DNA, 449 bp, Homo Sapiens
  misc_feature (49)..(163): n is a, c, g, or t
  misc_feature (171)..(204): n is a, c, g, or t
agtcgacggtaccggacatatgcccgggaattcggacattacggccggnnnnnnnnnnnnnnnnnnnnnnnnnnnnnnnnnnnnnnnnnnnnnnnnnnnnnnnnnnnnnnnnnnnnnnnnnnnnnnnnnnnnnnnnnnnnnnnnnnnnnnnnnnnnnnnnnnntctccagnnnnnnnnnnnnnnnnnnnnnnnnnnnnnnnnnntaggcgtggtaatatcccatattcccacacgttggttctctcccctttcccaaatgttggccaaatttctaaaccgggaaatagtggactctggtggctggtctgggtaagtccctgggggtataattgggaatggtgtggtggagattgaccccctccgggtggcggggtggtttcctctccctttcccccgtggtcaacgggctaactctatggaagcaggacccagtaggggaccctttccg

SEQ ID NO: 417754 - DNA, 512 bp, Homo Sapiens
  misc_feature (50)..(86): n is a, c, g, or t
  misc_feature (124)..(217): n is a, c, g, or t
  misc_feature (236)..(237): n is a, c, g, or t
  misc_feature (245)..(245): n is a, c, g, or t
gctgagccgaaacgacgagcgcaagcgagctagtgagcgaggaagcggcnnnnnnnnnnnnnnnnnnnnnnnnnnnnnnnnnnnnnagtcgacggtaccggacatatgcccgggaattcggccnnnnnnnnnnnnnnnnnnnnnnnnnnnnnnnnnnnnnnnnnnnnnnnnnnnnnnnnnnnnnnnnnnnnnnnnnnnnnnnnnnnnnnnnnnnnnncaagcggaggctcgaatanntcaaattntagcgccccggccccggtgatgtgaaaagagcaggtgaggcgaacagaccataaaagagtgagtgaggtagagagagtggagataaatggcagagagagatagggaatcgggaagcgacggacggagaaggagcgactaggcgagtagagcgagagaggtagacaagaagaaagaagggaggacaacataacgaaagaagcggggaagtgaggatacgcaaaaacagagacaaaactacaaacaaggaagcacacccaagaagacac

SEQ ID NO: 417755 - DNA, 760 bp, Homo Sapiens
  misc_feature (55)..(100): n is a, c, g, or t
  misc_feature (104)..(139): n is a, c, g, or t
  misc_feature (189)..(308): n is a, c, g, or t
  misc_feature (324)..(373): n is a, c, g, or t
aaacaaaaaaggacgagcaagcacgttgatgtcactatagggcgctagcgttgtnnnnnnnnnnnnnnnnnnnnnnnnnnnnnnnnnnnnnnnnnnnnnngcgnnnnnnnnnnnnnnnnnnnnnnnnnnnnnnnnnnnnagtcgacggtaccggacatatgcccgggaattcggccattacggccgggnnnnnnnnnnnnnnnnnnnnnnnnnnnnnnnnnnnnnnnnnnnnnnnnnnnnnnnnnnnnnnnnnnnnnnnnnnnnnnnnnnnnnnnnnnnnnnnnnnnnnnnnnnnnnnnnnnnnnnnnccagaaaaggggaacnnnnnnnnnnnnnnnnnnnnnnnnnnnnnnnnnnnnnnnnnnnnnnnnnncaaccggtgtgtgggcgggcgactggggccccttggagaaaaaagcgtttgaagagagcacacatgggcgggaggggcgcgcgcgcgggggccccaaagtgaggataaagtggagaccacgtggggcgccaataaagcgcggggccccaaaagaggagagaagaacccggggggaaaaaaggaagaacaacagcgggcgcaggggggtttctccacaccaaatcaaaaaaagagcgcccacgggggcgggcaaccacggggagagcttctctggggacacaaaactcccagaagaggggagactcccagaggcggcaccacaggcggggagctcatatccccagggggggcgccaagggcggaccccaggaatctacccaaaaattg

SEQ ID NO: 417756 - DNA, 554 bp, Homo Sapiens
  misc_feature (49)..(162): n is a, c, g, or t
  misc_feature (172)..(234): n is a, c, g, or t
agtcgacggtaccggacatatgcccgggaattcggccattacggccggnnnnnnnnnnnnnnnnnnnnnnnnnnnnnnnnnnnnnnnnnnnnnnnnnnnnnnnnnnnnnnnnnnnnnnnnnnnnnnnnnnnnnnnnnnnnnnnnnnnnnnnnnnnnnnnnnngttctccagnnnnnnnnnnnnnnnnnnnnnnnnnnnnnnnnnnnnnnnnnnnnnnnnnnnnnnnnnnnnnnnctttttggggcgcgcgcgcctgggcccctaaaaaaagtgtttttaaaacccaattggtgtgggggcgggcggggcgccccagatggttaagggacaattgggcgccaaaaaggggtgcccaaaagaggaaaccccgggggcaaggagaaagggcggcgggggtcttcccccaaaataaaaaaccggccgcgggggggccaccccgaggggccgtgtctgaggacacaaactcccagggaggggaggctcgcaggggagcgagcaaacgggggctctcaatacaccagcggggggctccgcacgggcgagcgggccagaat

SEQ ID NO: 417757 - DNA, 658 bp, Homo Sapiens
  misc_feature (49)..(92): n is a, c, g, or t
  misc_feature (95)..(130): n is a, c, g, or t
  misc_feature (168)..(462): n is a, c, g, or t
cggaggggcaagaaagccgctggatgtcatatgggcgctagccgttagnnnnnnnnnnnnnnnnnnnnnnnnnnnnnnnnnnnnnnnnnnnncgnnnnnnnnnnnnnnnnnnnnnnnnnnnnnnnnnnnnagtcgacggtaccggacatatgcccgggaattcggccnnnnnnnnnnnnnnnnnnnnnnnnnnnnnnnnnnnnnnnnnnnnnnnnnnnnnnnnnnnnnnnnnnnnnnnnnnnnnnnnnnnnnnnnnnnnnnnnnnnnnnnnnnnnnnnnnnnnnnnnnnnnnnnnnnnnnnnnnnnnnnnnnnnnnnnnnnnnnnnnnnnnnnnnnnnnnnnnnnnnnnnnnnnnnnnnnnnnnnnnnnnnnnnnnnnnnnnnnnnnnnnnnnnnnnnnnnnnnnnnnnnnnnnnnnnnnnnnnnnnnnnnnnnnnnnnnnnnnnnnnnnnnnnnnnnnnnncaaaacgtgtgatgataaaaagcgccataaacataatatcaaaccatgctactctgtcttaaattttcaaatagcttgggcacctgaaatacaaaattaagtgtggaaaacacagtttttaactgtgtgtgctcacaagctaattaatgtataagttctgccatgtgacacggttaccacatacagttcattttcg

SEQ ID NO: 417758 - DNA, 649 bp, Homo Sapiens
  misc_feature (50)..(164): n is a, c, g, or t
  misc_feature (170)..(202): n is a, c, g, or t
agtcgacggtaccggacatatgcccgggaattcggccattacggccgggnnnnnnnnnnnnnnnnnnnnnnnnnnnnnnnnnnnnnnnnnnnnnnnnnnnnnnnnnnnnnnnnnnnnnnnnnnnnnnnnnnnnnnnnnnnnnnnnnnnnnnnnnnnnnnnnnnntctccnnnnnnnnnnnnnnnnnnnnnnnnnnnnnnnnntatgtgtgtggggcgcggcccggggcccggaaaaaagtgtttttaaaaacccattctcggtgtggggcggcggggcgccccaagggtggtttaatgtggcgcaacctggggccaaaagagtgggtccccaaaggagaaaccccggggccatggacatataggggcgctgggtgttcccccccaatataaaaaagcggcgcggggggagaagcccgggctctgttttgtgagaacgaaacaccaggagtgaggagctgtccggaagcggccgaaacgcgggggcgtcatacacacacgcggggcgtccacggcgcagcgcccagaatacacaaaattaaccgccccgcggccgcgtggggggtaggaagcgcacaaagcgcgaacaactgacgacagaacagcagcgaaaacagatgagatagtataaaaacaccagccaagaagtag

SEQ ID NO: 417759 - DNA, 695 bp, Homo Sapiens
ctcgtggtcgggccgcgccttcgggcccttggaaaaagttttcaagaccaattcggtgtgggcggcggcgggcccagtagggtagggggggaccatggggcaatagcgggctcccaaaggagaagcggcgccagagacaacggcgctgggttccaccccaataaaaaaccgcccggggggtcaccagggagggcgccggcgacaaaactcccaagagggcgcccccagggggggccataacggcgctcgtatccacaaggggggctccaaaggggcagccggaaaactaaaaaatatacgcccccggaccgaggggggggtcaccccaacaccaccacacggaacgctccagccaccacggcacacgacaaggagggcgcaagcaccatacgcgcccacctgccgccagccgagccaccacgcggcacacacaggacgggcggcacgggggtacgccacgcgccgccgcgcgaggcagcaggtgccgcgaccgccgacgcacgccagcaggcggcccaggcgagcgcagccagcagagccgcacgcgtgccgggacgacagggcaggaccgccggggcgaagggaccagccggccgcaccgagggcagcgctcaagccagacgccacccgaaggcaagggccacgcaccgacgcacacaccgagacggtcgcgcccgtcagccagcgaccagcaa

SEQ ID NO: 417760 - DNA, 754 bp, Homo Sapiens
  misc_feature (49)..(175): n is a, c, g, or t
  misc_feature (177)..(247): n is a, c, g, or t
  misc_feature (520)..(529): n is a, c, g, or t
agtcgacggtaccggacatatgcccgggaattcggccattacggccggnnnnnnnnnnnnnnnnnnnnnnnnnnnnnnnnnnnnnnnnnnnnnnnnnnnnnnnnnnnnnnnnnnnnnnnnnnnnnnnnnnnnnnnnnnnnnnnnnnnnnnnnnnnnnnnnnnnnnnnnnnnnnnngnnnnnnnnnnnnnnnnnnnnnnnnnnnnnnnnnnnnnnnnnnnnnnnnnnnnnnnnnnnnnnnnnnnnnnntggtgttgtgggccgcctctcgggccccggaaaaagggttttttacaccccccttctgtgctggggcgcgcgggggccccaagtgagtgtgcgcaacaggtggcccactacaggcgtgtccccagcggagaaacccgggccagacccacggcgggcggggttcccccccaatagaaaaacccgcccggggggaacccccgccgccgttgcggagacaaaacccccaaaggggggcgtctcgagcggggccaaacaggggggaccaataaacannnnnnnnnncccaacgaagaagaggccaggttaataaaaaaattacccacgccgcggtggggagacacacccacagtcggcgaacgaacccaaacgacacgaccaagagagacaggcctatacacaagacccagccagacgcgagcgacgcaacaccagacctacgaagtacgcagacaaccacaagcagcacgacccgcaccgacgaaacacacgcagcaaccgaaagacccg

SEQ ID NO: 417761 - DNA, 537 bp, Homo Sapiens
  misc_feature (41)..(83): n is a, c, g, or t
  misc_feature (87)..(122): n is a, c, g, or t
  misc_feature (160)..(279): n is a, c, g, or t
  misc_feature (286)..(350): n is a, c, g, or t
gagaaaagaactggaaagtcattagggcgctagctcgtagnnnnnnnnnnnnnnnnnnnnnnnnnnnnnnnnnnnnnnnnnnnccgnnnnnnnnnnnnnnnnnnnnnnnnnnnnnnnnnnnnagtcgacggtaccggacatatgcccgggaattcggccnnnnnnnnnnnnnnnnnnnnnnnnnnnnnnnnnnnnnnnnnnnnnnnnnnnnnnnnnnnnnnnnnnnnnnnnnnnnnnnnnnnnnnnnnnnnnnnnnnnnnnnnnnnnnnnnnnnnnnnntctccannnnnnnnnnnnnnnnnnnnnnnnnnnnnnnnnnnnnnnnnnnnnnnnnnnnnnnnnnnnnnnnncaattgttgtggggccgccctgggccccagggaaaagctttcttaaacacccctcgtgtggtggcccgcggggcccccaggtaggtaatagggagacacaagtgggcgacaacagcgggggtccccaaagagaggagaactcggggagcaacagacaaaagggggcgggagagttcttccacccaat

SEQ ID NO: 417762 - DNA, 973 bp, Homo Sapiens
  misc_feature (52)..(95): n is a, c, g, or t
  misc_feature (99)..(134): n is a, c, g, or t
  misc_feature (172)..(291): n is a, c, g, or t
  misc_feature (297)..(326): n is a, c, g, or t
cacacaacaacacacgaccccaactgtaatcatatagggcgctagctcgtannnnnnnnnnnnnnnnnnnnnnnnnnnnnnnnnnnnnnnnnnnnccgnnnnnnnnnnnnnnnnnnnnnnnnnnnnnnnnnnnnagtcgacggtaccggacatatgcccgggaattcggccnnnnnnnnnnnnnnnnnnnnnnnnnnnnnnnnnnnnnnnnnnnnnnnnnnnnnnnnnnnnnnnnnnnnnnnnnnnnnnnnnnnnnnnnnnnnnnnnnnnnnnnnnnnnnnnnnnnnnnnntctccnnnnnnnnnnnnnnnnnnnnnnnnnnnnnntttggggggggccggggcccgaaaaaagtttctaacagacaactttcggtgggaggccgggggcccaagagtagggatacagtagacactggggccaacgaggctggttctccgaggagagaccccgggggccaggaagaccaggcggcttggggttccctcaccaatataaaaagacgcgccgggggggacagcaccgagcgggttctcggacaaacacccccagaagggggagcgtcaaagaggggcacaatacggcgggctcctatacacccaggggggcgcaccagcgggaccgcgcggattattaaaattaacgccccgccgccgtggggggaggaaagaaacacaaccgcaccgccagcacgccatagcacggaacacaaaaaagcaagtacaacaagaacacagactacaaggacggcgaaaacagaggaccaggcggcaggaaacaccaacagacaggaaacgcgcgcacaacacgacgcaagacgtcagcacaacccagcgagaacggcgcgaagccgccgacggagacagaagaaaaccagaagagaccacggacgcgacaggagccggcaccgaggcgcgcaggacaaccacgagggcagcgcacgccaccgccgccgagacagcaccagcaacac

SEQ ID NO: 417763 - DNA, 612 bp, Homo Sapiens
  misc_feature (50)..(168): n is a, c, g, or t
  misc_feature (173)..(214): n is a, c, g, or t
  misc_feature (281)..(308): n is a, c, g, or t
  misc_feature (387)..(399): n is a, c, g, or t
agtcgacggtaccggacatatgcccgggaattcggccattacggccgggnnnnnnnnnnnnnnnnnnnnnnnnnnnnnnnnnnnnnnnnnnnnnnnnnnnnnnnnnnnnnnnnnnnnnnnnnnnnnnnnnnnnnnnnnnnnnnnnnnnnnnnnnnnnnnnnnnnnnnnccagnnnnnnnnnnnnnnnnnnnnnnnnnnnnnnnnnnnnnnnnnncgtgtgtgtgcggcgcgcgcccttgggcccccgcgaagaagctttccaaaacacacattgcgcggtnnnnnnnnnnnnnnnnnnnnnnnnnnnncaacggtgaacacaggggcgcccaataagcgcgtggggtcccataaggcgcagacacctgggggccaagcgagacaaannnnnnnnnnnnnactccacacacacaaatataaaaagagcgccgcgggggagaaacacagggagggcgcgtctcgtggaacacaactctcacagaagtggggaggtccgaggagggggaccacataacggggagagctcatatcacacacagaggggaggctcacaaggcgagaggcccggaatattccaatatataaccgccccgggcaccggggggggagcgt

SEQ ID NO: 417764 - DNA, 454 bp, Homo Sapiens
  misc_feature (50)..(164): n is a, c, g, or t
  misc_feature (171)..(198): n is a, c, g, or t
  misc_feature (212)..(242): n is a, c, g, or t
agtcgacggtaccggacatatgcccgggaattcggccattacggccgggnnnnnnnnnnnnnnnnnnnnnnnnnnnnnnnnnnnnnnnnnnnnnnnnnnnnnnnnnnnnnnnnnnnnnnnnnnnnnnnnnnnnnnnnnnnnnnnnnnnnnnnnnnnnnnnnnnntctccannnnnnnnnnnnnnnnnnnnnnnnnnnncaccaaaggaccgnnnnnnnnnnnnnnnnnnnnnnnnnnnnnnncgtgtgttgggcgcggcgcgccgccgcgggcgccccgcgaaaaaggtttttataaacacccttgcggtggggggcgcgcggggcgccccatgggggtaagggcaacaagcggcggcccaaaagggcggggtttcctcagagaggggaaactccgccggggaccagagcgacacagagggggcgcggggaattctctctctccccaaatatat

SEQ ID NO: 417765 - DNA, 626 bp, Homo Sapiens
  misc_feature (50)..(135): n is a, c, g, or t
  misc_feature (276)..(276): n is a, c, g, or t
  misc_feature (475)..(475): n is a, c, g, or t
agtcgacggtaccggacatatgcccgggaattcggccattacggccgggnnnnnnnnnnnnnnnnnnnnnnnnnnnnnnnnnnnnnnnnnnnnnnnnnnnnnnnnnnnnnnnnnnnnnnnnnnnnnnnnnnnnnnttgtcgggccggccttcgggccctcggaagaaagtctttctaagacaccaatctcggttggggcggcggcggggcgccccaaagtagagggtcaaacgtgcgaacacatagtgggtcaaataaacgcgtgggtttcccttngaggaaagaactccggggggtcatatgggcaactagaggtggctggggggtaatctcttcaaaccagatattaaacaaaaaacacgcggcccgcgggcgggcacagcacccccggagcggcggtcgctgtggaagacccaaaaatcttcccagcagagtggcgagcggctcccttggagaaggggctccaactaaaaanccggtggcgggatctccttaccttccaccaccacgcgggagtgtctcccaacaaggcgcgagaaaggcctttccgaggaatatatcctccaacacatgttataaacgcgggccccccgggtctcttggggcgcccaacgcgaagccacaca

SEQ ID NO: 417766 - DNA, 549 bp, Homo Sapiens
  misc_feature (45)..(95): n is a, c, g, or t
  misc_feature (99)..(134): n is a, c, g, or t
  misc_feature (172)..(279): n is a, c, g, or t
  misc_feature (292)..(292): n is a, c, g, or t
  misc_feature (306)..(339): n is a, c, g, or t
acccactagcggcgaaagaactttgatgtcactatagggcgctannnnnnnnnnnnnnnnnnnnnnnnnnnnnnnnnnnnnnnnnnnnnnnnnnnccgnnnnnnnnnnnnnnnnnnnnnnnnnnnnnnnnnnnnagtcgacggtaccggacatatgcccgggaattcggccnnnnnnnnnnnnnnnnnnnnnnnnnnnnnnnnnnnnnnnnnnnnnnnnnnnnnnnnnnnnnnnnnnnnnnnnnnnnnnnnnnnnnnnnnnnnnnnnnnnnnnnnnnnnagcgaagaccccngttctcccaggacnnnnnnnnnnnnnnnnnnnnnnnnnnnnnnnnnncacatatgtgtgtgcggggcgcggcctcggcgcctcggaaaaaaggttttttaaaaccaaatccgtgttgggggcgcggggcgggcgcccaaagtagggtaagtgggagacacatggggcccaataaggcgtggttcccaaaagggaacactcgtggggccaagcgagcaccataggggcgcgtgggagatttccctctacaccaaaatt

SEQ ID NO: 417767 - DNA, 470 bp, Homo Sapiens
  misc_feature (50)..(131): n is a, c, g, or t
  misc_feature (133)..(141): n is a, c, g, or t
  misc_feature (311)..(319): n is a, c, g, or t
agtcgacggtaccggacatatgcccgggaattcggccattacggccgggnnnnnnnnnnnnnnnnnnnnnnnnnnnnnnnnnnnnnnnnnnnnnnnnnnnnnnnnnnnnnnnnnnnnnnnnnnnnnnnnnntnnnnnnnnnccgcgggcccccggaaaaagcttttaaaaacacacatcgcggtgggggcgcgcgggggccccaggagggtaagggaaaccgtggggcaaaagcgggtgttcccagggagaaaccgggggccaggaacaaggggcgggggatttctccccacaatataaaaaaccgcgccnnnnnnnnnaaaccgcggagcgggtttggagaaaaatctcccaaagaggggaggggttccggaggggccccatacggggggcctctatataaaaagggagaggccacaaggaggaggcccgagaattctcaaaatataagcgcccccgcgcttcgtgggg

SEQ ID NO: 417768 - DNA, 1033 bp, Homo Sapiens
  misc_feature (295)..(314): n is a, c, g, or t
  misc_feature (323)..(407): n is a, c, g, or t
tttttatagaacccatgcgcgtgggggggcgcgcggggacccagatgaggctaggtggacagggggcccaaaggcggtcccaagggagaaacgcgggacaggaacaaaggggcgggagttcctcacccccaattagaaaaaacgcgccgcggggggaacaccagagaggcggttcgtagaacaaaccccagagaggggaggcccaagaggggaccacacgggggggcactcatacacccccggggggcctccaaagaggaaaggccagcgaatattacaaaattatacccgcccnnnnnnnnnnnnnnnnnnnnaggcacacnnnnnnnnnnnnnnnnnnnnnnnnnnnnnnnnnnnnnnnnnnnnnnnnnnnnnnnnnnnnnnnnnnnnnnnnnnnnnnnnnnnnnacgctgagcaaagcaacagcgcacagacgcaccaagcaaccaccgacacgacgccaggaccaaccaagccgaccgcactagccacgaaaaagcaacgtacgcaacgacaggacggcagccaaaccaagacacgacagacccgcgcgcgcaccaccagaccggccgagacagaaccgaacccaacgcaacacgcagcaacacgacgcacaccaggcgcagaccacaaaactaaaaggagaaagaacagaacataccaaaaaacgacaaggagcacagaagacgcgacgaggacaacggcccagaccgaggcgcggcccggaccgccagccaacgacaaccgagcgcccgccaagagccccacgccgacgactgacacatgccacgagacacgcactgccagcagacacaccacgcacggaggacgaccaccagcgacaacacaacaaaaagaaaacgcacccaccgatagcgagtcagcaaacagcgaacagacaaacctcagacagacacacagacgcacaaagaaccaaccacaaaccgaacacaccagaacaggcaggcgcaccgacaccaaccacgcaaccacacgacaacacggcggaggagcacaacgagaaacccgaccg

SEQ ID NO: 417769 - DNA, 1059 bp, Homo Sapiens
  misc_feature (50)..(201): n is a, c, g, or t
  misc_feature (630)..(673): n is a, c, g, or t
  misc_feature (773)..(804): n is a, c, g, or t
  misc_feature (953)..(1009): n is a, c, g, or t
agtcgacggtaccggacatatgcccgggaattcggccattacggccgggnnnnnnnnnnnnnnnnnnnnnnnnnnnnnnnnnnnnnnnnnnnnnnnnnnnnnnnnnnnnnnnnnnnnnnnnnnnnnnnnnnnnnnnnnnnnnnnnnnnnnnnnnnnnnnnnnnnnnnnnnnnnnnnnnnnnnnnnnnnnnnnnnnnnnnnntggggggggcggcctcggggcccttggaaaaaagtttctataaaaccaattcggttggggcggcgggggccccaagtaggcgaaggcggacacgggcgccaaaggcgggctcccaaagagaaaccgggggcaagacacaaggggccgggggttctctcacccaatataaaaaacgcgccgcgggggggacaccgcggagcgcgtgtcctgggacaacactcccaagaggggacggccgaggaggagacaacagcggggcatctattcaacggggggccaaagggagagcccgagattccaaaattaacggccccggggcgcggggaggggggccaaacagcagcacgaaggagagacagaacaaccacaccacggcagaaagcagcgagagcaaggacgacaacgaacacacaagacgcaagcgcaggnnnnnnnnnnnnnnnnnnnnnnnnnnnnnnnnnnnnnnnnnnnnacgagcgagacaacgacccgcaacgacgccgaccgagcaaaaagcacgcacacgaggcacacaagaagacaagcgaaaaagcacagagcagagcaagagnnnnnnnnnnnnnnnnnnnnnnnnnnnnnnnngccaagcaagcagcgcccacggcgcgagacgaccacataaaccgcgagcgccacgacgcagaacaacacacagacaccgcgggtagaacacgaggacacacccgaccggccaacagccagccccagggcgccgctaccacgcacgcagnnnnnnnnnnnnnnnnnnnnnnnnnnnnnnnnnnnnnnnnnnnnnnnnnnnnnnnnnggcagccacgaagaaaaacacatacaaaccaacactagcgatcacaccac

SEQ ID NO: 417770 - DNA, 984 bp, Homo Sapiens
  misc_feature (50)..(339): n is a, c, g, or t
  misc_feature (341)..(371): n is a, c, g, or t
agtcgacggtaccggacatatgcccgggaattcggccattacggccgggnnnnnnnnnnnnnnnnnnnnnnnnnnnnnnnnnnnnnnnnnnnnnnnnnnnnnnnnnnnnnnnnnnnnnnnnnnnnnnnnnnnnnnnnnnnnnnnnnnnnnnnnnnnnnnnnnnnnnnnnnnnnnnnnnnnnnnnnnnnnnnnnnnnnnnnnnnnnnnnnnnnnnnnnnnnnnnnnnnnnnnnnnnnnnnnnnnnnnnnnnnnnnnnnnnnnnnnnnnnnnnnnnnnnnnnnnnnnnnnnnnnnnnnnnnnnnnnnnnnnnnnnnnnnnnnnnnnnnnnnnnnnnnnnnntnnnnnnnnnnnnnnnnnnnnnnnnnnnnnnnttgtgtgggcggcgggcacctggaaaaagcttttaaaacactcgcgtggggggccgcgcgggccccatgaggttcaagatgaacacgtggggtccaacgagcagttaccagaaggaaaaactcgcggtccaggacacaagtggcctggggttcctcccccatataaaaagctccgcggggcacacacgaaggggtctgacagcaccaccaagaggggcgtcggcggggacaacggccacacaccacgggggctcagcagggacccgaaaataaaatagcccgggcggggtgcgacgagcacggcgaaagaagaacaaagaccaaaggacgacaacagcggagcgacgcgcggcgaacactgccaaacctcagccaccgacgcgaacaccacacccaacagaacacggcgcacgcgatacgagaagagcacagcaccagtccacgacacgcttcgagtacagcagacgcaaccactgcgaccggccatcaaactccgagagcaccgcaccgcgacccgaagaggaaaagaagaatagaacgaagacctcaacaagcccataacaaaacgcagcagccacgcacagcatgtccagcccggccaacaagcacgcgt

SEQ ID NO: 417771 - DNA, 802 bp, Homo Sapiens
  misc_feature (50)..(176): n is a, c, g, or t
  misc_feature (182)..(239): n is a, c, g, or t
  misc_feature (426)..(436): n is a, c, g, or t
  misc_feature (569)..(727): n is a, c, g, or t
agtcgacggtaccggacatatgcccgggaattcggccattacggccgggnnnnnnnnnnnnnnnnnnnnnnnnnnnnnnnnnnnnnnnnnnnnnnnnnnnnnnnnnnnnnnnnnnnnnnnnnnnnnnnnnnnnnnnnnnnnnnnnnnnnnnnnnnnnnnnnnnnnnnnnnnnnnnnggaacnnnnnnnnnnnnnnnnnnnnnnnnnnnnnnnnnnnnnnnnnnnnnnnnnnnnnnnnnntgtggtgggggcgcgctctgggaccgagagaaaaatctttagagaacccattcgggggaggggacgcggggcaccccatatgatgttaaagcgcacacggtgggcacagaggggtgtcccaaagagagacaccccgggcgacaaaagaacaaacgcgggcgggaaggctctctcacacacatatatnnnnnnnnnnnccccggggggggaacaccaccagaggcgtgtttatgagagaacaactctccaagagaggggcggacacagaagggcggcacaaacagggggagaaacaaacacaacggagaggactccaagagcgagagcccnnnnnnnnnnnnnnnnnnnnnnnnnnnnnnnnnnnnnnnnnnnnnnnnnnnnnnnnnnnnnnnnnnnnnnnnnnnnnnnnnnnnnnnnnnnnnnnnnnnnnnnnnnnnnnnnnnnnnnnnnnnnnnnnnnnnnnnnnnnnnnnnnnnnnnnnnnnnnnncgagaaaagacagagcaacaaaaggaaaaacaaaccgagacgaaagaagagaagaaacacaaccaaacataagag

SEQ ID NO: 417772 - DNA, 175 bp, Homo Sapiens
  misc_feature (92)..(127): n is a, c, g, or t
gccggagacaagaactggtaaattcactattaggggcggccttagttgcgagcgaacgacgagcgcagcgatcatgagcgaggaagcggcgnnnnnnnnnnnnnnnnnnnnnnnnnnnnnnnnnnnnagtcgacggtaccggacatatgcccgggaattcggccattacggccgg

SEQ ID NO: 417773 - DNA, 664 bp, Homo Sapiens
  misc_feature (50)..(169): n is a, c, g, or t
  misc_feature (172)..(202): n is a, c, g, or t
agtcgacggtaccggacatatgcccgggaattcggccattacggccgggnnnnnnnnnnnnnnnnnnnnnnnnnnnnnnnnnnnnnnnnnnnnnnnnnnnnnnnnnnnnnnnnnnnnnnnnnnnnnnnnnnnnnnnnnnnnnnnnnnnnnnnnnnnnnnnnnnnnnnnngcnnnnnnnnnnnnnnnnnnnnnnnnnnnnnnntattgggcggcggcgcgcgcccgcggcgcccggaaaaaagtttcttaaagacacacaatcgcggtgtggggcgcgcgcgggcgccccaagtagggtaacgtggcagacacatgtgggcccacaaagcggtggtcccccagaaggggaacacccggggccaaggaacaaaggggtgtgggagttcctctccccacaaatataaataaaagcgcgcgcggggggggacaacagggagcggcgtcctgtgagcaacaacactctccaagagagggggggcgtccagggaggcgacattacggggcgactaaataacaaccagggagcgctcccacaagggagccgcccgaattgaatatatcaaaaatatcacccccccgggccgagtggagaaagatagagacaatgaaacacaaccgcgaacaaagtaaacaacgacgagacaatcaagacagatacacaagg

SEQ ID NO: 417774 - DNA, 666 bp, Homo Sapiens
  misc_feature (264)..(264): n is a, c, g, or t
  misc_feature (333)..(342): n is a, c, g, or t
  misc_feature (364)..(364): n is a, c, g, or t
caagggtggcggggcgcgccgcgggccccgcgagagaaagagtttctatagaaacaatctgcggtgtgggggggcgggcgggcccccagtgaggcgataacggggaacacatgtgtgcgctcacaataagcgtggggctcccatagaggagagacactccgggggccagagtgacactaagaggtggcggtgggggacttctctctcacaccaagatttaaaaaaaacaccgccgcggggggggaacaccagagagagggcgtntctcgtgtgaaaaacacaaactctccagagagaggggcgagctccggaggaggggccaccgaaataacnnnnnnnnnnaggctctaataatctaccagangagaggggaggcgtcgcccccaaaaacggagcagagaagcgctccccgaagatatattctcaccataaatattatataagccgcgcccgcccgggggcctgcgggggggatggggccacgacacagagacaagacatagtgagagcgacggcagctagcaaacactagacagaacaccacaacagacacaacagccaatacacgagttaaagctcgaccataaaccagacaccgaacaacaaacacaagcacaaacaccagacagtcagtaacctacgaaggcgaaaacaacaacgcaacgg

SEQ ID NO: 417775 - DNA, 718 bp, Homo Sapiens
  misc_feature (50)..(164): n is a, c, g, or t
  misc_feature (170)..(195): n is a, c, g, or t
  misc_feature (256)..(271): n is a, c, g, or t
  misc_feature (633)..(633): n is a, c, g, or t
agtcgacggtaccggacatatgcccgggaattcggccattacggccgggnnnnnnnnnnnnnnnnnnnnnnnnnnnnnnnnnnnnnnnnnnnnnnnnnnnnnnnnnnnnnnnnnnnnnnnnnnnnnnnnnnnnnnnnnnnnnnnnnnnnnnnnnnnnnnnnnnntctccnnnnnnnnnnnnnnnnnnnnnnnnnncaaacaaggtggtgggccggcccggcggccccggagaaaagctttcttaaaaccaatcgcnnnnnnnnnnnnnnnnccccaggagggtaagaggagaccagtgggccaaagcgcgggttcccataagagagaaaacccggggccaaggaacaaagggcggaggggaactccccacaccaaatttaaaacaacgcgccgcggggggcgcacacccggacgcggtttggagacccaaatctccacaagagggcgcgagtgcccacgaaggcgcaccacaaccggcgcgagcgccaatctcaacagcaggggggagagtctccaaaaagagcgagaacccctcggaaattatctaagaatttacaaacgcccccggcgaactgtggggggtgtccccccgtaccacgacacacacaactcaccaaaatacaagcataccgnaacacaagcccctcaacctaataactgacacgaccagaacacctccacaccaccatctacacccgcgaagaagcactacgcacgg

SEQ ID NO: 417776 - DNA, 793 bp, Homo Sapiens
agtcgacggtaccggacatatgcccgggaattgccctcgtaaaagctgtctatgcaccattcttatggcggcgcgggtccaggtgacggtaatggtggaacgtggtcatagctgttgccttagtgaggatccgtaggtcatgacataggtgctttgccattcatctgcgcgaataacacaaacggacgccagtgcgcgttactcggagtctgaattacagtagcgaatgtcgcaagaatggcagatttctggtaggggtcgatataactaggaatcgtgaatctaacaagtgagtccaaagcctgaagacgtcgaataatcagaattatacagcgcccgtccgctgaaggacagtcagccactttacacttacatcgaacaacttggggctaacaatcgccccgtaatcacatgtaaggcatttgtgttgccaaaatttcctgggttgggaaactggggttgaccaaactattgcttgtgagcccaaggtgggctaaacattgcccttggtttccagcgggcattggacacagtccaccccggtaaagggaattgggcaattgcccaaggtggaaaaccatcagcttgccttggacggcttctggtgtacttgctatctctaacctacacaaacttctgttccaaacttgaacaaggccccttgcggccatgccctcctctcaggatggtcttaaccaaacactttgggtgggtatttggatactgtgtttccttgtttgcgccagaagttgggagactgtggttggttctacaaaaccccggtattggtggg

SEQ ID NO: 417777 - DNA, 481 bp, Homo Sapiens
  misc_feature (365)..(374): n is a, c, g, or t
ccagtgtgtgtgcgggccgccccgcggcccccggaaaaagcttttcaagaacccatgcgcgttggggcgcgccggggggccccaggagggtaaaggggaacacagtgtggcgcaaagaccgggtgtcccaagaggaagaacccggggcccaagcgcaccaaggcgcgggggcattccccacaccaaatataaaaacaagcgccccgggggggcacaacccggaagggttcctggaacaaactccacaagaggggaggtccgagagagggccattaacggggggattcatacaccacacggggggcgctccaagagagagagagctcccggatattctcaaaaaattttccgccccccggctctcnnnnnnnnnntcacggtacagtcagtggatactgatccacgctaccacaaacagcagaagaaccagcgcgtaaacataagcacacaagaccattaaaccaagcaatacgcgagcgag

SEQ ID NO: 417778 - DNA, 835 bp, Homo Sapiens
agtcgacggtaccggacatatgcccgggacttcggcccattacggtccgagcattctttggagactgccgtgaccagatagttacgtgagcatctcctttggctgtcagctaggctagtcactgcgcatgaccatgagtggtggggtcatcatgtatagaaatcgctcaggcagaattgctgtcagtgcttggacagacctccagagtgggggattctcgtcgaacattggacttgttgtctatgcgaaagaggtgtccacagggtagcacgaaatcgctagttcatgcaccctgaaatgactcgtgcaagttttggtacgcctggacatacgggcgcaaatcagagcttgcagttcatcagaaaaaaaattctccatgtgtgacaaccatattggtattctcagtgtgcggtggtttactgcgtgatgctagactgtgtatgtaagtttcatgcgatacaggagtgtggagattccagatgggatattcgatagaccaggtgccggtgtctcgtcctagatatctcctagttggggaagcatgaaccaggataccaacacgaggatatggccggagaccatatgggtgggtctccttaattgctgggttatgatgatatggggcctcacattttccaaaacttgtccaatctggtaactaattttggagtgaagaagcatgttcatggagcccgttcccaatcaagttcgtattatgggagagacatatgtctggaattatggagtggaattaaatgaactgagtaaacatggtttgggtggctaagagaagaggtctggaaaggctggtaaaagaggtccttggattgtggaa

SEQ ID NO: 417779 - DNA, 441 bp, Homo Sapiens
  misc_feature (50)..(168): n is a, c, g, or t
  misc_feature (184)..(197): n is a, c, g, or t
  misc_feature (238)..(250): n is a, c, g, or t
agtcgacggtaccggacatatgcccgggaattcggccattacggccgggnnnnnnnnnnnnnnnnnnnnnnnnnnnnnnnnnnnnnnnnnnnnnnnnnnnnnnnnnnnnnnnnnnnnnnnnnnnnnnnnnnnnnnnnnnnnnnnnnnnnnnnnnnnnnnnnnnnnnnnagaaaaggcaacaacnnnnnnnnnnnnnngaaaacacaaaggaaacctcaaaacaacaagacaacaaacnnnnnnnnnnnnncatgttgttgggcgcgcctcggccctaggaaaaaaggttttctaacaaccacactgcggtggggcgcggggggcccccaaggggatctatgagcaacacagctggccgcaaaagggggggcccccagagaagaaacatccggtgagcagatagaacaaacggcggtgggggacttccccccaccacagaat

SEQ ID NO: 417780 - DNA, 1127 bp, Homo Sapiens
  misc_feature (52)..(85): n is a, c, g, or t
  misc_feature (89)..(124): n is a, c, g, or t
  misc_feature (167)..(214): n is a, c, g, or t
  misc_feature (216)..(245): n is a, c, g, or t
acccaccaaacgaatgatcaatattgggcgctagctcggcgcagcgaaggannnnnnnnnnnnnnnnnnnnnnnnnnnnnnnnnnccgnnnnnnnnnnnnnnnnnnnnnnnnnnnnnnnnnnnnagtcgacggtaccggacatatgcccgggaattcggccattacnnnnnnnnnnnnnnnnnnnnnnnnnnnnnnnnnnnnnnnnnnnnnnnncnnnnnnnnnnnnnnnnnnnnnnnnnnnnnntttgggggcggcctgggcccctgagaaaaagatttctaaacaccaactcggttgggcgcggcggcggcgccccagcgatggctctaggtcgaccatggggtcaacaacggtgtcccagaggagagaacccgggggccaatgacaaaaggcggctggggttttccccacccaacatattaaaaaaacgcgccggggggcgacaacccaggagacggtgttctgtgtacaccaacaactcacgacgaaggggcaggatcgcggaagggcacaacactacgggggcgactctcatatcgacaccaggggggagaggtcgcccaaggcggagcgccgcgagaaatatattaacaaaattaaaggcccccgccgcacgcggtgggagaaaccgaacaaacacagtaacgagacaacaaccagaccggacgacgatctcgcagacaaagcagcagactagcaagacatcgaccagactacgagcacgacctagcagagcagacgacagacgacagcaagcaagacgcgcgacgaccgcacagcagcaacccaacactatgcagcgcgtagcgcagacggagcgacaggaagggcgcgggacgacgcgcccacagacgagctggacaaccacgactccaccaggcagcgcgagatcgacgggacatacgcacgagcggcaagacggcggcgcaagaaggaacgccagcgctacacaaataccaccgacacgaggctgcgggcagaccgacagcatgagcgacgagcgacgacaagacaagacagagagaactcaagaacagcaggccaaagcgacacactcgacaacacaagccagacgcaccagcaccaacgcagcgacaccaccacacaaccacacgacacacaagc

SEQ ID NO: 417781 - DNA, 1111 bp, Homo Sapiens
  misc_feature (57)..(99): n is a, c, g, or t
  misc_feature (103)..(133): n is a, c, g, or t
gagcccgcgcaccaccaacacaccctggaaatcactatagggcgctagctcgtcagnnnnnnnnnnnnnnnnnnnnnnnnnnnnnnnnnnnnnnnnnnngcgnnnnnnnnnnnnnnnnnnnnnnnnnnnnnnngttatcagtcgacggtaccggacatatgcccgggaacaggagtcaagcgagctcgatatcaaattacgccccgccctggaagatcgcaacgcacactacgtaacgaacccacagtagaatcggaaagcagagaagacagaaatagaacaaaagcaacgaactcggcaaccacggcagagaaaggacgacgacaccgaccgcgagccgccaaggacggagtgaagagaagagaaaccaggcggaccacagagcatctagctgcgcggggggcgacacgcagcccggctccagaccgaccgcgccacccggcaaacccgccgacagggagcgggaagcggccaggcccgcccgaacaggagccgcgcggccgcgcgaagcaaccgcagccaccgacaccggggggacgagacgaggaggacaggcagccacagaccgagcggggcgaccgcacaccgcgacaccgcgcgcacgcccgcccgccgccggcaaagcgcgagcaccggagcgcacgaacacagcaagcgccaaacagagaacgggcaacacgaccacccagtaccgccgccggccggacagaacgaccagcagaagagcacacagcacgaggggcgcgcacgcgcgcaccgcaccacgcagacaccaggacgcgcccccaccggcacctcacccaagacgcgacaccgcgggcggggagtagaagcggcagactagcaccgcgaagaaccgccgccgcgcgagcgcaggggcggagagcgagcggctagagcgagcggcgccgcggcacacgcaccgatcgcgaactaggcggcacagacggaggcagcccgagggacgcacgagcggcgcggcggcgcagaggcagcgcacggagaagagaaacagagggagagagacgagacagacaaccacgccagccagaacagcacacggcgcgaaaaccagcagcaggacgcgcgcgaccgagaagcagaggaagag

SEQ ID NO: 417782 - DNA, 734 bp, Homo Sapiens
  misc_feature (326)..(326): n is a, c, g, or t
ggaaggaaacaaaaccaagaggacaacaggggggaaggaacccgagggcgcaactgtccaggctggtgcaacaaactgcccgccggaagaaaggaagaaccacatgaagaaccgaagtgaaacgccgcttcggacgcggccacctgccaaaccagcgaccggcctggccacaaacaacaaggcgccgggggagcccccggacaaacacaaaaagaagtcgcggcagacggacgccaacgaaaggacggttccaaacaacaaaagacccacagccagggcagccgcataagagggccgcccaaagggagcgggtctcccatcggccnagcaaggaaagctgccccagggggagcggtacaccacgtgccgacacacgcggcccctcccagaaggggggacgatacgcggcccgcactagagcgtgggcgaacaacaacacgccgggctttcccactcagggcacgcgtagtcgcaacggaacctcgcaatgtcacaacaggccggacctgcggggggagtacactaacaacgacatcctggatgcgatctgcaatcacccacgaaaaacgcaacaaccacacaactacacaaacgacaacaccacgccgagagcaccacgacgccagaccacccgctatgcaaacggactcctcacaccaccacacacaacgctcgggacgccacgcagcgccacgccacacagcgcgacagcgagcaccccagtgcacactcac

SEQ ID NO: 417783 - DNA, 484 bp, Homo Sapiens
  misc_feature (41)..(80): n is a, c, g, or t
  misc_feature (83)..(114): n is a, c, g, or t
  misc_feature (164)..(254): n is a, c, g, or t
ctcataccaagacttgatacaatagggcgctacttcagatnnnnnnnnnnnnnnnnnnnnnnnnnnnnnnnnnnnnnnnncgnnnnnnnnnnnnnnnnnnnnnnnnnnnnnnnngatcagtcgacggtaccggacatatgcccgggaattcgtggccattacgnnnnnnnnnnnnnnnnnnnnnnnnnnnnnnnnnnnnnnnnnnnnnnnnnnnnnnnnnnnnnnnnnnnnnnnnnnnnnnnnnnnnnnnnnnngtcccaaaatacgagcgcgctcgttagctccacacatgggcgacgggagcacagtctccgtactcgtatcatacctaaataaataacagtgtggccgcaaagagcacacgccatttccacgcccgcatgactgacccttcctaccgctctctgttgacacgacacggggccatctttgacaaatgcaaacacactctctgcaggaggttgtgaggttcaatttactggat

SEQ ID NO: 417784 - DNA, 552 bp, Homo Sapiens
  misc_feature (388)..(397): n is a, c, g, or t
cactgtgtgtgtggggcgcgcgcccgcgcgcccccccgagaagaaaggtttcttagaacccccattggggtgtgtggggcggcgcggggcccccagagatggtgaaagggagaacccggggcgccaacaagcggggttcccaaggggacaactcgggcggccagcagacggaacgggggtgggagagtctccccacccaaattaaaaaaagagcgccggggggggagacaaccaccgggcgcgcgtgtcgcgagaaacaaacctccccaagagagggcgagtctccgagggagcacccatacagcgagggcatacatcacaaaaacgggggcgtcccacaacgacgagcacgtcggatattatcaaaacattaaaccccgcggagcannnnnnnnnnaaccaacagcacaggaaagcgaagacacagaacaaagaaagagagcagacaagtgagacgagacaaacgcacaccgacaaccaccaatcacatgaacagacaaacgaagcaacacaacgtagacaccacaaacgaagaaccgaacaagcccaaac

SEQ ID NO: 417785 - DNA, 467 bp, Homo Sapiens
  misc_feature (49)..(168): n is a, c, g, or t
  misc_feature (173)..(239): n is a, c, g, or t
agtcgacggtaccggacatatgcccgggaattcggccattacggccggnnnnnnnnnnnnnnnnnnnnnnnnnnnnnnnnnnnnnnnnnnnnnnnnnnnnnnnnnnnnnnnnnnnnnnnnnnnnnnnnnnnnnnnnnnnnnnnnnnnnnnnnnnnnnnnnnnnnnnnnccagnnnnnnnnnnnnnnnnnnnnnnnnnnnnnnnnnnnnnnnnnnnnnnnnnnnnnnnnnnnnnnnnnnnacggtgtggggccgcgcccgcgggccccgcgggaaaagcgcttcagagaaaacacacaatcgcgggtgaggaggcgcgcggggggcccacaaagagaggacacagggtgacgaacagaggggcgcacaaaagccgaggagtcccccacaagagggagaacacacgcgggggcgccacaggaaacaagaggggcgggagggagatactcctcccccagccccactacat

SEQ ID NO: 417786 - DNA, 205 bp, Homo Sapiens
caaaactgtgatgataaaaagcggccataaacactaatatcaaaccatgctactcgtgtcttaaattttcaaatagcttgtgcacctgaaatacaaaattaagttgtggaaaaacagtttttaacgtgtgtggctcacaagctaattaacgtgtataaggttctggccatgtgaaaggttacaaacataccagttcattttgaag

SEQ ID NO: 417787 - DNA, 918 bp, Homo Sapiens
  misc_feature (58)..(58): n is a, c, g, or t
  misc_feature (77)..(113): n is a, c, g, or t
caaccactgatatccatagggcgctagcgcgtcgcagccgaacgacgagcgcaggagntagtgagcgaggaagcggnnnnnnnnnnnnnnnnnnnnnnnnnnnnnnnnnnnnnagtcgacggtaccggacatatgcccgggaattcggccattgacggccgggtactactgaccgtgctcgctgatcgcaccccgctcctcccccaatgttgcctatcgtcgtatcaacataagctaggcctcggaacagtgcactggggtgcctcaacaacattagagacataggctcagcggagggaggacatcgaagcgatattagacactcagatcccagatggatgctacatgagggtccatggacccggtgagtcgtaatctaccagaaaggtccaaggccgagcgtcgtgatgatcccattacacgcgccgaagtgggatgcattccgtgtgccactagaatgcaacgatgggagcccaactgattcgtggactgcgctggtgcatccccggatggtgcatgggctcgccgtgtcctcagcctctgccaagacgccaaaacaagccaaacgagcctcccaccagagccgggcaggaaaacggcccctggcaaatggtggtgaaaccctcccactttcaacactggatccatcttgagcccacaggtcaactggcattgacttattgctgtaaacactcttacttggagcagggagaacgcagcgccacccggagacgcatagactggatggagcccccaaatggaccaccccaatgcccagaagacggtgggaactcccgtgcataagggatagaatacagagggggcacttggaggaacctgggccgtgctcaagaccccaacgcaaaggaaactacgacaagaagcgaccaaaaagcgttgacttacctgctctctgaa

SEQ ID NO: 417788 - DNA, 925 bp, Homo Sapiens
  misc_feature (42)..(86): n is a, c, g, or t
  misc_feature (90)..(125): n is a, c, g, or t
tacccaagaccccttgtaaacactatgggccctagcgcgttnnnnnnnnnnnnnnnnnnnnnnnnnnnnnnnnnnnnnnnnnnnnnccgnnnnnnnnnnnnnnnnnnnnnnnnnnnnnnnnnnnnagtcgacggtaccggacatatgcccgggaaattcggcaattacgccccggcccaggtcagcgccttacgaccaacgcttgcagttgctcagccagagacccaaaggacgtgcgacgtgcaggcgagcagctgtttgaccactggcccactcagacgctggagccacaatcgcagcgtgtccagtgagaaaagcagacgagaggccgcttcaggccagcggagtgtcccgatgcttctcccaactatcattctctgtgaggaattcaccccaaaatgggccccatttatcccattagacagttgtcaccacccaacattccgcacaggttgtcgcaccctaatggagcgaagtcatcacccaacgggcagcagaagttgtaacgcttccccaacccgcccttttaacgccaaaaatctccgtgcgccaataggatcctcatattccccgcctgttggcaagagtggggggcacagatcccccagaaagcattgctcccctattggccaacaacgcgaggatcgcattgccactacaaaacagactttcgtactgttccacaacgcggacatacgttccaacacgcacatttacacacacattaggagcccacccacctaaacggcgagcaaccactgttggacccagaacattagaggaggaactagcacaccaaatcccatatatacaaaggagacagcgacacccgcatgagcatagcagggctagagaccatggcgaagagctattcaggcgacgcaccaaaacatatagaggacaggatgactgtctaacacgcacg

SEQ ID NO: 417789 - DNA, 884 bp, Homo Sapiens
  misc_feature (46)..(89): n is a, c, g, or t
  misc_feature (93)..(128): n is a, c, g, or t
  misc_feature (178)..(292): n is a, c, g, or t
  misc_feature (301)..(385): n is a, c, g, or t
  misc_feature (725)..(735): n is a, c, g, or t
tccgccaagaacctttgtatatcactatagggcgctagcttgctgnnnnnnnnnnnnnnnnnnnnnnnnnnnnnnnnnnnnnnnnnnnnccgnnnnnnnnnnnnnnnnnnnnnnnnnnnnnnnnnnnnagtcgacggtaccggacatatgcccgggaattcggccattacggccgggnnnnnnnnnnnnnnnnnnnnnnnnnnnnnnnnnnnnnnnnnnnnnnnnnnnnnnnnnnnnnnnnnnnnnnnnnnnnnnnnnnnnnnnnnnnnnnnnnnnnnnnnnnnnnnnnnnnttctccagnnnnnnnnnnnnnnnnnnnnnnnnnnnnnnnnnnnnnnnnnnnnnnnnnnnnnnnnnnnnnnnnnnnnnnnnnnnnnnnnnnnnnctttgtgtggcggccgccttgtgggccccctggagaagacagcttttcaagaaacacaaattgagcgggaggggcggcgcgggaagccaccaaatagagtgatcaagacggaaaacaggtgtggacacacacagcggtgtgtccccaagaggggagacacacgcgggcaaacagacaaaaaaggaggcggggagagaactccccgacacacatcaaaaaagaaacccgccgcggggggagagaacacacagacgagcagctctttctcggggacaaaaacattccaagaagcggagggaagaaatatctctgcgacgaggacgagtctcacaacgaaaannnnnnnnnnncaataatttcatatactaaaacgaagagcggaggatgattcatctccacagcggagaggcgcgattccgccgtcagatatatctactaccaaaaagatttgaagaccccgcccacgtacgtgatggtggtgtggtgtgtgagagaggga

SEQ ID NO: 417790 - DNA, 734 bp, Homo Sapiens
  misc_feature (47)..(96): n is a, c, g, or t
  misc_feature (99)..(134): n is a, c, g, or t
  misc_feature (172)..(327): n is a, c, g, or t
gaacaaaaaaaatgtttgtgtactatcactataggggcggcctagcnnnnnnnnnnnnnnnnnnnnnnnnnnnnnnnnnnnnnnnnnnnnnnnnnncgnnnnnnnnnnnnnnnnnnnnnnnnnnnnnnnnnnnnagtcgacggtaccggacatatgcccgggaattcggccnnnnnnnnnnnnnnnnnnnnnnnnnnnnnnnnnnnnnnnnnnnnnnnnnnnnnnnnnnnnnnnnnnnnnnnnnnnnnnnnnnnnnnnnnnnnnnnnnnnnnnnnnnnnnnnnnnnnnnnnnnnnnnnnnnnnnnnnnnnnnnnnnnnnnnnnnnnntttttgggcggcttgggccttgagaaaaggtttttaaaacctttcggttgggggcgggggccccagtagtttaaggtgtcaacccttgtgggccataaaggcgtgggtcccctaaaggagaaagactccgtggcgccaatttagccaaagggggctgggggagttttcttcaccaatttaaaaaaagcgcgcccggggggaaaaccccggagcggtgtttcgttggaccaatacttttcccaaagagtgggggaggttgtctgagagcggccacaatacagggggggagcctctatatctacacaccagagggagatgtcaccagaggggaagacgctccgagattttcaaatatttaacgcccccggtcgtgtggtggggatacgagtcacgaagtcacgataaag

SEQ ID NO: 417791 - DNA, 851 bp, Homo Sapiens
  misc_feature (42)..(84): n is a, c, g, or t
  misc_feature (88)..(123): n is a, c, g, or t
  misc_feature (161)..(332): n is a, c, g, or t
ggaggagagacttgaatatcatatgggcgctagcgtcgtcgnnnnnnnnnnnnnnnnnnnnnnnnnnnnnnnnnnnnnnnnnnnccgnnnnnnnnnnnnnnnnnnnnnnnnnnnnnnnnnnnnagtcgacggtaccggacatatgcccgggaattcggccnnnnnnnnnnnnnnnnnnnnnnnnnnnnnnnnnnnnnnnnnnnnnnnnnnnnnnnnnnnnnnnnnnnnnnnnnnnnnnnnnnnnnnnnnnnnnnnnnnnnnnnnnnnnnnnnnnnnnnnnnnnnnnnnnnnnnnnnnnnnnnnnnnnnnnnnnnnnnnnnnnnnnnnnnnnnatgcccagataagttggcggattccagagtgaaagatttgtgccccacgcagggagtagtaccctagtatgtagccggttaccttgcgcgagagttggctgtgaaaaccattgggctaagaatgtgatggcggtcggtcgaggacctcacttcccttcagcagtcgcgtaagactccagtttccgtcctcgccagtctgtggctatccgtgccattgagggccagctatccgtgaacgtagccaaataagggaggcaccacgtgttacagggggcccaccattaggtggaacggcctggggctttgagactagtagactttgttacctttctcttgtgagataatggcgtttagcaacaaaagttgcatgagtgccgggggcgcaggagggctcaagggcctgttaattcccagggacattgcgggacgggcccaaggcggggtcgaactcaaagtgggaatcacgggagtccgatgacccgagcttggccaagtgggctgaaaatccaagttcgtaaa

SEQ ID NO: 417792 - DNA, 931 bp, Homo Sapiens
  misc_feature (75)..(110): n is a, c, g, or t
  misc_feature (160)..(259): n is a, c, g, or t
  misc_feature (287)..(320): n is a, c, g, or t
aagagtataacatatatggcccacgctgttagcgtacgacgagcgcaccgagctgttgagcgaggaagcggccgnnnnnnnnnnnnnnnnnnnnnnnnnnnnnnnnnnnnagtcgacggtaccggacatatgcccgggaattcggccattacggccgggnnnnnnnnnnnnnnnnnnnnnnnnnnnnnnnnnnnnnnnnnnnnnnnnnnnnnnnnnnnnnnnnnnnnnnnnnnnnnnnnnnnnnnnnnnnnnnnnnnnntaataggcgagaacccccggttctcccnnnnnnnnnnnnnnnnnnnnnnnnnnnnnnnnnncttttgtctgggccgcgccctcgggccactcggagaagaggttttcaataaaaccccattgggttgtgggcggccgcgggccccccattggttctagggtacaccgttggccccatgcggtggttcccacaagagaacaccccgggggccaaggacacaaggtggctggagatctcacccagataaaaacacccgccgcgggggacacacagccgcgtttcggagacaaaatcccaaagtgggagttctcgcgggggcgcccaacaggggagtacatacacagcaggaggttccaaagctgcggaggtccgagattctcaaataataccgccccggtcgtggtgggggcgagtcactaagcaggtgatcgtgacgagcgaggagtgcgcgccggcgcaagcaagcctgaaagtgtcgtgcgacgaggggacacgatgaacgaagagcattgtacgtagacgggtgtggcgcggtcttgccgtcgcctgtgcacacggggcggtggggcggagcggaaagcccgacgagtgagtgacgcgacggacacgggctgaacagcaccgtaccacgcagtctcacatgccgaagtgttggagtgcataaggcggctc

SEQ ID NO: 417793 - DNA, 947 bp, Homo Sapiens
  misc_feature (56)..(278): n is a, c, g, or t
aatcaggtcgacaggaaccggtcacatatgcccgggaattcggccattacggccgnnnnnnnnnnnnnnnnnnnnnnnnnnnnnnnnnnnnnnnnnnnnnnnnnnnnnnnnnnnnnnnnnnnnnnnnnnnnnnnnnnnnnnnnnnnnnnnnnnnnnnnnnnnnnnnnnnnnnnnnnnnnnnnnnnnnnnnnnnnnnnnnnnnnnnnnnnnnnnnnnnnnnnnnnnnnnnnnnnnnnnnnnnnnnnnnnnnnnnnnnnnnnnnnnnnnnnnnnnnnnnngtacttaaaagaggtatcattccgaaaaccaccaagctcacctagaaaaggtgcacctaagatgctttactgataattacaatatgtggactttcagcctaaagacagttttacttggggagtcactggtactcagaacaccgatgctattttgggacctaatatggtggtcctggtcattgtcacgcagaacaatttattacccataccataacacatctagcgaggttggcgtttagcagttcagacctgtgtcgcattcacttatccaggtccatccatctactcagccattgagacatttggcctagaattcaaaactaagaaacttagaataatgaacacctatttctaaaactttttagaatggagtactcccacgaaaagtagattcctgtatcagctacatctattgtgactcagggtcatcccaagtcatgcactaaccgtgggccttcagagacaattcggactacttgaaaggctggggagtcacggaggtgtagtcctctcagagttatgaacattggtcggtaatgccaccttaagagaatttcggtccgaaggtacaaattggcagtgcatttagaaccggcagctgctagaccttctggaaactccaggaggacacccacgtggtaaaaacggcctgctcttggaacataacgg

SEQ ID NO: 417794 - DNA, 758 bp, Homo Sapiens
  misc_feature (78)..(114): n is a, c, g, or t
  misc_feature (159)..(263): n is a, c, g, or t
  misc_feature (276)..(307): n is a, c, g, or t
gtaacaaatgttaatgatatataggggctacggtgagagcgaacgacgagcgcaggagtctgtgagcgaggaagcggnnnnnnnnnnnnnnnnnnnnnnnnnnnnnnnnnnnnncagtcgacggtaccggacatatgcccgggaattcggccattacgnnnnnnnnnnnnnnnnnnnnnnnnnnnnnnnnnnnnnnnnnnnnnnnnnnnnnnnnnnnnnnnnnnnnnnnnnnnnnnnnnnnnnnnnnnnnnnnnnnnnnnnnngacccgttctccnnnnnnnnnnnnnnnnnnnnnnnnnnnnnnnntttgtgtcggcacggctctggggcccttggagaaaagagttttctcaaaaccccttctgtttgggggcccggggggcccccaagtagggtaatggtgaacatttggggccaaaagggtggtccccataaagagaaacaccctgtgggacatagaaactaccgggggcttgggagtatctctcccaccctttataagaaaaaacggcccggggggaaaacccccggagcgttttttttgggacaaaaattcccacagaaaggaggggcctcacggaggggcacaaaccggggagtcacaatcacacgggggggtcaccaagcgggggctcgcagaattacaaaatttaacgcccgcctgggggagtccaataccggtaatcacagccgcaatccacatagagtcacctacagacacactcacacacgatacaccagtcacgatgaccaccgg

SEQ ID NO: 417795 - DNA, 797 bp, Homo Sapiens
  misc_feature (50)..(169): n is a, c, g, or t
agtcgacggtaccggacatatgcccgggaattcggccattacggccgggnnnnnnnnnnnnnnnnnnnnnnnnnnnnnnnnnnnnnnnnnnnnnnnnnnnnnnnnnnnnnnnnnnnnnnnnnnnnnnnnnnnnnnnnnnnnnnnnnnnnnnnnnnnnnnnnnnnnnnnntccaaaaagacaagaagtgtatgataacaatgcaaaatgattgtttgggcgtgcctggctccccatcggaaaggttacaacaccccgcaatcaggtatgggagtgcgcgcagtcgcccaatatacgatacaggtggcccctcgtgattcgagctgttgtcccatagggggaaaccttggcgccactacaaaaccggagggctggttgttttgcccaccaatgaaaaataatcgggccggggggtgaacagccatgagaggctttcggataaaaaacctccatcaccggtgccctcagaagactaacacgggcggctttaaaaaaagcaggggttacacaaatagcaagcgggaagtactccaaaatttttaccccgacgttgtggggggtgtcttctacaattggtccactgtcaaccgaaatctcacaagcggcatcatttgcctgagcagatggcacaatggcacccattccgaatcatccgtcgcacttcaccacttgggcaaacactaatgctggtaacactcggcggatcagcaagtagtgtcggccccaaaagcgtccccttagaacgcccacaggctgccaaccacgttgcatccccaccaataaaccacttcaacaacac

SEQ ID NO: 417796 - DNA, 509 bp, Homo Sapiens
  misc_feature (81)..(116): n is a, c, g, or t
  misc_feature (154)..(285): n is a, c, g, or t
  misc_feature (289)..(317): n is a, c, g, or t
gaccggagaacttgtatgcatataggggctaggctgaagcgaacgacgagcgcagcgagttgtgagcgaggaagcggccgnnnnnnnnnnnnnnnnnnnnnnnnnnnnnnnnnnnnagtcgacggtaccggacatatgcccgggaattcggccnnnnnnnnnnnnnnnnnnnnnnnnnnnnnnnnnnnnnnnnnnnnnnnnnnnnnnnnnnnnnnnnnnnnnnnnnnnnnnnnnnnnnnnnnnnnnnnnnnnnnnnnnnnnnnnnnnnnnnnnnnnnnnnnnnnngcgnnnnnnnnnnnnnnnnnnnnnnnnnnnnntgttggcgggccgcgccctcgggccctaaaaaagggttttctaaccccatctcgggttggggcgcgcgggggcgccccaggatggggatactgtgaacaacacctttggcgccaataagcggcgcgtcccaaagagagagacacccggcggccctaggcacacaggcggctcgggattctctcccccaatat

SEQ ID NO: 417797 - DNA, 266 bp, Homo Sapiens
  misc_feature (44)..(44): n is a, c, g, or t
  misc_feature (92)..(123): n is a, c, g, or t
  misc_feature (171)..(203): n is a, c, g, or t
gaacgaaaaacagacttgttaataccatataggggctagcgttnacagccgaaggacgagcgccagcgagtcaatgtgagcgaggaagcggnnnnnnnnnnnnnnnnnnnnnnnnnnnnnnnngttatcagtcgacggtaccggacatatgcccgggaattcggccattannnnnnnnnnnnnnnnnnnnnnnnnnnnnnnnncaagcgagctcgatatcaaattacgccccgccctgaagagagtaaaacaaacaaaagcaaaaa

SEQ ID NO: 417798 - DNA, 687 bp, Homo Sapiens
  misc_feature (80)..(115): n is a, c, g, or t
  misc_feature (169)..(289): n is a, c, g, or t
  misc_feature (292)..(319): n is a, c, g, or t
  misc_feature (513)..(576): n is a, c, g, or t
gagaccttggtaatctcatataggggtcagtgtggagcagaaggacgagcgcaggagtctgtgagcgaggaagcgggcgnnnnnnnnnnnnnnnnnnnnnnnnnnnnnnnnnnnnagtcgacggtaccggacatatgcccgggaattcggccattacgtgcctgtgtgnnnnnnnnnnnnnnnnnnnnnnnnnnnnnnnnnnnnnnnnnnnnnnnnnnnnnnnnnnnnnnnnnnnnnnnnnnnnnnnnnnnnnnnnnnnnnnnnnnnnnnnnnnnnnnnnnnnnnnnnnccnnnnnnnnnnnnnnnnnnnnnnnnnnnncaacgtgtggggcggagacatgaggacacccgaagaaggttacacaaggcaccacaacggaggagagcacagagggcacaagaaaggagacagagagaacaagtggagccaaaagcaggggatccccagagagggaaacaccccgagggaaaaagagcacaaagggggcagaggaagatcacacaccacaaatnnnnnnnnnnnnnnnnnnnnnnnnnnnnnnnnnnnnnnnnnnnnnnnnnnnnnnnnnnnnnnnnaaaggtgagcaaccctagaggagagggctacaatacagcagcgggaccccaaactacacaacagagggagcagtccccacaacgggacaggccgcccaggaaaaatacaac

SEQ ID NO: 417799 - DNA, 751 bp, Homo Sapiens
  misc_feature (73)..(108): n is a, c, g, or t
  misc_feature (158)..(275): n is a, c, g, or t
  misc_feature (281)..(352): n is a, c, g, or t
agacgtaagatcatatggggctaggcgttagagcgaaggacgagcgcaggagtagtgagcgaggaagcggcgnnnnnnnnnnnnnnnnnnnnnnnnnnnnnnnnnnnnagtcgacggtaccggacatatgcccgggaattcggccattacggccgggnnnnnnnnnnnnnnnnnnnnnnnnnnnnnnnnnnnnnnnnnnnnnnnnnnnnnnnnnnnnnnnnnnnnnnnnnnnnnnnnnnnnnnnnnnnnnnnnnnnnnnnnnnnnnnnnnnnnnntccagnnnnnnnnnnnnnnnnnnnnnnnnnnnnnnnnnnnnnnnnnnnnnnnnnnnnnnnnnnnnnnnnnnnnnnnncgtgtgggggggcacactgggccacaagaaaaaaacttaagaaacacaacgggggggagcgcgcgcgggaccaccaagaggggcagagacaagtgggccacaacgacgcgtggtcacccgagggagacactcctggggaacaacaaacaaggcggcaggggatcttcaccaacaaattaaaaagagggccgccggagggggacaacacacgaggagcgttcttttgagcagacaacaaactatccacacaagaagagagggagagatatcaagagaggcggcgcacaaacacaagggggaagacctaaatacaaccacagagaggacacaccacaagacggagccatcagaaattctacaaatattatccccccgagatgttgtggtgtggggatgggg

SEQ ID NO: 417800 - DNA, 299 bp, Homo Sapiens
  misc_feature (82)..(113): n is a, c, g, or t
  misc_feature (155)..(255): n is a, c, g, or t
caacaaattagtcgcctatagggcccgcggttaaggcgaacgacgagcgccaagggagttttgtgagcgaggaagcggccgnnnnnnnnnnnnnnnnnnnnnnnnnnnnnnnnaatcagtcgacggtaccggacatatgcccgggaattcggccnnnnnnnnnnnnnnnnnnnnnnnnnnnnnnnnnnnnnnnnnnnnnnnnnnnnnnnnnnnnnnnnnnnnnnnnnnnnnnnnnnnnnnnnnnnnnnnnnnnnngtcaagtatagcgaggaccccggtttctccaagaaagaaaagag

SEQ ID NO: 417801 - DNA, 417 bp, Homo Sapiens
  misc_feature (85)..(115): n is a, c, g, or t
  misc_feature (164)..(200): n is a, c, g, or t
  misc_feature (202)..(230): n is a, c, g, or t
agaaaacggtgtaataacactaatagtgcggccacggtattttcgaaggacgagcgcagggagctgtgtagcgaggaagcggcgnnnnnnnnnnnnnnnnnnnnnnnnnnnnnnngttatcagtcgacggtaccggacatatgcccgggaattcggccattacnnnnnnnnnnnnnnnnnnnnnnnnnnnnnnnnnnnnncnnnnnnnnnnnnnnnnnnnnnnnnnnnnnccttgtgtgggccgcgccctgcggcgctgtgaaaaaaagattttcagagacacaattccgttgggtggcgcgccgggccccaagatgagataagggagcacaagtgtggcccaagagggtgtctccctagggaagacccgcgggactatgagaacaagagggcgcggggatttttctcaaccataat

SEQ ID NO: 417802 - DNA, 1032 bp, Homo Sapiens
  misc_feature (74)..(110): n is a, c, g, or t
  misc_feature (148)..(268): n is a, c, g, or t
  misc_feature (275)..(310): n is a, c, g, or t
  misc_feature (929)..(990): n is a, c, g, or t
tggaaatgtttacactatggggcctagcgcgtaagcgaagacgagcgcaggcgagtagtgagcgaggaagcggnnnnnnnnnnnnnnnnnnnnnnnnnnnnnnnnnnnnnagtcgacggtaccggacatatgcccgggaattcggccnnnnnnnnnnnnnnnnnnnnnnnnnnnnnnnnnnnnnnnnnnnnnnnnnnnnnnnnnnnnnnnnnnnnnnnnnnnnnnnnnnnnnnnnnnnnnnnnnnnnnnnnnnnnnnnnnnnnnnnnntctccannnnnnnnnnnnnnnnnnnnnnnnnnnnnnnnnnnncgttgtgtgtggccggcggcccggggccccgggagaaggctttttgaagacccatcggtgtggggcgcgcgggcccccaggtgtggtagagtgcaaccactgggccccaagcgcggtgttcccccagaggagaaccccgggggacgatcgacaaccgaggggctggggtcccccaccaaatataaagacgacgcccggggagaccgcgcaagctgtttggggacacacacccaccaagaagggaggggtacacgagggggcacacaaaaggggggcccctaatccacacagaggggagcccacaagggcacggccaggatattaaaaatatttagcgccccgcaagggggggtggagcggcacaccaccaaagagctaagtagagatcccgagaacgagacaagcacaaggaagactacagccaagcaacacgaccacacacgaggcacacagaagaacgacagagcacaacgtaccacagcagccaacacacaccagaagcgaaagcggtagggtgaggaggaaggcggcgcaacagaaggcagcgggagaagaggagaggaagcgagcgaggcggaggaagaacagagaggagcaaggcgggaggggacgaaaagannnnnnnnnnnnnnnnnnnnnnnnnnnnnnnnnnnnnnnnnnnnnnnnnnnnnnnnnnnnnnagcgagcgcaggcagccgcagagcaagcggcggcaagcacga

SEQ ID NO: 417803 - DNA, 427 bp, Homo Sapiens
  misc_feature (69)..(105): n is a, c, g, or t
  misc_feature (141)..(185): n is a, c, g, or t
  misc_feature (276)..(323): n is a, c, g, or t
ccaggcaaacaaatgtgccagtgcgtttagccgaagacgagcgcagcgagcagttagcgaggaagcggnnnnnnnnnnnnnnnnnnnnnnnnnnnnnnnnnnnnnagtcgacggtaccggacatatgcccgggaattcggnnnnnnnnnnnnnnnnnnnnnnnnnnnnnnnnnnnnnnnnnnnnncaagcgagctcgatatcaaattacgccccgccctgatggggaacaaaagaagagcaaacggagagaagacgagccacaagatcgaactgcnnnnnnnnnnnnnnnnnnnnnnnnnnnnnnnnnnnnnnnnnnnnnnnncacaagatgcaccacagacgaaaaggaagaagagaagacgagaggaaggcaaagagaaacgaggcacagcaagcacacatagacagagcagacgcagaccaagg

SEQ ID NO: 417804 - DNA, 906 bp, Homo Sapiens
  misc_feature (50)..(174): n is a, c, g, or t
  misc_feature (177)..(198): n is a, c, g, or t
agtcgacggtaccggacatatgcccgggaattcggccattacggccgggnnnnnnnnnnnnnnnnnnnnnnnnnnnnnnnnnnnnnnnnnnnnnnnnnnnnnnnnnnnnnnnnnnnnnnnnnnnnnnnnnnnnnnnnnnnnnnnnnnnnnnnnnnnnnnnnnnnnnnnnnnnnnggnnnnnnnnnnnnnnnnnnnnnntttggtgcgggccggtctacgaagcaacagaaaaagatgtgctcaaaaccagtcggtgtgggcggccgccgcgcccaagtgggtgcagcgccacgcgtgggccgaacacgtgtggtgcccaaggagaaacccccgggtccgatgccacacaagggggtgtggactcggtcctcgccagtaaaaaaaggccgcccggggggagcacacaggcgcggtctggggacaaaaccccgagggggaaggcccggagcagagctcgatataggtggggtttaatcaaacggggagagtccccagcgcggagcggccgaattataaaaattgaacgccgcggagcagttgggggagagaggggtgagatcggatcggggtacaaaggattctcacgggcccagaaccacgatcgacttaaatcctttgaagggaagcgggccatctgcgcttgttccaaaaattccaagaggtttcgattcacgcaaggccacaagagtcaacacacccaggctcctcagggacaatctcttgcgattgagatcttatcggtctctcggcaaacaggaagcggtacaagacggtggatggactacgatctcacgcagtgtccggggtccagaacgaagcatgcacatggacatctaagacccacttgtggtatttaactgtcgcataaagacctatggttggaccacaacaaacaaccaaacaatc

SEQ ID NO: 417805 - DNA, 358 bp, Homo Sapiens
  misc_feature (50)..(160): n is a, c, g, or t
  misc_feature (168)..(203): n is a, c, g, or t
agtcgacggtaccggacatatgcccgggaattcggccattacggccgggnnnnnnnnnnnnnnnnnnnnnnnnnnnnnnnnnnnnnnnnnnnnnnnnnnnnnnnnnnnnnnnnnnnnnnnnnnnnnnnnnnnnnnnnnnnnnnnnnnnnnnnnnnnnnnntcttcccnnnnnnnnnnnnnnnnnnnnnnnnnnnnnnnnnnnntgtttgtggcgccgacgtcggcgcgctgcaaaaagcgtttcaaaaccaatgcgtggggccgcgggcgcacaggtggtatgccacacgtggcacaaagaggtgcccaagagagaaacccgcgccagcagcaacagcggcggtggggactctccccc

SEQ ID NO: 417806 - DNA, 745 bp, Homo Sapiens
  misc_feature (72)..(107): n is a, c, g, or t
  misc_feature (156)..(270): n is a, c, g, or t
  misc_feature (546)..(554): n is a, c, g, or t
acaaacttattcactatgggcctagggttgagcgaacgacgagcgcaggagtagtgagcgaggaagcggcgnnnnnnnnnnnnnnnnnnnnnnnnnnnnnnnnnnnnagtcgacggtaccggacatatgcccgggaattcggccattacggccggnnnnnnnnnnnnnnnnnnnnnnnnnnnnnnnnnnnnnnnnnnnnnnnnnnnnnnnnnnnnnnnnnnnnnnnnnnnnnnnnnnnnnnnnnnnnnnnnnnnnnnnnnnnnnnnnnnnctttctttccagcaaacagggcaaaaagaacaaaataacatcaaatatatcacacaaaaacagttgtgttggggccggcacacttgggctcttggagagaacttttctcataaacacctttcggggtgggcggagaggggatgaccccctatttgtggtattggggaaacactgtgggccaaaaacacgggggccccccaacggggacacccccgggcccacagcgccccaaaggcagcgggagggattaccaccacaaaatcaaaaaagcccccnnnnnnnnnccaccacggagacgtttttgtgacaagacaaatcttccgagagagggggggacttcaaggaggacgctaacacgcggggggactttactcacaaagagagggagctccaaaaggagggcgcctccaaagttttccacaatttaaaccccccgagtgcgggggggtgtgagatgcagaactaaacaaaaagc

SEQ ID NO: 417807 - DNA, 340 bp, Homo Sapiens
gaagttgttgggcggcgctgggccccatagaaaaaaggtttctcaagaccacaccgtgttgggggccggcggccccagggcgagggtaaaggttgccaccacgtggccaccaggcgcagggctccatgaggacaaaccccgggacacagacaaagtggtccgtgtgtggttcctctcccaaataaaaaaacgccccgggggggacaacgcgagcggtcttgtggaaccaactacgaaaagggggcgtccaggagcggacacatgacgggggtacactaaccacagggggccccacaggagcagctgcaattacaaatataaggccgcgacgtggtggagc

SEQ ID NO: 417808 - DNA, 991 bp, Homo Sapiens
  misc_feature (83)..(118): n is a, c, g, or t
  misc_feature (168)..(267): n is a, c, g, or t
  misc_feature (294)..(337): n is a, c, g, or t
gccaaagacgtgaatcaactatgggcctagcgctttgaggcgaaggacgagcgcagggagtatgtgagcgaggaagcggccgnnnnnnnnnnnnnnnnnnnnnnnnnnnnnnnnnnnnagtcgacggtaccggacatatgcccgggaattcggccattacggccgggnnnnnnnnnnnnnnnnnnnnnnnnnnnnnnnnnnnnnnnnnnnnnnnnnnnnnnnnnnnnnnnnnnnnnnnnnnnnnnnnnnnnnnnnnnnnnnnnnnnnttataagcgagacccgcgttttcctcnnnnnnnnnnnnnnnnnnnnnnnnnnnnnnnnnnnnnnnnnnnntttggttgagcgcgcgcctcttgagaccttgacaaagagacgtcttttaaaagacacaatctcgggtgtggagcgcgcgtgtgtcacacccaatgaggtctcatgtgaaacacactggtgcaccaaacctgggatgtaccccacaggggagcgacaccctcgggggcaaaccaacacaaaagggcggggggaggaacctctcacaccacccaacaaagacaaaaagcagcgcccccgcggggaggtgcaacaccccgagagaggagccatattgcaacgacaacaaacgtctcagagagaaagtgagacgagatcctctgtcggagagaggccaccatcattcgagggggggaggggtactcactccatcccgccacgctgagggggtgcttcacaacagaggcggagcaaactgcctgcggaaacttactacaacaaaattttttccgacgccccgcgcgcagtgctgcttgtggtggggtgctgcccgacgatcgaatccatcacgactagatgtagagatgacaatgcacacgaagagaagagacgagtagcacgtgagacacatacgacatgctgccagctcacacataatcgagtggtagtaagagccacaacagcagaacgacgaaacaagatgatgagatcacagaa

SEQ ID NO: 417809 - DNA, 757 bp, Homo Sapiens
  misc_feature (75)..(110): n is a, c, g, or t
  misc_feature (148)..(267): n is a, c, g, or t
  misc_feature (276)..(308): n is a, c, g, or t
ggagagctgattatataggggcctacgtttagccgaacgacgagcgcgggaagtagtgagcgaagaagcggccgnnnnnnnnnnnnnnnnnnnnnnnnnnnnnnnnnnnnagtcgacggtaccggacatatgcccgggaattcggccnnnnnnnnnnnnnnnnnnnnnnnnnnnnnnnnnnnnnnnnnnnnnnnnnnnnnnnnnnnnnnnnnnnnnnnnnnnnnnnnnnnnnnnnnnnnnnnnnnnnnnnnnnnnnnnnnnnnnnnntctccagtnnnnnnnnnnnnnnnnnnnnnnnnnnnnnnnnnttgttggggggggccacagcgcccggagaaaagcttccaaacccatctggtgggggcccgcgggcccccgtaggtaaggtgcacacgtagccaaagcgcgtgtcccagcggaaatcctgggcctgacaacaggtggcggggtttctcacccaataaaaaaaggcgcggggggcccacaggaggcgtttcgacaacaaaccccgaggagtgcgtgcggagggacaccaacgagcggactcaaacaagagggggtccccacggagctcccgaatccaaaatataagcccccgcgcgccgggtagtgctacaccacaagcagccgcagcacgcgatagcagcgacaaacaacgaacgcagaacagccaaacggacacgtgacgatcattccagctacaccagaccagacgaccatagctagactagcgcacacgacgagcacgaactcagag

SEQ ID NO: 417810 - DNA, 643 bp, Homo Sapiens
  misc_feature (85)..(121): n is a, c, g, or t
  misc_feature (169)..(282): n is a, c, g, or t
  misc_feature (289)..(347): n is a, c, g, or t
ccaccaacacaccacaaaaaagcgtaacatatgtgcatcggtttagcggaagacgagcgcaggagctagtgagcgaggaagcggnnnnnnnnnnnnnnnnnnnnnnnnnnnnnnnnnnnnnagtcgacggtacggacatatgcccgggaattcggccattacggccggnnnnnnnnnnnnnnnnnnnnnnnnnnnnnnnnnnnnnnnnnnnnnnnnnnnnnnnnnnnnnnnnnnnnnnnnnnnnnnnnnnnnnnnnnnnnnnnnnnnnnnnnnnnnnnnnnnctccagnnnnnnnnnnnnnnnnnnnnnnnnnnnnnnnnnnnnnnnnnnnnnnnnnnnnnnnnnnncatttgtgcggcgcgcctgggggcacccaggaagaggttttcaccaaccactactgttgtgggcgcgcgggccaccaattatgattcgcctgcactggggtccatacgtgtgttcctcaacgagacactcggtggaacaaacatatggtgtgtggaattctaccacacatacaaaaaaacaggcggcggcgacaccaggaacagcgttgcgcaccaacccacccagaatggaagaactcgaggcgcacgaaaggggacgctacataacaacgagggagccacagagaggactccat

SEQ ID NO: 417811 - DNA, 1083 bp, Homo Sapiens
  misc_feature (56)..(171): n is a, c, g, or t
  misc_feature (184)..(248): n is a, c, g, or t
  misc_feature (425)..(437): n is a, c, g, or t
aatcagtcgacgtgtacctggacatatgccctgggaattcggccattacggccggnnnnnnnnnnnnnnnnnnnnnnnnnnnnnnnnnnnnnnnnnnnnnnnnnnnnnnnnnnnnnnnnnnnnnnnnnnnnnnnnnnnnnnnnnnnnnnnnnnnnnnnnnnnnnnnnnnnntctccagaacaannnnnnnnnnnnnnnnnnnnnnnnnnnnnnnnnnnnnnnnnnnnnnnnnnnnnnnnnnnnnnnnngcaagttgggcggcccaacccggcccccgcagagagccccactcaaaacactcatggcgtgtgggacagcggggccccacacaaaccccaccacaagacgacaacaggtggcccacaagaagcgcaccacaaacagaggaacacccgcgggcaacaacacaacgagccggcccgggnnnnnnnnnnnnnagaaaagaaaaaaccgcacccaccgggcgcaaagcccccaccagggccccgacaagacaaacacaacaaaccgcagaagtgcgcaccactagcgaagggcaacccaacacagggcggagaaccacaaaccacccgaagcggaggacacacgaagacgaggcacagagacaacacacaaagaaaaacccccgcacagcacgctcgtgtcgccccaaaaacaacaagaagagcaaaccaaacaacagcacaaacacgcaccgaggcgcaaaacacaacgagcaacaaaacgcgcaaccacccgcgcaccacacgacgggacaacccctacccgccagcaccgcccacacgaccacaggcccaagcgcgcaccccgaagcaaacccaagccgccagccagggacaactaaaccgcagagcacaccacaacacgggcgacgtcacacgtcccacacaccacacgctgcgacccgccaacaggggcccctgtcatgccggccagcacacacgccccccacccgcgccccacatcctgagacgcaggacacccacaacgctgaccagacaacaaacaacgagcccccaacaccggcacaactccgccactcccgctacgtagcccaacaacggcgccacaaattccgacagc

SEQ ID NO: 417812 - DNA, 486 bp, Homo Sapiens
  misc_feature (81)..(113): n is a, c, g, or t
  misc_feature (153)..(267): n is a, c, g, or t
  misc_feature (282)..(320): n is a, c, g, or t
tagaacggtgtatatactatgggcctgcgcttacagcgaaggacgagcgcagggagtagtgagcgaggaagcgtgcgcatnnnnnnnnnnnnnnnnnnnnnnnnnnnnnnnnncagtcgacgggtaccggacatatgcccgggaattcggccnnnnnnnnnnnnnnnnnnnnnnnnnnnnnnnnnnnnnnnnnnnnnnnnnnnnnnnnnnnnnnnnnnnnnnnnnnnnnnnnnnnnnnnnnnnnnnnnnnnnnnnnnnnnnnnnnnncggtcgtactatctnnnnnnnnnnnnnnnnnnnnnnnnnnnnnnnnnnnnnnnccagtgtttgtgggcacgcccacctcgggcccccctataaagaaagtaatttactaaaaaacacataaagcgagtatagggcgcgcggcgcgcggtagcccccagaatgtgcgatatacgctaaacacatggtggggcgaaatatccggtggttataacaaaaggg

SEQ ID NO: 417813 - DNA, 910 bp, Homo Sapiens
  misc_feature (72)..(107): n is a, c, g, or t
  misc_feature (157)..(270): n is a, c, g, or t
  misc_feature (490)..(501): n is a, c, g, or t
  misc_feature (535)..(535): n is a, c, g, or t
  misc_feature (600)..(600): n is a, c, g, or t
  misc_feature (604)..(604): n is a, c, g, or t
  misc_feature (644)..(644): n is a, c, g, or t
  misc_feature (664)..(664): n is a, c, g, or t
  misc_feature (699)..(699): n is a, c, g, or t
  misc_feature (872)..(872): n is a, c, g, or t
gcaaattatgtctatggcctgcgtgtgagcgaacggacgagcgccaggagtagtgagcgaggaagcggccgnnnnnnnnnnnnnnnnnnnnnnnnnnnnnnnnnnnnagtcgacggtaccggacatatgcccgggaattcggccattacggccgggnnnnnnnnnnnnnnnnnnnnnnnnnnnnnnnnnnnnnnnnnnnnnnnnnnnnnnnnnnnnnnnnnnnnnnnnnnnnnnnnnnnnnnnnnnnnnnnnnnnnnnnnnnnnnnnnnntctccgtaacaacacacaccaaccactcaaaaacaacaaaaaatgtgttgtggcggagccctcgggaccacgaggaaagagtttttacgaccacactgctggtgggggccggcgggccccaagagagtaaacgtgacacacgtcgcacacaacgcgtgttcccaacaggagccctccgggctccgaggaactgtgtggcgtgtggcgttttctcacccgnnnnnnnnnnnngagccgccgcgggcgacacaacgcaggcggtctnttcgtgcaaaccaaccaccgagaagctggcagtcatgcggaggaggaccccaccgtaagcggggncganctcacatatcaacgagcagtgggacgtctctccacagaangagaacggcgcttgaaatantatcacaaaaatattaggaaccccccgcgcggccngtaggtgaggtaacggggaatgcagacgacgatcagaggaagagcaagcaatgagtacaggaagtcgagacatggacgcaaagcagaaagtatacacaacgcatcgagcagcagtaagcgagtcacatcgtagccgtagcagcaagctagaagccacaagcatagaatcgagnacgcagatagcgagcagcatcgaattctacacgcagca

SEQ ID NO: 417814 - DNA, 965 bp, Homo Sapiens
  misc_feature (86)..(121): n is a, c, g, or t
  misc_feature (176)..(279): n is a, c, g, or t
  misc_feature (303)..(359): n is a, c, g, or t
agacgacccagacccttgtatgtatatagggcctacgagtagagcagaaggacgagcgcaggagtatgtgagcgaggaagcggcgnnnnnnnnnnnnnnnnnnnnnnnnnnnnnnnnnnnnagtcgacggtaccggacatatgcccgggaattcggccattacgtcctggggccgnnnnnnnnnnnnnnnnnnnnnnnnnnnnnnnnnnnnnnnnnnnnnnnnnnnnnnnnnnnnnnnnnnnnnnnnnnnnnnnnnnnnnnnnnnnnnnnnnnnnnnnngacccggttcttcagaacaagggnnnnnnnnnnnnnnnnnnnnnnnnnnnnnnnnnnnnnnnnnnnnnnnnnnnnnnnnncttttgtgtgcggcacgccttggcgcccctgggaaaagcgcttttaagaacccatattggggtgtagggggcgacagagccccacaatgaagtcaagtggacacagagatggcaccaaagagggatgccccaaggagagaaacctcgggcgaacaaaaacacagagcggacgaggagatatcacacacccacaatatgaaaacaagagcccgcggggagaacccacaccacgaggtgtttttttgagaacaacaactatgccgcagaaggggggagcgattacaaagaggagccaaacagaaggggcgggctatatatcaacacagagggggacggcccacaggggagacgagctagcgaaattatctacaataataaacgcccccgggaccgcttgtggtggggggagagagaaaaacaaatgaaaagaacaaaagaggatgcactactagaaagaacagcgacagagaacgtgatatatcaatctagataagcaagaacaaaagcgcaaactgatactgagaacacaatgttgatatgaacacaaagttagcacaacaggaaaaaaagaaacaacgtacaataatggatgaccacaataaaaaa

SEQ ID NO: 417815 - DNA, 910 bp, Homo Sapiens
  misc_feature (94)..(129): n is a, c, g, or t
  misc_feature (167)..(288): n is a, c, g, or t
  misc_feature (295)..(325): n is a, c, g, or t
aagacttggactgaacttatagggcgcccgcggtgttttaagtgcccgaaaacggaaccgagcgccacgagtccagtgagcgaggaagcggcgnnnnnnnnnnnnnnnnnnnnnnnnnnnnnnnnnnnnagtcgacggtaccggacatatgcccgggaattcggccnnnnnnnnnnnnnnnnnnnnnnnnnnnnnnnnnnnnnnnnnnnnnnnnnnnnnnnnnnnnnnnnnnnnnnnnnnnnnnnnnnnnnnnnnnnnnnnnnnnnnnnnnnnnnnnnnnnnnnnnnnctccagnnnnnnnnnnnnnnnnnnnnnnnnnnnnnnnctgtgctgggccggcgcctctgggcccctgaaaaaggtttcctaaacaccaatttcggttgggggccgcgccggcgggccccaagagtgcttagcggaaccatgggccaaacgggggtcccaaaggaaaactcccgggccaggcacaaggggctttgggttcctcccccaaaatataaaaaaccggccggggggaaacccagaggcgggttctgagaaccaaacttccacaagatggagggtcgagagggcacatcacgggggcctctactcaaagaggaggtccccaacggaggaggccgaataatacaaatttaaaccgccccgacagagaggagagaggaggacacatagccgcatacaggagaccacacaacggcgagcagacaggacgacacaaacacgacacactaagcggcacaaaggccatccacagcagtaacacaccaaccaacgagagcacatcccagcagacagaagcacacaggcacaagacgcacgcagacagagcgacgggcaacaaagccaacaagcagactacataacggagccagagcaaaaaacaacagccagtacgaagtacaga

SEQ ID NO: 417816 - DNA, 997 bp, Homo Sapiens
  misc_feature (80)..(115): n is a, c, g, or t
  misc_feature (165)..(344): n is a, c, g, or t
  misc_feature (370)..(749): n is a, c, g, or t
acaccttgattcgaatcactataggggcaggttgagagcgaacgacgagcgcagcgattcaggagcgaggaagcggccgnnnnnnnnnnnnnnnnnnnnnnnnnnnnnnnnnnnnagtcgacggtaccggacatatgcccgggaattcggccattacggccgggnnnnnnnnnnnnnnnnnnnnnnnnnnnnnnnnnnnnnnnnnnnnnnnnnnnnnnnnnnnnnnnnnnnnnnnnnnnnnnnnnnnnnnnnnnnnnnnnnnnnnnnnnnnnnnnnnnnnnnnnnnnnnnnnnnnnnnnnnnnnnnnnnnnnnnnnnnnnnnnnnnnnnnnnnnnnnnnnnnnngggactcaaacagctattgtataatnnnnnnnnnnnnnnnnnnnnnnnnnnnnnnnnnnnnnnnnnnnnnnnnnnnnnnnnnnnnnnnnnnnnnnnnnnnnnnnnnnnnnnnnnnnnnnnnnnnnnnnnnnnnnnnnnnnnnnnnnnnnnnnnnnnnnnnnnnnnnnnnnnnnnnnnnnnnnnnnnnnnnnnnnnnnnnnnnnnnnnnnnnnnnnnnnnnnnnnnnnnnnnnnnnnnnnnnnnnnnnnnnnnnnnnnnnnnnnnnnnnnnnnnnnnnnnnnnnnnnnnnnnnnnnnnnnnnnnnnnnnnnnnnnnnnnnnnnnnnnnnnnnnnnnnnnnnnnnnnnnnnnnnnnnnnnnnnnnnnnnnnnnnnnnnnnnnnnnnnnnnnnnnnnnnnnnnnnnnntatattcattgttcataggcatatattcataagtagccaaaaaggtggaagaaacccaaggtgtgcggcaatgggtgaatggtagaagggagatctgagcaatggtgaaaagatgacttgagacttccgagaattagcgttcaaaaagaatctggtgagctttatgagattacggggccattcaggacagaaggcttgggcgagggggcaagatgggaagtatgtccgcggaaaaattgggcggggcc

SEQ ID NO: 417817 - DNA, 721 bp, Homo Sapiens
  misc_feature (61)..(101): n is a, c, g, or t
  misc_feature (104)..(139): n is a, c, g, or t
  misc_feature (189)..(282): n is a, c, g, or t
  misc_feature (310)..(342): n is a, c, g, or t
aaagagaaaagaacgagtagattgcatctcgcacttatagcggcctcgctggttagagctnnnnnnnnnnnnnnnnnnnnnnnnnnnnnnnnnnnnnnnnncgnnnnnnnnnnnnnnnnnnnnnnnnnnnnnnnnnnnnagtcgacggtaccggacatatgcccgggaattcggccattacggccgggnnnnnnnnnnnnnnnnnnnnnnnnnnnnnnnnnnnnnnnnnnnnnnnnnnnnnnnnnnnnnnnnnnnnnnnnnnnnnnnnnnnnnnnnnnnnnncaacaaaatagacgagacccggaagggnnnnnnnnnnnnnnnnnnnnnnnnnnnnnnnnntgtgtgtggggacgcccgtaggcccacggaaagacgcatttctgaaccccacgagggagggggcgcaggggaccacaccaagagagaggacagggcacacgagggcataacaatggttgaatccacatagggagaaaacacgggggaaagacgaacaagaagagggagagggacaccccacaacgaaaagaaaacgccgcccgggggagaaaacacgaagatggttatcaataggaagaaacatctcacaagagaagagcagttattagaggcgctataactcacgggaggataaaattacacaggaaggggggtaacaaagggagtcaacagataaatcaaaattttaaccgcaaaataatagaaagtattaatcaat

SEQ ID NO: 417818 - DNA, 1173 bp, Homo Sapiens
  misc_feature (70)..(101): n is a, c, g, or t
  misc_feature (143)..(263): n is a, c, g, or t
  misc_feature (265)..(294): n is a, c, g, or t
  misc_feature (657)..(765): n is a, c, g, or t
  misc_feature (774)..(832): n is a, c, g, or t
  misc_feature (898)..(1086): n is a, c, g, or t
aacatccatattagggcccgcgtttgacgaacgacgagcgcagcgagtcttgtgagcgaggaagcggcgnnnnnnnnnnnnnnnnnnnnnnnnnnnnnnnnaatcagtcgacggtaccggacatatgcccgggaattcggccnnnnnnnnnnnnnnnnnnnnnnnnnnnnnnnnnnnnnnnnnnnnnnnnnnnnnnnnnnnnnnnnnnnnnnnnnnnnnnnnnnnnnnnnnnnnnnnnnnnnnnnnnnnnnnnnnnnnnnnnncnnnnnnnnnnnnnnnnnnnnnnnnnnnnnncatagttggaggagcggcgatacggagctaaagagaaaggctttccaaacacacatacgggtaggggacgcagggcccacagagaggataagggaacagtgggcgcactagcgaggaagccaagaggagaaccggggaacagaagacaagccggggagaggagattcacccaaagatagaacaacagcgccgggggagaccacgagacgcgtggtcgcgaacacaacacaatcccagagatagagaagtactagcggaaagggcacaacaaaggggggcatccaaactcagacagggaggaagcacccaaaggcagacggcagtcgatatataaaaaatttagagaacaccgacacagtggcnnnnnnnnnnnnnnnnnnnnnnnnnnnnnnnnnnnnnnnnnnnnnnnnnnnnnnnnnnnnnnnnnnnnnnnnnnnnnnnnnnnnnnnnnnnnnnnnnnnnnnnnnnnnnatagctacnnnnnnnnnnnnnnnnnnnnnnnnnnnnnnnnnnnnnnnnnnnnnnnnnnnnnnnnnnngggagagaggaaggagagcagaagatgagtgggaaagaatagcagtggagatgaggtggtgatggnnnnnnnnnnnnnnnnnnnnnnnnnnnnnnnnnnnnnnnnnnnnnnnnnnnnnnnnnnnnnnnnnnnnnnnnnnnnnnnnnnnnnnnnnnnnnnnnnnnnnnnnnnnnnnnnnnnnnnnnnnnnnnnnnnnnnnnnnnnnnnnnnnnnnnnnnnnnnnnnnnnnnnnnnnnnnnnnnnnnnnnnnnnnngaacaggagagaagacggagtagaaggtgtagaggtgggagatgggatgaaggtagacgggggagagaagagtgaggaaaaggggag

SEQ ID NO: 417819 - DNA, 333 bp, Homo Sapiens
  misc_feature (42)..(83): n is a, c, g, or t
  misc_feature (87)..(122): n is a, c, g, or t
  misc_feature (171)..(288): n is a, c, g, or t
gccagacgtgataaacctatagggcgctagctcggctcgagnnnnnnnnnnnnnnnnnnnnnnnnnnnnnnnnnnnnnnnnnnccgnnnnnnnnnnnnnnnnnnnnnnnnnnnnnnnnnnnnagtcgacggtaccggacatatgcccgggaattcggccattacggccggnnnnnnnnnnnnnnnnnnnnnnnnnnnnnnnnnnnnnnnnnnnnnnnnnnnnnnnnnnnnnnnnnnnnnnnnnnnnnnnnnnnnnnnnnnnnnnnnnnnnnnnnnnnnnnnnnnnnnntcctccagaacaaagggaaccacaaaaaaacaaaccaaagggacc

SEQ ID NO: 417820 - DNA, 178 bp, Homo Sapiens
  misc_feature (54)..(92): n is a, c, g, or t
  misc_feature (95)..(130): n is a, c, g, or t
gacaggaaaaacctgggtaaactgatccactattgggcgcctaagctctcgagnnnnnnnnnnnnnnnnnnnnnnnnnnnnnnnnnnnnnnncgnnnnnnnnnnnnnnnnnnnnnnnnnnnnnnnnnnnnagtcgacggtaccggacatatgcccgggaattcggccattacggccgg

SEQ ID NO: 417821 - DNA, 769 bp, Homo Sapiens
  misc_feature (83)..(118): n is a, c, g, or t
  misc_feature (161)..(231): n is a, c, g, or t
  misc_feature (233)..(277): n is a, c, g, or t
gtcgagacgtgttactatactatagtgcgcatccgcgtagcgaagaacgagcgcagcgagcttagtagcgaggaagcggccgnnnnnnnnnnnnnnnnnnnnnnnnnnnnnnnnnnnnagtcgacggtaccggacatatgcccgggaattcggccattacnnnnnnnnnnnnnnnnnnnnnnnnnnnnnnnnnnnnnnnnnnnnnnnnnnnnnnnnnnnnnnnnnnnnnnntnnnnnnnnnnnnnnnnnnnnnnnnnnnnnnnnnnnnnnnnnnnnncttggtgggccggctggcccctaggaaaaggttttcaaaacactccggttgggggcgcggcggcgcccccaggtaacgttaatgtgaccctgggcgccaaagcttggtcccaaagagaacaccctgggccatgcacagggcgtttgggtttctcacaattaagaaacgcgcgcggggggacacccaggcggtctgaacacacattccggagtggagagtccggagggaacaaaagaggggggagctctacccaacggaggagggtcccaaggagggacgcctcgaaattatataaaaaattagcccccgcgccgcgggggataagacagcaggacaaaagatcagacgaacagagagagaagagaggaaagacaactaagacgagacagcgaagtagaagcacgagaagacgaacagaagaagaagataaaaacaggaaacacaagagacgaataagaaagcaagagacgagagtcagtaagagaataaagc

SEQ ID NO: 417822 - DNA, 1133 bp, Homo Sapiens
  misc_feature (46)..(81): n is a, c, g, or t
  misc_feature (119)..(433): n is a, c, g, or t
  misc_feature (484)..(503): n is a, c, g, or t
gaagcgaacggacgagcgcgggagtagtgagcgaggaagcggccgnnnnnnnnnnnnnnnnnnnnnnnnnnnnnnnnnnnnagtcgacggtaccggacatatgcccgggaattcggccnnnnnnnnnnnnnnnnnnnnnnnnnnnnnnnnnnnnnnnnnnnnnnnnnnnnnnnnnnnnnnnnnnnnnnnnnnnnnnnnnnnnnnnnnnnnnnnnnnnnnnnnnnnnnnnnnnnnnnnnnnnnnnnnnnnnnnnnnnnnnnnnnnnnnnnnnnnnnnnnnnnnnnnnnnnnnnnnnnnnnnnnnnnnnnnnnnnnnnnnnnnnnnnnnnnnnnnnnnnnnnnnnnnnnnnnnnnnnnnnnnnnnnnnnnnnnnnnnnnnnnnnnnnnnnnnnnnnnnnnnnnnnnnnnnnnnnnnnnnnnnnnnnnnnnnnnnncaagaaacaaccacaaaaaaacaaagggggtaaagggggaacaaacaaagnnnnnnnnnnnnnnnnnnnntatggtgggggggagcacccagccccgccgaaaaaaggattatcacaccaccatgtgtgtgggcggcggcagagacccccccaagatgagagtagaagacacactgctgcatacagtggatgggctgccccaaagaagactccagcgcacgaagaagtggcgtggtggttccacaccaaaaaaaagcacgccggggggggacgaggcagcgctgttgttgggaacaacccacacgagaggagcgatcgacgacgcacaaggaagggtctcacaacaacagagcaccaggcgagaggattataataattgcccccgctgcggggagggggaacacaaccaaccgaacagcgaagcagctgaccacacgaagacccgacaagagaacagacaagcagcacgaaagagcaggcatctaccaatgcgcaacgacaacagatcacaacaggccccaagcaggcacacaccagcaccagccacaacacatcgaataagacgacacacgcaccacagccaccacgagacaaagagcaacgagcccaggaacaagcactctcggctacgcaccgaccccactcgacgacaccagtccattcacacggagcagcaacaacgacgacgagacagaaagca

SEQ ID NO: 417823 - DNA, 173 bp, Homo Sapiens
  misc_feature (89)..(125): n is a, c, g, or t
aaaggaacccgtttgggtaaatatcactataggggcgctgagtgctgcgacgaacgacgagcgcagcgatcaggagcgaggaagcggcnnnnnnnnnnnnnnnnnnnnnnnnnnnnnnnnnnnnnagtcgacggtaccggacatatgcccgggaattcggccattacggccgg

SEQ ID NO: 417824 - DNA, 267 bp, Homo Sapiens
  misc_feature (27)..(27): n is a, c, g, or t
  misc_feature (48)..(84): n is a, c, g, or t
  misc_feature (122)..(214): n is a, c, g, or t
ctgtgagccgaacgacgagcgcaaggngtagtgagcgaggaagcggcnnnnnnnnnnnnnnnnnnnnnnnnnnnnnnnnnnnnnagtcgacggtaccggacatatgcccgggaattcggccnnnnnnnnnnnnnnnnnnnnnnnnnnnnnnnnnnnnnnnnnnnnnnnnnnnnnnnnnnnnnnnnnnnnnnnnnnnnnnnnnnnnnnnnnnnnncaagcgagctcgatatcaaattacgcccgcctgaataatgacaagtgatcata

SEQ ID NO: 417825 - DNA, 860 bp, Homo Sapiens
caagcgagctcgatatcaaattacgccccgccctgacatcatcgagatgtgtaatcataagatctgccgaatgaagcatcacaaacgcgcatgatgaccctgaatcgccagaggaatcagacacacttgtcggcctagcgtactacatacttatgcccatggttgaacaacggagtggccgacgaagtttgtccataattggcccacgtttaacatcaaaaactgctgacaactacaccccaggaatggactgcagaccaaaaaaaacatatgctcaattaagacccttaagggaaaaatcaggcacaggtatgtaacacccgtaaaagagggcccaagattataacggcgaaacatatagtgttgataggaaacactggccaggaaaacacaccgtcggggagaatacacatcccagagcagagtggaaagaacgatcacaggcacgcatcagcggcacaaccgcgggataccaaaggggagaaacacaaaatcccactaaatcaacccaggcatacacccggccactacaatagggccaagacggaacaagctcccgggaagtgacgcaattcaactcgaaggcggcgacaacagcaacatggtgcaactaaacagcgccggcacataaaaaactaggcgagacagcactcaaccctgatacaggggcctagcaacacagggcccggaagaactaccaagcctgaaaagggaccgcgaaataggcaaccactgaagaaacctgacgcggcaaaggccctccaaaaaggtcctagcgcaaggcccatggcgacataccacacggcggcaacacccacgggaccaacacgcaacaagagaccttagaccggaacaccaga

SEQ ID NO: 417826 - DNA, 421 bp, Homo Sapiens
  misc_feature (49)..(161): n is a, c, g, or t
  misc_feature (178)..(241): n is a, c, g, or t
agtcgacggtaccggacatatgcccgggaattcggccattacggccggnnnnnnnnnnnnnnnnnnnnnnnnnnnnnnnnnnnnnnnnnnnnnnnnnnnnnnnnnnnnnnnnnnnnnnnnnnnnnnnnnnnnnnnnnnnnnnnnnnnnnnnnnnnnnnnnntctccagaacaagggannnnnnnnnnnnnnnnnnnnnnnnnnnnnnnnnnnnnnnnnnnnnnnnnnnnnnnnnnnnnnnntggtgtggcggggggcccgcgcggccccgagagaaaagagtttttttaagcaccctttggcgtggggggcgcgccgggacccacagtgggtttagggggccacagcgggcccacaagcggggctcccccaaaaagacaaccgcgggctcagacgactgggtggctggggttttccccccc

SEQ ID NO: 417827 - DNA, 401 bp, Homo Sapiens
gcaccctttgttgcggccgccttggacccctcgaaaaaccgtttttcggagaccctctccgtgtgggccgggcgggtcccacagaaagccacaggggaccgcgggcgcccaaacgccggttcccacgaaggggaaccaccggggccacaacgaaagatagggccatgaggaaaacaccacccgcaaattaaaaacaagcgccccgggggcaacaccacgaacccgtccggaaccacaacgtccaacaaagggggagttccccgggacggcacaaccaagcgggactcatgtgcacaaaggggggagctcaaggagaaacgccaccgaaattaccaaaggtagagcccccccgccccgggggggctgcaaactaacaaattcgcgccgcccagcccgggggg

SEQ ID NO: 417828 - DNA, 862 bp, Homo Sapiens
  misc_feature (190)..(235): n is a, c, g, or t
  misc_feature (603)..(621): n is a, c, g, or t
ggagctctaactggctgcttccccatatttgtaatagttcaaagtcttgaaatatcagcgcttaagagtctttgggagcataaactgagcttcgtattaacagcttcttcatttgctttaaaatagcgagacctcttaccttttcaatcccaaaactaaccacttataattcagtgtggtcatttaaacnnnnnnnnnnnnnnnnnnnnnnnnnnnnnnnnnnnnnnnnnnnnnntttaaccataacatgactgtcacatattctctaggagacattttggcccttttagttgtttaggttattatacttcaaggatttataaatgtgcaacaattcatggagtggcacaaaaggatatagagagaccaagttgttgaggaccatagctggagtttacccttccagaagtatttttcttgccagaattgatcaaaggaacacccaacggcactggataggagattctagcctctgggtgcctcttccagataagccgaggctaaaaggggagttgaacaagttatgtcatctttcactgccgcagatacccctttttttatcaacttggacatcccccctaatcacagccattttctaaaatnnnnnnnnnnnnnnnnnnnagtgtaagcaaccggaggaaacccaggaggtcccgcgcggggccccttcaaatcctgggggcaaatcacggggggaagtttctccaccaggctttttcaaagggagcgggggtttctgaataagggaaaggcctctcaacacctgcctttcaaagaggatcggggcaggggaagagagcacggactcgacctcccctccccggggaggggaccccgttacaccaacggtaaggcggttggg

SEQ ID NO: 417829 - DNA, 758 bp, Homo Sapiens
  misc_feature (659)..(659): n is a, c, g, or t
ggttactagaaattgaagtatcccatcaaacttatgattttaggcctctataatactctaatactctaatcttgctggaaagtcgtggaggaaggaataaataaatttctgagcaatgtcttggcaaatatatttgacttttctgttctcccacctttacttactattccttattttttctttttaactttctatttgaaaatgcatatagactcacaagaaaagtatgaggactcactagaggttacaggtcccaggtatccatcgctcagcttccccactggtagtgtcttacacaactataatgcattatcaagaccagtaaaatgatattggcttagcaccgtcaactagactacggacgttaatcagatttcacaagtgtttgcctgcactcagatattctaatgcatatgtatctaagtctgtgaaatttaatcacacgtagagcttcacgtagccaccatctaatcaagatacagaagtgctctgtcactacgaaggaactcccttgtgccttcccctttctactcacactctggtccctccacacagccgccttctttaacctcagaaagccagtggatctgtttttctaccatataattttagtccattttaagaagttatataagaaggtatcccaacatcttatatangatacgaatatatggggcaaagatggggcggaataaagattaccttactaattgtaatacccttaactaaaaaattgattttataaaatgtcctattta

SEQ ID NO: 417830 - DNA, 203 bp, Homo Sapiens
  misc_feature (65)..(123): n is a, c, g, or t
ggggccggggcgcgccccgaggccgggctccagccgggcatgctccccctccccctcagcctccnnnnnnnnnnnnnnnnnnnnnnnnnnnnnnnnnnnnnnnnnnnnnnnnnnnnnnnnnnncagagcaagactacaactcccgggagaaagtcgcctgggccgtgtttcccaggctcccgacagctccggcccggctcgga

SEQ ID NO: 417831 - DNA, 579 bp, Homo Sapiens
  misc_feature (387)..(395): n is a, c, g, or t
  misc_feature (521)..(521): n is a, c, g, or t
ggtgggggggtttgaaacacatgggccaattaagaaatactggtgtccggagtttaaccaagttgaatgaactctcaatgaactggattaaccaaaccgaccctatttaagttgggttatctaaggggtggtttttccatccaaaaatttggagggtgggaaaggtttaattccgaaatgtggcctcttcctggaaaacgaatccttggaaaaaaccattaattttttttgggaattggggtaaagttttccaccttggaaagaaaccttcctttttagttccattgggttaaagtgtttaacagggaaattttaatttaaccttgtggaaaacaagagaaaaaaatttggggacaaaatatgggggaaacaaatttgcgcggcccnnnnnnnnncctccccgccgttttaaaaaacagcttcccccccttttttaacgcgccaaagtggggggcaaatatcttttcttatacaaatttcgcttataaacccctttgttaatagtgtgtgggtcccacagngccccaacgccaaaatttgtttttctgtaaaagaatcccctctttttagaccccgcac

SEQ ID NO: 417832 - DNA, 631 bp, Homo Sapiens
  misc_feature (418)..(427): n is a, c, g, or t
  misc_feature (503)..(539): n is a, c, g, or t
attatacgcgcgatccattgcgcctggctcaggtactgtttttccaacatgacttacttacgatcctattttcattctttgttaaacagatgggagttttctgaacttttccttaactacaaagtggaatgcatcttaatattttcctttttttacttgtgtctctccccagggagggaaaaacatatttattgtgacagaatttagcatattttaggccacattaaaatactgagtaatgtattaatcagtgaaaataggctatagtgaaaaatatataccatttgattaataaaattggtattgcaaaaatgcaaaaactgctggaacaattgctaacatttgtgttggcgaaataaatattactaagcctaaaaaacaatgggaaaactggcctatgtaagggccaacaaccccnnnnnnnnnnattaacccccttcccactttaattaataacccagatctaataaacccccggattttataaggaccctctcgtgcannnnnnnnnnnnnnnnnnnnnnnnnnnnnnnnnnnnnggcccctaccccgggaaaatctaatttccacgggcggctccccttggcgctaaaaggcctcaacagggcaaatttcttgtattttggaaaag

SEQ ID NO: 417833 - DNA, 433 bp, Homo Sapiens
ggactcatttttatgtgatctcagtggagggaggataaaatgctgattccagtttccagattcccattgacttcttccatcctaatttatattcacatttgtcttctccacagataagcacaggaatccattcctggagccagaatgaacatcttgggaccagcatcggtatgactgtgcagcaaacacatccaagcatatgacacagaggtttcacaattgcatggccacgtggatatcgtgatatcagcagtcactagcaggatttaagaaaatctccctaagcagcaaaacttctcctcaggttcatccttgaaacaatttagcatcctttggaattaatgaaatagactaagaaactattactttgaaaagctaagtgtctatgtagtttggataaattgagtaaagaattaaaattttcctttcattc

SEQ ID NO: 417834 - DNA, 679 bp, Homo Sapiens
  misc_feature (466)..(525): n is a, c, g, or t
ggtggcaaagtctatattccttaactgaaataaatggtattgtctctagtgttggatttgacatttaaacctgtctgccaaacttgaaccacagtcatgtctaagcactagtttaaaataaatcaggattttaagacttgagcttgttcattatctaatgtgtgtcaggtaagactcattcttcacccttgagaaatctcctttctgagttatattatcagatgttgaacgttcagtgtgattgatatgtttcccctcatctacttcatttttggttgttgaatattagtattaaccattggaacagcgtaccctgtaagtaacatttgaagcatttaaagagaaatctgtggaattattgtgggtggtctataatccttaagtgcaacgaatattgttagtagacttaataaataacccatctgtatacctcactactttttaaatgtctgtggttacttttgannnnnnnnnnnnnnnnnnnnnnnnnnnnnnnnnnnnnnnnnnnnnnnnnnnnnnnnnnnnccacagccccaccaaataattacctttgtctggcccccccttcgggcccacttaaagagagctttttcttaaaaccctttctattttgggacgccgcgggcccccccggtagggtaaaggggaaacactgggatcctaaagctggtttctccct

SEQ ID NO: 417835 - DNA, 867 bp, Homo Sapiens
  misc_feature (653)..(755): n is a, c, g, or t
ggtgggttatttctgtttttggctatcgtgaataatgctgccatggacattcacgtataagtttttgtgtggatatatgttttcatttctttggagtagagttgctgggtcatggggtaaccctaggtttaagcttttgaggcctaccagatttccaaagtgactgcatcattttgcattcccatcaacagtatatgaaggttctaacttctctacatcttcaccaatatttgttattgtctgtcttcttgacaaaagttctcctagtgggtgtgaactggtatcattttgtggttttgatttgcatttcctggatggttatgaatgttgattttactttcatgtgcttattggccattgtatatctttgggaaaatagctattttcccaaacttttgcccagtttaaaattgagttttctttttattactgagttggaagtgttctttatatattctggatactagaccagcagcagatatatggcagatatgttttcccattctgtgggttgcctttcactttcttggtggtgttctttgaagccccaaagtttttaattttgatgatatgcaatttatctatttttccttttgttgcatgtgcttttggtgtcatatctaagaaatcattgcataatggttttccaggtnnnnnnnnnnnnnnnnnnnnnnnnnnnnnnnnnnnnnnnnnnnnnnnnnnnnnnnnnnnnnnnnnnnnnnnnnnnnnnnnnnnnnnnnnnnnnnnnnnnnnnntacatagtggtggagctgaattggaaaactcttccctgacaataaagggtgactggataaatgtgggaaaagtccttgaagttggaaaggtataatcatttttcaaccatca

SEQ ID NO: 417836 - DNA, 582 bp, Homo Sapiens
  misc_feature (523)..(523): n is a, c, g, or t
ggaactcagtttaacccaactttataccatacaagtaataatagccttagctctgagcctaaatatatttgccaaataaaaatgataattatgatccatttccacatactcctcatgagagcttggtcaagtcctcagaagcagcattgtgttccaatatatctttatcaaacagtgtgctcagcaacaaggacaggagagaacactcagtttctttaattttaacaccttgttgattcaaaaacatttaacaggcatttgaaaagaatttcaaaacaattaacatttgtttctaatacatttaaaaaataatgccttttaaaatgtgggtagaactttttttattaacatggctttaatttatagcaaccatttgttacctaatcacagtaacacaacaaaataattagtgtatcagctttgaagatctcatttcacaaaagctaaaaaaacacgttatgatatatccattactcaaactcataagcccttttgcatgcattgggcatagatttcatggaanatcaaaagcatttagtctactttctgacattttcatctgttcttttgactaccttagca

SEQ ID NO: 417837 - DNA, 889 bp, Homo Sapiens
  misc_feature (116)..(131): n is a, c, g, or t
  misc_feature (148)..(382): n is a, c, g, or t
  misc_feature (790)..(790): n is a, c, g, or t
ggtgccctgaggtcacacagcagcgcatgttgccttcagtccagccttctttggaatcccaacccttccctcaggaggttggctttaaggccttcatttctaaaccactgtcttcnnnnnnnnnnnnnnnngagatggagtggcttgnnnnnnnnnnnnnnnnnnnnnnnnnnnnnnnnnnnnnnnnnnnnnnnnnnnnnnnnnnnnnnnnnnnnnnnnnnnnnnnnnnnnnnnnnnnnnnnnnnnnnnnnnnnnnnnnnnnnnnnnnnnnnnnnnnnnnnnnnnnnnnnnnnnnnnnnnnnnnnnnnnnnnnnnnnnnnnnnnnnnnnnnnnnnnnnnnnnnnnnnnnnnnnnnnnnnnnnnnnnnnnnnnnnnnnnnnnnctaaattactgtcttctctccaagaacattaatatagaaccacttttatatctacaactttaattacatgtttatttccccaaatcatcaaaatctgcaatgtccccaaacccctcaggagattcagtgaaagaaggaggctggaacagggttctaacagatgagggtctgcacttgcaggcctctgttttaacaacactttgctgtttttgatcctctagtccatataccttttttccttaccctcccgcatattttggtccaatggagtcaggaatataagccctttaaaacccctgaaagttctttgggggttcctgaaagaaaaagattcctccattttaaaggacatagttctctggtttggccagtttcaggcccccctgaaccttgtaatggggggaaacngaaccacctgtgaactacaaaatccacctttttatccggttcccccagctggctccatttaattgtaccgggaaccccaggggcaagacctggggttta

SEQ ID NO: 417838 - DNA, 871 bp, Homo Sapiens
  misc_feature (50)..(730): n is a, c, g, or t
agtcgacggtaccggacatatgcccgggaattcggccattacggccgggnnnnnnnnnnnnnnnnnnnnnnnnnnnnnnnnnnnnnnnnnnnnnnnnnnnnnnnnnnnnnnnnnnnnnnnnnnnnnnnnnnnnnnnnnnnnnnnnnnnnnnnnnnnnnnnnnnnnnnnnnnnnnnnnnnnnnnnnnnnnnnnnnnnnnnnnnnnnnnnnnnnnnnnnnnnnnnnnnnnnnnnnnnnnnnnnnnnnnnnnnnnnnnnnnnnnnnnnnnnnnnnnnnnnnnnnnnnnnnnnnnnnnnnnnnnnnnnnnnnnnnnnnnnnnnnnnnnnnnnnnnnnnnnnnnnnnnnnnnnnnnnnnnnnnnnnnnnnnnnnnnnnnnnnnnnnnnnnnnnnnnnnnnnnnnnnnnnnnnnnnnnnnnnnnnnnnnnnnnnnnnnnnnnnnnnnnnnnnnnnnnnnnnnnnnnnnnnnnnnnnnnnnnnnnnnnnnnnnnnnnnnnnnnnnnnnnnnnnnnnnnnnnnnnnnnnnnnnnnnnnnnnnnnnnnnnnnnnnnnnnnnnnnnnnnnnnnnnnnnnnnnnnnnnnnnnnnnnnnnnnnnnnnnnnnnnnnnnnnnnnnnnnnnnnnnnnnnnnnnnnnnnnnnnnnnnnnnnnnnnnnnnnnnnnnnnnnnnnnnnnnnnnnnnnnnnnnnnnnnnnnnnnnnnnnnnnnnnnnnnnnnnnnnnnnnnnnnnnnnnnagcagtgcagacatacgataatacaggttacattcggaagagattagcaacataaatatatgatcacactggcgtcccataattagcaatcgatcacgccataagagtaccaaacaattgggaagacacacaattcaatga

SEQ ID NO: 417839 - DNA, 168 bp, Homo Sapiens
gaactctagggacaaggccaccttaggaattgcaggaaggagccagcccagagactagcggccctgtcccttgtactgggacaacttcgggtgggatttcccaagactgcaaaggtcccaggtagcttagagtaaagggcacctaattaggaacaaaaagatccctgt

SEQ ID NO: 417840 - DNA, 842 bp, Homo Sapiens
  misc_feature (86)..(121): n is a, c, g, or t
  misc_feature (614)..(672): n is a, c, g, or t
cccaaactcgtatagatcactatagggcgctagctttgagagcgaacgacgagcgcaagcgagttcagtgagcgaggaagcggcgnnnnnnnnnnnnnnnnnnnnnnnnnnnnnnnnnnnnagtcgacggtaccggacatatgcccggggaatacaggcattacggcacggggaacacgatttctaaaataagttatgcttgctacttatggaacgaaataagaggccataacgaccagtggtgtcaatgtcctgttaatctcaggcatctttgagacaggtcccgaggaccggcgctgggagtcacgaccgtccacggacctgtgaccaacactacgcccctgtgcgtaccatttctggctgacacacttccacggggctcttatactacaaccattagcagatcccattgacgccacgtgctggttgcgttgccgtatggcttgccatggtaatcgcaggcatgcatcgagagcagagcatgacggcccgagcaactcgcttgacaccctgggaggccagacgccctctgcacggtgcagccaacacagacttgcaccaacgtgtacctccatgcccatgggcacacaacacgcccacgacgcaccaatccnnnnnnnnnnnnnnnnnnnnnnnnnnnnnnnnnnnnnnnnnnnnnnnnnnnnnnnnnnnccagggtcagagcgggacccgcaacgaaccgcacgaccacccacaatggacaggaggcaagacagggaactaagtccaaaaagcagcagacagacagcacaaccaacgaagaacaagacgagcagggcgggagaaccacaaaggtgcagcgcacaaaagaccagacagcg

SEQ ID NO: 417841 - DNA, 1048 bp, Homo Sapiens
  misc_feature (50)..(89): n is a, c, g, or t
  misc_feature (92)..(127): n is a, c, g, or t
agaaaaaacagacagaaatgtaacgatcatatagggccctgcttacgagnnnnnnnnnnnnnnnnnnnnnnnnnnnnnnnnnnnnnnnncgnnnnnnnnnnnnnnnnnnnnnnnnnnnnnnnnnnnnagtcgagggtaccggacatatgcccgggaattcggccattacggccgggcaaatacaatttacttgtaaacacttaggaccaataaagtttagatggagctcataattatacaaactcatctcgttcacaaatccctagggctcaatgttaaagtcagccattgtttaaggcagaaattcaggctttcagcatcatcagtgtcagccaacagcattttcccattcatcatgcagcatcatcgatcctcattcaaaccatcaaacacttttctccttgagacttgtctcattattcactggtactatctgggttggcacatcaagacatggtcatgcccaccgataaagtatatatgtatctcacgattacattaaccccaatggagaaacgtgtttacaaagacacctgacacacatttaaacaacacggtggtatctacgtcgataagaataccgatgggcgatatgatgtaaaaacaacacattacacgaattacggacattataacaccgcataacttgggcttaacgttggaaccctaacgcaaccgcggacggaccacacaagcgcgatctggagtagtaacttctaacgggattaacacctgacctttccacaacaatgggttgggacctgtaacagccacaaaaccgatgtgaacgttggcggaaccaccaacgtgggcacacgaagacaccttcacggagtagcaataatataacagaaattaacccccctatcaacagacccaacagtagccaccaatgtatatataccatttgggccccattggagcttacagcattttacgccaatcaccagttaccaggcgataactagcgggataggaccacaaaccgtttgattataccaagcgacacatttaccgcatgcacacattggcgttttgggcacagtcg

SEQ ID NO: 417842 - DNA, 817 bp, Homo Sapiens
  misc_feature (50)..(381): n is a, c, g, or t
agtcgacggtaccggacatatgcccgggaattcggccattacggccgggnnnnnnnnnnnnnnnnnnnnnnnnnnnnnnnnnnnnnnnnnnnnnnnnnnnnnnnnnnnnnnnnnnnnnnnnnnnnnnnnnnnnnnnnnnnnnnnnnnnnnnnnnnnnnnnnnnnnnnnnnnnnnnnnnnnnnnnnnnnnnnnnnnnnnnnnnnnnnnnnnnnnnnnnnnnnnnnnnnnnnnnnnnnnnnnnnnnnnnnnnnnnnnnnnnnnnnnnnnnnnnnnnnnnnnnnnnnnnnnnnnnnnnnnnnnnnnnnnnnnnnnnnnnnnnnnnnnnnnnnnnnnnnnnnnnnnnnnnnnnnnnnnnnnnnnnnnnnnnnnnnnnnnnnnnnncaaaagctcaatgacatctaggagttggtttttcttgacacaaaacaacttgaacaacaggccattacggtagactaactaacacacacacaggaaaggagacgaacgatccaaatacacacaacttagaaactgctgacacaccgacatattactaccatcagaaatataccatagcaactgttcagaaaactaactatagagacaccttcttatggtaaacgaaaggttaagaaaaaccctagcgagatcataggactacatttccgtggtacacattaccaccctgccaaaggctggatgccagcgaacgaaactcgattaccatgaacagaaccactaacaaagcttctaacaattggcatcaggccatcaactcgcctacaaccaacacaagctgggacctatggatcccagtcactccaccaatgctccc

SEQ ID NO: 417843 - DNA, 668 bp, Homo Sapiens
caaaggtttcaaacaaggcctcggtcaacaccacaaaaacaaagagacccggggggtaccagaggattatagggcaccacggcgagcgagaaaccgggcgacccaacaatatatggccctcacggacaatctctccccgcccggcaaactccgggtccacggcagacacccaacggcgaccacacaaccccgggaccgcatcagcgaaacaacgtgatccgggacacccgggcaggcgacacctctattcctccagcccacaacgcccacggacggaagagcagcagcccacggccacttcctctccacaagaacccgggcccacgaacactcctaccatccctcgaacgcacactggcgaccccgggaaacccctgctccccactggtccattacattgcacaccagactcgaagcgcatggtggccacaacacaggcaaccctcgcccaccagaaatgcgttcctcacacaacgtcatcagcggcggcggccactggaacccagattggagtcggcgggagacccggcacataagaaccggcatggacctcttcaacacagcggcggcggctgcccacgcacgagcgccaacgagggcaccaaccgccaccgcgcaacaaaggcgacaagccacagcatcacagcagcacggacatctagcgcggc

SEQ ID NO: 417844 - DNA, 256 bp, Homo Sapiens
tttttgggcggccggcgctagaaaatttttcaaaaccatgcgttgggggcggggcggccccgatggttaatggaacacgtgtccaacaggtgtcccagagaaaaccgtgctcacggaactggtggctgtcggttcccacccaaataaaaaaggcgcggcggcacggaggctcttgaacaatcgcagagggtttcggagccacaagggtcatccggggtcccaggagtcgattcaatgagcccgcgcgaggaaacac

SEQ ID NO: 417845 - DNA, 765 bp, Homo Sapiens
  misc_feature (56)..(87): n is a, c, g, or t
  misc_feature (90)..(125): n is a, c, g, or t
  misc_feature (165)..(372): n is a, c, g, or t
ccgaagaaacaaacaaattgactgagatataagggcctagcgtgttaagcgaagannnnnnnnnnnnnnnnnnnnnnnnnnnnnnnncgnnnnnnnnnnnnnnnnnnnnnnnnnnnnnnnnnnnnagtcgacggtagcgggacatatgcccgggaattcggccannnnnnnnnnnnnnnnnnnnnnnnnnnnnnnnnnnnnnnnnnnnnnnnnnnnnnnnnnnnnnnnnnnnnnnnnnnnnnnnnnnnnnnnnnnnnnnnnnnnnnnnnnnnnnnnnnnnnnnnnnnnnnnnnnnnnnnnnnnnnnnnnnnnnnnnnnnnnnnnnnnnnnnnnnnnnnnnnnnnnnnnnnnnnnnnnnnnnnnnnnnnnnnntggaatcgtggcctaacattggacacacatgtgatctctcagacgcatgcggtgacgcaccaggcagccgaagcacctgctgtcacctcaaacaacaccaaccccacacggaccaccgcgaaagagaccgacaaacacgaaaggacacacagagcaagacaaaacaccatcaaccgcacccggagaaacggggaacaagaagaggtgcacacgaaaatcacactatgaaagagacccaggcacgctcggcgagcaaccacccacccgtgcgccaccacaacagtggcaccacaaaagccctacacgactcgatgacaataacaacaaacaccgacaacacaccactcgagcccggccaccctgtgggcgcaacagacgcccacccgtgtggtg

SEQ ID NO: 417846 - DNA, 839 bp, Homo Sapiens
  misc_feature (122)..(157): n is a, c, g, or t
  misc_feature (196)..(261): n is a, c, g, or t
caccacaaccaaccaagacacgacacacaacactccactcacacgccgacacccctagtatctatgggccctcggtaagcgaacgacgagcgcacccgagtatttgagcgaggaagcggcgnnnnnnnnnnnnnnnnnnnnnnnnnnnnnnnnnnnnagtcgacggtaggcggacatatgcccgggaattcggccnnnnnnnnnnnnnnnnnnnnnnnnnnnnnnnnnnnnnnnnnnnnnnnnnnnnnnnnnnnnnnnnnncacggcatctacgcagggatcaggcagcatcaagcaccatcctgggctcaaccatggtgcaacaccccaatctctgggtggagtggccgcagccacccatgtaggtccccccagagatcacgtcccaaggccaggcgcctgcaggcgcccaagggcagccaacatgcaaccggttgcacaccccctgtggtggacagggttgcggccagacctattggcgcccaggtgtgcaaggcggcccgccacgccactgggcgttcggccccaacttgcgcataacttttaccccaaaggcccctatggggcgaccggaaaaccacaagggcaacgggaacgcgaaacgcgggaccaacttccacccgggcggccccaaagaaagagccgccccacgtccagcagcacgcaagcacgcaacaagaagcacacacaacgcaagcagacagcactcagaagcaacaccgcacgaccccaacacacaccagcccagattggtgcggagagacgaagcgaaagcccccgccgcggacagcactcggctgcgagcaggcacccccgcgaacgcgcaagaacgaaagaca

SEQ ID NO: 417847 - DNA, 1274 bp, Homo Sapiens
  misc_feature (44)..(87): n is a, c, g, or t
  misc_feature (91)..(126): n is a, c, g, or t
  misc_feature (489)..(500): n is a, c, g, or t
  misc_feature (520)..(580): n is a, c, g, or t
  misc_feature (587)..(713): n is a, c, g, or t
  misc_feature (884)..(927): n is a, c, g, or t
gaaagagaatcgattcgactcactatagggcgcctcgcgttttnnnnnnnnnnnnnnnnnnnnnnnnnnnnnnnnnnnnnnnnnnnnccgnnnnnnnnnnnnnnnnnnnnnnnnnnnnnnnnnnnnagtcgacggtgaccggacatatgcccgggaagccctcgcagcacagctttctcagcaccattcgtttggctgcgcgggcccagtcaggtcacagtgcacacatggtcatagctgtttcctcaggcagcatcctggtcatgcactcagtgcttggcattctcaccaaatcaacacaaacgcccgtgcggcaaccgcagcgttctgcaaccaaatcccagcatggcagttctagcaggtccattcactgggcatctcatccaacaggcagtcccaagcgcagctcagactatcgaacagttaccgaccaccgacaccagggagaacgaacaacgacaacaacaggcaaaggacaaacacgcgacnnnnnnnnnnnngacaacaagagagacagaannnnnnnnnnnnnnnnnnnnnnnnnnnnnnnnnnnnnnnnnnnnnnnnnnnnnnnnnnnnnagcaagnnnnnnnnnnnnnnnnnnnnnnnnnnnnnnnnnnnnnnnnnnnnnnnnnnnnnnnnnnnnnnnnnnnnnnnnnnnnnnnnnnnnnnnnnnnnnnnnnnnnnnnnnnnnnnnnnnnnnnnnnnnnnnngagcaaggcgggggagccgcgcaccgcgcagaaacgcaccggcacggcgagacgggagcaaacagcgccgcgggcagaggagggggagagagccaagcaacgcaacggaccgaagaagcacagcagaggaacgacagggacagccagccgaggagcacaggcgcggcagcnnnnnnnnnnnnnnnnnnnnnnnnnnnnnnnnnnnnnnnnnnnncgacaacagaagaacgcagaaaacacgaggaagggccaagcagacgagagaaggagaagagtaaaagacaggagcagaggggcgccaagcacgagccagcaggagagacagaaccgaggaacaagcagggaaagacggaagcgagcgagaagcaagggaagagggaagacagagcaggagacaacaacaagaggagacactcagccgagaaaggaaagagaaggcagccaacaaaggagccgaccggggagagacgcgaaagcgagacaccagtgaagagagcaaagaaaggacgaagcacaagaaagaagaacagacaacgcaagagagagagagaagggcagacg

SEQ ID NO: 417848 - DNA, 343 bp, Homo Sapiens
  misc_feature (44)..(134): n is a, c, g, or t
  misc_feature (138)..(184): n is a, c, g, or t
  misc_feature (190)..(258): n is a, c, g, or t
tgaatatctatgcgatccgggcatatgttcggtaccgtcgactnnnnnnnnnnnnnnnnnnnnnnnnnnnnnnnnnnnnnnnnnnnnnnnnnnnnnnnnnnnnnnnnnnnnnnnnnnnnnnnnnnnnnnnnnnntagnnnnnnnnnnnnnnnnnnnnnnnnnnnnnnnnnnnnnnnnnnnnnnncgcgtnnnnnnnnnnnnnnnnnnnnnnnnnnnnnnnnnnnnnnnnnnnnnnnnnnnnnnnnnnnnnnnnnnnnntgggatatagaggaggaagggaggaatagatcaatatagggatagtgcacgaaggagagaagagaaaatagaaaagagaacggcg

SEQ ID NO: 417849 - DNA, 1146 bp, Homo Sapiens
  misc_feature (41)..(131): n is a, c, g, or t
  misc_feature (135)..(181): n is a, c, g, or t
  misc_feature (187)..(257): n is a, c, g, or t
  misc_feature (1025)..(1079): n is a, c, g, or t
agtctgcatggatccgggcatttgttcggtaccgtcgactnnnnnnnnnnnnnnnnnnnnnnnnnnnnnnnnnnnnnnnnnnnnnnnnnnnnnnnnnnnnnnnnnnnnnnnnnnnnnnnnnnnnnnnnnnntagnnnnnnnnnnnnnnnnnnnnnnnnnnnnnnnnnnnnnnnnnnnnnnncgcgtnnnnnnnnnnnnnnnnnnnnnnnnnnnnnnnnnnnnnnnnnnnnnnnnnnnnnnnnnnnnnnnnnnnnnnngaaaggtaaggagtgaataccgactcactaaaggaggctacacgtcaccccacaaacggcaacaaggacaagaggccagcaacattggacgaagagcggacaagcaggacgaccaatcagcgaacgaaacagacaccacattagagacaaaaacgcgcaccaaggtcgcacgccgacccggagcatcctagaccagcagcgatacaagacaagacgggaatgatacacaaaaagagaatccacacgccgagccgagaatcaggatgaaaaacccggccagcgagaccaccgaaacacagcgataggcgacacaacaaactgacagaaacggtcatgcagagccaaacgccgagaagcagaaacaacgagggcatacgacacgaaaaagcgatggaccacgaagggaacaaatcatacacgacaccgaagcccccgacgaggcaaaacaaaaagtacgcaaggcgacaacgtgactgcagcccacagggcgaaaagcgagcatagaccaagggcaccgcggcgaacggacgacgacaggcagaacaggagaacgcaaacacaccgacacgcgaagagtggagggaggaagggtgagcggatagaaaggggagacggtggggagagaagggaagaacgagaaggggagagcagacagcaaggaagggacgggtggagcggcgagggaaggcgcgggggcgggaacggacagcgcacgcgacgacgcgcgaggggggagcggcacagggaggggagacagcacagcagggnnnnnnnnnnnnnnnnnnnnnnnnnnnnnnnnnnnnnnnnnnnnnnnnnnnnnnnacggcgctgcggagcacacaagggaagcccggcggagaagagacagggcgctacagcgggaggggcc

SEQ ID NO: 417850 - DNA, 418 bp, Homo Sapiens
ctggttatagtttgtttattgccacttagccagtgggcggggggtattttgaggacaaagattgtgtctccagagtccacctgtggcactcaatacatgccggcacaagaactgtgacaatctgcgctcgggtcctctgagcaggatggggcctttgtaatgggtccattcaacaaatacttacagaggccctaccacatcccaagcgtgctccgttctaggtcctaactaggacacaacaacaaacgggacatacaaggcctctattctcacagggcttagtgagaagagagaaacaggcaacaaacaagatgaatgtcatagagatctacacagaattcaataggctgctatgatagcaagtggctggctgtttcttggtctgtactgagcagacaaacgcagcctctctgaggaa

SEQ ID NO: 417851 - DNA, 376 bp, Homo Sapiens
  misc_feature (96)..(96): n is a, c, g, or t
  misc_feature (107)..(107): n is a, c, g, or t
ggaattcttaatttattattaaataatccattgaatattgacaattttacacagtactcatcaaaaaatctagacccggaaaagagattattcagngcttttcgaanaagtcaaaaaatccttaaaaccagagtaggcagggtacagcaaataaaatgcagacactttaacataagaaacaaaatctccaaaattgttctcctacctacccaatctgccatattccactttttccaccaatttcaggagtttccgccacatggtttggctccaatgagccagtccttgcagcatccacagacacgaattggatctgtgtttttatatcaacagataagttcaattacttcatgatattcttttatgcacaggtaaa

SEQ ID NO: 417852 - DNA, 711 bp, Homo Sapiens
  misc_feature (265)..(313): n is a, c, g, or t
tagcatatctatagcacacacgcatgaaactatgtcagtcattttgaatttaacattgtgcataatgtattcataagaattatatttatttattagcatttatcttcaaatcaaaggttaaaagtttcaagatgcacaaaaatggttaactttctgtgagaagtctgagaaatcactgaagacatgaaaatgacaggctggaggaagaagtaaagaacctagaaggccaaaatggaattctaagataacatgaatatagaacatnnnnnnnnnnnnnnnnnnnnnnnnnnnnnnnnnnnnnnnnnnnnnnnnnttattaaatggaaacattagattcaagtaaacccaaaacaatcatcaaagtagatgttaacagcattttgagtacatgttgtgagtatgagaagtgcaattctaaatgttaggcccttatgttttaacatatcagcaaatacaatattttgtttctaatttaacaaatttttaacgactgttatgttagttgtgacatatttccaataaataattatgtttcccaaggacactgggtacaacaaagtgggtctgacaattaacttacctttgaaacctgagcccttcattagttacaggaactagactggaaccatgattttcctctcctgcttggagaacccacaagtagtgttccttttctgactcttggaaaattccttgcttttagccaaatga

SEQ ID NO: 417853 - DNA, 1143 bp, Homo Sapiens
  misc_feature (14)..(14): n is a, c, g, or t
  misc_feature (997)..(1087): n is a, c, g, or t
ttggaattttccantctggttaataataagacaagctcattcaaaatgtaccatttatactaatcctgtttacagaataacaaccagtgggttaaactaagtatataataaaccacactgtatttttgtaaatttatctacaaaagcatttgactttaaaattccccgtgcatcatataaaaataacattaattttacttcttcaattaaagtctaccaagttagaaatattcacaaattcaaacatatcaatgattatctttatgaatttgtcacaatacaacacacagagttcacaaaacttgatttacagaaatgaggtaagaactagtgcaatgtttaaccgaagaaacatattgcagaattcaacatgttctatccgagctcaagtacacagtggaggtctaattacagcttggctcttttccactagataattcacacaccaaaggaagagtttgatgagtgacatcctcaggtggtggaatcactctgcggctactgacacatcaaaagcgtggctaccccaaagtaggaagggcatagtcatacaggttgcacctgtaatcaggaactactagtggtgagcttagtaatggtcagtcatgggaagtggtataaaataaaagaaatctctattcttaccaaatccaatcctgatcattgtgactcagttagctggataaagtacccaggtaataacatcagaccagagctagtctgcagtggcgcagaaaagttctgaataaaagcagaagcttgggaaggcagccggaatacaggagcacgattacaggcgagacaagaaagacatagaaacacaaaccacgaaggctagaagccagaagaacaaaaggaagcacctaaacaagaggaaatcacaacacataagacaaagagcccagagaagaagatgtaaacgaacaaagacaagaggagcaaaacgggaggacatcgggagaaatggcgggagcgacaaaaggatgaaaccggagannnnnnnnnnnnnnnnnnnnnnnnnnnnnnnnnnnnnnnnnnnnnnnnnnnnnnnnnnnnnnnnnnnnnnnnnnnnnnnnnnnnnnnnnnntcaacgaaagagcccgaaggaggagaaaagcaacgacgagaaatcagagtaatatg

SEQ ID NO: 417854 - DNA, 811 bp, Homo Sapiens
  misc_feature (565)..(565): n is a, c, g, or t
catatatacagtcatgcaccatataactatgttttaatcaatgatggacctcatatactatagtggtctcataagattgtaataccatatttttactgcatcttttctatatttagatatgttttgatacgcaaatactcaccagtatgtgactattgtctatagtatttagtacagtagcatgttatacaggtttatagcctaggagcaataggctacattatgtagcctaggtgtgtagtagtttataccacctaggtttgtgtaaatacactctatcatgtttatacaatgacaaaattgatggatttctcagaacatatccttatgacacaggactgtacttcaaaatattgtgttatacatgacaaatacatataattttataagtcaattctttaaaaataaatatttttaagagaaagaagtacatacacatactctataacaaaccaggaagaacacacaatgtgtttccagttccaaatccttaagagctgatggtaattcttatcagtgtggcactatgagccggtttgcacatcttcttgtagtctctggaagntctatctgccatgctggtgacttcttttgcaatctgcttatatggtcctttttatccaagtggttagagcggtatctgggttgggttggcaccctttgttgccggtgtgtcttagaacctggcggaggaaatggttatacctccttgtgcgtcggggaaatttacgtcccgaggattgcgttcggcttcacgaaattttagacccgcgagcaggtctttggaggcccccccctaagatcgtgtttg

SEQ ID NO: 417855 - DNA, 1014 bp, Homo Sapiens
ttagtttgacataaactaagcagtataatgattcttatatctactttctagacttctgttaaacaaagctccatgtgaaaggaaagcccatactccaattttacaacccctcttccattcagcctctgtaccttcctcatgcagtaaagtaccatagacaatagcctacaactctgctagtaatcttcctttttcctttcctcaagctgtctttttttggggaataagataaagctttttattttattacttatttatcttgacacataattgtacatattcatggggtacctagtgatgttacaatacatatcatgtatagtgatcagatcaagataatcagcatatccatcatctcaaacatgtatcatttctttgtgttgggaacattcaatgtcttccttctagctttttgaaactatatattattgttaactatagtcatcctacagcggtatagaatagcagtgcccaacctttttggcaccaggaacaggttttgtggaagacagtttttccatggacagggatggggctggggatggtttgggataaaactgttccacctcagatcaccaggcattagctagattctcataaggaacacacaacctagatccctggcatgcacagtttacaacaggttttgcactcctattattatgggatcttggggtgttgctttctggctggaaacctctgtggccagtcgtgcctttgcccaaattttggttcagccactgagctcattctgttcactcgaactggcaggtgtggtcagctcaaaattatggctggattcaactgcaggagatgctggagcggcaggtgttgaaatattggttgccaagccagtgatgcgtgtgaaggggcgtcaggcaccaagggagactgcgggaatggaagaacgattttcatgcggacgggtcaacgaacgagggataaggggtgggacgagagaagggtttcacgagaagtttgtctccgtcgccgcggttgtgctgtactgtcgac

SEQ ID NO: 417856 - DNA, 955 bp, Homo Sapiens
cccctccaagacatcctcgggtagtagtctataaaaggatgtagggtgtgagaaggtatcttctcctttaatgagacgcacactccaccttccgcagtccccaggctctcctttttttcagggcgcatcccccctctctggtatttcctccatcctgccaggcccctcacccttgcagagggcattcatgtgatgctgcatgtagtgtttgtgggtctgtagcactttgaagtgcagttcccacaagatctggttctgatggacctcatccggggttgtcctctctggttcccacaagatctgttcctgatgagcctcatcttggttcaccttctccctcatgtgtctcactgtggcctctgtgctgcttggtctgctcaggcagttctcacaagatctagttctgatgagcctcatctgtggtcgccttctgcagttctcacaagatcggaacccgatgagccttatctgggttcgccttctccctcaggtgtctcaccgtggcctctgtgctgcttggtctggtcaggtagttctcacaagatctagttctgatgaacctcatccaggtcacctccctggggtgtccctctgtggcctccatacttcttggtctggtttgacagttcccacaatatctggttccgatggacctctctggggtcacctatgccctcagtgtccccatagtggctccatggcggcttggtccggatccgggagcactctgggtgttcctctccgctgcctgcgtggctcctggtccttctggcaccttgggcatggcttaccatgctgttccggccagtattcccccgtcatgtgccgtgcctttagcactgtcgcgatcctggaccgccctgagacgcagaggacacgccatggggaagggtctgcacagatgaacacttgcacctccccttggaacgaagtctctccccctgttttgccgccg

SEQ ID NO: 417857 - DNA, 861 bp, Homo Sapiens
tgcagtatccttggttgtatccctcattaccaccatctgattggctgaccagcaatgtgtcttcgagaaatggaacccgggttgcttgaagacaatcttaacttctctaagggtttgcttttcaaaggaagagtaccccaggagactcctctcagcctcagggcatccacctgctcccttgagaggctacactccaacttcaggctgtcctgtctcccattcccagatatgcgaagtttcattccaggccaggagctgaaatttactagacattgtagcatacacagccacagtggatatcttgatttatccccagacagtactgaaacccagaaccaggaaaaaactgaagggtggctgaggacacattaccttataaagtttccaaagggaaaccctgacccaaaaatattctgataaggtttctgtggctagaggcaataaaaggaaaggaggcacagaacattttttacaatacagtgtcaggggattattctttgctttcttctcttgggaaatctttacaacacagaaaacaaatcttttttagaatgccagccaatgctttgtcaaaaaatgattaattaaaatatggtacctaaaatgtacactaaagtgtacatttacaaggacaaatagttgataatgtgacattagggaggggaaacttggcatttgggaatctcagaaggaactggaaatttagtattttactgcaagccagagttaagctggaggaatggaaactggggaagaagtcttgagaccctgcttgagaccgaagttgaaaatgcggaggaaaatccgtggccgttggaatttcacaatattagtgcaggccttaactgggtgccccgcgca

SEQ ID NO: 417858 - DNA, 879 bp, Homo Sapiens
tctagtttcaaccaggatatatagaaaagagtgaacagagggaaggaactatcaagggcaatgcatgaaattcagttggtgaaaaattaagttgagcaactgtcgggacatgtaattagaatctgcagtttgttcaactgctaggtggatgtgggtcaatccaagaggcgggattggtgcaagaagttgaggaagacgagatgagcgtgtgtgaatgagcagctgtctgtgaggaagaaaggctaaatctattcacaggttctcttccttaaacaagcacctgccactgattgacagctctaccaagattgcttaaggcagacatccgctgaaaatgcttatggtgcatacttgtttttaaaaagatggaaaaacctgccttctcaatttagtatttcctaatcaaatctgaaatggggggcaaattcaacgtgagggatttattaaaatatgaaaatacagtccttactgcattaaaatagctctatatagaaatttataatgagagaaggaaaagtaattttatcccttggcagaagtcttagtaatcactggaattataacagaaatattagctattttaattttctttctcaatattgagtctcacaagatcattttatcggttgcaatgtcagtaatttttgcttacctttccccccgacaaatttagctttgtgcctcaagtggtaataaagttggaatatattactgctatgaagctgaaatagttttgccattctccaatgacattctaactgggattccttcaagagaaagcttacatttattccactaaaacattcttgtttatgcagcagagttccacttggtgctttcttcttctttcttcacccaggaatgttacttccttgcatt

SEQ ID NO: 417859 - DNA, 799 bp, Homo Sapiens
  misc_feature (44)..(80): n is a, c, g, or t
  misc_feature (117)..(150): n is a, c, g, or t
gtaatagatcatatagggcgaatggattcacgcggtggcggcgnnnnnnnnnnnnnnnnnnnnnnnnnnnnnnnnnnnnnatcaggccaaatcggccgagctcgaattcgtcgagannnnnnnnnnnnnnnnnnnnnnnnnnnnnnnnnntccccgcggcgggaggagcccagccggggtctcgggccacaggagccggcgcgggctggacggagggagtcgctagtaaggagcgtcaatgagcctcccggcgcccgtcgctcagcgcgtccgatatcccctgggggcggcatgcaaggctgccgggccagaatcgggactcctagaaagaggggaggcagtacggatggaatgacagcgtggtgtcgtgaggtggatgctctgatagagagcttgatcggagatccttactagggaggtacctgaccctgtgagacggcgataggcaaggtcgacgtcttttcactacgtctgaagaaaggttgtccatgagtgagagcatcatggtgattatggtattgattccgagagagacctgattgacgtagtcgaccgttggcaggtggcgccggagccagggtggtgtaattgcccgtccgtgccaggaagacgtcatgaacggatggttgccccttgtgttggaaaacaaggacgtttctatgtgactcagacatgtattggacacgaaagaactcgcgtgtacgagcgccgaaggatattttcgactaaccgcactactgcgtggcggagagtgcccggtgaactaaggaggtgcaggaaactgaaagaacaacactgg

SEQ ID NO: 417860 - DNA, 816 bp, Homo Sapiens
  misc_feature (46)..(81): n is a, c, g, or t
  misc_feature (755)..(755): n is a, c, g, or t
ggatgatagatcatataggggaaccggagtaacgcggtggcggcgnnnnnnnnnnnnnnnnnnnnnnnnnnnnnnnnnnnnatcaaggccaaatcggcgagctcgaattcgtcgagagcggccggttcccgcccgcgcctctccctccacacttcgccgcaagcagagggagccggctccggcctcagctggcccagagaggggctccctcagtgcagtggcgagctgaagggctcctcaagggcggctggagtggacgctgaggccgaggagacgccaagagcaaacgagggctgctagtacattgtcacctctcactggtaactacagttgctgtcagtttaactgttgatattctggaagcaagatcttggaaggccaaggacaggtcatttcttaggactgtgcaaaagagaatcagtctttacagtaagctatttgattctagtagttctttcatctcagtcttttgaaagcaacttcccctctttaaccaacacctgccatggcctcttcatgagccgaagaaggaaagacaggacagattcttatgacctgaaacagcacctcaactcttaccttggaaatttctacatgaagaatctgctctgaaactatagcaaacgatcacagagtgttgagtgtgagtccggactgattcgggaagaccaagaagcaatgatgatgtctgtttttgtcaaatgtctgaaaactatttttatttttctaaaactttgttcagaagtctcaatatngtagtgtatagagatgtacactaatttagtgatatgaagatgaagggctttaagcctatgg

SEQ ID NO: 417861 - DNA, 822 bp, Homo Sapiens
  misc_feature (26)..(26): n is a, c, g, or t
  misc_feature (35)..(35): n is a, c, g, or t
  misc_feature (62)..(63): n is a, c, g, or t
  misc_feature (70)..(70): n is a, c, g, or t
gagcacccggcgctgtatgatgtatnatgagctantcaatgggcgacccctggagcgttcanncgcgtgngtcgcgatactcgtatacatcattatcgaagtatggatcaggcaatcggcgagctcgaatcgtcgaagcggaggggcgggcgggaggggcaggcggagcgcaagcacgttcgcgggagggtctggccttgtcatgcgcgggtcgccgcgggaaggaggatggcccgttgagggcttggcacggatacctgacggtcggaggaaggggggagagccggtaaaggaggctgacccaaaactgagcccggtgcatcatccctcatgagaggcaagcccagaagcgccacaatactagggtcccccttcaggagacagagaccccaaggacacagagggcccccaagtcactcagcccccccaggacacgcagctcctgcaggacgcagagggtgcccaagacacacagtccccaggacagagaccccccaggacacagaggacccccaagacacgcagtctccagacacgaggtccccccagacccagtgcccccaggacacagaggtcccccaggacacagcactcccaggacacacaggtccgcccgggaccgagaaaatggaggagggaaccggaatattttacgtgaccgtaaaggccggggggaacgtcactacagaagattgacggtctaggagtcggaacaagggaaggaaccctgtctcgcgtgggaaaggacgggtggtcagggcaacaagaaggcgggaaacgctgagcgaagggcacaggtacggagccagcccaggcagaaaa

SEQ ID NO: 417862 - DNA, 795 bp, Homo Sapiens
gacggagggagaaacggtttgagacttaataccgggtacgcttatacgggcccaacttagaagagggcaccagggggggtgggaaagtttagaccaaggatcgtttctccttccttgcaagttctcagcccagaggcccttcccttccaaatccgggccggggaattctggagccggtaacatccttccctggcaagctcagggggagggggaacgacctccgacatggggaacgtgggaaaactggcttcccctgggtgggtggcactgggccccaaaacgcaccggggtccttctggaaggggtctgggaggggcccatggtccacccttggcccccggggagtcacttgggaacccttctcagggcgtattttcccaaaagggtttggctggagccaaatttctccctcagttctgaaccccttcgtgggccatggttcccaacatgggagtcccgtggtcacagtcaccgtgcgtgggtcctaaagggacggtggtccccaaaaggccggcaacatttcccacgtggcgctggaaacctcacaggaccctcaagtatcaccccacacgtgggtcctccgcgtgggtcaaccatctccccaccaggggcgggttgtgccaaaatgtgcttctgggaccaagcgggacactccccctgtctcgtggcgacaaaagcgcactaagggtcccacacgtctgcctcttgacagggggactccggacgaacatcgaaggcggcccgcctggagtggcatggggcccggccatcagaccccaccaagcgacaatgggc

SEQ ID NO: 417863 - DNA, 1366 bp, Homo Sapiens
  misc_feature (578)..(586): n is a, c, g, or t
  misc_feature (775)..(775): n is a, c, g, or t
  misc_feature (1185)..(1195): n is a, c, g, or t
tttctagagtttttcagttacccctttggtgggaaaattccgagaggggcccttattttttatttatcatatctataatattcttctttgagacaacgagggatgtcgcgtgttcaacccgagggtgggaagtgtgcacggggggtggtgacaacatggctctcacagcgaagagtcttcaaaattctccaagaagcccggcgggtgtgtaatccctctccccccactctgcgggcgcctccgcgcgtgtgttagacggggggcacacccagagggggtgtttttcccccatctatagtgcgcgcggggctaaatatctgtggaaaacatatctcttctgtgggacaagagagaggggggtgctcccctctagtgttttgtgcgcccaaaaagaggtggggcccacagaaaatatctgcgggggggctctacagcgtgtgagtgtgtgtctcccccacactctcaaggaggtctctctctcaaaagagcgggggcggcgagaggatatcacaccgaggggggggtgtgagaaccccacagccggggcagacacaacgaggcacatatatctgtccgcnnnnnnnnntgtccttccaaacagggcgtgctccacacaaatcatacggtcgcgcgtcgcgcccacaagaggctactccacctagtagaggagtcctcaaccacaagaggggggtcgtgggcgtgtctcccaccccacatatcaacaccacacggcgccccctcttttaataaaccggaggcggcgtggcgggggggnggcgggcgcgcacccaaccatcttatctcttacccaccacctttactccagaggggcgggacaatcataacaaacagggggaggcggaggaaccaacacaatctaatagacgcggcgagcgccccacaagtggtggtgttgtatcacaaacgaccacacggcctccagcacacaaactaaccggcggagtaaagacgagggcgtgagtcggctcccgccacagcaggagagaagagagctatctcaacacaagactactccgctccactcagcgtgaacaggaagacgctcttcgtcggaggaacaatatactcgcaccgcacctcatatagccgctccctcttctgacacaaaacaaacggcctcttcccacacggcggttggtgtggcccccacaaaaagcaagcgannnnnnnnnnntaccacaagcacgcagccgcgtgtatactaaccacaccccaagaacgccgtgttgggtgggaggcagacgtacatcgaaggagggggcgggggacgtgacaccaccaacagaacgcgtgggccagcgagaagtgacttcttcagagacaggcacaacacacccgtggggcg

SEQ ID NO: 417864 - DNA, 733 bp, Homo Sapiens
  misc_feature (247)..(264): n is a, c, g, or t
atcaggccaaatcggccgagctcgaattcgtcgagagcggggtctttcctctccaattgctgctaggctgctggttttcaccttgattgtgaggagaggtggtgtgaatagagcaagttaaaatgccacaaagctctgagaggtggtgggaatagagcaagttaaaatgccataaatctctgagaggtggtaggaatagagcaagttaaaatgccacaaagctctgagttctcaccaagattcagcnnnnnnnnnnnnnnnnnnctgagaaaacactccttgaatggctgcaagcttgggttaagtcctgaaagttaattctgactgaccattttggccagtattctcatggcttctatggagaagacaatcttgggagatttcctaacaccatcattgggtgctgatgtcaccctattctctatgtttaacagggttggccgtggtgatacgggttacccgggttgaacccggaagggatggtgaaaagggccaaaagggtgacacgggcccaccgggacctccgggactggtaattcctagaaccggggacgggctatacctatgggagaaaacgggaaccatggggttgcctgggtggcctggagcaaaagggagagcgaggattccgggaatacagggtccaccgggcctccgggacctccaggggctgaagtaggggtccccgggacctccggattcctggagaacggggtcagaacggcgatgaagg

SEQ ID NO: 417865 - DNA, 1273 bp, Homo Sapiens
  misc_feature (52)..(88): n is a, c, g, or t
  misc_feature (974)..(983): n is a, c, g, or t
ggtaagaggacagaatactatgggcgaatggagcgtttcgcggtggcggcgnnnnnnnnnnnnnnnnnnnnnnnnnnnnnnnnnnnnnatcaggccaaatcggccgaagctcgaattcgtcgagagcggggccggaggaggcgagcgaagctattgagccagcgtaggagtgaacgctgagcctggcctcagcacgctcctaggagagaccaggcctcctgagagtagttctttctacccccatcttctttctccgaatgctcgcgctccgtgctctccatccctgcccaatacaatgcattcttgagatggcagcgtctggactccaggcaagcaccagagaaccgaagccaagccggaagagaggactggagccacacatactggtggcgggagacttgggatgcctggcttctctttgaggagcatcgttctggagcgaggggtgggctttggggtgggggcttgtgctgtcagggaagtacaggcaggtccccaagatggacacattcgtggggcacattccagtgacgtcgcgggtgtggcgggacgttggcatgatagcatccgctagagtgcgcccgtggtccatcgcgtcgtggaggatgagtcagacacgacagtcagtcgagcagcagccagacagtcagcaggcaggccatgcattcgccggagcgcctaacaagcgagctccggccagcgagcgcctggagagccatcgctggcagcttgctcaggctcccgaagccttcaagggagcacgcggccagcagcaggcagcgaagcgaggacggagacgcagacaggcggccgcacgacgacggagcagaagaaacaacgagagtaacctcccctgagtgacatgcatagacacccacaggacacaacatacgaagacgccacgcggccgcgaagcacccgcgggggcacctgcctggcacgtccgtccctcccccaagggcccaacgcagggnnnnnnnnnnaagttagcgacaccaccaaagaacaccaaaacagaggacaacgcccaaccgaaaacacagccgcagcagcacaacgccaacggggggacagaaacaagacccatcaaaaacccgattagagagcagacacccacggatggtgacctgggcgcacgaacaacacccagaggacaccaagcaacgcgacacacacaaggacggcacccatcggccaacacacggcccgcaccacgagtcaccacgggaaccaggcgccgaagcagccacacagcagagcgcggacgccgagc

SEQ ID NO: 417866 - DNA, 782 bp, Homo Sapiens
agcggaatggtacctggaacaggtccctcattctctagccagagcccaatacaggtcatttgtggtccagaattgtcaccttagtctatctcagtgccaagtgtgcaactaatgttaggctttgtggagcagcgaattcactggcagtatcccgacagaggaaattctagcatcgtatacttctctcgtgctgactagtgtgatatctcggactcttgacataggctatcgatcgagtagacccacgtctggaggatgactatcctagtggatccttgtactgcgcatcatcgtatgtacccataactgaaatgtggtgaaggacttgtagacttgggcgagatggtgaattatggtagatatttggtcatgggaacagggactaggctagacggtgggcactacggctgatctagcgcacctgcgactatgccatcatcgaactgccgttcaactcgacattggaacatagcttatcggatgcatctacggaagaaaagcgtggatcaatcggccgatgtgggctccgaacatctgtactactgactcgtggccggtggctctgctactccttcccctttctactccgctcaataatatgctttcatcctgctgagttagagtggtaggataatatggtgtagatgggttagactatgattatatgttatatcaaggaatcatgaaaccatccatgtatgaaaccagatggccagcatagtaaggccaagtctaaatgtaacagaagacatggagatgtattcgatattaccggtggattg

SEQ ID NO: 417867 - DNA, 1240 bp, Homo Sapiens
  misc_feature (119)..(119): n is a, c, g, or t
  misc_feature (333)..(333): n is a, c, g, or t
  misc_feature (555)..(555): n is a, c, g, or t
  misc_feature (591)..(591): n is a, c, g, or t
  misc_feature (941)..(941): n is a, c, g, or t
agcggggccgttgctcttcccgggtttctcacagtcattgctgagcgcgtaccaggccttcgcggttgtcttgcggatcaccgagacgcggtgctgagaggcgagcgagagtccttagnactccgtcggtctagtaggttcatttagcgtgttcgctcttgtacgcaccagtcgttgagctccgtgtagacacgctgtgcgtggcacgccttccagagggtgcactcacgtctcccggcgcgtatgtgtccatccacgaaatgctagtctcgaaggaacgttagcagacgaggagaacatgcctaagacggaagtctggcgcacaagtcgcancctgaccatgcaatcattggaccggacaattagcagtggcaagacacgggaacatagagtaaaacttgagaggacaagagaagcatgcgaaatgtctaaatgccttgaaccatgcgaaacattagtgcatggactgagccatctctcatctacccatttaccatcaatagtctatgcgatttcgccttgagagggccataatcccacacactagatagcttngcggtcgatcaaaggatagttgaacgcgagatcccnattgccgcccgcgtgtaaccacatttgcctcatcaccacttcgacgaaaaacagaggccagtcacctaggtccactggaggaacttactcccattggagacgcgaacattcgggcaccgtgctaactagtacatttcggatcgtttacccttccatttgagcttatggccacccttctgaaaaaagcaatatttatatgccacaatgtggacattagattggacgcgagaattgaacaaggggggatgaatttcttggggaagaaatcattggggataaagacggggaatgcaaagatacgtccttgcccccagaggaattgttcaacataggaagcgacctttaggagnaaattaccgttcagaggttccttggatatttccctaggttcaaacggatagggttgaaaagaaaaagggggtcaccaaaaagggattggaatagagaggaggggggaggaggaccgtgggcggtttgcgttacaatttttctttagaagctaaggggggacaccactcgttagggcggagcagtttgggtaaaagcccgagagaatttggaccaggaagggacccattgttggaaaagggagattagaagcttaggttggaggcgggaaggatccttgcttcgaagaggacatgggtaa

SEQ ID NO: 417868 - DNA, 570 bp, Homo Sapiens
  misc_feature (66)..(412): n is a, c, g, or t
agcggaggctcatggaaggcccttcctatacagggagtgtctatctggagtagctccctgcaggannnnnnnnnnnnnnnnnnnnnnnnnnnnnnnnnnnnnnnnnnnnnnnnnnnnnnnnnnnnnnnnnnnnnnnnnnnnnnnnnnnnnnnnnnnnnnnnnnnnnnnnnnnnnnnnnnnnnnnnnnnnnnnnnnnnnnnnnnnnnnnnnnnnnnnnnnnnnnnnnnnnnnnnnnnnnnnnnnnnnnnnnnnnnnnnnnnnnnnnnnnnnnnnnnnnnnnnnnnnnnnnnnnnnnnnnnnnnnnnnnnnnnnnnnnnnnnnnnnnnnnnnnnnnnnnnnnnnnnnnnnnnnnnnnnnnnnnnnnnnnnnnnnnnnnnnnnnnnnnnnnnnnnnnnnnnnnnnnnnnnnnnnngaagaagaaggaaggtatggtagaggaaatctggtcgaatgtgatttgaggacaatataggagaaagtaaaatcaaggtggactcctcatgaaaatagcttcattttttttcctcataaatataatgtatgcagattataaaaacttcaaataataca

SEQ ID NO: 417869 - DNA, 850 bp, Homo Sapiens
  misc_feature (44)..(68): n is a, c, g, or t
gacgcggacgacgacgacgacggactccacgcgctggacgacgnnnnnnnnnnnnnnnnnnnnnnnnngtcccaccgccacgcccttgccctgtcgccccggctggcggccggcctcctcgggcttctcctgtgtgccatggccctccgcccgtcccccgtggtcctcccgccacgattttcctccccgtgcacatcagtcgcctcccacagttcgtcgtgagacaccttccaggggctgcccccgtccctagcacacatcgcgcccggtcctgccgtcatataggagtctacttacttctacgtcggacgcagcaagggttcgtcattcccatccttgttaacgcccccgggacatagggacatcaaaagatccatccacgtgaacccgatcgcttgtagtccccacaccgcgacactatgagcaccatcccaccaaaaggagtgactagggaaaaatacacacaggaccgtataacggcacaccagcgaggaccacacggggaccacgaacgaagctatcacgcagtctaaaaccaaaaagggcgagacccataacagagccaagtaagggatacacgggcccccggaggcacatattgacatttggtggccccggagattaaatcataaatcacaatttgatacgcgtgagacaacctcgagacgacagaaccagtaatattatgggagcaggggatccccgtctgtaaaaaacacacattgtacgtcgcccacgtttgtggataaaacctgagcgaataaaccgggcgcttaccactgtgaggcaaccaaaacaatcccgaaacggatgaccatcccatagtgaggctcacaaggtttaccacact

SEQ ID NO: 417870 - DNA, 1100 bp, Homo Sapiens
  misc_feature (208)..(208): n is a, c, g, or t
agcggaatccatgaagaagtcgattgtcagcatagaagtgggaggctaggtttcattcctctgccactatgaagtatccagcttttcccatgtatcatcaatacttgaagatactgtaccttcccgccacaggtgatctctctgggactctatgacctataggtcgccatggttgggagatcctgcgtagggtagaagctcgcacagnaagtgtgcggtctcggcaccatccttgagactgtttccccgagcttttctcagtctcactagctccacaaacgagacatccagacaccagctatatgggcatctggccagtttctgctccaggtactatcacgtgagcgagagctgctactattttaccttggtgccatttcgttcaacatgttgtttgaaagtacattaacagcgctcttagcacattcaccttattcagcttgggctcgatctagctgatcccacggtttctgctctttccttacgtgaagagttgactgatgcgccgcttcacgctatgctacgggtctactcactggtgacgtgtcactagttccggtatttctcgtggactgggttgcctttgtacgatcttgctgacctgggagctgctctctctgctctgtttgttgtgtcttgcagccttcgagtgaagatgactcaagcaccacttgagagacatgttgccccgatccaaggcggtcttgggccctcactggaacgatcatcgcggggcaaaggttctatccccgtttcaactcagatggcccaacgtcgagcttgatcgaagcctacatgtccaacagcgagtcaaaattgacgaactgtggaataatggccagggtccggtgtttgaaagaattactagacacgacagggccacctttgcaccttttcctcatgtcgtgaaagttagggtcaaggagtgttaaaggtgaagcggccgaatcaacgaagttgcagaaagacctgggggcatatcaggaagaccatgtgcttttaaatatagcatgaaacagaggaccggtttggcctaccatccggagaattctgccgacccccaggaattgccgaattgtttcagaaaagttctgcccccg

SEQ ID NO: 417871 - DNA, 886 bp, Homo Sapiens
agcggaaatgagataatatcaataaagacctcctgtcgtctctacccaagaaataaactaaaggaaggcagtgtccttgcaggcattttgacatcagggatgggcaaaaacatacatccatttaagaattctagaatcagagactaggaagagttgaaacaaccttacagatcacttgatgcactttatatagacccaggggagaaacaaaaagaccaactactaaagctgctaaaacaagataaagcatactgcaagggaaaggctggagcagttcactggctgaagttataaactccatcaagagacacacaatcagatggcacaactgtcttcagtgggtcacagttttccaaatacaaaggcggtgcctaccgaagctctgggattctggaaaatatactggacttggagtaagacaatctcagtccatgttcctagttctaggattttacggcataacacttggcttttagggcattgtattttctttatagtaacatggtattaaaatgatgcctatcaacaggcttgtcaggatgagtcaacagcatattagatgggaaaacaccataaagtacaaaaggcttgttatcgtcagtctcctttggttgttatatcggttaagaggactaattgtttgcctctctccaagttcagaactaattcaacatgcatagaggagtcagaaggtgggatccaaacatttatgtttatttacctagtttaacgttcggcatcataaggaacttggcttgaacttataagcttcccaactggtatctataacacaactattgttctcttatcctgccctttctccttgattatactaataagcttgggaaagaagaaattcatgacaaaagcataccttggaactcct

SEQ ID NO: 417872 - DNA, 849 bp, Homo Sapiens
agcggattcctggagaagctgcagtgtggggatgctctagaccgagtactgcccccagtgtctttccaccgtcctcctgcagcagcggcagcgtgcatgcagcagttagcagcggcaactatgaggcgtgcaccccagaggcaagtcccgcagggatggagcgtcagcctgagaaggagggctatggcagccccgacaggggtagtgttgtaccggatggagggcgaaccagactgggaaccagactgtatgggcccatgagaatacaccattcccaacgaactagacccgtacatgcgcacgaacagtgcagcgtatatcgatcagtatggcgataagataggccgccgattcagtatgaccctaggacgcgtccagtgatgatgaaggagtactagagttagttgagcctacttcagacccgtggttccagcagcgcgagtgctcacgcacagttagacgcagaccctgatgatagccttggcacacatcatatgcgcgaggggacccggtgtgccggactgctgtaccggaccgggaggacagacaaagaggacagggagacgtcctgcgtgagggaccgcgagcacggagccggctgagacgacaaggaccatggggcgtacgcggtattagagagggaacgtgaacgcggtcgtcgatcacacccgtgccgcagagtaccccaggacgaaaactcgcagacggggagcctcgggacatgaagagcgaggcgcacaggaagcaagggacggaggggcgcggggacggcgagcaggcacagagacagacgcccgcaacccggggcgatacgaggctggagccctgcagcgcctctgcgcccccgga

SEQ ID NO: 417873 - DNA, 1561 bp, Homo Sapiens
  misc_feature (51)..(51): n is a, c, g, or t
  misc_feature (502)..(510): n is a, c, g, or t
atagagaaagagggaggtttctcgcttcgtggtctcccagggggatagaanatatacaggggagcagttggctcctcggagtatgatctgggcaaaccttcgttgcctctcccggggagttcacaggggggtagatccctacctagcacctacaagcctcctatagaatatagcgggggactacacaggtggtgctgtcgccacacattgcgcgctggggaaaaaaaatttagcggagtggggattgaatggagggaagagaaacacacgtggggtgtttcaccacccagagtgtgtgggggaccgcagagggctgcggggggctctctcgacacactctcgcgaggagacgctggtgaagagatgagaactgcccgactggttgtggacactctgtcgaggttactcctccccagaaaagagggtgcgcggggggaacacataatagatgggtgacatgtgagaacgacccacacaccaaccaaaacccgcgaggcaccgnnnnnnnnncaccccctttagaagatattatatattcactagtagaatagaagggaaggagtgggatagagacatatactttatgttgtgtcgagacaagaggaaagaagacgagagaacacgcgccgagataatattttgtgggtgtatattgtgtgtggacgagaagagaaagacactgtgttgggggatcgttggttgtagaacgagtattgtacagagtgtcgtttcgaaacagagaccccagagaggatgttggttttcagagaggtgtggtgggtgagcagacacaacaagttttgttccacactgttagcgaccatgattagaaacagattgtttcgcgccaccatgtttttaaagtaagagcgggtagggccaacggaaagaggttaatacaatagacttgacaaccacagttgtgtaggtgataatacgttgcagaaagcacccacaaatttttaattttcagccctgaatttcaccagctgatctatgacgaagagcagttggtgttgttatgtacacgcaagctgtgtgatggaacgagaaaaagcgttttgaagaaagagcatctcgccaagtatgtgcgctccgctgtatagagagacagagatgaaataacaactctcccaccaaatattatcatcatgattcgactgccccaaagcagggggggtggtgagcgacaaagacacacccaccgtgtgggtgaaccactatagtcggtgagggaccccaggtgagtgtggacgaacgaccaccctccaagtaggagaacccgtaaaaatatgtgggagggggagcgacacactccacgacacaaatatggtgggtggctaatgagagggagagaggggggagtaggctacatactataatcaggaagcatgaaagcgggtctccaacagaggaggtaggatccacagggtgtgtatacaagcagctgtgggtgcgaaaaaaagatcctctgcctccccgttgtgtaggaagaccagcgggagggtacagaacaaaagaggtgacaacaatagttgggagccagatgtgtattccacgc

SEQ ID NO: 417874 - DNA, 815 bp, Homo Sapiens
agcggagtggggatagccgcggccgtggaggtggcgtcggggactgtgtgtcctctcggaggccaggagcgagaggccgcgtctgactgaggcgaggcgagcaaggcgggcactcgcgcgacgcatgcggatcccctgcggctgtgctcccgaagccctccggcgcaggccggccgactcgaagagcggcgggagagcggcgcgaaacccagccgcgtgcacgtgcggagcagtgatgctcgtggcggctctcgggaggggcccgtgaggctgatgggcgcggacgtttcccgggaaaagtgctaggcctggagtagaacgaagcaaggggcacgtgggctcgcgtgggctcgtgctggcctggtgtgcccccaagtggcttgtacgtcttctcccagtgccatccagggcttagaagcccgttgataggccccagtggggaccaaccaaaggttggcctggtccgggcctgaacagattgggagatcgatcgccggacgtgcaaagggaagttgtccgggattgcgttacctccatggacttggcgtaaccgtgatgcggatgggcatgccgaaagaagtgttcgacggtccggttacagtggaagcgagacagttatgagcacgaggggacccaaactcccgacttgggggagcatccgagattgcgcgacgtgggttacacaggaggtgcccaaattgcgggaccaggtaccgccaaaagtgtcggagtggggatatatgagggttaccagggccaggtccatttaaccccccttgttccacacctttttaatggacacaagcccgagccac

SEQ ID NO: 417875 - DNA, 1053 bp, Homo Sapiens
agcgggttctccctggcggctgtcctgctcaccgtacccaggcaatgcttgtacctctagagcttgttgtgcgacctattcgtcgcgtgccggactgagagcacacccggtaggcgtactacttatccagcgttcctgagatatccctgggatatgactgtgtctctactaggcaagcgtacattgcatctcggaaccggggttagactcggtagagtagatcgtggcaacctgagagatgtccggatgtgtacgtcgttgctcaggttggcatgcgtggcacacctgtgccacttctgcatgagaaggtcagatcatccctcgttatgctgagaccagacagtccgcaggctctgacaaggactcgccgactgacgcaaggtgcgggacgaacatttagttcaggtctgtgtggatcgtacttaagaaaagtgcccaggaacgacgaacttgccgtgaatacggtttcgagccgcaggttgcttcgcatagggattttctactagacacaaacgtctacagaccacttgcgtggcaacttaattccatggatttgtgtttctgaacgcaacacaaggggaggaattgagactgatagtggtcggggatgtagtactagaccgcgggaagaggaccatccgtaaataaagaccgagaacgggagcacagcaagttttgtggccgttatagaacggatccttacacacgcagttgttcttgttcgaggcgggcacgcaaagaccctaagcggggggaccttgtttacctcccacggaatgaaaggcagcttccaagctcgcggaaggcgatcaacgcgaacacttacacttggtggtttctccctttaattagtttggcgaaattgtgtggagctggagatcgcgtacacttggaaagttgaacattagttccttgaacaatctgcacagggtaacttgcagggttgtacttcctcttctattcgccctggttgctttcattttcggatggccctgggtttccactccggttgaagttaaaaggaaacgccgttgggcttttggctgattcctg

SEQ ID NO: 417876 - DNA, 812 bp, Homo Sapiens
agcggggggagatggcgggctgtgtcggtgtctgctccagcagttggaggctcctcttttgataactgccgctacgatatgccgccttggaagccgacttttgcaaataggggatactagcttccaaaagtccggaaaagtggcagcgaccatcggtgcggtggtctatcgaggatggcatatgtatctatggagcatatacaggaccacctgaagggttggttgtcgctgacaggatctgatgctgagatacacttcatatctcctaatattgagttgttgtgggtgctgggacatgctgacagacacgagacagtgagcaatccgagctcaagtttcttccaaaccgtggagctccactcccatctccactggccgtcttcccagcagtcgtgaccggaccagaatacggtatggcggacgtcagatgtcctttaacctagcgtatctagggcctacatataggtagcacccccattgttttactggggaagtagatgttaaactggtacctgctacctctgagcattcatctatccttctagtggatctagactgcattaattgtgccatctatgtcatcccactggtgtttctcgcgtctccattggctaggaccttgtgctgtagttggaaggataatgtgagatggccacgacagtggacggagggaggacgccacagaatctggtgacgcgaagagccatcgcaggcatggcatcttaaagacgagcctggagctccggataggcaacatttagaacctctgacgtcatccagcaggaaacaagctggaattcaactccgaccat

SEQ ID NO: 417877 - DNA, 799 bp, Homo Sapiens
agcggactgtgcgcggggcgagccagcgagagggcgcgagcttggcggcgctgtctgcaggctgcatctctgcacgtctccggctgggccggcgagtccagtgctgcgtgctcgcgcggatggctccgtagcgaccgtggagcggactgaccggcgggagggctatcgagccacggtgtaggaggcgcgaggcgaggtcgaccggagcgacatgggggaccgtgatcagctgctgcatgaacgtggtcggcggttggccgaagccatgcggagcgctacgaggatatggtctccggtatgtaatggcggtgacggagctgaattgatacctctctccaatgaagatcgaaatctccgtcatcttgtggtgcctacacaccgaatgcttgccgtgggtgccagaacgatctacctggagggtcattagcaggctttgagcagaaaaccatggcggatggaaccgaatggacatcggagacatgttaaagcttaccgggagaagattgaaaaggagctggaagagcagtcttgcacatgattgtcctgtctctgtttgacgaggttcctgactcaagaactggcgactggatttccagtatggagagcataggttgtttttacctgagaaatgagagggtgattactaccgactacttatcagagggcgcattctggggagaggaaaaaacagtgtgggtcgaagctttctgaagctgcctacaaggaagccttttgaaatctgcaagagcagatgcaaccacgcagtcccaatccggtgggccttggccctcaatttctc

SEQ ID NO: 417878 - DNA, 933 bp, Homo Sapiens
ggaattgcatggtctgatctcggacataggcatgaaatagcctatatctatctgtgaccgatgcatcggacgaaacaggcaatacttcatgcatctgctcttaagcatttatgcatgacaagtacccacacaagtttatgacatgaaatgactatatagatcacgtaatcagtgctctgtgtggaaacaagagaacttatcatggttccctggccgtcgaactttaagaccatggtacatatggtttaggccattcacatgtgtaatcaataataacaacagacattcatggagggagtttcttgttattgtatcatgcaagaggcaaaatttttatacacatgagagggagctgtatctagttttaatcatggtagaagtaggtaccttctactatccagtgtttgaggattgcttcaaggaggccagtgggatacagacactaaaactttatttcatggtgtaactaagaagaacagaatacactgtctgtaggtcccgatctgattctggcatgccactgcactcatttttgtttggccagtgacctgggtataccaagaagatgagccattgagacatatacaaaccaggtgctggggcccacatgaaatgcatttgtgctttacgatgttaccaacgaccaatgcaataacacaacataaatgtgcctatcaaaatattcgccagtgcgtacaaggggtgacatatatagtgtgtatttcgccccattgttgacccaagatatttaagtactatccatataattttgggccatcacacccatagtgcctctaattaagccaggatgtaattgaagtatattaatgacgactggagaagatagaaattcaccccagaaattagttaggagtagataaaaaacatacaaaagccacacgctaccacatctatgtgtcgagagaactaaac

SEQ ID NO: 417879 - DNA, 1485 bp, Homo Sapiens
  misc_feature (334)..(334): n is a, c, g, or t
  misc_feature (405)..(405): n is a, c, g, or t
  misc_feature (549)..(549): n is a, c, g, or t
agcggagtgtgacttaacacacttcgtcggatatggctcccagcgcttgcactagcggaacccgtactatcctgaaaggcctcgcgtgtgccgcgctgcctgcatggcgcgcgctcgcacgcgttgccgaccgaggtattgaggttgggcaaccccaacctttggaagcaatagctaggaaaaatttggaactgagctatgctctgctacgtaagcctgactagtcagtcgattcgatacattatcgaccaggaggccttgcgagttcgttgacagtagacttggcgaaaagacgtcgcctggcatcgtctccatgcctaggtattactactgncaccacagcaacccatgtatcttgggctaagatgagatcttcatgttgatcgtgacacattctatgcatanccttgggggtgacatgtagcatgaagcgccggccatgcctcgggccatttcatttggactcgagtaccctatggtaacaaggaaggactgagacggtcaaatcttactgtgagtgcgtcgagaaatcgaggggtgacgatgtanacgaaatcaatggcgtagtgtgccgacgacgtctcactgtcgatccagaaggatatattgctgtgagcaatccccccccgtctggttcgcccaaagaggagtcgggctatgtgcctttcccttgcgcagttgtgactgtctcctgtccgtgaacttgttgcatgaggccaaggggcacgaaagagcctgctcagaaatgtaggctgtccagtagggcacgcaaatcacgtgcaaggacagaaggaacaggacatcttggagtatcatcgctaggactgttgagaccttttccaatgttccaatcgcgcagggaaacgttcctcctttgccctgttaattcccccgaagattagataagattcgccctacgggagagagcgcgcctttggaagttgcgactcgcgcccaaaccggatggtttgtgcccgagtgtggcccctgaacgcatggcgggaagtgggaaaggttactagattgcccctcccaccaaaacaatagggtaaggccgcacgactaggaaaattagggactttgaagccgaatacaacagtccacgcgggggggagaatatcacacgcctttttgaagttccgaactccttaatacctgtatttgccacttctgatgctggaaccaacagcgagagcgttctgaaaggataaatcccacgcaagcttgtcaagagtggcttttgaccccatggcattcttttaagtaaagcagaatttcccttcacgattcaattttacgaatgtgtacacctaccccacgtgggggagcaactgcgtggggtgttgaaatttaacacacctttgcaaggccacattccgcgaagtgacggattacccccaataaaaacgcgcgtggaaaatgtttatttgccgtgtgttcggcaccaggagaactcccctatagtaaagatgtctatacttctca

SEQ ID NO: 417880 - DNA, 1109 bp, Homo Sapiens
agcggagaagcgccgcagactatggcccgtggagcggcgtgtggcgctgcgggtggcatgagtgaggtacgtcttggcaggctgagtcggtaggtcgagtgcgcgatgcgcggcggccggagagctgccggcgcggcagcgggggccccgtgacgcattcctgcatgtgctcgatcgggggactactgcagtcctccctggctgcgctcgagcgcgcgcggactcgtgcgctggcctgtgcttggttgcctgaggtgaccgccgcctcagatggggaacggacccgtgggccgtgcgtggcagctagcggtgtgcccccatttgtgccgcaagggccacccgggttggtcggcccttgctgaagacccctgacgcgtacaacccgggtggggcgcggtaggcgatcgacacaaacttgaaaagaccttagcaattgacgatacacgaggccggccaagcatcgtcgtcggcgagaaggactctgaaaattcgcaaaaggacttcccacactcgaaatttgaatgcgtcgtggggcaagccttggggctcgccatacgaacttgtttgcacggcattggaacatgcgcaaagggaaaagaattgtttcggcgaaaggacatagatgtccaagcatatttctaacccggtaggagaagaatacccattctttcaaattcgtgtggcgcgtgtcggctaacggctgttggattcacaaccgccccttttgcaagttgaacccacgaacaacagcacgttctatagggtgagccatttgtgaatcgactcccatagaggtctcgacgtcgtaaagcatgtggaagcgggaagggcaacgaccccggagtttgggcagagttggacattggtcgcgaaagagcggttgtgggaccacaggggaggtacttgccttgcattgttccaggcacgaactctcccaagtaccatacaagtttgccatacctctgtggccgagggccaggggctcgcaagaatacccccctatgggtcaccactctacacgggatgccactttgtgcaaccaattgcgagattcatcggacggttgtaattagaacttctttcctggctttcgacagaggacttgcctc

SEQ ID NO: 417881 - DNA, 1433 bp, Homo Sapiens
  misc_feature (58)..(58): n is a, c, g, or t
  misc_feature (713)..(721): n is a, c, g, or t
agcggaactccagtgtctcgtgtgcgcttctgacgcttatgggagtaactgtcttccntcccgcaggcagctactgctgcggttactaggggtactatgagtctgatgatagagcgtaccagctactatgccctcgtgagatcttctgaaagctatgcccgaatcagtgacgaccacgaatgccagcgagctgggctggccacggacgctactcctacgtggtcacctcgtggcactcgtgaacgataccgaaccttgaggtgtcaacgctcgaatacaatgcgtcgccaactactccgtatctactgttagttgtggggttcggctgcatatacgtaataccgcctgaagacatcggagacgcgctgcgcaccctataatcattggcctagtgtttgcctcgctcgaaaggggatcatacggaaggaaggaaggattcggatcatcctttggcaatggggccctcgaaatgaaaattgttcaacccatagttgccaagggctagcttacaaaggattctgcccagaggcatccaatagataaggtagcagttggttgtggctccacggcaacaaaagatttaaacgaccacctacgattgcaccatcccttatgtcttattaaggaacttgctggggtaggcattgataaccgtccatgggtacgattctatggcctcttatcgtgcgttcagtacaatcttgtcgctgggnnnnnnnnnccgagcagcgtcctcgtagtttgcctaaaaacttaatgacgcagagtggggccacttcgggcgtatccccgggacttttcggaaccttatgactccactgttgtcaactttcgttttggcattaccacggcggtataggatgggccaaaattgggggcggttgaggtcgaggccactaacttgcgtggaaatgggtcacttacttaccgttgggaaacattatctcccgtacccctattaaaaagctatggggtaaaggattgccagtaaccgtatggacaaagctttgtgttccacgcacagaccatttgaccccgtttttattggcaatcccccacggaattttcgtaacgagcgctgtttgggtttcccccttggtgcctgagtttacacgcagtatcccaaggaaggcgatcaggcggatcacaatcttccctgggaacgcctagatagggggaccccctggaaacaccgaaattgaaaatggggtataaacccgctggaaactggaacaatgcgacaattggcaggcgcgggggcaaatcacacgacacaagatatgtgtgctggctaccacgcctatctgccaatgtggtctcttctccttacacattttccttaaatggccctggtggtttcggccagtccagtgaaaccccaggtgacatgccacggggggtcgctaagccacaactattcgggagagtacact

SEQ ID NO: 417882 - DNA, 962 bp, Homo Sapiens
  misc_feature (172)..(172): n is a, c, g, or t
  misc_feature (290)..(290): n is a, c, g, or t
agcggatttgctattacgcgtcccagggtggctgtgccgttggatcactgtgacgagttcaatcattagaccaaagaatgcctgaaggaaacccagacgcagcgagcagccgagggaggcaggaggaaggttgcagacgcttcagcctgtctcagagcaagagagggttatnagcccagattgcatgtcagttagactcatctacatacgtttctaacgttacgtagcgaagagagtatctctgcattgagacgaggctcttctctcgaatgcgctctagatcgcatagngacgtacatccggctctgaaatgctatgagctaggaatcccgagtaaagtataggactactggggcaacgagctgtggttatttaaccttgataggcggagacggacacagagaatcgtagagctctccagctgattgtggtgggatcactggcaattgtgacactggacctaatgcttgcatctctggatcaatgatagcccttggggtaacgtatgctgtcgcaacgcttctgtgggaccccagaaacgcgttccgtgcgaaaccgcctttggacaagggcctgggttgacaggcacatattcttcatacctgactgttggggcccacggttctgggaattgctatatgcgcttcatcaaagggtacctggcctttcatggtgggctatggactgaggtagaagatgttacaccgttgatggcagttcctacccctgaagaactaagtatagccgcaattagaattgccagttctgcgtgtaaccgtcgcttagggcggtaagtgtgtgccttccatgtacaaggtgggggggattccacttctctacagagttgtaagggaaccaaggcaactaacaaaggttttgaaacccttagttgcgagcttcgattgggcacaacaaaacatcggtataatcccttaccaacccgtttgcaaaaagaataccac

SEQ ID NO: 417883 - DNA, 584 bp, Homo Sapiens
agcggggcgcgggcgtggacgaggtccggctcacccgggcactagaggacctgctgagcgttcgaaagtcgtaaggtcacctacctgtggtggtgccaatgtgcctgggcaaccactgggctcgcgacacgatgttgcaacaacgattcaagcggaacgtgatggctagaacgttaggctacagatgaacgtcgcaacatcagagttccagtcggagaaggtcggaagactgacaagtcgtcctgaaggtatcgtgacccactgtgagacatttagactctgatcctcactttttctgtagggcacggaagttctctagaagaattcgactggtactcatgatggtgtcccattgcgcctcatgacgtcgaaccagaaataatgattcacgggatgatggcactcgtgtgtgggtctcgcgtattactaacccacgtgccttcatgaatcaatcctgattggaaaaggatttcgtccaaacgcggtatccgacgtgtgcaatggcacaaagttccgacctcgagattgcgctaggcccccccctgtcgagatgcctggattcttacctcgcacaatggggaaaa

SEQ ID NO: 417884 - DNA, 1287 bp, Homo Sapiens
agcgggaggggtgcgctggagcaacctaggtgggggtgctcggatacctagggccaagtagctcgtagctccccgctcagtcacgcaatggctatcgctagtagcctggaaaaccctcgtcgtggagctcgctactgcacccgaagcctgcgctcgggcacgtgggctcgcgcagctgcgtgcagaggacctgtacgatgcgtttactcggcagtgagtgcgctaggaggtgacctgcagaccgagtgcacgcgcagagactgcaggaaagcgaggagacacgagcgagaggaagcaggggagtggaccggtcagtgggagcaagagccacgcggggggatgggagcaattgcggaccaaggcgcccgcgacgcgaagcggacgcgtgtcggatgcaggggcgtgttggcgccacacctgcggcggccggaggatggtgaccatgacttcggccatagggaagcccacggagggcacaccgcggcacacgaacccccgcgagcctaacgaataggacgctggcatcgggaaccatcccgagggcgggacatcgagtgccgtgggagagcggagacgcaaagaaagcctagggtcgcgccagcggggcacagcccccaggatgtaagcagccccggtgctcgtggaccgacggagacgccgggtgggaatcagcggcgacaatagttgccgaggcagagccccgcggggatgacatgggcgagcaccggtgggtaggccagcgagggcaactccggccaagcgtgggatgctaaccagcacgggaggatcgaacgtcgcggaaagggtcgctacgggttggacgcctagcgatgcgggcgggatgatccacaagggtcattcgtacccgctcggagggaagaatcggccgtccgcgatggcttgcgttgagacataacgaatgaaacgggaggaatccgcgccgacgcgcagtggccctggagcctacctccggtggacccacacgggccgggctggagtccacccgggcgccggggcactgtagattccaatcgaagtacgccggatcggcccaaggcccgaccctaaagggcatggcaggaggtgcttcaactcgcgggggcgatcaaccgcggtgcgtgccgtggttcaatcccacggaaagcccagcaagccccggccggcagtccgccctaaacgggcctggggcgcgacaccggccatgggggggagccggccaaccgtggcgacacctcttttgaaccagggggcgggtgggccaccctatcggaccgtgtccgagtccta

SEQ ID NO: 417885 - DNA, 1278 bp, Homo Sapiens
agcgggatcgtagaccggtgacgcgagggaaaggcactgctgatgcacctttgttctgtctccggacgaagtagaacacgagcgtctactcgatacgcgcttactctgctcctgtgcaaaatggtcataccttctttagatggaagaaaacgtcgagtcgcaccacgtcgcgggtcatgaagaggtcaggacaggtgtcgcaatcaggtacgatctactgcccgagaggtggtatggacgatatttgcccatggggtgtcgctttatcacgatgctggggaaagactcggggcatgatgaactatcctcttttgttggagtagtgtctgggattgatatagacgggtgaatgtgaagaagattgagtgggattctggatgcaatggggaagtcgttaaatgctcttgtcaaaactaacttaagaagattcgtggcaggagtaaaaggcaattgattacgtggatggatcgggcaaatttcatatatgaataggagtaaggggtcaaaccgtgtgccagaggaagatcccgaacgggaaccatatcgatatgcggggggaactcacaggtgcgtgctgtacaaggatccatggcgttggcgaagagttaaagctgtgttaaattggtcgtttcctagactttcacttttactttgcgcttcgagaagttccgctacacgacgttaccatggtcgcatgaaattattgacgcttctacgtacatttggtggtgtcttcacccaaaggcgggcaatataggggacgcattgtcctattaacgcgttaatgggtttaaacccgttggtgaaaaagcgtaaaatcgttgggacaatttagctcctggaaaaccaaccccggtcttctgtcatttgggcgcacagctgtgccttgcttatgaaacctagggcaatcttctgtcctgaaggatttatacagcgttaaccccttaatatttaggtttggcacacgatgccgtttgggccaattccaattaccccaggacgagtcccttgccgcatgacgaggtgagtccccttacagaagggaccggaaacccatagggtgctgacccttccacatgggttgtttggatatgttgcttgagagcagtgtgtgtagtggttacaactagctggtgccacgggtgttatacacacatatttactcgtgcgttgacgagctgtggcagtccacaacagacaacgtggagaacccgtggcacacctcgagcactgctgctagtaggcgtgggcttgtgcgacgtgtgtacttatataagt

SEQ ID NO: 417886 - DNA, 1019 bp, Homo Sapiens
gcgggatgctggttttaaggaataaaatgcaaatggtgcttcttggaatcaatccatgtaacagcctagagaacaatggggcatccagggataatgagatcttctagagtgcaataggtgagggttcatggaagacacatgatgagataacatacgagagaaaaaggttgttgtgagataaatgaatttcggaatcctagtatttctggtgtagtatagattcgtgggtaataataacactatgcaaaatggtggagttcacgagtctgaagttgtcagaattggacatctttggtcatcacgatctatcatcaatcttcaaggcttaaggcttcttactcgtcccgctcaacgaaggggcgtaaggcaacttgcacggggggactggcaggaaccacaatgcatcttgcagtcgagtaagggtccctaatacacctggtggcatttgagggccgtttcgtgcacgaactggcaggatatgagctaggggaggaaaggtccataaatgttggagtaagaccccctaaagcattattctcgcttaatccagcaagtccctaaccaggacgttctacaatctaatctccgcctacagactgcatctgtcccggagcttttactcaaccgtaccgggtagaaatatgttagtcgctgaacgggagaaggctggctccctttttagtattttccacccctaagtggcactttgaatgatggaggcgacatcaaaaatgtattctatggttaccgcaatgacacattagttaagtccccaactttccaactacttggttaactatgatggggccggtggaaccatgttgcgtcaacgtataagtatacggaaacagtatgaagttgagcgtatgttgccttagtctaaaataccttacccatttagttgcccgtgccccacaattttggatgaagtcccttctcgggaataacgacattatttgtcttaacctcttaatatggtctatcccagagatttagtgtcccatcagttgggcaaccta

SEQ ID NO: 417887 - DNA, 907 bp, Homo Sapiens
  misc_feature (43)..(55): n is a, c, g, or t
agcgggctcccggctccgtccgccgagtgaggccgcggccgcnnnnnnnnnnnnncgtggcgccggtatgtacggcgtgtatcctatgtaaagatcgagcgatactatcaataaactttattttaaacacgtctcccgtcttgcccaggagcgccagccgacttgcgatatgacgggcttagctattcacactagggatcgtctgctcgctacgtggtatcgacggcctcgaagtactgcaggacctgaccgttacgatggcgtcagtgacgctccattgactctcatctcgtcactccttagtcaaacgcgtaagccgcccctttgttacccttttaggtaccctgtggtaacaacgccatatgaacagttacccggataaaacttggattaccatgcgtcccagtgtcagtcccatggttacttctgccatatacacgtcagctatggtcatattttatccacaatgtcttacgtggagagccttgttctcgtcacaatatacgacccaaactagcccgactgtgaaattcactcggcgcctcacgaataccgggcggctacagtacgagactctcgtataaccacatacgttgttggaccgccccctattgcttattgccccgcgctctaaatgggaactcaaccgcagtaagctagtcaaagacgggcgcttcaagaaccgcatacgcgtgactagttgcagacagtgattaaactgtacctggtgtgcgtctctcgacactcgggtctattgtacgctgggagcgtgccacaaaaacgtcccggtgatacacagcactcggacctccacttcacagttgtccaacagcacaccgcgaaacctactctgacaagccaacacactttaattaacactatgcgtcgagattctaacatcgtagca

SEQ ID NO: 417888 - DNA, 1216 bp, Homo Sapiens
agcgggagggggacacgaaacttaatggctgtagtctccagaccggttacaagcatgtatgcagtgtgcaccagaggtagagggacctgatgtggagcggacatggaagatgacaagatactacttatcactctcaccgccatctggatacctggtcaccctcagagttaagtagagcgcattctggtccgcgtcgaatacccgacgaccttgtacgttcgtctagtttgagagtatcgtcgaggacgcgcgcgtcgctctaaacactgatatgatgtggaggcgacaaaccaagtgtcgaaggtgctacacgacgtcttccgtcgacctccacgatctcatcattcctcccagtattagggtaacttgcgctgcttcagcccgtagaaatccttgaagatgccttgagtacagtggactcctcgaggaattgcgcgagtcaaaccggggtttatctaaaacaactacttggaattcatcattgcatcgttatgcataggcattccacaaacaatccggggggtcctgcaaaggctctaaaaggattcaataatttgatccataaagaccaggttttagatactcctagggtcactcgaattctacattatacctacaacttcattcagtagcggcaggcatctgacttctgctagataccagatacgtagctctattagataccgaggtccaaaagaaaaataattcgctgagggggggctgacacagcggaaagcgcggaaaatagccaaataatccttcgcaatatctggtggtttattatccccggggtaaggatacatgaagctattaatcttggcgcacatgtccaatgggggggtctaaataattctcgatggaatttcaccccaaatcccacctttttagctcctttgtggggaacggttggttgtgggagcacctatccatggctatatggttaacccaccaacagcctatgaaagcaaggggagaactccttattccggtgtgcaaaaaggcataaatcatatcccctccgtaaataaattgtgcactctcaggcgtttgcaaagctgtggggtcggctcaaaagtgttggtgtgggggatcatcacgttggagattcccaggccttgtacacctctggggccgcccgaaattatatccgaaggcggaattctttcggcctcgtggcgggtagaataatttggttctgcaaggaagcgacaatttc

SEQ ID NO: 417889 - DNA, 1027 bp, Homo Sapiens
agcgggagctccggcggccgagtttggatggagcgggcacggcgacggggagggtgcgagggttgcccgtgatcgcagtgtgccagtctagccacaacacggagcgaagtggcagagtaggagaaccaatgcaaggcccctagtcgagggacgagggagggatggaaggatggacgcacctctgtgtcatgaagccgtcgtgcgcctcagatgaggtgcgctcgcacgtccatgagacgcgggggctgacgcgacgcgggctcagtaacgtgcgcgtacacggccacggatggacatggcgacaatgagggtgcacggggtgattgcagggtctacgtcggctggtgctgactggtgaaggcgatcgaagcgagggtatcacgaagaggctcgtgcgccttcataggtctcgcctggggcatggtgagtgaacagcgcacgctcgaggaggctccatggaagagctcccgaacagtgtcggaggaacgacccagaagggggtccccgctgatctcaacgaagacacggctcggatttgactcggtgggcattgggattcctgcttcaacggatgggagacgcttcgtgcctcgctgtggagctccgatgcccttgggaaggtcagtaaacaagaatgttgcctctcatatataatcgatagcgcctctccgtccaactggaatacttccgtcgcgtaacacggaaattggactttgatcgaagtggttcgggtggtgccggcacctgtgaataactgacagagcaatcatgcagggaaatacatggccgactgcagggtttgcgacacccgtagggttgggttgagggggaatgctgacaatgtcagcacgtggggctttgcgaggtggatcctagtgccccattgagacacggtacccggtaaactccccctggttggagaggccaatgtctcggtttgaggcattgattctttcattgatatgtgattctttggagcaagcaattggcttcgtcgcattggttaaacgcccaagccttttttcca

SEQ ID NO: 417890 - DNA, 1103 bp, Homo Sapiens
  misc_feature (269)..(269): n is a, c, g, or t
agcggattcatgtctgtgctctctcgctgtctccgctgcgtggtgccggacccttgtgccgttcgccacctgtctcgagcagttgctgccagcgagtcccgtactggaactggcataggatacgagactgaatgggccatatcgaaggcaatataagattgcaagcgaggcttgtcgcaatgtctggtgcacttgagtcattgctgcgtgtgcttggtctccatctcggagaacctggacacagtgagtcggatagtcgtattacgtgnagcgatggcatattggaaaggtgtaaggcatccaagagaagcagtgacgctctgtgggcagttgactttgtggagacgttgtagtctctgaagatggctccagcggcaaattctcccctagttcttcaggatagggccccccaagcgagaacgtataagacgtatacgtacgcgataatgaatgacataggatccttggttcccctgggatgggcaggattcgcgaagaagaacgaattgcatggggaggtgctggccagggacggggagaaagggataagtagacaaggttcagtgcagggaatgagccgcatatggtgtttgacttcgaccgttatgtaaaatttagggggcgaaggaagtacatgcatgtggggaatcgtacgagaacggctgtgaggaagggtccccttttcgagggaaaggggcgataagtgggtaaggggagggagaactaaataattagttgtaattacgggagagaaggatttgcgattgggaaaggggtaaaaacgccattggatttcgctgtggcaccttacatgtgcggcaaacttatcattttttacccgcggagacaccatccaggttggagagggcatataaactccaatgaaggcgtcgtcttatatttgcatcttttgtgcaccccgtggtacttggtcccgaggcgacaacctctataggcgccaagttagtcgcccgattggcgttggcccgtggggacagggttgcacagaccaccggagaatctcataggggataccccgtcccctaaggagttgtggtagaaagtggttatgtggggcacttgagagagtgcctatagcgggg

SEQ ID NO: 417891 - DNA, 1029 bp, Homo Sapiens
agcgggcctgcatcccccgatcctgtccgctccagcataagcgaataattagtgaagcccggcgacaccgactggcatgagattatcatagcccgaggtgcgcctccgttgagagaccttcgcgcccgagagccgtctgagcagtgaaatgagcaagagtcacaaacagtcagggtggcggaaggcagccggactattgcgcagactcagtgagcagcagagggaggaaggcaggagagagtgcacacagagactgacacaactgaaaggagctggagcaatgagtaagacggtgccgaggaactaagaggcgtaacacagcgtaaggcatgcgatgggcagcaggctcaacatcagcgcatgatggaacgcagtgtcgtgtacaagcgagaagcggctgagcgaacatccgagatctcactatcgtaccgcggcagcgcagcgagtgccccgtgcaatctcgcatggaacagattagctaaggtcgcccaaggccttgaatgggaacgccgggtacgcgtcgtccctctaatggaacacataggggttcaaacacacggcacgagttcgggtatgcgggataggagccttcattttgttgagcttccaaaacccctttacagaatggcgcacaggatataccctttggcgagaacatggaaccacggcccgttcacacaaggagggaacaatcccttgcgtttctccgtatgaagctaaggttcgccatggaccctagatcggtcggtcgcatggcacacccctgcatttacaaccgaaaaccacggggcgcagggaaggggtaaacgaaaccggtccaaggagtacggacttgggttcaacacctgtgcaccatgggaaaatccttaagtgaagcgagaagccgttggcccctagccgcgcccaatttcttggcgcgaccgaacccggcgcagaaacgagtaaccggaggttccccagaagggaatctccacgacgtatcggcacgcgcacccacgtgccgcgaaaggcacttctctcgcgcgggaa

SEQ ID NO: 417892 - DNA, 942 bp, Homo Sapiens
  misc_feature (576)..(576): n is a, c, g, or t
agcggtgtcggacgcttgatcaaaatcgctgagaaagtcggagatagctatcctgcttcctatctcggctcgtcgcacgaacgccctgttcgcggagccgtgtgacctgcttatggtactgatccgcatacgtgtacttcgtggtgatacctagaagtgacttgcctggccagagacatggggctagaagcagaatacagagcggataaactgggtcggcggtacggagtgaatgacaagatactctagcgtgagtggagtgtaggacgcttgaacagattccaatgaagatacacacctccttagtctagtatgcgactattatatgaaatggagattgtgccacgctaggaacgatgccgtccatgtgaggacactagattcaggcaggcattgtaatgcaggaaaacgtaatgaacacactataagttggagggaatggacatgtaccaaaagcttatgacaagtggactttcggtcgtaactagtccgggctaaccgttggggtctagaaagagcgtaggaatcgtgaggaagcatatttacgtactcgtttggtagaccaatttccattgncaattgcgtacccttgggacgctagaatacaagctctttccaaatgtgcccagggcaccagcctgagccaaccttgagaacggacgtgtacccaaactggggtttcccctacttcaagttcaagtaagattactgtgaaccctggggggaagcagcgtataccacctaagcgacggtggattaatttccttaggcgccaaggagcactttatggcacctaggccatgagggaaagaacttgcagctatggcgaagaggctggaagggcctttgtcaggggaaataagaggcttgtcccctacagtttggcgcccctttggaattcccacattggctcggcgtaaggtagtagaagttcggcaactg

SEQ ID NO: 417893 - DNA, 873 bp, Homo Sapiens
agcggaggagagcatgccacgctgcgcccgctccgggacgcgccgccgacttactggtcctgcgagaaatccatcttcggcaaccacaattcgtgccagcggaatctggtgcagacgctctacgtataactacgagtggtttgagtcctctctattcctgaatgtgggatactatcgggaagacgctgacaaaagcatggtcatgatagcaccgtggaccctattacttcgtgaaccgaattctacctctgcatgaagttcataacacctgaattcatcagctacctttataaagaagcaggttcttgcttgtagcactaacgagtacaagtacactattattttgatctgaagtgatcaagtactgtagtcttgcgccgtgcctaacccaatagttgcgtgaacattcacactgtttagtccgacctggcagtaagattggacccacattatttgaaagggaaaactttgggacctttccacggggtcaattccgatctccaagttaaccttggccagaaagaacaaattccacttggccaccccttgtagacttacggctcaggcacaggttctgaagttctcggccactgggccacatttcaattccccgtctaagacaacttattggggagtatacccttaacacgaaacaccggtaatttggagtcacggaaaacttactttcattattggggctcccttattccgagagacgcacgcagctggaggaaaagggcccgcagtttggcacaccacgtctctcgaacatttacagccctctcacccgggacgtatggggcccatttaagaaacgcaaggcgggttccaacgaaaccgaaactccgtagcctaacgtgacgtgctccctaa

SEQ ID NO: 417894 - DNA, 1202 bp, Homo Sapiens
  misc_feature (112)..(112): n is a, c, g, or t
  misc_feature (164)..(164): n is a, c, g, or t
  misc_feature (338)..(338): n is a, c, g, or t
  misc_feature (426)..(426): n is a, c, g, or t
agcggagtccagacgaagagaacctacaacacctacacttgtcagattgacagattcatctcgagtcaaccaagacgtgcatgcactctgtaacattgtcctctacagaccntgaccttggaccactcaacaggcgtgaacaccacgcaagaagacacctgacnaacagtacaagtccttgaatgactgagacagtccaccggtaattgacaaatcgttgaattagctcctttcgtgccataaatatctaataagtataccgcgatcgcatagggtctaccaaatggtatgggcacaccatgcagcaacctgttcaagaagtgtgtaatagcgcagcntacaagaaggcatggatctcttgtcacataatcgtatacgagcatatgtcattggtagcgatattccataaaatggacctaatagcgncataggttccgttgtgactcgatgtgatgtgagatcctgttttcatgcctctcgtatctgtgatctggtaccaactgcgcctaaggtccgtgtctgacaagatgacttcttgcgtatactgtatgcttgcgctatgcacgatgtaaactgaggtgactcgtggaacccatatgaatcactgatgtggccccacacctgtaacacatcgcaacatctaatacctgtgctcaacagtagtacttcaactcaaggtgttcaagcaagtgctgtcattcatcctttctaccactgtgaagtgacagcaagctgcgacaatggcgctttatgagatacccatgtttcccccctagatgtggtgcactagtcacaaagtttgtccaaatgcgacactttacttgaccgataacagaatggctccttaagtgccactccattgcttaaagcatggcctgtattagtcccacaatgtgttcgccttctattgtggggacgccatacctattctgctcgcagagcaacaaaataaaaattccaaggccttttgattccagattttacaggcgtatttaatcttgaaccaattatgacacgttaaggttaaagcttcacactattggattgggccaacagacccttaaatttcttaaatcttacccaaaagtgggcccaaagcataatctccgaatccttaggccccattcttaagagccagtgctgtccacggggttctacaagcctgtgatacctccctaattccagagacactcggaccacag

SEQ ID NO: 417895 - DNA, 1221 bp, Homo Sapiens
  misc_feature (433)..(433): n is a, c, g, or t
  misc_feature (837)..(837): n is a, c, g, or t
agcggggttgtcagattgagttgtcagtgagcggcctctgaggtctctgtatactggccacttgggcccttgtcccgcgattgacgagtcaggattccgtgtatgacttgaactatcccgggtggctttctttgtgctctggcctagtgaggaaatccatcacatgcaatggaatatcctcgcatgcatgatgaggcgatagcgactatgccggcatctatgaaacatctgagcttgtagcccacgttatttgttgcccaccagtagaacacaattacaacaaacgtaggacatgtaagcccgtacccgtgggacgtctttcacgctctgggggaagtattacatgagtgcgccgcacgtgcatgggatcatgcggtcctctctccatgcttatgtgtgacttcctctctgtgcctcaccatcgggctgagtntacccgtgacctccttggagtgcaatccatagaatgccgcggagaatctctgcacggagaaaggcgtgggtaaccgagcacgtctcttgaggcactcgtttgagattgagtgcgtccgcgattgtccctagaagagtagtgacgaatcgcaccacggccaccggccttggttcccgcaagagtcccttgtgagccgcacccatgggtcttgttcgaaacatctaagagcactcgcatgtcgtccgcctgcttctcacatttaccgcttcatcatagtgtaatacacttcacctcacagagaacgcaagacaggcaccttgtggccattctaagcacaaacggtttggccaggcccgcaccttaggcacgccgttaccaactgatatgagcaaccctacctcggntcacgtcgcaaccatttggacattaaaaccctaagacaacattgtctaagcagggggaaggacacaacctttacacatggtctccaatgcaaagaccgcgccctccggctcgcgacgatacaccctgaaagctgtgggagaccgcgaactgcgcgcgacacaagacacggccccaacgacccacacacgtgccctttaacccccagcgtagccaactacattcggcacggctccctacagggaacccactaccatgtattccacgcgctgagagcactccactatggcccctggggacaccacgcacggggacagcaccaacgcaagaccccacgcgcgactacacccgctacgccacctgcccgacgcacacaccactaaact

SEQ ID NO: 417896 - DNA, 1053 bp, Homo Sapiens
agcggggacatctgacgcgaagtagtaaccaagtcggccgctctatcttgcgcaccggaccatacatgaagatgtctgctagcagagcagcgtggccacggtatgaaactcggctcgtgtcctgtgtcgtgcatggaccgaatacactgaataaaagagggaggcaacagatccttgactctgttcgatagccacgtgaaatcacagccgcgagtagcttctttgctacatctggccggggcaccgtgctcctcagcttacggatgtgatctctgtcttcatgtatacgtacctcgtggattaacagtcgatcctgtcatggtggcagtagccatcgctgtgaccccgtaatggtgtcttgtgtctagaattctaagaaaaatgtacgcgtccgtaatagactgcactcactggtttcccctgtctctccaagtggtagcatgaagtaccaaaaggaagagcttggtggacttggcacaagtattggcggaatagcggacgcggtaagctacgagcagagctagtacggggcgttcccattatctagctacttagagaggcttcctatccgtaggagatttcccctactgtgctaaattggaacgctttctggggcaaacagtgggacacgtacttgtattgcacaccatgggcggtttctcattcaggcagtacccctacatgttagtgatccccttaggttggcccacacacaggcactgcgccttgctggccgtgggaaagttgtcatttcatgacggggccttatacgccgaggctcggcgcccacataggctttgtcccttgggaccggtgtgatttctactccgaaagtccatacaaaggaacccaacggacgggaccgcggtccattaggagaacggagggcccttgcacataatgacggcgacagcgacgattcaaatctcctcacctacgcaaggatgaccaaatttgggaaacaatgtggtcttcccaagaaagacagggcaatgcagactagtagaaccgggggttcccccattgtgcgaacagccaagaattcggaattga

SEQ ID NO: 417897 - DNA, 812 bp, Homo Sapiens
  misc_feature (156)..(348): n is a, c, g, or t
agcgaaagagtttcctgtactctaggaatccaggaaagtgtagaatacagatttgaaatatgtctaccaagattgattaaaatattaaatatattgcttaaataaagtaggccttttctagaaatgttcttgttcttgagatggggtatgctcttnnnnnnnnnnnnnnnnnnnnnnnnnnnnnnnnnnnnnnnnnnnnnnnnnnnnnnnnnnnnnnnnnnnnnnnnnnnnnnnnnnnnnnnnnnnnnnnnnnnnnnnnnnnnnnnnnnnnnnnnnnnnnnnnnnnnnnnnnnnnnnnnnnnnnnnnnnnnnnnnnnnnnnnnnnnnnnnnnnnnnnnnnnnnnnnnngtgctaaagcaaccttcctcctcagccctccccagagcacctgcgatcataggctatgggcctaccaatgaactagaaccccccagaaaaaagcccacaaaaacagacggtcacaataacaccactcatgcaaacacatgcccaacaataagccaaccgacaaactcgcatctacatgaaatagaaaatagcaccatcactacccgcacacaatcacgcaagggacacgcacatccacacacacctacgagaaccggaaacaactgcacctgtacgaccacaagctcgcgcgtagccaagcgctacaaaacaacgccaaacaatggacagtataccaactgccaggctaccaagacgaccaatcaagcaacaacacactgataacggcgaaacaacggcacgagacaacaaagcaacaacacagcgatccaagaccaagaagacaacatgcaaacggaaacaac

SEQ ID NO: 417898 - DNA, 1340 bp, Homo Sapiens
  misc_feature (1103)..(1103): n is a, c, g, or t
agcgtgggctggaggacattcccatgcttgactgcgctcgcgcatgctgctggcagacatgtgctgcgagcaagcgaactatccacgaaccgcggcgctaactaacctgccctggcagcaactggactccttctctctacctgaaactcttaccagcgcctcgtgccacgctggtgcaagcttaacgccgggcacttcctactggcctgaatccacgaagacagagattccctttgcagagagaacagaaacgactgggaagacaggaaaagtaagattaaccccgtagttgaatccaatctcggctggttaacggaaacttgggtcaatcgactggtacacttaagccccaagaaccactggaacgctacttaccaattcaccaagcataattcgagtgggcacttgcaaactttctccaggcgaaacgcttaataacccaatgggcctgctggctccgtggctctaacttggccgaagccaagataggccccgaagaggaactaaccgtaagttccaggagtcaagttgtcgtaccgcacctgggaattggaacgctcccaccgtaacccgacagactgggaaccgttcccgttccgcttgtaacttcatccgttaaacacgcgggcaaattccccgactatctcgcattatgcgcaagggcaacgttccactgggctggtgaagcttacacagaccgtttaagcttaagcttcggggcttggcaatacagggcgagacgctcagctcgagacccgaagacagagttttgaaacccagaagggtcacccaagaacagcggcagccgcccatggggcaaacacttcgggcggcacactaacacagcacggaggattccccagctcatgcgaacgctttgtctcgacagatgacccaaagtatactcccccagagtttgatacgccgttgtgagtaatccagacagagaaagtcttgagtccaccatcatgctatcttggtggcgcgcgaagtattagaaactttaagaccagcgtagataggcaagcagacagcatatcgcactccattttgggagaccgcgcttgtcttgtagaagggggacaatagcccggatcattgtntataaacagccactagtgccttcaaaacagtatttgtcacacgacattatatgattgcttgggggcaagacaggagagcggcaacaacaatctcttagctaagacgtacgacaacactgaggagcgggtgaatcatcacacgaaccgcttaggagcggagcttacaaacagcgcggtgagacaccagtggcagcctgtatcccgcaaagatttaagccgaggagcaatcgtctaccg

SEQ ID NO: 417899 - DNA, 1174 bp, Homo Sapiens
  misc_feature (298)..(298): n is a, c, g, or t
agcggactgggcaccatccctctgcaagaggaccatcgtcggcctcgcgtgaattgtaaactccaccgcatgggcaactggatgttggttgacttcgtgaaagacattgggcaagcaagcaatactgtgtgacaagacgcgagggtctgtggagcgcaggcggcaccattctagcagtcgaagaagcgaaatacggactaatcattggagattctcagatagactccaatgccgacctaagtgggtaattgatcgtgtaattgatccatatgtctgagagtgaataatgtaatagctntgaaagatgggagacagacactcgcagtatgatcgctaagactaatcaatggtagattcggacaggaggaccactgttatatcgcgaagatatggtctataatcgttggcaatgacgaagatgcagacttatgattgagaaatctgcgcgacgtttccaagctagaggttttcccattcaaataccggcgcgtctctacacttgggctctatcgtagcacagaatacacctaactatagtatgtagatgccgaagaccgacactcctctcctggaccacgtggattattatttagattggtgtctaaaacataggcgtgtagtgttttatttgtgtactgtagacaaatcttgggatctagaaaagttagaatctcgttgtccgaatacggcgtattttagaattagagaaaacacctttgtattctcactcggcgccttttactaaggaaactcgtagagaaatttagttactatcccttatgagataagaacacttagtcgctgtttgtgttaagaattcgccgtaggttcgctcatattgggaaaagcccaacattgtgctcattgtccaccgtcaaatgagccacaacaccgcgttggataaggtttgggttgggaagtatcgcagacaatactctaacttcttttactggtttgtatcattttcgagactaggttgacaccataggtgaaagggccacgtatttggtgagccaacgtctaatgaggtttattatacctatcgtctggaattttatgacaaagtttagaatggttagggacactcatcattggcgggattctgaaaggtctagaaaccaaggtcttactgtatcacccactctggaacttgatttgattttataaccccttg

SEQ ID NO: 417900 - DNA, 1463 bp, Homo Sapiens
  misc_feature (478)..(478): n is a, c, g, or t
agcggataacttgaatctagtagcgaacctgtacagcggcgttccgagtccgtccatgcctgtgatttcgtgtattggaactcgtaatcacgaccttgtctggcctgctacctgtgttgcaagggtcagtagcccgcatggtccctggagacgtgtgcctgctgcggattgtatgcccatacacatgttgaatttcattgtgttgtctgtgtacagcaacacactcaacttggagagctcacatctagagcgtctccacctacaccgacatgagtgccgggcagtggtagagcaacatcgaggagctgcctttgtgccacaagaggtgttaccaatttttggcctatatttgggcagttgtcccactctccaagcttcttgcttgttcgtaccttgaggttggaatctcctcgactgtaagcgttgattcccatagaacctcctattcaaaagattcctaaaggccagaaagaggccnagttagcacacgctttcgaatttgtaggtgaaccatccgagtttgagctagtttgggtgcccagctgtgacataccccacgtactgcacccgctagtaagaacaattttgaaagcattcaagccccaggatattgttgtcgcgttgttaccccgtgtgtgctatagccatttccccttagacctttagatacttggtttccacaagtttcgtgtggaaacggcacttcaagcttccactacacttggggtgcaattggtccataacaaccgtcgaggggagacggtcacctgtggttccaattgcttgcttggaaagtgagtttccgcgacattggattgaccagttttaccccaaacgggcccattaatttcaccaaggggcagtagcgtccacaagggcagggagagatttgaatagcgacacaggtccaaaagggaaactatgcccttttccccccagggcagtaacttattaacacgtcggcgggatagcgataaattacaccaaaccccgctggcccaaatgacattaagccgaatatctttggttagaaatccctttgggcacatgttgtcccacagaaacacagctcgtttgggtgctaagcacaaagagaaccttaattttgcggcaccaacataggactgccatagattggcgcatcgacttcaaaacgaatatccctcattatagagtatagattttcctcctttgagtttcggaaggacgcccgtctcaatagtaaattccccgacatttcctaggaaattttaataaacccgatctatcaaggacgtttaacacccgaaaggagccgaaaagcggcgtcactttacacgggtcaagacacgatgtcctccagaggagagcatatgctttagctgccggaatttatgcagaacgtcttcctttcacaacgtatccagatgggcgccccccatagagggagaacacagaagcggtttcaatcagactaatttcca

SEQ ID NO: 417901 - DNA, 829 bp, Homo Sapiens
agcggctgttaccagagggctgggacggggcgacgtggccacggcgctgggaagaaccaatcggccgagaaccctggggaagtgaactgggtccataaagaccaagtggaggagtagtgggcgcggtcaggatgctggaaggcagagtgaggatgcaagcccctgggctgagaaactggggggccctggcctgggagcaagagcaggtgggccggtggcctggagcaagagcaggggcggggccccggagaactgggcgagacccaggtacagtaccccaaggccccttggggcagaacccctgagctgaagtgagcacaggcgtgcgaatacccaagagtaagaaacgttgcggaagggcgctggggttgccacacgaaggggtttggtgggccacctaagcccggtgtgttgcgaaatgttaacaacctggttgttttgccagagttccgacatggtgcaaatagaaacggccagataaccggtggggggacacctttataacagcaggggcgtgggcacggtgcttcaaacacccgtaagaaaacaattaggtagagagtccaaaagtgaaacccgaggcgttgcagaaggaaggccaacaagtgaaggttggggtacacttacccacgtgtggcatgcggcgatggcccgtgcactttacaagtgggaagtcgagagagggtcttcgtaaggcgcaagcggtatacattgtttggcggtgcacccacagccccggagtgtgttaaccccgttgggcgggtattccataccacggtgtggggccccagagtaatgatctccggaatgttcagtgggccagctggtg

SEQ ID NO: 417902 - DNA, 778 bp, Homo Sapiens
  misc_feature (449)..(449): n is a, c, g, or t
agcgggaatctccaggacaatggggacccgggacgatgagtacgattacctattcaaagtggtgcgtactatcgtggactcgaggtcgtgggcaagagcaatctgcttgtcgcgcttctacccgctaacgagttctaacctgtgtaggagcaagaagcaaccagtcaggcgtggagtatctgccgacccaagcaatgcgatccaggtggcacggcatatacctatcacagtgcgcagatctggtgacaccgttggccaggaggcgctagcgcttccttcaaccatccgcagtaactagcacgttgagtagcaagtgaggtgctcttgtattggatgtagcggagattcgtcgcgaatgcatccgtagaactactagagaaccgttggaagcagcgtggcttgacgggagcttgaagggaccaacgcagaatgggtaacattcgtcagtnctatgcatagggtggcgcaaagtgaaggaggtgaccttgcgcactaggattgctggggcttgatgcgccaattgaaccgaagcgcccctggggcccattcggctggccagggaagaaactaagctttcgtcgctctcagagtcggagtagcccttccgagcccgttggaagtatcgcgcatagaccgttaagagggacatgcgctttcaaaggaagagcatcccttgacgaaagaggattttacctggcagtgtcgttgttcagcgggtacattcagaattcgcctaacctgcggctgccactacggacgaagttcccgcgggggaacc

SEQ ID NO: 417903 - DNA, 886 bp, Homo Sapiens
agcgggccttggcctcctgtgcatgcgacgtgcgtgtcccttcatttgacgtgcctcgcgtgttcgcgatatggcttgtgtagcgatcagtccggattgatgagttgagttgctgatttctgtgatgttgccgatgataatggcaaacactgacaacgtacagtggcacgcgaagagaaacacggatgtatggctgctatatgatcattcgactcattgccctgggtatacagcagccatggttggctatcttcgatatttaggacgacttctggtagggcttttcccagtcgagcactgaaaactctgaccatatggaagctacactgaaactaaagacattctcgttatcttctggtgatataaggtaattgaaactatcaggctttgatgtatctgacgtctgtcatatgccatcatgtgcattaagtttggctccgagagttctgtcgtttgatgggtttagctgtgcacccaaagctgctactgatatgcttgtgcctgggaacgtgataaatagtcaagcctgagcctcccagatagcagactgcatgcgttacctctgagcgtgatgagtaggatgcgattacccttcagcgaacagacctccaactgaaaagaaatggctaggctttgacacgaccgttttgcctcagtgtacttggtgtcaccgcctgtgatccttcctatttagtcatgggtagtaaaccctgtgcctgttggctgcacgtcaggacttctgtaacttagtgaatgcctaacaaatcgccttgttatctttacgggaagggttgcctgctatacggctcatgccttcctgcaaagtgtccaaaaactttggtgcaacgcaaggaataatcctgcttactttgttgacgcaaccctt

SEQ ID NO: 417904 - DNA, 878 bp, Homo Sapiens
agcggagttctgtctcccgcgcgcccgcctcggcctctgcctagctgagtcagcccgtgcggtagcgccaggcacacgcggtagaacatctgtagggctgcaaagctgcacctccgcgtcagttctcacggcgagcgccgccttcagcccaagttctcaaagctctcggggctacgtagtctaccctccccggtgacccggcgagatccctagccgctcctccggccgctctgctctccgcatccctcgcgggaatgaccccctttacccgggactcccagagcgcactgtatggtagggcacagtggcgagtcaccctgtcccctgaggcctcttgagcagtcgccgatctctgcttcccgcgtcgctgcgatcgcctttcccgtagctgaatcacactgacccatcggaaacggttctgccctccctggggtccaccttgtcatccttgactaatatttaactcaactaacatttaccaagttctcgctggcacgagttctaggagctactttttcatttctcagctttctccataaatgcagtgggtcctttaggcaaacctgaaatcggaaatattaatcttaccaatgtaatcttagcaaatgtcactcacaaggactgtgctatactgggctaaaaattctcatcctgctatagaaatatacgtggaattttcagattacgtggaaccctttaaagaccgcattcggcctcctgggtctacagctctcttttttacccctaaccactcaggccctggcattttctgcagaccattagtcgagtccctcttttcccatgtgccacaatcgcatccgcgccttccttccctgctcctggcgtgatacggacgcccctttctgattccaccggtt

SEQ ID NO: 417905 - DNA, 1434 bp, Homo Sapiens
  misc_feature (660)..(660): n is a, c, g, or t
agcggcgttgtgatccaatcacgtccaaccgtcttaggccgcacttccaccagcatggtggtcgtcgcgttgtcccacggccttttgattcctatatcgactgcgaccttccctatctatcggccgacgctgcccagtacaaagcttgcgactcccttcgagtctacgagcccgtaagacgaccagactcttctcgctcagacagacactatgcggtctgttgtacagaaccatggcatggaacgccctgtgcagcagttgtcttggtcatgcgtggtatgagagtgccgtagcaatggcgtggcgcgccgctgtgagcaatcgatggtacattgtcgatgggcaacggagaaaagactccgcgatgaaaaaatccgtgcatacaccccgcacggtagttcgctcctgtggatgctattgtactgactagcactagttctactcaggacgcatcaagtctgtagaacatcaaaaaggcgactcccgttaccatttatgagttgccgacgcgtttagttagctaattacttggctgccgaggtccataacagacagggaaaacggcgcatagacccgagaagtccaaaggccaatccgagttggagacctttgtgagattaacctgtgtgggttggcctaggccgctgaacctaggccgantccaccggaggttagggctcgagcgcccgaggcgaaacccctttcggagagagcctaaaggcggtttggggacacggaagcgccgacaaaggtttaccgttacagcgaaataccccgacccaattgtataactttgctccacaaggtttgaactagttcaaacgtccttttggccaaaccatgttaacgcagttattatgcccgttgttggagagcacacatcccacccccttttttttggacagagaattccaagacgcggcctttgatttaggaccttcaccttcccagggaaaccttagcggccccccgatatagatagacgaccgctcagaacggcaaacttaagacccctagatctcaagctccccattgcgcgacgccttgctccgtataggacccccagggatcccccaagcaaagtggcccatacacagaagggcgcgacgttggcacatcatggtaccgctatcacaagggttccgcttcgcgggaggcaaacttttggtaccacacgttcaccccacactattgttgataagatctcccttatgggcggggcgatataaaatttcgggagcagtataccctgtacagcagaggccccccccattaaacagactattttgatcctacattccaaccacgcgcgcatacggttttgtgtacatacacaccctagccgcccctgtgtgggagcacacgaagcgtaccgtgcaccgccaatggtggaatcatcaacattctccaaagttggtctgaggacgactactc

SEQ ID NO: 417906 - DNA, 1050 bp, Homo Sapiens
  misc_feature (572)..(572): n is a, c, g, or t
agcggagagcgagatagcaactgcacatcctagaacaccgagtgagggtgctgaacgctggcacgctcaccgggtctctggcatctacaatccaaccgttcatcacgctgctcttcctgccccgccggagccggtgcgagcttcgttcaggctgacggagcagccccgtgatggattacacgcttagtggatgcgaccgatgcgcacgggctttaagagagctgcctccctagtcttgaggttcctgcgaagctagcgtgacggccagcactgtgcttggtgcgtgaagcgtgtcgctctcatcgagccgggtcgcggcatgttgccccgagctcgctcggggtcgaccgaattgactccgccctggttcgcgtcgatctgctgccagccttgcgtcggacgacacctcacgttgtccttgttgcttggatcgcattgtaccacattatccacggacggacgttctattccattgagtgccggggaggccagcgaccctcgttcccgtcggtggatctcacgacgtcttggcgcgcaggagttccgacgttttgacccgtgcaaggctgtgncgggaagagccctgtgccttgtgaccgaagggatgcattccacgcaagtggcttttcccccggcactcaggcattgggccccaggccccaacggtggcatccccaatccaagagccccacaagaaccgcttactgtagtcctccacactgggacccctgagaccgctttcccagccaatcgccaacaccgctcataggatgtcctcgttctacatcgcacaagaaccccaaaggaggcagccctctaagcagtccttgaaaccaggctccatcaccgttctttgcctttctcccctcatcgagggtaattatctcccatttgtcatggattgcttgaaacaccgcacaagttccccagtgaacctcctgcttgaccaggttcctcgggggagcttgtggacggattggtgcgcatcgagtgggaagccccctggggctttgattgcattgtggatcgtggccacgcttcaggtccccg

SEQ ID NO: 417907 - DNA, 1140 bp, Homo Sapiens
  misc_feature (545)..(603): n is a, c, g, or t
agcggagccagtgcggcagccgcggccgccccttgtccagcctctggcgcccggtgacccgatgcgcgtcgctcgcctgccgcggagccgcgcgtagcctgtgagcgcctgggcgaatggcggagcatgaagaaccaacagccggccgcgcccccgatccacccttgatagagcccttacctgcctgccaagaagtcccaagtttgaacacttaaaacttgtgcaccaaaagagccaaacatagtgggaaagcaaaaatcaaccttacagggaacaagacacccactattacgcaattcgtggaaccaggtcaaaccaacgggagccaacccaagtgaaaggcaaccttacccacatgtgaaacaacttcgctaacgcaaaccccagcggataaattaccccgtcgctaattcatcaaaaacagatggatcaaaaactaacaccatggaaagaaccgcctatagccaattagaaaaacactccaaggccaaacaatgggacaggcagaagcccctaaacacccattgcgcaccagcagcacttgnnnnnnnnnnnnnnnnnnnnnnnnnnnnnnnnnnnnnnnnnnnnnnnnnnnnnnnnnnngacttaaccacaaagaggccaccctgagtcacaacacacaccaatatcgacagctaaaggacaaaaacccccccatagcagtggcaaaaacacaaaatgatccacagacataatacacactaatgtcacacagcacctatgggaaagtggaaaacaacactgtgccaattaataacgaacagaaggcctataaaacgagcaccatgtggggctatcgcgagccacacagacaacaccccatttcaaccacatatgacatgtgaaacgcgccagagggatactacacccaagatacgcaccacgaccggaaaaaacaccgaggacacaacataacgatgtgcggtgaaaccagacaacaaccaacacgacgctgttaaaataatcaaaggcacgaaacagcgaacaatacaacattcttacccaaatgataggcagcagaagaaacaaccctctgttgagcgaacaaaatcatcacgcacacgaaatactatacagcacaagccatccccccacgttgagcagaacacgcgctcactt

SEQ ID NO: 417908 - DNA, 1165 bp, Homo Sapiens
agcgggtgctgattccggggcagcgagtcgtcggccgtcgcgctcgaagcttccgcccgctgccatgccgcggtacccgggccgtaccgcgtcatggggccgctccgggcctgcgagcgcgatcgtcagctgacgcgtgcggcgcgtcgccctggcacctggcgcgtggtggcctggctggtgacgcacgcgattgatcgctgtctgttcatcgaatgctgctgcatcgtgctttctaatggctcatagttcgtgtgcagcgcggaaattgcgagctcaacgcatgcatcgggccttcaactacctcgggccaagacccacacctttcttgtcaaactgcttgattcgcttttcagggactgttgtcaaagcgaggcaccattgattccctcaccgttgcgtgttttcaaactattgccgcataaagatcacgcaaaaagggggacaatgtgaactgtattaaagaacttcctggggaacatttggaggggaaaacaggtacccggcggtatgcccccgactagacattagttaagaaagagtccggcattagcatttggctacgatagggaaaggttgaatgcctgcccatagttcaggttcgttaccatgttggatatggaattagtcttgtcttgaaccccaggagaaggcataagaattttggacgcgcccatcctataagaaagcggaataccttcctagaaaaagaccttttatctgtgggaacgaaaataacctttccaaagcttggcaatgggtgtgcacattccccagggattgcatataacgtcccatagagtgttaacccaaaaggcggaaaacactcttttccagggggaaagccattttcgaagattagaagaataggacaccaccttggaatttcgcacgaacagcaggttgaaatattccttgatgccatagacccaattaccgagaggaaaccacgaaagaaagaaatcctgaagttgccgttaccttgccagatcctttcttaggcaaagaaagatataaagtgcgaaccaaatttatttagactcaatttcaaggccctttaaaaggtgggcttttcatttcaaaaacgaacttccggaaaggtccactgaggaaacaaacctgtgagaattttgcactgacaagttcactcacactttgaaaaacg

SEQ ID NO: 417909 - DNA, 171 bp, Homo Sapiens
agcgggttacttcgccgccgccagggtagcggcgtactgagtccggtccgcgtcgcggcgtcgacgcattatcaccagcgactggcagcgcgtgtgtctcgtgtgctctgcggctcggtgagacgaaaagtgggagagcctctcaagactacacccggcgtccccaatgtg

SEQ ID NO: 417910 - DNA, 943 bp, Homo Sapiens
agcggggctgggcgtgacgggtgcaaagtcgggggcgaggcggcggagcgggcggcgcgatcggggcctcaagcggaggcggcctggccgtcggcctgtgcattggcactgaggcgggtgaaaaatgacacaatccgcaggcgcggggagagaaccaggccggtcctcgggtcgggggaccgccctgccagggacgacggaagtctctgcgtcagggatgagagcggggtgttaggataccttgggaaatctatggagactggatggttcaagtcgcaagtgaggaagtcatcgactagtcagactatgtaggtggtaggtcaggttggaaggatggtgtaaggaagcggaagaacatttccaatagggaagagacgaaggacgtgagtagatggagaataccttcaacggtattcatagtgtaaccgaacgccgaggaagaattgggacacaaagaatcaacgcgtttcattggtgccactgattgcatgagggggtgagagccagaagccctttgcttctggatccctgctcgtccaggtcagacgccagggtcggagggccaaggtagcggtcgggcctgaccagggaacaccgagcgcaggcaacgagtggtggacacggtacggcacgggagacccgcctgggggttcatagccctgagatgatggccttccgagaagtcctggcgacagctgggggaaaaaccgtccaaagaccggtttggggggggtggcacatgcaccacggaacgtgggcgacgcatagggaccgcgccgaaaagggggtgaaagcagggagcaacctcgggcaaaacaagcattgggagacctgcctgccctttgcgagggcaggattcccacgaggggaccattgaaggcgacagggaacccaagggcaagagctggggagaaaacgaactggacttggacggtgggggaag

SEQ ID NO: 417911 - DNA, 1069 bp, Homo Sapiens
agcgggggtgtggcctgcgatggacgggtacggtgaggactgagctcgatcgttgtagatggatgggtgacctggagtaggctctgtaatcatgccagatgcacgatggcttgaggacaatgccgaaatggcaagcatgtggcctgggggatagtggccttgctaggaatgatacgagtactgccaagtcactgagtgacgtagcgtggaacgccttgtttggcatggaataaggggccgtctctcaacgtgtcacaagagcactagtttgacgagcactgtgcactacagtggggatggtgcgcattcgtttcgttgacgcatgtgcttggattctcatgctatcctatgcatacggatctcaacgcgtgatttctcgacgctgtggcgttgtccccttgtcctcagaagagtcgtgttggctgtgctcgtggcattgggacactatccatcttggtctgcccataccgtgaggcagccctcaagcatagtttatggttggcgactacccgagagtcagacaccgagggtagcggtaaccctagaaaaagggaaatccaacgggcgataaaagcggaagtttctccactgtgcagcacagtattgactcgcttcccaaagagtcgcttaccgttgaaatgacggctctcctggcagctcgcgaagaattggcgctcgggaggaacgttttcggtgctcgagcaaggatgcgcgttccgtacgtttttccataggaggctgtacaaaactaggggaaattcagcaactggagaggccgggcgtttacacattagactcgggcttcaaaatttggccacagtgcgaaagtcgaacgtagcaccttcctggctctgttgatgcgcaaattgatgacacatatggacagaatggtcaaggcatgggggatgagtttgcgcgggacacaccaagaggcagagagcgacttctctacttagaggaccctcggtagtgggctattccaacacgtttacccgcgttggaacttacttctagcaaccgtatcccacagtggtgagagcttaaacctcagagaccatatcacccttgg

SEQ ID NO: 417912 - DNA, 1176 bp, Homo Sapiens
  misc_feature (846)..(854): n is a, c, g, or t
agcggggggttctgggtgggcactgtggaccgggaactcaggccttcgaacgctgccgagattgcctgtcgtccaagggagcgctgcgttcattcttccttggatcttagtgaccgtgtcgtcctgctgttctaatagagggagaatagtgttcgcaaggattatcttacatgaaggagcgaatttaaggacacgtatgcgccctcccccgatacaagtcaaaacatggcgagcaactgaatttaacaagtcacactcgaggtactcgcgatcggaccacgagtacatctgattcggcatcataaggtgtcgcatctatgacaagtcctcttgacatctctcgagaaagcgtcataagagtcttcagcagagaaggcatagcagaagtaattgatctagcaatggcttcgtgcgtaccgtagacaccacgtagctcatcaacactgtcacagaacactgcatagcaatatttaaattgtgaaagttgctttgcggatcagggaagcctgacgtcactagtgtatcttccatgaaaggaagtcaaaagacttgtgtggtgtgcaatgccttcgtttttcgactacttcgtaaacgatcggaattcgctttgcatatgtgcacccatgactgctcgcgagagtacctacgaccatggactcgagacggaacgtgcagtatgcgtcctgtgctttcgtacaaattggctcaagacgctgtttaaaaagacatctagctgaactctctagggtagggcaatgctctttcaatagtaataggcacatggaatcgctgagattcactttaccatgggctcttatagcgcaacatatgactttgctcggaatnnnnnnnnncgcagtccgtggtcacgcaaggttaatcccctaggcgttaaccgtcgagaggtgtactcatagaaccagaggagaatgggtgaatgtcccggacacccttgggttgagagtcgcgaagccccatgtgggttcgtctggataccgaagacatgttatggaacgggtaacacctttacccatttgtaggggagcaatcgagttcgtcggttacccattcctgtgaagccctgtattagggggggccccgggacaagaaccgctgtggtttccattcatttaaacctccgggtgccattcaaagaaatcctccttaattagattc

SEQ ID NO: 417913 - DNA, 680 bp, Homo Sapiens
ggtctcaagaaacctgtgaaattccccatttataagttctcctcaaattcaggtgactcgtgctcaaaattaggcctggttaccctgaaattacctttacaaagccagttctctaacttaatgtgcaatggtggtttttttaacaaattttttaattggaccctttactttggctgaccattaatttggcaaccattgtttttaaggacaaaccaggtattttaatccctttgaaagacctggtctggatattgtctccctcaatttggctcaggacattttaatcatactcggcttttcccacatttttctgcaaaattaagcagctttttcccaggggtccattagggatactccttggctttaacagatttttcaccacgattgagcgtttggaaaagccctcagaagggttttggctcaacaggacctatctgtgcttaatacactgtgcacaccctttgtttcacccagattttcaccactttttacacagttagcgcacagttttaacccacggagatgggcgttgtgaattgctaccaaaacagctcacgcaaagaggaactccatgttggccttgttgacacctctcaagaggtaccccttgagaattcattttccataaagcttagtgcattgtgaactcttttgctctttggaaattgtgggccccaata

SEQ ID NO: 417914 - DNA, 508 bp, Homo Sapiens
  misc_feature (93)..(107): n is a, c, g, or t
agcggagcaaacgcttgttttcagcgttctgtctttaccatcaaagcatggtgtagcttctgtcttacactgttggagcactgtctgatgtcnnnnnnnnnnnnnnnaaacactgctgaataccaattggtacttggaatacctcttcctctaaaatacgtgatcctattccccaaagtggaacttccatgtggaagcatcctaagtgatcgtcctgggtggtgccatatttcactaaagtgggaaacagaagaggtgaaacttggctcttccaacaaggcttgcactttatacttggggcagtgcttgggaaaaggggggcccttggaggtgacgcaggatcactgtagctagaggagaggtctcactgaaacagaacgcatctgtgactgtagcttgcttggagagcctagacagccaaccattggattggccttaatgttggaatggaacacattctattccaatggggatagaaacctttacctatgtcatatctgtaaggaga

SEQ ID NO: 417915 - DNA, 208 bp, Homo Sapiens
  misc_feature (65)..(128): n is a, c, g, or t
agcggagtctccccgttgcttctcggagcttgactgcccttggaaaaatctctccgcccctcgannnnnnnnnnnnnnnnnnnnnnnnnnnnnnnnnnnnnnnnnnnnnnnnnnnnnnnnnnnnnnnnagggggtctgcgcgcggcgctacccagaagccagcggacggcagcacggagtgggctgtcccgagcccagccccgacgag

SEQ ID NO: 417916 - DNA, 985 bp, Homo Sapiens
agcggatataaaatgcactgttataattttcggggcaggtggtgacacacggccccgctgtactctgtcctgctctgtgcccccatagggctcatacattattctccctcagaaagcgcggtcgcatgagagtgttaacttgaggcaaaccgtctgcgagaggaccatgccaatcttttgcaacagtgagacgtgctgtactgtagtccactcacgcacgctcagtaggcacttgattgtgaagcaacgctcctggtgagctgtagtgtctgtactgagcgctgtccagggagtggcggcctaaagtatcacccttggatcttcgctgcgtttgtggggacacgtgtgctcccacattggtcgatgcagtgcccgatctcttctggctgtcactctttgtgcgtggcctgagtagactgggtaggggccaaagcccgtgcctagctctcatctggcgtggcccagagggtgggtgcagcacggactcgtggactctgcgctgcaggggcagtctcccactttgtgttgccagtaatttggcgggacacccctggggtttttgatacctgagaatttccgcctagtcgtctcatgctcttgccatcggtgaattgtcgttctttgtgtgcccctaatgccccccgccttctatcgcctgcctgatgcatgctctcacccccttgtgagctggcgggggtggctgagtgctctcagtatgtgcttgcacgcacgagacatcgctgagctgttttctcccaggtgacagggggggcacgcaggaagcgggccctcgaaaggtgctacgggaagtgtgggttagcctttggggggctttaacgggtttggcaagttacaaacgggtgctggccgctcctggggggcccccaaccttgtaagcccactcttccgtcaccgatgttgggtcgcatcccagttttctggcaaccctgaaacgcccttcccggcttgacccaatttggtatca

SEQ ID NO: 417917 - DNA, 764 bp, Homo Sapiens
gggatcaagcacattttgtctccacataggcggggcatcctgacccccggtgctcctgactggagacttcgctgggcctcccccacactcactggcgtcctctgcacccctgctggtcctcccctcttggatggggattccctggtgtgggtggggtccaggatgggggctgcagggtgtgcaggagaatgagggcgcttgtgctagacctcagtggccaagcccttgcccccaatcctgggtcccagccttggagcagaggctcagggccaccttccaccccacatttctcttcccacctcaccccagatttccatggtcccagctggctccggggcctcgaccatactggtgccaccaccgaaaagatcctgcaccggggacctgaagccccagaacctggctcatcaaccgacaagggagagacctgaagctggcgactttgggaactggccagggccaagatcacagttgccccaaaaaaagacttaattccaattgaccgtaggtggaaccctggtggatacaggacccccacgaattagttgcaagcataggagaatccacacagcatgaaaaatccatacacgccacaatttgggatatatgattagagagacgtgagagcctgcaattcaacattacacaaattgggcccacaagggaaaggtcccccatcttttcccgaggagcttcaaacagctacaaagtgaactactcttgacctcaaattcatttacgcgcacactacgggaaaaccccaa

SEQ ID NO: 417918 - DNA, 2084 bp, Homo Sapiens
  misc_feature (888)..(896): n is a, c, g, or t
  misc_feature (1152)..(1161): n is a, c, g, or t
  misc_feature (1430)..(1438): n is a, c, g, or t
  misc_feature (1664)..(1673): n is a, c, g, or t
agcgtggggggagcgcgcgtgctgccgcgtcccgatgcaagccattggagcaaatgggatccatgacctgtgcacgcgacgagtagaaggtccggatccatagaccttgtaaacgagacggcagagacgggtatagctggctacccaagaaccaccacttgcagcgcagcgaccagacacggggcaaagccaccaagctagaaatggactagcataaaaacaattagtacagcaccccactttgagaacagcaagaacgagccatagaaagaagcatgagcagctaccgggccattctgccttgcccggcaaaaccatacccgcccgaccacgcgcctaacacacacatatacaacataatagcgaacccgcaacacaagattcctatgggacacacacccttttccaacgactgttcgccaccgggctacctctctgggaccgatccagctggggtcccgtgacccacatgatcccccacaaatttgcacacacacactgggcacaacccctatctaacatacagatatcgggcgcaccggcgacaaccagaacgaacaaagcgcgaacctctaacccgtcgtgagaaaagacatgcaataacccccttcgctaacaacccggcctccaaaaaacacccattcctccccaccacttgtcacaaacacactcaaaaactcactacccacctaaccgacatactcctactaccctccatcctgcatcccccaaccctccccctcactaacctactccccattacctccttcccccaacccatattaataccaccacaaactcatttcaaccaccccctaaatccactgcacaaaaaaatgtctcccaacaaacaacaacccctctctcgcccaccacctcaccccacannnnnnnnnaaacatccatacccactccatatactaccaaccgcactccacaacctttcgcccccaccccctaactcagaaccacacccccattggaccacatacaaaaccgccacacctgcgcgtcaatcacccggcgtgagtgcaccaaccacaacgcaccaccatacgcaacagggtgacaaacacacgggtcacaagcaccacccaaagcgactccaaacccacgcctccctacagccgcacgtaagacacactgcagcannnnnnnnnnacccaacgaaacaagactacacacacacacctcccaacatcccacaaaacatcacgaacatcgcattcacacaccgcatcataactcccgacaaaacactcaaacatactacatcaatcatacccgacatatacacccctctccccccaaaatacacattccaccaacccccatcaacaactcccctccaacccctggggcaaacacacagatgacgaaacaccaccacaagaccgcgcggcacagagcgccaacaaacaaacaaccgnnnnnnnnnggagccacccccacgcagagcagcagcaccacgccaacgcgcccccaccagggcaccaagaccacaaacaaacacccgcacagaccaacccacacaccaccacccaaaaaacccggacaatccctcccgcagggcacgcagacggaaccacaaacagcaacacgggaagctctaagaaccagaccagacacaaacaacgtcacaaaccacgccaagtgcgagaatnnnnnnnnnncaacaagtaccaacagagcgaaagtagaggaacacgacaacatcaataaccataccagaacaacacacaacgaccaacggcgaaccacaccaaatagacgcaccacacccacaaactcgagccaccaatcgaaggcagaacccgccaaacaaacacgtaaccaccaccaatacaaccaccgacgggacacaacgcccccaacgaaggcaggagcctaacacacccaccatccaacatccacagcacaaaattcgacaaacacgaacaaaacaaaacaataaaccgtaacacaataccatcatcagcggatcacaccaccatgttacggaactcagtacaactacacagaaagaagaggcaggggggacaacgagcaatatccacacataagcaacatggccgagagcacat

SEQ ID NO: 417919 - DNA, 1183 bp, Homo Sapiens
agcggggtgctgggcatctgcgccgcgcggggtcacatcgcaatgaagtcctctctgtaagtccaaggggatgattctgctgcttagccgtgcttcggtctgctcagtttgcagagtgcgcgggacccgagagctgccccgagcgacggaaccgaggtctgtcacgtcggatcagtccaggtggtccttgagctcatgtggcgtggcaatcacgggaaagaaatagtaggggattctggtgaggattaatgagacgtggtgtagtgaccacgacgatgcattgactcaattatgttcgtctcatcctgcggtaccagatgcactcaatgaaggatgttaatagttgctcgcgacatctggttatggactaaccttattgattggtcatgtaatagttcgctagcgctggaaatgcggagacaaagtcaaggattacgacgcttaggtactatatgaatgggtgactatcgacgacttgagggtcaagggcaacagtattaagtgtatgcggctcgtgaagcgaacccacatcaatcattatcgcggagaatgtgacttcgggaattcgtaaaagtggcataggaatgcatgaatatttgtcaccaaatcgcgaatcaattggacacatgggacttacgttcctaaaagaaggcataaccatttacggcaccaagaacacacaaggattggtgatgcacttacggacatgtggcgaatcggacaattgtttgcgttggttccaccatgacctgttggccccaattgcagatccctgggagtgtggtgaggatagtgaaaacggaaacggtattctggtacgcggagattggattttgaatgccattctgacacaaatggtgttctggggagtaggacttaatgattctagtaggaacttgaacttgccagggggatggctctggggtggggatacaaacgcgttgcacgacgaaaagtggcgtgaggaatcacttgagggaaaggaccgatgtggatttgagagacagtccgatttttggcgcgataaccgatgggcaccactgggtatcgagggtggggataagacacggaataagaacctgggacgggtcgattcaagtagggtcgaaaggaggaaataagttgcgtcttaaaggaaaagagttcgtggattcttggttaggagtctgaacgaatggttagg

SEQ ID NO: 417920 - DNA, 796 bp, Homo Sapiens
agcggggttccaacggtcggcttggtgatagtggtggtggcggctgatggactgtctccatgggagaacccagtttcagtatcctgcctagatgagttgcactggacgacatctgagatcatccgtcgagatgagttcgctgtccataggcgagagaccgcgtggtccactcaacattgcgtagatcttgctgacatcagtcaatcaagcacggatcgatggtccacaggagaatggcctctccgtagacagtagcatgtagcgcaaccgtcattcctacggtcctcgggctgagccgcgtgtccagcaagtctggatacagactctgaaacctatgggagtgagttctagctctataccttaattcaaagcatccatggtgagctgggtacatctggtccctcggaacgattactcggcaattaaccttgagcaccttgagtagcggtgacttgatatagtaacaatgccttcgactaaagcctgagaggagatcggcggttacaaaaattcaaaagcaaagacaccagttcaagtggaaacacgcgaataactgtgtgaagtgctcacaattggaagctctcggagagccacaagcctcaaagtgaggagcacattcattgtgacacacagacagagttgctgggcacttctctatcgttgattaacaggcctccaccaggttcgccaaaattgctgtcaattcgcaagtggctgttataccaagagccggccacaaattaaacatgcccattatggcggccattgtggttaaaactaggttaatgtagatctt

SEQ ID NO: 417921 - DNA, 778 bp, Homo Sapiens
agcgggtctgccactctcggctccgcgggtcccgcgcgaccaactatacgcagaccgcgtctcacgtgcacacctgacagccctacgggctgccctctctccggctcttctcacggggacgccagctccgttgccatgcgtcgcctgcccgagtccacttcgtgcatgcctctcggcagaccgatgttccagccatggttccgtgtcctcgctcctcctagccgtagggattgtctcggcgggtgccggggagccgctgatgctcgtggcgcgcctcgctcctgaagctatgtgacctatctgtcgtaatcggccatgctactgcgtcctggtgcaggacgtcgcgtgcagccccgaggctccaggtccgccgcctctagtcgcactctgtcccgtggtgcggtgatagtctgcgcaccgtcggctggtctgtcggtgacgccttgtcggattcctacgtgcccctgagcggttggcagggtgtccacgtgcaatgggagcagtcgagggtgggcacctgtcatcaggtgtggcgctagcattcgccatgtcgagccactcatgtgagattgcacctctaaacaagctgctgccaatctcgactcgatggaaaggagtcccgatatgcgctgcgaagcgacgctgtcgctttgacccccagggtgggcaggtccatagcgtgaggccatttcgtgaaccaactgggatcgacgacctgtacccaattgagatggcaagtggaagcatgcgtaaaggggatcccattagctgtggccca

SEQ ID NO: 417922 - DNA, 1191 bp, Homo Sapiens
  misc_feature (166)..(166): n is a, c, g, or t
agcggactgcgcggcgaggcctccggtggtaggggcactctgcacttcagaatctcgtgcgtctcagtcgtgtgtgagctgcgcttccaatacttgggtgtggcccttccgggcgcatgccgagggcgatccccgtgcgtggctcggtctgggacgtgtctcgggnacgtctggatgcaggcgtgctctgagcacgccgtgctcgtcggtcatcgtctcgcttgcggctggagtgccctgagcacaggtcggtgggccaagctggtgacaacgatagtgagccactcttccaattcgcatggagggctatggacgatcgaggcttcagccactcgattgcatcacccacaggcgacgcgagcggtgtgcgagggctcgtgcacgtgggagacgtggcacgtgggcgaaggaaagtgccttctgtcaatccagaaggcgcttcaggacgacgccgttgccccttgtgaggggaggtccaataagcggtggctaagcaagatggcgccttttcctatgcgagggtttgcgccattagggcgagacccgctcgctattcgcagcgcttgcgctgcgggccttttactaccccgtgattggaacggccctttgcgaatcgcgacctggggactccgctcggcttattgtgatagctttagctcttgtagctgcgccccgttgttagcgctcttggggtcgctttcgcattgtggaatcgtcgcgagacggggtcgcgattccgagggctgagcggtgatgtgcattcgggttctacaccaaccaaagccacaattgtgtggcccatatcaagttcgttaggctctgggaagttaggacttacgagcctcttattattatggcccttgtggagctggggaaatggcttagtgcgtcccaagtcgcagttgggaagtcgcagcagaccaaaggggcaatccttctttcgttcccccagttgctttaggccggtccgtgcacaaaacccccttggtgcgccaaagagctcgttcccccgtgcgcggacctccggaattttggatcctcgtatttgtggggccttggcggccaccccctgctttctcccaacggaaagaatcggtgccactgggggacgtgggagccacttattggcgtgtcgcatttacgtgggtttggtggggtcgatcacctcgcttttcaccttgtggggagttc

SEQ ID NO: 417923 - DNA, 1028 bp, Homo Sapiens
  misc_feature (250)..(250): n is a, c, g, or t
agcggactgacatggttctttattcgtcgatgttgaatgcttctcataggcatatcgtcctatgcgcttggccggacgggctcattgtgttgtgctgcatcgcgtggagcgcttaccccgccggcggtgagtacacgactgtgctcctctggcatggacacagagcgtaaatcgttgatgtaagtctttacctagatgaccatatgatgaggctgttgctagtggttgtctcgatacacaggacatgatngcatagactggcggtgtgaatatcagtatatgctcttcgggtgaggaaaagttctacgatgtaggtttcgggagaattactgatattggagattaaaacaatactgtggggaatggaaggtaaagatggaaaggagggttattcccatacagtgaggtcatggaagaaactaatgtacataacgtggcatatagagcgactgtgggcgattaatcccacgagtatacaacctggaagctagtgcgaatagcggatggtcactctcgaaccaggggcaaacagatgtcccgtggacctgcaggcgcctacaccaaaattgtctcggaacccgagcatagaaagcgacctaagcttggtcaatgggaaaccaggaggcatagtccgatcactgcaaactcttcaaatcgaatctgatgggatgatgaagtccctttcgcaggattgcgagctagtaagaagaaacgcacgcgagaatgggagtactcttgcaaatggtgcaacgctacaggtatgttactactctagttttcctcattgtcagaacgacaaggagttctatgtcctcccttgcataattgcctcactggattaacgtagaggtttcacaacaggcgacgtaagcactagagtagaaaggtatctaccatgatagcaaaggtgggatctaatacgaaatatcgcgttgacgaaagcttttggaaacctgtaacaatttaccatttgaaaacacgcggttggttcacataccgggaagccccatccttgggggtggcgggcc

SEQ ID NO: 417924 - DNA, 525 bp, Homo Sapiens
  misc_feature (229)..(252): n is a, c, g, or t
agcggaggggggtaaaatccccagacctgaggactcgaaggggcagtcaaggagaggatagctcttctccagagcttaaaggcaaatattttctttttccctggtttctcaccttattgctttgtgtactgagtgaacttatttgtttttgagatccagtaacccatgcaagaaatttcataacacttctcatttagtactttaatactagttgaagaatctagggttnnnnnnnnnnnnnnnnnnnnnnnncaggcttagttccattacctatagctgtaaaaatgagatttttttctcagttttgtgaaaatgaaaggctgctggactggaactcacagtattgtatatcaaaaagtatcagattgtgataaaatagaaacccagaattaaacttggccttatgatttttagaaagtcaacagattttgaaggagcccacccagtgtattcatttcatttttactaatcctttctttcatgctaagatagagatgaaaaagaatgacagacttcctgttctca

SEQ ID NO: 417925 - DNA, 1297 bp, Homo Sapiens
agcgggtggagcctctgtatcatgccgcgcggcacgcgtagcggagaatgcgccggctgccctttgcctgatctctcgtgtgcacggcatagccctgctctccgggactggcgccttcccgttgcttgcaccgtgcggccgttggtggcagattggctgcgcatcttggctcgcgtcctcatgagcctgtcgtctcgtgtcgtttctccaatccatccatgctatcttgcggtggtgcgagctggcggattgttagtcgccttatctgtgcgcatgcgctagtgctccgtctcatgcagccttatcgcactagagctaagttgcaccgaaattctcttgcatagcagaggaattccgtttgtcaccatataagcctgaccaagttcagcacttgcacgtcagtgagcgtacagagttacgattcagggacttaggcccatgggaggacacacattgccctctatggcggtccgcttgcgcagagactgtaactcttggctctagcttttgttgccctacataaaatccagggggaggagagttcccgactcgattagccgtagactgtagttcgacaccgggtcctcgtctagctgatggcggtattgctgccttggcctcccatacttcgcgtggtacccctttggtcccgcatcacctgcacaccatggtaagaggtatagcgttgcaccggcattgcgcttttactctgagccgctccaggagcactttgttaggaccaccgtagagttcaacagcgagaaaatcgtgcgtttaggtacagcaacactgcgaaaggcggttgtgtggcattctcggcccattgcgacgtttcgtagtgaaaagcagggagcttagagtaatcttcaccagttgaagctcgccatttacccaagagttgtggttgtcagtagccacagagaatcccgcagggtaagaagattacgctcggtttgatcctcattatgcccctgtgcgcacggtgtaatttcggacatgtttgtactttcgctcttccccaggacagggcacacggggagctgatcgtcccagctttatgggcgagcctcgtacgaaacatgttaatctgacgtaaaaactgctacatcccgtaccaagggcaatcctaggcggacacaactggtagtttgtccagttaggttcgggcggaccacctgagagaaagccatattgagcgcctacaccccgctaaacccacgcggtgagacttgtgttcgtcaccagtcgcattttgatacccgctgagctgttggttaatctcatgacacgaaacctg

SEQ ID NO: 417926 - DNA, 1132 bp, Homo Sapiens
  misc_feature (945)..(945): n is a, c, g, or t
agcgggcggtgcgtgtcagctgcgcgtcgggcgttgacagagcgatatgtctgcatatcgtggtcttgttccgctcgtctgccctgtggttgtaccgaaatgcacctagtgacggcacggggcgctcatgcttgatatccgcgagtgcatgtcaagcttggcctagaacggggctgcgatcacacgtgacccgggtgtaatgtgaggcagtgatcactatcgacgactgcaagtggtcgtgaccggtgactctcgccagacggagacagtccggccccggtaggccatgcatccagggaatacatgagtggggactctctttgtgcagcctagcgtgagtcgatacacgtgagctatgcatacgaatagactgaagagacaagtccgacgcctagacatagcgatagagagtggacgtgttgtacgcgccgatggcagtagcactcagtggccgctccctcagggcaccagtcgctcctcttgtggtcggttgcaatgtcaagagcggcagataagccattcggcaatgggacttggtgcgggatttgccattatcctttcgcagcagggtgaactagaggtccacgcgaaagtagacggacaacgggagactccgacagcgcccagtaattagttgtcggcttccaacctggagcacgttgcctttggcgccccatatgggcgttggcaaacgactgggtcttaacaatcagtccgcgtagcataggctctcatcgcgttaggcagttcgcatctattaactcgagagatataaatacgagcgtcgcaacgcattcccattcgggtgacgattaggcgtaccacttcacgctctagcgggcacgaacacagcaccttaggcaggctctggagaaacgtgtgagtaccaggacagtcctagtctcacgtgcactcgtttctgatgccttcaggccctgttggacntgccgtttaccagcacacggttcgcacacggcgccacggcgtgcacggaaacagttagagaagctcgcctagtggcctcgttcaatatgcagagcagagtcgaggctctatgaacgtagccgcacagtcttcatctttgcgctacatcaccgttgcagcggacaccccggacgggacccgccctcac

SEQ ID NO: 417927 - DNA, 1134 bp, Homo Sapiens
  misc_feature (112)..(112): n is a, c, g, or t
  misc_feature (315)..(315): n is a, c, g, or t
agcggggacaggacgcgtcctggtgagtttgactaactcgctctcccgttgcttcctgggtagtctgcgagtatccgtccgcacaggtcgtacgccaccagaagtgcgttgncaggatgatcgaccaccttatgacgacgtcgcgcaggtattgctgctgtggtgtctataggacgtggggacctggacgcttacacatccctatgacacgcttacgtgaacggggacgagctccctatcggagtgagaatgcgacagaaaagcaagggcagcgtcgagcacctaggggaggcaacgaacgcgaggacagaatcnccgacggagtgttcggtatgcctgagatgtgtctgttggtgtcctcgaaggaagccatggacgaccgccgtgcactacgtgtaatctgtctcgcatgtgagagagctagctgtgttcagggtagcacttacccggtagccaaccacagagcttcgcggcgactcccgttggaccaaggctttgaattgagtcacagagtgagagggttcgtgaaggcctgccttagtcacactccccgaccgacaagctttgcttcacaccacagaggattccagtcgcgctgtaaggatttgtcctcagtcgcctaggtggtgcgttttggccaattttctgagactttgagtgtcccttttgagcgtgacagccacccagacactataagtgggtgttgactcacgtccagtgcgttacagaagaaattgtcccagctttgagtcggcaacgtggttcagacagttgagcttgactcagagttggcacgacaggcctgaaccgaggtgctctgcctcaaaatgtttgagacaccttggtttgtcgttcaccgcttgagaccggcgaaacggactttgcttggcctgtttgaacggattagggttcacatcagaccagggcagaccattccctccgactaggagtttacacttggggaacttttgcacactcactttaactcaggtgtgctttcacatcatgtttaatatcccccttacgagttgaacagcggtggcaaattctacaaatacgcggaatccttggacttaccaaaattttttggcaaccaccgaggttaacgaagaatatccgaaacgtctattgagc

SEQ ID NO: 417928 - DNA, 629 bp, Homo Sapiens
cacaacgcaaaacctggtttaatgtaatcattctccatgttgagcatttggtcttttctaattaggatggcgattattcacagcgtaaaaagtgtgattcttctttgcacgtgcattgcattatgttttccaatagtgtctacagtggcaatacgtgtaaacctttgagtaacacctttggggacccacaataaggtgccatttagtgatgtacggaaggtggtctcccaaaaaagcaaaattgatgggcgtttataaggaagagaatgtttaatcccttgatagggaacaagattggagatctataggctggcagttggcctggccatttcaagacaggatggattcagtctttggtaaacaaatggatataaacttgacgggtatcaataagtaccagtacaggcacttattaacggtacttgcctccttagtgatgtcttggtgaagtaagccttttcttaagcttcttccatcggtaaggaattacggtattgtaccacattaaccaattagaaacatatttttacttgccctggttactcaggtcaaggagtccgggtgacataaccagtctaacgttcgggggagtaaaagacctggttgccaatctttgactgtgtcagggg

SEQ ID NO: 417929 - DNA, 913 bp, Homo Sapiens
  misc_feature (512)..(512): n is a, c, g, or t
agcggggtggagcggccagcctgctccgaagtaaacaggagtggaggcgtcgcagctggttgtgcacactccactgctgggtacaagtctgcggttcgccctggctccgtgtcgtactatcccatctgagaggaagctggaggaagcacggacactaagagaccggtagtgtggaggttgatctcatgagctggatcgcagtgagaagagaaatctagtcgcaattagagtgacatctcgtaggcggcttcaagtggagaatgaaggagagtctttaccttgcgaagtgaaaggatcgattaagcatgattggaattagcgtgtcacgaggaaatgcattagagattgacgtagaggtacccgtagtgcgaaagatgatagaggcgttgcgtaggcaacagtcgaagtgcgtagtgtctttgcatgtacatacgtgacgaatgtcaatgggtagtgagaaggatgaagatttgcatttcctacgcaggagggactacatgtcactgacgtancgatacgtgatgcagattcgtaaccctatgcgaatagagttgtcttacacaatgcggaatagctgcaagagggatccataagacgtaggaccaacgtgaaatctacaccgtggtgtggcaaatgtgcttatcgcttaggaatgggaggataactcgggcataaaatcacgtcgaagtttgataccttaggtgagcatcgtgccctattggctcagtggggtaggagccaagatttgtggagcttgggcgaatttgggaagcgcattgtgcacctttctcaaggttcaggtaaagttgtagtatgcgactggcattggtttgggagcgcccctgaatgcgcaaaattgcgtgaagtaattaccaagtattcgccatacgttggggaaatctcggcccggttg

SEQ ID NO: 417930 - DNA, 747 bp, Homo Sapiens
  misc_feature (392)..(392): n is a, c, g, or t
agcggacgttgccaacgatgggggagtaaggcgtgccggtctatttctgtcctctgagtgcgagagcgtactgcgcccgtgaggaccagagtttcttctgttgcagcgcgtggagtggcgaggactgcggatataccggcgctagtgaatagcgcagattagtccgcagaagattctattcgtcacgctaccattcatgtgagggggagtggtacatcgtatctacttgatcgctacgtagttgagcgcgcaatccagtagcgaaataaggaccgaccgccatctcggcttttgatgatgcactgaatcgggagtgaaacgaagacttgagcgcattgcaccattcttgtgctgcatacgataatgacagtggtagaacaagaagccaatcntgtgagacctcagggagctgggagagcgtgcatgagagtaggaggaccatgtcaggtatcatacagaatgaggcgttacttgatcctcaaaatgactctaaacgtatgattggagtagcacgtacatgatgaacgaaaggatgttagatgcagatagtgcgaatacttgagtgtgaagctgaaggaatggtagtcatacggagtcgttaagatatggaataggtgaggggttcaagggaaccatgcatgtagtgcaggaggtttgacggttgaagcaattagtgggttgaaccatggtatagagagcaagaaaagaggtaagaagtgttgaaagtagcgagctagcatgagggat

SEQ ID NO: 417931 - DNA, 899 bp, Homo Sapiens
  misc_feature (546)..(546): n is a, c, g, or t
  misc_feature (788)..(788): n is a, c, g, or t
agcggggtctggggctggcttgtactttgaccctctgactcctgtacgcagacagtgaaccgcgcagtgcgtggccatcttgctgtctgctgtcgttgcaccggtgtgctggagctccgtccgtcggcgatgttcagtgtctggcggaccctggctggtgctttccagcgtcgcgtcctggcatgtctcggcgtatccctctgtgcgtgttcgagccccggggctcgttcgagggtgcgtcgacgctcgtgagcagcatcggcttcgcctgagcagcggagccgcgtggctccgttggtgtctcgtccggaccccgtggagcgcgtgctggtcctgatgagcttatgtattcagtattccaccacgcgcatggcatcagagagcgtcggttggggtatgcgtatcttcacagttggtaagctcgcatcggacacagttcgagaggcggagggtaggtatgtataaacaattgtccaatgggatttggcaggttaaacagcatgccatcgcgcgttaaaaacgggattgggtctcgtggacgtgttntagagggcaaacgtcgtggagctttgatattatagcgggatagaaggaacaatgggggacaggaggtataggttgctgggataaagccttgcccgcgtgtgcaaataagggactgatctgcgctgcacctgtcttcagacggctcttagatgcgacatcgagggccattgcccgaaccgaaagccagtgtgtggaatcgggtggcaaggggagcggcatacgcgctgcctccatttgggccnagtcacaagtgtgtgtcaccggagacagcgcagcccttggaaacttggtatcaatctaagcgtaccccatatctattggttgtgtttggagggcttattgacagtaaatga

SEQ ID NO: 417932 - DNA, 1066 bp, Homo Sapiens
agcgggaggcttagacttggtgtaggcagcgagaaagtcgttcagcggtactctgctcgagagccgaacataaacagaccactccgcggccggtgcggtgagacttacccggaacgtgccaccggagaacagcaatgtaccgcttcggcgtggacagaccttcgcgccgtctgctctcgcagacaccagagtacggaataagggaatagcagtcacgggctagaaatgaccgtggggcacgaacatcgcagctagatacgtctctccgggctcgagccgatgatttccatatagtcccgtcggcctgtgtcgccccgtgtcggattggcaagtggagcctagaatgcgaggatacggtgctagactacaaggggggatcaccttagtataggcctggggtggtgctggctgtggtgcgctgccccaccaagcactctgcgagccacaagtgggtacgtgccatcggcaagccggagacaagcgtacacaccaaggaaaaggcgtcgggaatgccccggagcgaagatggacctggtacttccctttcctgtgatccctcgagggcaggctagctaagactttgcttgtcacgacggggtcgaatgccagccttgtcttcgcttgactttcacttcccggcggtcccttcacagttgcctgcctggtgggatgcattgaagcaacaagtcccgggcgtgacaagttgataagtccccgtaccttcccggggggaaaggcgccaggccctagttgcgcaggatatcaggcgctgcgcctggcgcagtcaaggccaaggcgctttttgcttgccggggtccaaccgaggtcagttggaaccaccggatcagccgaggccgttggtccaccttttggtggcgccttctcctcccattgacatggctttaatctgggatggttcccgagacagcaggtgggggtttcatcagacattgggacccttgtggctttgggggtaatttggcaggaacgttgtggggaagatatggcattatttgggggaacaaagccacggggtagcaaatttcggcaaaacttaatttctcgg

SEQ ID NO: 417933 - DNA, 1105 bp, Homo Sapiens
agcggagggtcgccatgcggtgccacccagagccgtgggataataccccttcctcctggttggatcagagcatacctctggagggtcgagaggcgagagatggcaattgctcccaccgttcatcttcccatgacgtcctatcatgcgctgacttgactccgctacttgacacgtgacggccatctagaccggtgtggatacgaaccgtcgcagccgtgttaacgtgtctggtggccgtcatttacatgtatcttagcgtttcggaacaatcggcgtttccatcgtcccatagcgaaagagaacccatcgtgcgatttcggctgacactgactcgtcgcaatagtgctgccgcacaaatgccttccatagacatcgtgccggaagtctgacatagggctatgccaaggttcccgggatgagtcacacgggtgacgtcgctatgggaggcccagcttcgagaggggattctgagatcccgcgaaacgctgggggcaacagatagtaacagtggccttctcactgctacgctgcctttacttacgaaagggaagccaagcctgccacggtaaccctcatgccacgcgcagtaggcgccaggcatttcgcgtgcttgcttgctcgtggcaaccttgacacagtcggcccatttctcagagtacaccctggcagcaaccacgaacccacgcgtgaacaacagaactctgtcgtcgggcacgagatcttttgcgccatacctgttgaaggccagtatccaggcatagctggactcactggccgtaccatttttcgccaactcattcccttagccgtgcacgatggaacatcggtttatcgcttacagttgccgcatttttgaaaccccccgttttgccatggaagcctggacgcaaacccttataaaacggagcggtggtcgcgttagggcctccagtgctattccaccagtgggggcacgacacttcggacaaggctgctaaggctcgacaaagcgcgctctctggtatgcccccgataattcgaatgctttgcgatgggagggcccatcgatcaaccgcgaacctcggtttcgcagacagctaattctcgattgttcagcttttcgccc

SEQ ID NO: 417934 - DNA, 1191 bp, Homo Sapiens
  misc_feature (331)..(331): n is a, c, g, or t
agcggggagggatagggagggattgacctttccgcagcggagaaatcgcactgatcctcgtcgctgtctgttgagtactgcctcgtttgagctatttatgtgcctaagagatgactcgagatgagttgtgaagaagtgtagggcttaccttgtgctaggttattggtaaggttagtcgagtccttcaccactaggatgtctgtgtactgtatcttgttgagcatttcattgcatagttggcacgccttgttctgttctcgtaatttcatacatttatatgggctcatgaatagattagtgggtgtataccgagcattgagagacatggaanagacgttcatagacgaggatattggtcactctgattcagagagttaacgcttccattgtggtatccgtaggttaacgcgaactattttcatagctacgattaccgccatgcatctcgttcatcctgcagcttcttttgtgcgttaatcctgtatgcattacttctccaaattctttgttcttgctgcgtcggttcgttgaccgtatgggtatctttcctcaatgcgggtctcgtcccgacgcattagcaatgggaggcatttgcgatttgcgacgccttggtctaagaattccctccatgcatacttctgtgaacaaatggcaccattttgaagaaacaatcccttggggaatgcgtccttaccgaatgtccccattacgcgttttccattatggggtgtatcaaccgtgccgcttgtatggccaccgagtgttggtgtgtgcggcgggcaccacggttccattcgtttggcatctcaacagcgtggcggacactccgtccactttgggcgtctcgcacttcaccattgttccgggctcggcgcagctattttagcccaaccgccgtacctttttgtgcgtttcatcccaggttctgcaatcgcacgggcccgcactttaactttagctttcacatgcgaagtttccgcacaaggccccccaaaccttcagggaggttttgagggctttgtttaaagccgtcttccgtgctactcgcgttttcatacgggccctaaactggttttgccggttttccttggaggtggcccttctctaagagacgcccagtctacccccttatatgaaaattgtccaacgcggccgcccttttttacctgcgcccgagttgaggcctcggtg

SEQ ID NO: 417935 - DNA, 1375 bp, Homo Sapiens
agcggatcttggctgcttgctgtggcgcaatactaccgtatcatgctctgtcagtgcagcgcatagacagtatgctacccggggacacaggaagaatccagtgtcatgtggcactgagcatggtgtagctgtagctgtccgaatcggcccacatgacagtgtgcccgccgctcctcgtgacaacacagtgcagtgcctgtcactagggctcgcaggtgagatagtaggcactgtgctcaacaatggggtacccatttacaactaacataggtgacaatgctcgatcggcacctaaggatgcgcccttgtgttagccgtacggcgtaaatgtttgcgctcttgcaagttagcagagcaggcggaacagaaacgggtctcacaggcgctcaagttgaggaaagctttggagatttccccaccatgtaagcctggaaaactttttcccttttccccaacgggattatttccgttgctcatcactttacctcgttcaaatcagcatggccatggggggtgtgttaaatagccagtgagtgtaaaccctctccgttaaagctgctttgacccatttcgaggggacaaaaacgccctgaggaagacccattttcacaactttcccctgtccgaggaattaaccccgggcgcgtttcgattagaagatattcccgccgaagaattagtgccgctatttcactgaccgctcaaacgtttaacggtttagggttttgcgcaaccgctacctcaccacagggcatcgggcccaatattgttaataagggccaaacaggcccgatttggttacacactcacgtataggggatcgcctgcccaatcaatacgttcctgagatgtagttcccaagccgtttacaaggggcgctggcgtccaacacagaattagtgggggcttctcccgtcaacttccgagcggtcacacccttctttgaagacgtacaaacggaccaacttacactttgggaaggtttccccccgcatattgtactgatggcatgcttcgggccaacatggttagaccaatctgtttacggcgccaagtccagaaattttttaagacaggaaggagccttccccgggtgcgtccttttgagacagttgctccgaagcgagacagccaatcagcaattccctcttatgtgttgtatgtcctccgacgcccccaaaggagcggcgtttttcgatgtgtggagaacaaagctcagggaaaaaggtggtcatgctccccagggtgtaaatcatcaagtccgcgcaaacaatcgagggggaggcggcataacatttcgccgccagcgagatggttaacccaccaatatacacacagccacaagatacgccgactattgtctcgaccatataag

SEQ ID NO: 417936 - DNA, 845 bp, Homo Sapiens
agcggacttttcccgctctccgtgaggctgaagtggggatctcccgcttccctgcatatcggcgtgcctggccttgactgcgcgagatcatggattgagggaccgtatgtcgtggcgacttggtcttcccatgcccaggggaagcgtccgtagagcggcgcgcctctgcagcagatacaggcactgatcagcaagtaggaccgctacaggtgcgtggcgagcgtaagcactgacccgtcatgacggtcgatcgcgagagtcatcctaggtgatcagcgtcgctgctgatcccacgctggtagcgctcaggcggaagtatgcactgatgagtgaaggagcgaggaccacgcatctagtgcacgcagatgtgtcgaacgcggcacaactcacacgttacggactcacacgacgacggcatgcttgcgaacatctgtcaaacggggaagttccacagcataggcagtgacgaattcctcaattggcccctattcatgccgggtcgttagaggaggttcgacaccaaggtcgatgcccatacggcgagcggccacacgatcgtgagcggagagctaccaagacggaagagagctggtagttgaggcgggtactgtaacaggacatgaagtgaagcccagtaacttgaccattcccctttgacgtggaccccattggacccaacaatagttctgacgcacatgggtgctacaccgaagcacggcacgcgtcgaccgcgggcttggaagagtacaccgagtagaaccccttccaacctggagcgcatcctacttgttctgcgcccccaatcagcagagaactatgctctttcgacacctaggctctgtgcg

SEQ ID NO: 417937 - DNA, 805 bp, Homo Sapiens
agcggggggtgcctgtgcgggtgatgacggtggaggcaagcgtgagattggagtctctcatggtagtaacccaggttgaggtatctcgtcgatgatgcactgaatgacgtccgaactcatccgcgatcatgagttcgctctctcagtaatgcgaagggcgtgagttctacttcctactactgtgttaaatctagcgatcagtgctattcaccgcaagatggagtagaagaatggacacaggagaaacttggctctcgcgctagacaagtaacatgtgatgttcactgtacttccagcccgcggtgcatgagctgcggacgcgtagtatcatcacgcatgtcgagttggagggagtcgacacacactataatgttagagaaacccggctagggatgggcttagggccgcgggacgtcccatggtaattagctggagacttgatagggtgactcgtagtactcctattacaccaccatgtcgtgagacggaacccagggattacgaaaacttcaaagactgcacaacctcaatgaacaagcgactacgtgtgttattcactggaagtcagggaacggagaattaactcaggcgacgtattgagacaaccagcaactcgggggacctcggatcttagtagtggctaaccatttcacatacttgtgctgggaagagtttaatcaactgggatacttgagtggccacgttgggtctctgggaacactaggtagggaatgagcccaatatgaagcgaacctcagatgtagggcagctggagactgatgcgcgaaatttagaatcggacctg

SEQ ID NO: 417938 - DNA, 895 bp, Homo Sapiens
agcggatggtggtgtattagacgccccgtgagtgtctcatggggacatcctcggtgtcagtgtgtatgaacagcaagttcgctgggtgcgtaataggaactgcgcagccatgactgtgaggagctcgagtcgcatggatgctggaggagtaagaccacttgtgattcatcagtctccgtagcgacgtgggacacgaatcgtgcctgtcgtggggtagtgtagccagacgagaaggagagaactcgtaatgcaagatgcaactggaggatagacttgcgcagagagataccactagtagtactgataagaagttaagaatattgttgatgcgatacgggattgagtgacacgaattgcgaacgacgtgaatgtgatgtaaccatctaagaggtagcttaaacgcagagcatcatcgagttgattattcttgtgtcatactaacttctgcattcagtttagaatagtctgtgtgcgcagaaggatagatggagtgtcgttgaagaaattagctctaggattgatgttcgccaataggactctatgttgtcattctaagtatggttaatgagagtagccatctaaaatttgcgggccggcttccactgtgatggacggtgcaccgctactccgtttccttactgcatagtttctcgagggcagaaaaccaagagcggcgacatttaaggacatgggcaacgttaataagacccagtagttccaagctggctcgatggagatttaaccttcgactgggatcgtatatggcataagtgaccgggggaaattgcgatggaaagggggctatggtctaacgaaatttgtgggaaatcgttgattcgtgggcaacgggaattgccaggatagggggtcctgcaccgatgagtactgtgaaata

SEQ ID NO: 417939 - DNA, 1213 bp, Homo Sapiens
agcggaagggtgctagcggccgttcaggtacgcgcatcacgtttgcatcttctgctctttctgccgggggtccactcgttagcttctggcacgcagaccaggcgtactgaccggtgtgaccaatggactggctgggtgaagatggtccacgcttctctcttgtcacccgatgcatctatcggagaaacctcttccgcataagaggatcctcccgcgtgcggccacgtgaggacactactgtggagaaagacggaatgcttcccgcaatagtccgcctggagataaatgggaacagagaagttattcctctcggtgatgtcggatcaaactgcttatgattcacaggctgatgagcttacctatgagcatctcgacgtaacatgtgcggctcaattagggtttgcaaagcgtatcaagtgtcggccctcttagtaatgggcctcatatctcgtggaagcgcatatgcataactgaacgcacctttgattcgactaggatgggtagattcaagtatggcattagccagaacagtataatacgttcattgttggaatctaccctttgtgaaatccttttcttaccctaggtattaggattgcataccgttcgaagcttcgacttggtcccgtggtgccgcctggaaggaatatcgataagcctcttcacgcggggggcataaatcgtccctttttgaaggttatgtaagggacgaaagatttttgatgtgtggtattggggagtgctaacccccttagagagaagtgcaaagatgcatggcactagggcaaatggagaacctgggtggcacacggcagggaaattgccaaaaacggcgttcttacgtgcgatccaaattggtaataacacccgattatgggagcaattatgcgcgctatgggcattgggaacaacgcgccggaagaggattgtggagcgcgatgtcgccgaaggcaacaaggttggggggatatcaccgcgaggagattgaggacactaggtgtaagcagggcgagaaacgcaacagaagagagtcaggaagggatgggcaagccacttgacaggacagagaacggacggacacgagagaatgtgaaggggaggaacgacaaatggtggtgaagccgggtacacacagggaggcggcgaagaaagagaggaaacgggagatgaccacggagcagagacagtaaccaacaaccgcgagaagagacca

SEQ ID NO: 417940 - DNA, 1054 bp, Homo Sapiens
agcggggttgagcgttctccagtccctcgtccgctacctggcgagctcgggcatcgcacagagaagatatcgcactgtcaaatgtactctccctagctgcacttaggtgcgctgccgtgctgcggggtacctggtggccgtgagcccctagttgtttctcaggcttcgacgttcagcatggcggctgtggacttctgctctgacctgctcctgtctgtgtgtcgatcctagcttgtgtgctgcgtacctgttgccagctgttgttagtcacggcgggcgctctgtgattgaagcgctgatgacactacctttcagccagaggattcacagtgggactggcttcagtgcgcaaatgcgcaagagtaatcgatgcagtgaaggcgcgtaccttgtaagccaacagtcatgttgagcactataatcacactggtctttatttcttgaggcggacatttggcttgacgcttaatgactgggtaaacagtgacagaagaatgaatcgagaaagttatatgaggacacttatacctttgttccaaatgggattgtaataaggtaattatagggttgaaaaggtagtctgatatattaacgccagattggttgagctacgacattgacattatatatcgggggaagtacgtggtttgacacacggggatagagaagagtggtagtgggaaaagaaagatttggggtagggagatacgcgtgggggaatttttccccacatgaacatcgatggcttacacccccctgaaagcctacctacaaacgtgggaagagccacagtttccttcctagagaggtctacgattgacacttgggatgcacattgtgcccttagagttgcgaatctaatttgggtccctcggtaagaaccaacacaaggaagcaacagcgtgcgattgtaacacattgtaatgcgcagtaacaggactctggacttccgcggtaacgttatgtcagtgagcctggggagggaactattaggtaaacaatacggtgttggagtttccgatgatagctccaatgaacgcaacgacttaaacgc

SEQ ID NO: 417941 - DNA, 1098 bp, Homo Sapiens
agcgggttgtgccctgtctcactggtgctcagatacttgatccgcgccgcagccttggctaggaatgactgatcctacgaagagatccaccaagaagctcagtgcttcggcacatccagttagtggagtccacggtcgagcgcacgcgacgagcacgacagaggtggtgagaccacgacagacttgccagtagcgatcccgatcgatagagtactaatggatgctgtgtgtgaacgaacatgtttcagcgtatcgttggcagcgggcagtaattgcataggtgggacgaaagaacacgaggtgatataacggagcatcagagtgacccgttcttcaaattaacaggacaggtgacactatagcggtggttagcccccaatttcattgcaaatcacagtcgatgatgattagagctcgtaagtgaacacgtgtgttccagcacttgggatgctggccagcaaataagtattaacagcaacgtaaaagaattcaacattcgtacgggaggctgactccctggagtactagccaatatggcgtcgtcttcgagaggacgagacatttcccttaagggatgttagctgaccttttctatggccatcatccccacaggggatactcggaacagcacagagatgacatgttagtagcacatagtagagtttgcaaagttcgagcagtgaccaagttcgctgtaaattgcgtcgtcattaagaagaagcgtttcacaatttgcgttctctcacgcaaattgaacctaatcacttaaccttagtaataataaggagaggacggcacaagtaaaattagcccccagtaggagtacagcagacataggcgcgacaaatagtgcgttgagcaccaatagccaccagagagaccattcgtgaagtaattgaaggcagtacacaccgtttgcgaaagccagtggggacggctttcgtacgatagcgggaagatagccctgtgggaacgagtatcccatgggtagagatgtggtgcgttagtgggctactaagtaggttgtcgcaacaacggggattagactaatgagggcacgagtcatggaggcgcataatttcgtcgcggagcggagac

SEQ ID NO: 417942 - DNA, 1213 bp, Homo Sapiens
  misc_feature (1094)..(1102): n is a, c, g, or t
agcggagtgtggcctcgtccgtcgaaatcgacagagaggtctcgctcctaatcgttagcctcccagccatctcgcacgtggcgacccacgatctctcgccgcaacgttccgaagcgatacttagcgcggagctatggccctgccctcccatgtgccggtcccccggcatgcgtcgcctgcttgtctcgatctcctctgggaccgctaggtccatgcgaccttcttcaggtcccagcagtgcggggattcacgtacctcaaaggttcgtcggcgctgccgtaggatcggtgccgtccccctgaaggactcttcagtgagggcgatagtcggggatagatcgtggcagctttgacgtggggcattccgcagtcagggaggtcgcttgcagaacataagcgcaagcaaaggcgagcaataggtaaaccatttcgacacggccagccgtcatgccggggagtgcgattgactgcagacgctcgctagtgcgaggattgccgttaaagcatagagcgggtggaacaacttctcaatttccatctaggcgtctttgggcgacgcattgagaggcaattaaccactcggtgtgacgcgaggcagcgcgggaacctacactttgtggaccaaggtcgccactctttgtacacatttgagcgctatccacaacattcgcttgataaacccgccgaagagttcgaattgctctgctctcttgtgtacccaatttaattctagcggtcgatgggaatgcgcgaccccgcacatttgtggcaactataatggagccctctcttgtgtttcgaaacggaatcccaatctccttagatcgaggagaatctccctctttaggagggaagtctggaaaaccgcgggtccctccgggcacgttgaatggcccctgaatcggccccgtacggttgagtcgcggcgcatcccgttttcctatatacgtccgtaggtgggttttcacgctcgagaactcttcccgatcgtgtttggggacccggtgcgcacttttttccgttcctgtggttggaatcccaaggggtttttcaccgttccactcgttgggggtaccacccttaggggtccacccnnnnnnnnnccgcgtccacgcgtttcctttcgctccgttcccacggttcgagtttctgggcttgggtcagtctggcctcatagtggccacactttgcccagactttcgcatatattccgc

SEQ ID NO: 417943 - DNA, 1275 bp, Homo Sapiens
  misc_feature (1035)..(1035): n is a, c, g, or t
agcggagcacttcggccaaggtcgccactgagcgtggtctcccagactcgaatcaccgtcctggcctctgacgtgctcccacacgctggcgcccgatctcctactcagaccacctacatcatcatagagacagatcccaggtcaatgcccacggtggtgtcgcccgccgacctggtccgtcatgttgtgctccgccatcccccctccgtgagttgtcccctctcgacacggctgagagcgtacctctcgagacctcgcgaggagtaagatgcatcaacaggaccttacaggctgacaagcctgtgatatatctgctcttgtcagcgtgtgacgaacgtgggctgattcggtggaagattcggacccacctgttgcaagtttctcatcgatccaatcgggatatcacagtgtagttgtgcctcgtgtgagctgatcacgtccgcagccagggatcaccgcagttatcctcttgcactttggggaaggaaagagaggaccattggcatgtacttcgatcctgttcatagcagagattagcgcctgtgattgtcccttgttaatgcgattagcggaatctcctaaagatttccgtcggtcgatccaggacgtgcatccccaagcctgactgtgaggagtaactccctcgagcgtgcgccccgtgcttggttccttcctgagtgtagaaacccagcaacgcaatttctcgcctcgtgtgtcgtgggtcccattgtcgtacttttctcgatggcgaaaggggttatcggtaccaaggtactctccccccttgtaggccctattttccgccatagcggcgaattcccaagaagactcacaacgtggtcgaactcttcccgcaagtttcgctattccaccccctgggtgcgtcggtgataggccctgctaccatcggtcgacgtgccgcagttccgccagagaaaaatacgtgtggtaatctggacatatatcatggcccttcccgtgcacctcgccccgttctgtcgaagtacgtatacgatctgggaaccagggtcttgntccctcaccacaacctgtcgttgtgtgcgcacttacagcctttctgttgcacccgtcccctatgcgagcagcctgcacttaggtcatctaccccaaccagacaccttaatcgggccgccggttgggttccctcgcgcaaccattggaggtttccccctagtgttacgtcgtccttggcgagttcaagagtcccagcacaactggggggccacaattttaccgccgacagtgaaccacata

SEQ ID NO: 417944 - DNA, 815 bp, Homo Sapiens
agcggctccctcgggccgcgttacccaggtcaaccgcgagtgcggccgctacctgagctgtgcgcctgcgtcccgcgggcccgaccctcccttcccctcggccttcgcccctgcacccgccacagcacgggcggaagggagcgtagccccagtcctcagccgaagtgaatatcgggcccgacgcccccgcccaagaccaggtcagacacagacaccagcctgcctgtgccgtgtcgccatagacccaggcggaggtcgacgcgctggacgagagaacttcgccaacagagaccccacgacagccccgagcggatgacaaccgacggcataagtcgctaggggagatgagagaagccgtgcgcgatgaatgacgactcgggtggaggaaaggataccacaactggaaccatcaccatcgtgcgtgcccgagaggacgatcgagaaggaccagaaagaccaaaagacaggcgagcgatggcacggaaagcacggaggagcctgaaaccgcgaacacatgacattgcgaaaggcctacaataagtaagcaagtaaacccgggagcaagagtggacctgaacactgcgtgctggtcccaagaacgttggggaaacccggttggacgcccgaagaaaggataagcgaatcaaggccgcgctgtttggcaaacaaacttgcgggaaaaagaagccaaaggtaaccatcccacagagaggaccccttgatggacgaagaaaacttgaaaacccttgaccataaatttggaacttctggaaagaacacgtgaaaagaatgtttgtcaaattcattagctcaaa

SEQ ID NO: 417945 - DNA, 1341 bp, Homo Sapiens
agcggggtgagccgcctatcaagccgcgcagtacctagcgagcatgcgtcgcttgtcgatgtgccgctctctcgagtgtagcgcacccctggtctccgggcacgtgcccttcacgggtcactggcgccaatgggccagctgcgagcatcagctgcttcgtgaccggtgctgggtcgttgcatctatgcacgtcatcttcgtgtggtgggtcagagatggcagtgttgatcgctactgttgtggatgccatattggtcttcatgcgacgttagtgactcgacgtagtgaccgacttcttcagtagagatgtgtacactgaatcggtcccatgcgtgttaagtgagtcattagactgttagtgagtcaccctggcatttagtgctcatgtccacgagtctagaattcggtagtgctggtgacgcgagactaatccggtgtggaataaacgtcggcatgataggaacgttggcccaacggtcttggttcagtcgatcgcttgcatacgttggatgagtagtgatcaacaaggacacgtggcgttatcgtcaggagttgcactttacgaggcgtgagtactgttttaccacggtaggcgtaaaaccgcgtttgggttggacacttgtaccgggttctgacttcctggccaggtcagtttccacgagagagagggtgcgtactctacgtatcgcgtaccaaacgtggttagagcccagagctgcacgttgaaagtagcttggcgttatacaccgtgggcttattgcgagtttacttagtgagctatgaacgaaccccaggcggattggcgagttgacgctctccggttcggagacagttcctaggttagcacctttaaccgtccaaggagaacgttggtgtgataccatatgttcccagaacttttgggatatccgaataacggaaaaatctcttggataagataaagcgagggtagagcttgtccccctttccttatgattccggttgcgttagtacgaatagaatggactttgccctaagtccaaattgtgtggttccattgcctgcacgcccgttgtggccgcagacccttgtttccctgaagcgtccgtaagttggctgacgtcgggcgtggttgacgcggactctagaggttagctaaacaggagaagagcgagagcaattgaactacggttcattggcagtgtccgtttgttagaaatccatcggagagaccgctcaccgttggggcaattgtctagcgagactatttgtcatagatatgtgcgtaggcgcccattgtgctgttggtggccttggggttcgcggttagcgtagcccaacaagaggaaggaggacgcacag

SEQ ID NO: 417946 - DNA, 1053 bp, Homo Sapiens
agcggaggtccgtgctacttgctgtgggctgggaacgggcgatggccgcactcgtcctatagtgctgtctcttagctcgtgattccctcgtgctcctcgctctgtggtaaggcagcgtgcaaccaatctagtccgtacccgtgctgcgagcttcgttgcaatttcgcgttctcctctggcagttcaggtgtactcaatccctagatagtcatgacgccccgtctctgtagtgcatgtcgagcaaggccgtgccctcctccctgttttacgatagtataactagcaatactcgtcccagtgcaggaatctagaagtaccgtggttcatgagagagattgaaggctcggcagcaatcatcacacagtgtcgcaacgttccgaactttgcagtgcactgtggacttgtcataccgactattcgacacacgggcatccgtggcaaagccatcgcatcaccatgttactgcctaattccagttgcctattcttagtgaggtagtaatacccagtggtagagcattgtttcgtcacaggtacattagcgctgttgcactgggccataacttctaggaatgtgatcccacttaagcttgcacgaaattccgtggacacaggagttaacccgatttgtactgaggatcggagtaccacccgttctgttttaaacccagctctgagctatcgaaacttttggacggttgacctttccctgaaaatttgtgtggataatgcgggtggaccagcattcccaaaggggatatcgctcacgaatcggttcgagaaattccgcttcctattccatcagcgcacagcagttgtcaacgcagctgaaccttgaactacaacttcagaaacatgcgttgatgctggtttaggcaagattttcgccaaggtggttcgtacacagggaaatcatacaagggcaagctttgcgagtccacagtcccttcaggtcgttagggcgctcagtataaggacatccggcatgacgaaaaagcggaaagcatcgtaatcccactgtgggtgaaagtccctgttatgggcgggcacgacg

SEQ ID NO: 417947 - DNA, 1060 bp, Homo Sapiens
agcgggtctgagccccactcagtccgggcgatgagcgcatctgaggatacggggatccttgaggcaatctctagtgcagtgggttgcccgtgtgaccctggcactgtacgttcgtccgtagcacaagatcgtgcgatctgcttacaagtttctcacatatttgcttagttcccacgtagcgagtcaccggagaagtgtcgatcataacgtcagtcagagaatgtgtaagcaatctgcgagtgaatgcggatgacgttcccagggaatagtcaattcacatagacctagtgactcagcgtatgaacctagtttggtcaagagtgcatagcaggtccacgttatgacagttcaccgatgtcttgtttattagaattcagattgtaaggagcagatgacgtcgcactggggtatcggggtcaatgtccgtgtcgtatgccatggcgaatgggttgttggccgaccatattgcctttacgagttctttacgcaagtgacaagcttttccccagcgttcgtttgcagattgctgatggctttgcaccgtggtgttgagaagtcgcccagtgagttctagagtaggtagccgaaagtgatcgacatacagttgcagtagacctttgcgaagctgtcgtagctgggacacacggttaggataaaatcgatggtttccgattggcagttaggcttccggtcagtcgggtgatattccattcatgcgttccccagttggttagtacccggattgcggttaaacaacgttcatattgactacgcggaaatccaaatgtgacgcggttcccgtagtggacaccggtgagctagtttgcgcaatttattgcaaatgttccgggtgaactccattgtgacaagtcaatcattgtggagaaaattaatgaacctcaagttagtacgcacggatgggacaatgtaccacctttccaagcttcggggctaacgacgctgtgttagaagcctgatgtgtagagggctatagaggatcttggtccacgtcccatggtagaagacgttgtgtcacggtctgtgtgaacggactccacgt

SEQ ID NO: 417948 - DNA, 993 bp, Homo Sapiens
  misc_feature (217)..(217): n is a, c, g, or t
agcggatgtcgagaatgacccaactagatggcccatctcagatgacccagtagaagctgggtggacaagatagttctcatgtcatggaatcagaacttcgctaattaagggtgcttatagatagcctcacttccgtaacacttggaagtagacttacgcgaaaggattgatcatgacatcataaaggggaacttaccgagctatgaagacggtagangacgcaatagagcaagacaaactgaacaatagaaagatagatttggaactgaaacccaaaagtagcataatagcctaggcgtgcatagcaaaaaacctattctacttaagtatttccaacacgtatgcggtacgatacgaagacacaacctaatgtggtagaatcacgtgacttggacgggcttctcctcttagaggtaactaaaggaaactatggagatcgcgactcactatttaactctcgaaatcaaataccctacctggcgttagatcaatcattacgccgcgaatacgtaaatagcgcacatatccagatgatggtatggaacaaagcatcatcatgcacactgcttctaatgatgcctaacgtgggttagactacttaatcctattcacattgagtcccaagggatttaatggtgaagcgaacgtttacaagtttgttccaaatcccaaatcgagtatcggaatgcatgcataatatggttgttaaaaactgttgggttagcgagttaattgagcaacgatagtggggaaggtaactttgttttgccagttccaatagaaaaacaccgatattgaaggaaaactggttcctatttataggctaaagcaaaagcagtagggtttggggtacaccttggtggaaggggaaccctatgaattgctaaacgaccgttgcacgacttaaaggccctgagggcctcaaaattagcagccaaagatttaacaacaattggttacatccaccttccaataaagttgggaggaagccga

SEQ ID NO: 417949 - DNA, 832 bp, Homo Sapiens
agcgggattggcgactatccagatggcgaggctgctaatgttgcatgtgcttctgtgatgatgcttgaaggaagtttggatcctcgtttatctgagccccctcatgatgtagtgcagtacaccatcatgcatgcccgtgacaagcatcgaagaccttgaagcatgactcgtctcttctgctgcctggcttgggatccgttgattttgaggccagtgtctgggttgcttagatagtcctctcttggggagtatcaatagtacgacctgaggtcacgagtgtaatcaaccggttgcttggacgggaaagacatgcctagtgtctctattgcattgtgtcgcactcaagcgtcgatactgcctcacacctcaactcaaacctagcgtgactgttttccgtgtgtccctgcggttgatccgatcacgctcttggactttcgatgtctttctggacccccccgatcaggaaatttgggcaaaggattatggaatcgagattgaagagcagattccgtttagaagttatttcccctaatatctctaacatatgcggcaatgcttcaaatggtttgaggggccggtcggctaccgaaaaatttgattccatggcgtagagagcagcaattcggtaagagccaccttgactttgtaccttggatttgtatccctttctctatgaggatagaggtctcccatctatgggaaagccttgttagttgccgcttggatataggtgttccaaccaccgaggaggtacaccgaataactaatgatactttatactagcaaaggggttgggggaaggatatcctgccatgtggggccccctagaaag

SEQ ID NO: 417950 - DNA, 541 bp, Homo Sapiens
agcggagggggagccgggccggcgttcgctggcaccggtgtccccgtgatcctgcgtccaggtggtgcagaagtacactggcctgtcgcttggtgttctgattcgaccgatgggcttcgttctggatatcgcaggtgaagagaactcggagaagctgtgcagttaggccgaggcttatggagcgtgattctcagcccgtcgagtcaaagagaatctggtgccagatattcccccgtttccacctgccgaaagacagaaggactctgggcccatggagggaacatgcatgaacgaaagtgtcgacaggctggcaggagagataacgagcgcgaagagtccgcgatgagaagctagagcgtgcttggaaagcaggtctgagctgcagaacaagcgaggagccacgcagcaatagagagctgcatttctagcgaagggcagagtaggagagaggaacgaacgaacattcgaggtgaacaattggctgagaagcacgaagacttgagccctgacagaaattgggaagactacctaaatgacgaag

SEQ ID NO: 417951 - DNA, 978 bp, Homo Sapiens
agcgggcggaggagtctaagctgcgaggcgtgatccgcgtcgtgaccgtatcctagtccgaagtgtgatgaagtggctgacgtcgactctatgtgtcctagttcatctacgggcgttcgttctcattagtccagcatgacatcataactcgtagtagtgctgtgacatgaaagcctcggtatggaggagcatgatatggccggcgcatcgagtaacgattagctgtctgacgacaagatgctcgctgtagatgtcatccgtaaggtagccaagacctgtgactcctgtgcaccagagcgtggtaggatacagcccagggaaaggaagtacgttgtatggcagtctctcgcgagtaggcgtattaccatgatggcgttgtgtatccgcagaacgatggaggcctaagcaggcgtgctagggagtcagtagactatggggcgtccaaggacacacggaaggtatgacaatgccgcaactaggagccggtgtcaattacttcggagcaggagcgatgatcggagtggagacacatggtgtgtccatttcgaagtggacaatagtagtgctgaggaatagcgaaggggttgtaccatcatcggataatatcggggaagacgttaccttagaattgaagaaggggggaattaaggggtttgataaccgtagtagttcggtacataactcaagcgtgaacataaaggtttggagcccgaaactattggcactcggcaatagttgcgcgtaaagagtgggttccataaggcagttgcacgcctttccagaagattaaaacccgaacgactctcgagggaggaaacccactttgctaataaagcagctattcaaccggtgatttttcgcctgagtgttcatctaattttacgcccctgagggacatcgtttaagccaagcagttccaattgacagccgtgaaaagtgtacgtagaccgagcttgtatgggaggccaatttgtacct

SEQ ID NO: 417952 - DNA, 994 bp, Homo Sapiens
  misc_feature (764)..(764): n is a, c, g, or t
agcggatttgagctgacgccagcggcgaggaatgccagtgtactaatgagcactgggtgcgcaggcccgagcgagtgctgcggacctggccaggccagccgggacgccctatggaccagcgggtcctccgttgtgggcaccctggtcgcaggacgtaggtcgcgctacaatcatccgcatgatgagattattgcagtgctcgtggatgcacttgggtaaatgacagggatggtcgtgtgatcaggggttacctgtcgtgttcacgaggaaattattccatgaggcttttatagttgatcacaggtttggatggacgtcctatctgcagacactttcatttggacacttggtaggccttatatccggtacgtaatttgggagagtagatgctgaatagatagatgagactctcaatctctcatgagcgatacctggagtccctggccactcgtggggaccagtcggacgaaagtgcttgcgtagcccaatcgagcacaaatgagtaaccactaagtctgttcctccattcatggctacatgcacgtgggaactagaaggtgtctcgcccctgggtcaggccaattgtggcatgtgaacggctaccacggtgaaaatcaaatccgcggtggacctcctttgttggtaagagtcactaggaaccagtataaaaaggcgattccaggggaataggctacagtaccaagcggggcacggagcacccattggctgccttgggggggccagtatcccaaataagggtaagngagcatggaagaaactaggcttctacagactactcaatgatcgattcctcgttccgtggtaggctcgaacgaagacgtgagccctatttactatccccccactaagagctaccgcccaagataatacccttaagaaaattcttctcggttgcttcatcgaacttgacttgctattccccctttgtggtggtttaccaatggttgattcccccttgtataccctctcaccc

SEQ ID NO: 417953 - DNA, 730 bp, Homo Sapiens
agcggggggtgtcgctaggctgcgtcggggtgagccatgagacgtggcgatcggtgccgattgtgctccctcggctgccctggccgtgtgtctagtgccgcccctggcagtcgttctggactagtgcaggcgtgagtggcaagctggacgtaagcgttcgctcagaggcacggttatcagacgtctgatcatctcaggccgtacgacgtgacatgttaactcgtgcgcctaagaagtgcagccgctggccacgctatcggagcacagatgggactctgttcaccgtgcgtagtgaacactgacgatgcaggatacttcatgataggctcgccagcagcgatccgcactgcgcgtggtcgccgaatgcggtaggcgtagtagggatcgtatgcgagaagtgcacgtttgggtggtgcacgtacaaccgcagtaggctatgcgcaatcgactaggaggcggggtcattctagcgaaagggacagagttcgagaggaggaaagtggttgtacgcattgtatagtgggaggaagtggggatgggcagtggaacgatatgcgttgcacgtcgtggcaggaaaaggcgggaatgggttatggttaggaatggaagtatgactcggaatagatggtggatacacacttgtgggttgagacaaaatgttgtgggaaaacggttggagcttgtgacttggaaagttgaatatttggtggcatttgggatgataattcgg

SEQ ID NO: 417954 - DNA, 1165 bp, Homo Sapiens
  misc_feature (246)..(246): n is a, c, g, or t
  misc_feature (248)..(248): n is a, c, g, or t
  misc_feature (467)..(467): n is a, c, g, or t
  misc_feature (954)..(954): n is a, c, g, or t
agcggagagcaccgctggccgtgtgcccagatccttgggaagcagcctgcgagccgcgagcctgaggccatatgtccactgatgcctcgaaggcccgatgcagggagtcgagagtcccctatgcgcggagcttgcgcctaggccagtagcagaaggactttcgatgcttggtccaccacccgaggtgacatgcacctttggtgacacacatcaacgcgacgtcgtcatgcgcacgtgacttcctangngacgcgcagcggcggccgacctcttctgcggctctcgcttcctgcgcactgagtgagaagcatcggcctgcgattgatcgagacgatggaatgtgcgatgaggcgacctcgggagcctttgagtctactcaccagacgcgaattaatcccctaggtatattctgaccctcgcgctctagtcacaatctccgcctccttcccgagccgtggtcgcgcganatcacgacacgagcgcgattgcgcgcttgtttcttgcgcgcttgtgcgaatctatccacgcgcacttggaattggcctagaggacgacccattaacgggtccacatatcccattctcgaggggatgtgtatcccgcagcctcccgttttgtgacctcactatcagcgcaggttcgcatgcgatcgttacaccatcgtcagagacatgttgatcggtatccaccgctagcgacgcaatactggaagccttgctaactcacacagcacgatagcggtggggtccctgcttctcggatctcggtctgacgaacgtgagaacgggtttgtccaagtcacgtcgtgttgttatcccaggctacatgggtggggccaaatcccgtggtgatctcccgctttgcgggagggaacgtggtggttctatggcggacttccatgaggtcgagaacccgaattcgggtcggagcccctggggtcctgtgactctcttnatacgcattctggatatacgctacagggaggcaaacaggtggagaacccgttggcacgcatggtgtacattcggtcctgagcaagaacaattgcgtgatggaagcaggctggatggtttgcttacctctgccgtaggggttgcgaacaacacgacggccgaggattccgaattcaagcatgagttggcgggcgaacaaaggtcccctcatg

SEQ ID NO: 417955 - DNA, 837 bp, Homo Sapiens
agcggatcagaaccagaatcgcgtgatgccagtcgacactgtgatccacgtgagccgagatcagaaatgtcgatcctcaggcgacgcgcagatcttagctgtcctactcaccgaagtcttgcaacgattcgaatattatctcctagagcagtccttcagtgatacacagagtgaaatgcgggcactgcatctctaagataggcaaggtggtcatagcacaattctcgcatgctcgttatcacactccatgacgaagcttgatgagcaggagactcatgcacgaggtagaatagaagagagatgacgcgaggaatgtaggacttaaggctagttgaaggcttcgcaaagaaccagagcgttgtctcaagattaggcatctccaccgatgtgcggttacattactgcgcattgcgttcctgataacggcggcatcacatcattgaatacaaaagttgggcttagatgacaaatctgatctcgaaataatccttcgatgcgatgcataggctgagccagaatgggacgctctagaatgagactgagtaggaagagactttcgtaatatcgccgcagtggcactatttccttgagactagacctagaggctaagcggcttggctattccatataacacttttgcctcttacaatcgttgtccaggggtacgagtgagtagcatcaaagaatccctatagggactcgtgagccaatttacactagaaatatggattgggaaacatttaattaaatgagcagtaattaactagaaccattgataccctagtcagagtgtctggatggcccctactccacttccatgggagacatgttgcaccg

SEQ ID NO: 417956 - DNA, 761 bp, Homo Sapiens
gtatgagccactgtcagcctggccctttcctaatctgtgcggtattgcatcttttcttgttgcctttccgggtcattctgcacggttctttggagagtatttcctgcgtctgttgttcattcccctcagggagcatgagttggcccttcagtattagactattgtagggtctcgagcacgaatagaccaagtgcttcgcgatcgctatatagtaggggacctccttgagctaacactttgtagatgaggtgtccattcgttctcctttggatagctttgttatctgcgtcatttctcttccagccatagagttgcgtatatacgttatccataggttgggactcgctatgtatcaagttgccattgtagttagactcagcaatggcaagtggactacacacgcctaatctgcatggctagtgtcctaggcgccaggaacaggtagggaacggcggcttaacgatagccagtcttagtggcttccataagtcgacgggctcgtctgactttttgttgctggatggcagcggactggatgtgcgtttaccgtgcagtactaaagtttttgctctctcggggaggactgcctggtgacgcaagtgccgcataaactcctatatgccgtgctatcgttattcccagaagtaggcaggaattgtcgtcgtgatcagtccccattgctcatctgaaccggttcttaggcttccagggtttgctcatatacggtgtcacctctgatctgtggcctgagggatgcccct

SEQ ID NO: 417957 - DNA, 641 bp, Homo Sapiens
agcggaggggtccacccggactacgaccatgtaggggtatagtgggtcgggtggccgctgctccgagacctccgagggaccttgcggagactcaccccttcagcagtcgcatgaaccccagaccgtcagcatcatatacatgcagggccgacgatccggacgggcgggtccagtccgcatgatcaggtgactagtgcggacgacaacacactcgtccgtatcgcgcaaaaaggcaggacgcacgaacaccagggacgcaatcgaagggacggacaatagggcagacagatggaatggaacggtccagaattaagactgcaggggaacataacgcacacaacatcacgtaccaaaatgaccacatgaggaagatgacaaaggacaagaggaaagcacccgaggaccatggaatacacggagcagcggatggcacccacacaactataggagaatggaggagaccaccaaggataacgggcacatcattggccgtactgagcactgggtcaccagcacagggcactaggaacagcagaagagaccccagacaagatacatgggaacttctgggatggcacacaagtcaaaacataacctgcatagagatccgtgaagacctaaggaggcagacagtcatgcaa

SEQ ID NO: 417958 - DNA, 1271 bp, Homo Sapiens
  misc_feature (173)..(173): n is a, c, g, or t
  misc_feature (384)..(384): n is a, c, g, or t
agcggatgagatgcaatctcaggaacctgacggtggcaacatcggctgctgtcggaagcgtgagctggacctccctctcttgcctcctcccttgtctcgcacgtggagcatgtgtagcgctgcgggaatctgccgacttgattggtcttgcgaagtcgtctctctgtaatagntctgtgcgctttgcacggagtcacgaggcatatgtgaagtcccacgtccaaggcaagattgtcccgttctagactagcactacgaggacgagagagcagcgacagttaacatagtagtgcgctccgtatacatcaacgcgatagtcgtgggtgaaggaagttttagatctcgaagattccccgcgatcgaggatgggttgggggattcttntcgagtgagctagtttggagcgcatggatctctcgacaggatcgtcgtcttcgttgggcggagtggatcctcgtgtggtcaagacgaaacaatcagtccgaacgatctaaacaatgacgtccttaccataccagtgattaagctagcaattgcttgcctattatgaggcgaatgttggactagttataaccccctgcaagaatgctacaaatacgcacaatataggaaagggtttttggaaggcaacgagttgattacaagccatgtagagttaacagagatacatgtccgaaacttgttggcctggcacggacatttcctattggccaatcctgggattctttgacattagggaaggagggactccttccagaatgcggcgaaactttttcgcctacagaaacctaggaggacttccacaatctcgttgggcccatgttccatgtcttagaattctgcgaacgaaattgcataggcaacctgatagggcttccttgtattctgaagaaatggggggacatagcaaggaagtttcagggtgatcacccggcctgcaagaaggatctgaataacgttcgcattcgacgacccttgcctccttgtaacatttcgaggattagagaaggacaaaccaaagagaaaggaagccgtgagagcgtgaaaccaccttcctttttccctgtcttgcccttttgatgaaacttaccaagactttccgaggcgaggcaacgtgagaggcaattttggtcggtggtgcagagtatttgcaagggacaagccccgcgtgtggtttgtggccgcagtgtgccaatgcgggattgcaagccgctcgaaatgaaacctctggacccgcattattttcttaccacattgaacgaatcttcccc

SEQ ID NO: 417959 - DNA, 962 bp, Homo Sapiens
agcggggcgtctgcggagggcgcctgatagtgggatgcaagcgtctgggagtcctgggaacagaagatcatcaggactcgtgctggggttggcaggcaggatcactgcacacaagacgcacctgactgagccgcgatcccgacccgttgcgtccacccacaatccacgtcgcgaggcatgccacgcaaccatctcaagtctattggcatagatagagagtgagagacgtgggggccttcgaagagccggctcgaggaatcgtggcgccggattcgctagaggcctgaggtcaagagtagtgattcgatcgatggggtagacttggcaatggaaagttcttggattagacatgaagtcggtggaccgctgaagtgttctcctccgagaatgaaagcgtatgcacgaggagactcttttccctgcgtacgagtctggcgtctgaatagaagagacttgcttgggtgaaccgaggtacccgatgaggggtcctctctatctgcaggcaaggggctactgtacgtgcattgctcactttgggggaacgaaacaggaagccggagatcgtggcatggagcatacacaacatgaaaggggaactgcgcgtcgggacggaaagtcacagaggcacgcaaggagcaagagtcaggaacaccgggggcgctgtaattgccaggactcatctctgccacatggaattgttcccctggtgcgtcttctccgggggcaagaagcgctcttgttgctgtcagcgacaaatggctctactcgagatcgaaagaagtgagctagatgttcatctcattagttgtcgcccatagtagaacaagggaggaattgaggtgttactggtaggatcatttgtggcattgaagggggagggcggcgtgcggtgattgcaccaaggagccagggaagttaggactcgtccgggaagccccacgcgaggctgtacccaaggaatc

SEQ ID NO: 417960 - DNA, 592 bp, Homo Sapiens
agcgggctgtcctccgcagagcgccggagtggagccgcccctgtctccccgcgcaggccgggggaacgaaggcagcaagaagggaaaagaaggcactgccgatctgggcacatgccccggaagccatgcgacatgcagagaaggacagctagacgggaccaagagcgcacgcagtaaggaagcggggtgtacgcggaagagaacatcaaggcagacagggaactccgcagatcagggaagtaagccatgcgtgcatgcagcggaccagccaagaggccaaagatgacgaagaacgatgagaagaaggcggatccggaagagcgaataccgtagcgacagacaagcgtggaaacggaagcgtcgagcaggagaccagaacagcagaccaggaagaaggaacggcgcagtcataaaaaccaaaaactaaggtagacgtgaaacagaggacgagagcgggcaagaacaaaacaccggaacagaagtaggagcacccaaccacgacaggtgagccacaaaagggacacgagacacaaggacgcaagaaaaatagtaacagaaatcaccacagcacgaaaaaccaaacagaaggaac

SEQ ID NO: 417961 - DNA, 1257 bp, Homo Sapiens
  misc_feature (471)..(471): n is a, c, g, or t
  misc_feature (529)..(529): n is a, c, g, or t
agcggaggagagaccggccggcgatcgtcacgagtcgccccaacatccagcctgctgctgacagtccggctgtagccgtggcaccagccgtgactgaggatacagagccttggcgacgaggagtctgtgccacgcacttggtaccagccactggttcacctagcatacacatcactgcagtagtagtgtggctgaggaacctccaacgtgcagcggcctggcagaacatgcgtggatcttcctctgctgagagcaagcaaatggttatttatcccaaatggggaagagctcatactctgctacggcaaggggacgcaccggacttccaatgcatcccctctccactggacttgcaatctagaacaagatgcgcaagctacatcgtgttcacccgaatgaggaatatagagcttggggccgctcgtctcaatgtagggggaccattcacttggtagaagcgccagaatgacnttaatagttgcctagactccgcgaagtctaaagccgtgctcttctgcgaacgatatanccctaatttggttctaacgccatgtgagctaagtgggggttcgtgaccatgaccactcgggaaccccagccacgatcgctcgattctcgtatagcagccaagaggggttccagtcaaggaagacctttgtgctccacaacgaatacccaacacaaaagggatccggaataggctttggttaactcgccaacgattatggaaagccttcgtccttggcgtgttgcttccggggcgagcacactcgcactttgtggagccgccggtatctccattcgaaccaacattcgtctcccaaggttgtgcgaggggcccccattgaaaccccggagttttcatcaagtttgtggcggacgcgtataggatttctttttggcccttgccccccccaggccttccgggcggcaggccgcggcgagttgccccttgggctttgcagaaaggccgcccccaagggggacacgcaaacgaacaagtcccgcgcgacttttatatggggcgacgcccaataggcacaaccgtacaaacgcacacaggccgtcgtccattgtttggagacacttaacatcgggattcgggttaattaggtatcccaacagagcaacagagttcttacctgcacgattacacattccaccagtatagcttgggtcccccatttgagaaacaccttttgtggcgcgacaagagtttcggaattcgaagtggccaaatttccgatattgaaccca

SEQ ID NO: 417962 - DNA, 772 bp, Homo Sapiens
  misc_feature (713)..(713): n is a, c, g, or t
agcggtgcccagtttcacatatgtttttgcatcactgtctctttttttcttgagcttattccagagtgtcttttaatatccattccatgatcaaatggctgaactattaaaatgctgtccagaagtgtaaagcaatatgaagatgctagaaaagttgaagagacacatatatggtaggtccaagaccattacacttactgagtccattactaaaaatgatgttcacttaacatcaaaacactcaggattacccaagcacaatatactgatttgcacctctgcctttgttcatgccccttgttcaggagaactgctttcatgtgctactgtccatagatcttctctatccttacagattaatttcttccttttgaatgctaagtttccatactttgacattccttctgcaccattcagaccatattttagttcttttttatggtatctctcacttttgattgtcaccccttaagtcaaagacaattttttcatctgtgtcttctcaacacccagcacagggctatgtttggtaaaaattaggtatccaagatgtactaaatgacaaaaatcaaagaaagcaaaaatttttgaaatttcaaatgagcttataaataaagctctgttatgtacttattgtaacgaagtttgaacaatagagaaaagtatcaagagaacagaaatctctaaaaatcccaaaataaccacctcagggngagttcttaaagttagaagccacatctctcatgggtacccctgttgatctgcaggtctc

SEQ ID NO: 417963 - DNA, 798 bp, Homo Sapiens
  misc_feature (557)..(557): n is a, c, g, or t
agcgtatgccattgtttaagagcagctgtgtagtattgttatagtcgtgcaagtcgctaggtagtatagagcttgcatgtaataataatcatgtccgatatatagtttagcatctcatacgtctactggtcgctactcatatactagtatagtcatacatataggtgtgctgcatgattgtgtggcaccctgttacataggcctcattgactcctgaatacgtccgcaagtaaaccgagatccagcagaacgatgtgatatactctgatgtgcttggtgtataatggttgtgaggtgtgtacatagcaccagtcttcactctagatgcataacttcccaaagattcctgtctacctacggtcaacccgatgggactaatcatggtagttccattcgctgccgcatggatcatttgcctgagagatactttagaccatcctggttgtaatgaaagtgaactagtagcgcaagaagaacagcgcagattcacatggaagaacaacccaagaccatatcgtctaacaatatttcgaactcgtgcattattccacacactncattcattgttggagaattcctgaagacgctaccatgtgcttcgatccctaggttatggctctcaaacattccgcaagacaaaaggccaggaaggctaggacttgggaggaaccctggaggagaaagcaccgcatggaagtcaagcagtacacttgacaataccgagtattaccttgctttgactagacaagagtaaagcagaaactggacttcgtccaaggaaagtgggaggtttcttca

SEQ ID NO: 417964 - DNA, 1015 bp, Homo Sapiens
  misc_feature (250)..(250): n is a, c, g, or t
agcggcgtgatgcgcacggctcccatgcaggcaggcgcgctcggcgcgaggtatgagcagatgtggcctggtgaacgcctggtcgcgccgtattcttctgaggtgccacgcgtgccgccgccgcacagctcagcgcatggccctagcctgcgttgtgcatttctaggaggtgggacgctggaagagcactctgcgtgagcttgtgcacgttgtgaaggagttgatgctgaggtcactctgctgtcctcgntcacgtgtgcgctgcacatcctgcgatgtgtacgagacgtactctcgcgaaggaagaatccttgacatcattcgtagtgtcacagacaacgttactctagggtcactggagtcaagtccatcacctgtagtgtggaatccagtgcagagtctgctatggtctcttggagtggagtttggtagacttggtcctcagtcgtactgctccagctttaatcttgtgtgataccccagaatgcattccagcaagcatatctagaaacgcagagaaagatagcctctgcttaccatcctaggcggtgcagcgatagtccatcgctctagtcccagtctgattagtgatcgcctaaacgtccgcgccatcgtttgacggcctctgtcatgacgcaccagatggaacgctaagtcctagtcggcactgacgcgtgtaaccatgtcctaccagtcactcgaacggctagtccggacttgttgcaatggctccagcaaagtaaccaggttatcagcacaccttggaacattgcgccgaacctaggacatgcgcaagctagcagagagcgtcgcaagaaggcgatctgagcttgcgccctgagtgagccacttgtatttgggcgcctatttcccattggcattggccgaccatacggaacccccttgcgagggaggatctatgcttgccctcgacctactagagtattggcggcaccagatcagccttgctgtggtgtgaatgggcccatgtcaacgatcgattcagttccagcct

SEQ ID NO: 417965 - DNA, 1420 bp, Homo Sapiens
agcgggcggttcgaatcacgcccagctgaactgctacagttggtatgctctgtgagtgtggtccatagtagcctcccatatctgtagcccagaatgaacttccctgcacgtgctgactcgtcggtctgctcctgcgttgcctccggcatcacagataacagcggtctaccgcgccgggcactgcggagccctcccggacgccgctagtgtccccttatgccgttccctgtgctgcttcccatgggcttagctatctggcggaaggcaatgagtgttgctagctgtactcccttcttggcatgcctgtacaggagcacgaccaatccattgttagaatagccttactgcgcagcatcagtgtgggtaatagaaccatagaaacacgcggtaaactagtgatgcaattgggagcatatcgagggtataaattagtataagttggtcacacatcaaggactaactgtctcatactagtactcactccgtcttttgcaattggcccaatacttaggtattggctgcatcgtcaattccattaaccatagtgcgtatcgcgtggtctgcatgattgaatcgcctgattattacgaaacgaaaatcattgttcctatgagtaatagcagagagaggtcccttttaaaattggatgatacttcaggtgccttgccatggaatgtgcgactgtacgaagctccaggaacatcaggaatgcacttaaaatgcgttaaactgaggggttattgaccttccaagttggtgaacgaacctctcgtatattggctgaacctttaaggcaatcagtgcacaactctagtgaaggcaggcaaagtccgcccaagtatgatgcaaaccagggtccaagctgatacccaccaatcttcccgaaaatactaaggtccattggcacaacatcacaccttttgagtcgaggggtaaccaaaggctaaatcaaaagcgtattctgagaatcggccaccagaaaccttgaatcatgattaggaggatccctgtcggaccttggtgacacccaaggaatccacatggtgcacaggatcaatttgggcagaggaacgtcaccgaataatcattttgtagggcgttagaacaaaacaatcattggcgttgagacgagttccacagcaccggagttccatcaggaagccagcttcaacaggtggggcaccaaacatggtgccacatttatcacagggatcatttccacccaaattggcaacagcacaggaatttatcacaggattctttgggcagcaacaaaatgttcaggcacaacaaaagaggccacgatgatatcttttccggacatagagcgcacaccagcggtcgtacccccttcgcttggccgccttgacacacacagtcattttttgtcaacagaatcgacatacttgggtgagccccc

SEQ ID NO: 417966 - DNA, 1352 bp, Homo Sapiens
  misc_feature (383)..(383): n is a, c, g, or t
  misc_feature (469)..(469): n is a, c, g, or t
agcgggcctcgacatggctttctggccggcggccgacgcctacctacgatggctgtgttctgcgatctaggtcaaggactctgcgtgtatcctccaacgtggcgcgtactcggccactccgcgttcccgagcgactgctaagccctgcacggcacacacgatatgatgcggcagaagtgaaaggccacgacgaataaaggcgctaccctcctaggacagagagaatgcgtgttcgacaggactggcgctagctgtgtaccccacgtcgcgagctacgcagtttagaacctctctggagtactctctgtccgtggtctgcgaatgggcttcatcgcagctattgagaccatgggccggtgcccccagtgggcacacaggcgaanggcgtacacagtcgttagtacaccgtgtgtccacacgagatgtgcgccacatctctctactggcaatgtggggacctccgtgttanccaagtgtaacacataggcgatcttgctgacaggccccgtttaccagcattcttgtggcacttgaaagctgggcgcgagggctgtgaagctggagcgaggctgacggagacagaaattgttggagcaaaggccaatctgtcctgaagttggggacagtctgagacggaggcccaacttggagttgattggtgtgtcaacttcaaggggacacaatcgtgattcccgggaaaccccccgaggaggcacgaagataagattacggtcgtttaaaacggaagcttataaggcatatttcccattgatgtggaaagttcaaaaggaactgcagtccaacccgcgaagaaaggaaccgaaaaccttacgtgttttcacaaggccttgagataacggaacggaaaggcggagctaacgtggggaaatgaaccctacgagagaattgtttgccttttaacccaattcacaggagcgacgactacgtggttgcccccgtgtataacctccgcacggcctaggagactacaacgggaatttaactttgcaaaggtggattaaacataacataaatcgcaggtaggttcaataacccaatggaggttctttgggcaaaattaccctcgatagggacgattgggcgagcataatacagtgtaagacttgggattaggccaagaaacattggcaaggaacgtatcactacttggcggcacaacgtttcgcgctccttgtcaagaatataagaaaattgattccctggggagaccgggctttcgacccgaagtatttacaaagcgttggcgtgcaagtacacccatttttggcggccacatacacgtagccccaaagaagcgtcccttttggacgatagcgcgaaatttcaccgcg

SEQ ID NO: 417967 - DNA, 1207 bp, Homo Sapiens
agcggctctcttccgtcgccattgtaagatccagctccatacaacgctccgactggcgcgtgctgacgcgacccggactgcgcgccagtgaccccctgccgacagttccgctccacttacggaggatagtgaacgagtacagcataatatagaggaagttcgcaatgagggatcccacagactcaaacgtcgagtcacagaactcagacatgcgatgacggtaaaaactgtgagtaggaaggcgtatgacgctggtgagtacaacgctggaaaaaggaatctagaacaggaaggtacctttgatcgtccgacgtttgagcgagcgaaccggttggtcaagagcgtgcagcgaattctagagatcacaggagtccgacgtcagcttggtgaacgcatcagaggagcgagtttggggagtcccgtggctgtgttcaacacgactgcctgcctaggtccggtgttgaacttacaggtggtcttacggtgcaaaccttgagagataggcaatcagcgatagaacttgggaattgcgccaggaatttcgaatgaggcaattcccccacacaaaggggtcccaagaagtcctttcacctacacgggtgagccacgaaaccgtcccgaaacaaggattcctgtaggcgtggaactgtgagtcccgcgcatgtacgtgtcttgtacaccgaacaaagatgcacaagagcaaactaatgatgcgggagcctatcggcggagccaggcaattcgggagacagacttactttggacagccgtttcgcaccaatgggcattagccagaggagaaagccgaatatgcatacagcacaaggcaagggacctctggtgcgccttgatttagcttccagcacttaaatacctttggagtttggaacaaggaaggccacaagcgtttagagcaaacaccacccgtgcggtgtacaaggaaatgaggggccgacattaccccaatttcacaacggtttagggggttcctagggggcgaaacagcctggtttgaccagaacatttccaacaaagtgtgtttgggccgaacaaaacgtccccagcaagaaagataggggctcatttaataaacggggccaggcgcgacagcctatggcgaaaacccgaaatcctcagaagacgtacgcgctttgcggaacgcagcctgtggttgtcccaggcgaccggccgttgtgcgttgcgacag

SEQ ID NO: 417968 - DNA, 1251 bp, Homo Sapiens
agcggatggtagttgctacagctctagccaagggcacgttggctctgatttcagtcaactatatacaatataagatcctctgactagcgaggagggggactctcggtggtgagtgagcacagctttcaacctgacgtaggaggcaagcaaccgaggcttggcgcattcgagcattctggtctggtccagtgacttgtccgcgtacctgtaagtaagagtatgtagaacccagggccggtgtgccctacctacgcgctcatcagcacaggcgtcgtctccttccgttctggccaaaaggggcgttgcaacccgctgggagagcgctccctacgtgccctgccttccttcggcgggcgcatgctagcgaagcgttaggtcgcggtgtccaagtctgcatctagcgcgttcggcgagtgtccgggggccatctacggaactggggggggaatcgtggcatccgggcgggtttgctttggcggcgctgggggcgaagtgaagctcgcgtgggttgccaggggcctctgtggatgctaccagagtatcggtggcccgcgtgccggcggcatcggacttggcctcctagggcgggccgttcttgcccgtcagcgcatcccacgtcgggcgtggctacctctcgtcgccactccgcaaggaacaagggatgtcccctcaaagaaccaagagcccgggatggtttccacttcgtgcacccaacacgggatcgacgaaaccaacccctacttggtggaagcaaccggggcgccttggcgaacagagagcgaatcgttatcccaccggcgagggattagcgaggccattgggacaggccaaccccagataaccggaacgctccggagggcatattaaaacaggcacaccactacaggaaaaaccacaggggtggcccacagagagaagtttagcataagcctatgggcctggaatgggataggggcgcccccaatggcccactggcagagcgacgccatttaccacaagacatatggggatagggggggaccaccgtcagtgtaagcaacacgaaggagggtcacgggcatatcgagaacccagtgggcaccaaaaaacgcccagcagaacaccgaacgccacggatagggcgattaggcactatcagacacccggggggataccgcagatacgcaacagagcgaataagcacaaggaccgagagagatagaggcaatacggacacaaccacaccaccaaggtctgacacacaccaagacg

SEQ ID NO: 417969 - DNA, 1140 bp, Homo Sapiens
agcggaagtacctatggtggcagcggaagatggaggggtttgtgtttatgctactggtctgtcgccggacccttcctgggtcgtctggaagcgatcagggctagtatgcggtggtcgtattgagagctcggcatgggcttactgtgtcatgctggcctacgtgacccgcagtcaaactgctgtcgtcggcgtggtcctcgtgccgtcagacgtgcactatgacgggtagcatgtgctttagcgcttccaggtggccggcattgggcatcggcgggctgttgtggttggcgcactatcgcatggctcgggtctccctcagttcgtatatgcttgctctcggcttggtgccgaaggattgtagcactgtgtcgcgacaagcgcctctctgcgcaaggactccgggcctgcatcttgggaagctcgggttcgttcacctgcctgatctgtggggcttcggtatctcccatcttggtgcctttacttggcaagggtatcctatcaggccatgggccctgatcatgcgtattggcccagtcaattcagcttggtaaacggagccgaggaacggttagctatcccaaaggaatcgcgtcaaggggcttacaatcttaggtgagcgggccctatgaaggtttcaattgacgcgcctgggacatgggaacaggtctacccgcgtgagatccttcacaaatgagctaggacgccccagataatacgcattaccgtaggtaccataggaaaaaagacagtcccgaaagtagtacccactttacagacggaaatagaacatcgtaagagaggtaaatcataccttcgcattcgtagctacctgtacaacccctggtgcaagtaggaatctgacacacggattggtcgcgaaacaacacctcatttgtgagcctacggcgttagcgtgcggtcacaccagttcccggatcgtacgaaataagccccttgtaaggaacttttgacctgaggtttctcgggtgacttcaaaaaatagaaagtgcacctggtttgcaaagttactctgtatcacaaacagaggtcgggccttagcgcgcttctatctgttagcttcttgggcaaatgaacaatgtggccggcaaaaggggttccaacagtcgctttgggagagtg

SEQ ID NO: 417970 - DNA, 1401 bp, Homo Sapiens
  misc_feature (1189)..(1198): n is a, c, g, or t
agcggatctcgttggcacagcagaagtccatgcatggcgcaaccttgcacttccagcggcctagcacctgtaactctttctatccggcaagtcctacaggattgcggcccggtgcctatctgccgtcttgtgttgcgtggagtattatgcatgcgatcaagctataccctatagtcattgaaaaggagtaatacgatctaacgccacattgtaggccaaaactgtccacttcacctgatcgcactcgcttgatgtatctactcccgatccaattctgcatgaagcatttatgcaatcccacttctacacaggttccctgtcttccactgggcagacaagttgaattagataacactatccactgagtcacccaacattcacatgcgaagggatctcgggtgagaccaggagaccacgtctgtcttgtgaaccctgcaatgtattccccaatgtgagaagttaccggtaaaccatcgtatagcatatgtaggacgaattgatatcgtgtgcttcaatgtccctagtccccgtagtcattctgttcccacgttttttcctttatattggtacttctcccagtaccccagtgcatctcccacttatttttggttgattccgtctggttttattcctaggcttgtgcctagggtcatccctttgcattcttcgcgaagatcattcctttgtgatagagtaccgagaaaggcattcccattctccattagtaccttacctttattttctttccttggggggcttgttccttttgtttcctctggttcagttcccatggttcccttgtcaggataaatattttccagaggttataccaatctgtggggggccccgtccatttttttggcgagtggggcctgctaattccacttgattcttcttcgaaccaaactagctcgtatggttggggctcggtgatatatttaaaaaagtaccctttgtcgtttttgttcccactccaagctcttctttcggttatggtggttagccctgtatgttttaaacctcttcctatgatttacttcctgtggcaccgggcgctgttttttaacgttgttaccattaaccctggtgtgcctgttgagcatagaaaggtttttggccggcagtccttttaggaacctggttttcacgtgtgaacttggcattggaacggcctgagggcctataatannnnnnnnnngaagcgggtaaaacaacaaactgggtgtccccccttggttgcaatttgtgatgtgtgtacaagaaacaacgtctcatggtcttaagagaaaaacgcgaggcatgttctccacacttctttgtgtgtgtatgcccactcacaagcgcccatggaagatatagagtagataaacgctcggagagagcacattactccgcagaaca

SEQ ID NO: 417971 - DNA, 520 bp, Homo Sapiens
  misc_feature (126)..(202): n is a, c, g, or t
cagtttaaataaccaaatactaaaagaactggcatagaagtaaatgggctgctgctttatttttaggctgtctttttagagaacaatgacaattatttccaagtttgtcattagaaagtaatattnnnnnnnnnnnnnnnnnnnnnnnnnnnnnnnnnnnnnnnnnnnnnnnnnnnnnnnnnnnnnnnnnnnnnnnnnnnnngtactgattaactttgttccttacagctgtatcctggtaagaaaaaccgttttgtttccccttactattactttagcttgtttctttggtcgacgacacgagcttgccgcatgctgcccatgtttgagttgccgctgcgctgtgagccccggtccttgggaccttcccccccggggccccagagacctcccactctgttcccaggggtcgtatctcccgtttgcgccccgccctggggctttcttcttctccgcacggtgtcccagcttggccgcttgctcacacctgcgtccgcagtccggtgctcgtccccaggtg

SEQ ID NO: 417972 - DNA, 1098 bp, Homo Sapiens
agcggggcctccgcggctccggtactcgtccttgccgatgctaccacgagtgatgcttgacctcctgtcgtccgcagcgtcttgtatttcgtcgcgtcgcggcctcatacgcgatccactcgtcgctctaggcgacgtccgaatacatcatctgctcatcactagttaactccagtagaagctgttgctactaccgttgccactgtcggaggttccgaccactgtattcggaactgtgatgtactcaacgttgcggggaatacctagattgcgaagtacttcttgactgcttaactatctcctacgaggaaagaagtttgggccagtagagttgcggtacacttgcctccacattggtctgcaatttgagcctgcccgtgcaccttgtccccactactacaacgaaacatgatcgttctacatacacaccttgaacgtttcatgcagcacctatcttcaagagcgcctgtgccctgtttggccccccgtgtctcacccatctacgccaaaacattcacctcgtatcttggcaccgcagggtagcgaacgcgtgtgcacgcgtgtacgcatgcacatcctgggcgttcagaaccgaagaactgcagacactttgtctaacacagtaggcttgaatatgccttgggtctgcagcatggagcgactgttggcgcacagagtagcttaacttacgtatcccacctctaccgaatttaccgacttggggaccatgcggtgtcaggcacctcaaagacgcgggttaccccttgaacatcgtatcccccttctctatacactgaaacgttcgaccgtctaggcatactaagttgcgtacctatcccatgggacaagttactccaatcgttacttcgaagacgagctctataacgtcggcggcaatagacaatagacacgcttgtatattggaagagcgagataccaaatagggttcccttggccttcagatcccccaaacgcaaaaagttcgcaggtgacgcttcctatctatagcacgcaggccaaaagtcccataggcgcaagctcttaccacacgagtactcccataaacggagcactcttgtcaccacttgtcccgtccat

SEQ ID NO: 417973 - DNA, 995 bp, Homo Sapiens
agcgggttgtgccttgatggaccgtccggttgtcagactgcctatagccgccgaaaatgcccgctcagctctgtggcgctccttgcttgaaccgactgacccgtgcgtcaagttgttagtccggagcgagatcgcagctccgcaaaggtttaacgtcacgtcacgaggtacgttcgatcgctcggatagcaatcgtgccatcgaggacctaggaacaaagggatgacgaggttcgacgagcccttgattcatttctcctttgtcgatcgagtcacgttttgggccgacgcagtgcaatagattgcaggtcgacgtttagatgtgacgagaacttcctggttactgcgtcgtgtcttctgaacgagtctgacagagggggctcatcgtttgcgatagggacgagctctttgccattagaataattgcgtaagtcatgtactcacttttggaggaatgaaatgctggaaagtcaatggatataccagtggtagtcccattgtaaagaaactgcaggagacaaatggtgacccgagttcaagaaactccgacacgaagtactttccattggagcagattgcatttggagtggcaaggatcagaggataaaaacttggctaaccaacaatcggtaggcacaagatatgtgcctacaaggacccgttggtccttcggtgtcctaggcgtatgacagagtgaaatgtcaagagcacgaattcatgtgagcacctatttgtcatttgaaggctaacttgagacctaaaatgcattcagttccaggtcatggcattacatagcctaatttggtgtatggaggactgtgctcctgtaacacgacaacttgatggctcaaggatgttggccctaacgtttgcacactataaacaatggtcgcactttatttggaccacaacaattgggagcattgtatggaattagattggtccgaccgtgttaaatcaacgtacttgacgaaggggcctagacgcccaaaaaac

SEQ ID NO: 417974 - DNA, 1461 bp, Homo Sapiens
agcggggcgtggtcgctttcgctgagcaatcaagcgatgtcggctgcggggtactctgcgcgcgactggactacaaatcaccctactgacttatactctatggcaggctatgcatactggacgaggcaggttcgagagttgacttgccatgtgcagcgcgtggataacgtcatcgccggtgagtagagagccgtcagacgagggttcggagtttcctctgcattctaagaacatgcgagcttctgcgagattgccagaggtggggcccgctactgttacttcgatgagctacaacactctagagattgaactacgtcatttggccgcgttagtcgcgcgttgctgatctttgtgcctcgcattggtggctttacaatcgtttgcattgtctagatccctcgcgcccgattatcctcaaccgtcgtttagccacggtgctcccttgttcgatagcaattgcgccaattagaacagcttgccagttcgaattccaacgcacctttgaattacccgtgttagattagggctcgctattttataatgcggcgtttctgaatccatcttttggcccacccattgttggcctttattttcaatcgtttggcactaaacttttgtagcttgaatatgtctctgtagcctatactctcgtgtcgagatctaaactgtggtttttcaaaatctccccccttggttcggtgcttggcttcccttgagcttttccttagcgattatggtctctgaacatagatattttggccttcgaaacttttcgggcgaacaccgttaaactgagacaatacaacacacggaaacacgaatgtgaggttcgttaaacgaggtcccatttttgcccttgttccccttgtcccgggtgtgccttctcaggtccttcgacgtgtcacctttcgatactggttgcttcttttatatgagtggctatgtgtcccaagagtgcttctggcgtgtaactatccccaggctgttcccacttgttgatggttccatggtttgctggaacacatcccttggccaattgtgtctgtcgcttgtgcccttgggttccgtttcccttagtgtggttgtaatggcccattggtttggcagttgggttccccccatatttaacggtctcttggcaaacaaccccactacctaggagagtagttccttcgccatctttcaggaaaggtcccttccaggcagccgggtaaatttttcacatagtttgtataaacgtaagggagagacggattccatacaggagaaacgctactctttgggttttacattgacgcacgtttagggcatgccgcgcattgttattgcaacctgggatgtgacttgtaaaaactgcgttgtatcaaacaacactaccaccctttgtgggaaggccggtctcattctaaactcaggtgttcacctagcgcgtggaatcagcatgatatatgttgtgtggcc

SEQ ID NO: 417975 - DNA, 935 bp, Homo Sapiens
agcggacttcctgtgctcttgcggacacgcgcgcgtcgggttataacgcgtgtctgggccgcacgtaagcccggcctacgggcagtctttgactcgatgagccggcctataggcgcatggaagtgttcccatgagaaacgggaggctgccagacgggggcgcttggccgccgtgcttaaagcacagctcgacgttgccgtacctgaaatgctacctcaggatccgggagctaccgacttcgaaccgcaggtgttgaataaccgcgtcactgcatggaggcctgcaggcaccaaccggtgttccaggcaaacacagtgtcgggcgcgctgatacagcacgtcaatgccatgatcgagaacgaaactggaaccacttgatcacaggactgaagaccagcacgcggaccatgacccagagccgctctgccacttaccatactgcaccatttttcctgggatatacagtccagatgctcatcagttcaggcatccgtgagaccattcgctaccttgttgcagcacaacatggtggacggtcttgggtgatcacagctgagcggacgtggacggaagacctcatcaagtgcctggcgcgcataatacttgggcgagatttagcctcagggggaaggagctccgggagcaacgggatcaatagtgatcggaaatctggtggttgcccaatgacgaattacgtgcaagttgtgaggactggctgatgcgcaattctggagccagatggctgatggcagcaggaacaccagagggtggtaagccgtgacgccctctaagatgaatcgcccggctgggccagcggatcagaaacccgaaatccgcgtattactgggccccaaaaaaacacatacctgtgtttgagtccgcgctttacccaaaggtctctgtgccgaactgaattgttgtcattccataaagaac

SEQ ID NO: 417976 - DNA, 1195 bp, Homo Sapiens
  misc_feature (622)..(622): n is a, c, g, or t
agcggctctgttccttacgtgaccgccctgttcttaatggctatagacgtgtcagcgcgccagaccagttgtccaggactagcagagctagacgcgtcattcttgcgtgctcagtctgctagatactctgactgctagaggccgcggccccaggatctctgtctgataagcgtcgtctcgtcatagtatacacagagcatgcaatgctgaatccagagaaagtgctgagaggatccagatgaaaccacacaatgaaaggctgcctcgcgtacgaggctctgccaatttaatccccatgtgctgtatagctccatgtgtattggcacgacgctcgatcaaagaattcatgggcacgccttcggaaatggagtgcccgcttatcacacacacgtgcacgtttgatgttcacaaaaccggaaggatctgcgcctttgcacttgcgcaggccacggggcaacggggaacttccgtcgcccatttgaactaattgtctttgggcctttgactccgttacgctgcggaacatgcaacattctcctcacacttgtaactggcacctatgcccttttgcaatgtggcccccatttgaacatggcagcacattttggacacgtgtctaccncacaatagtatagggatcctcccacagtttcgcacatgttattccccaccacgaaagttttcgtttttccccctttggcacctccgaagtggcgtttaaggaggcgcagagaagggaaaacggattttacacaacttcgatgctagcccaataggaaactaccgctcttggctatgagtagaatcttcgggttctcatataccaacgtcaagaaaactaggtcccgatggtttgggctctacttggccattactccggacgttgatagctggactgaaagcccaactttaccgcgctcgggagacccccatattctccattctgggatcccccaagcttatatggcgataattatcgcaacgaaagtgactttggcgtatggaatttacaacaccccattttggtcgcttgcacaatatcccagccagtcttataaccgccgctgaaccttggaacggcgaaataggttcgccaagcatcgcaagcgatggtataccatacttgtaggcaaactactacgcgcccgctataacttttgggccccacatgcgaacaccagcggcgcgacaactg

SEQ ID NO: 417977 - DNA, 1142 bp, Homo Sapiens
  misc_feature (842)..(842): n is a, c, g, or t
agcgtgggttccgtgtcgtgctgctgcatggcgtccggcttagacgctttggctccggtgtgttccggacgccgtgacggacggagacggtggcgtcgtctcctgtgcgtgcgtgctggaggtcagataacgacggaccctgtgccgagcctgtgggactagcttcccgtgtcgcttcgcctgacgttggtggactctgtgtgaccacggatacttcgcacagtgaagaccaagtactagtaaagtgtagattgcacccaaagttacatgaggcacagtgtaagaaaggcaagcttgatttgtctatgaaccttatacacaatatcagagctattgactgctatcggcattaaaacactaaacaattttgcttagctaaaaggggttcccgagtagcgaccattgagaaatccattttgtaagcatcgtggaaactcatatattggggcaaaacgggtttcaattgcgcaccactaatcttgtgtcctgaaaacaattgttatttcctttgcggcatactttgcacttaccctgaaagggtaggccaatttaaatgcagttatgaacctgtgcatctattaacacttgtcgcaatggctatgtgagcaagcccaaggaatacagaacagggaagaagccttattgcgtttgttcacaccacatagacttttattgggtggtggcaaggttccacatacgtataatctgtgtgtaccccgtgggtaacccgtcgttaaccattgtttgcgcaagacttttcgacggggccgcacgcctttgaccctttgcgtgctccttttttgcgcccttggtgccctattactttttgtcgaaaaactagnttccttcaggtaaccgtaaacgggtgggagccggctttgacacacgagaatgtagccgaattaagacatacggctggtgcagccaatatttggctttcacgcgtaattgtaaacgcatgtccaggcgggaaaaaacctccgaagaaaactttaacaaccccaaaagataactttttgaatttcggctcaaatgtattgtgtacacagatgacaaagggcgctaatatttgtcatacaacttcttgcgacacacgagcgccctatggtgtaatttactaccccacatacacaattatctac

SEQ ID NO: 417978 - DNA, 1150 bp, Homo Sapiens
ggatgactgcccggagtcgacaacctgactgtgctagactgtggtctacgtcacgtctctacttacagatgatccaatatacatagagagttcatgctgcggctgtggctgtgtacactccgggtacatccactgtctagcattatgagattgcgcgtgttgatgattcaccttggatgcctagagatgatactatcgctgcttcagtagtgcgataccatcactgcggacattgagcctcttagctcatcttctcgcatgatcatgttagagacgcggtgctcatccctggagaggcatcttaatatttacccgagactccctccaaatcattgcgctgtgcagcgcagtgaaaatgtctcccctccagggatcgaagaaccgagtagaaccattgggtcaagaccaatcgattcttttgctgtagatgcgcttgtgtgccaattctaacccggcaattcgagtccattgggcaagattgtaccactttatgccaaccattgggccttgaagccctattcaggttgtcctatctatggaacccccgcataggccgcaatccgggccccattctgtgaacctaagcccattgctatgtggcccttacttcccacttgttttggcggcgcttggccttcagcccgttagggccctgttcgtaagcccttctttcttgtggcgacgtcttggcgttggggcaatcgtcggggcaagtagagagggctgcccccttggccccgatggctcaagaagccgccaaggcccgtccgttttgctacacaagaatttcttcattcgctgcgacgaatccttttgtggcccgtcgcccatttggggccctcgttttgagcggggttccaatccgtccgccacagtttgcgtctcacaggaacccgttccccaaggtaggctttcgacacgcacattggggggtggagcgctatgcactttgcacctacttggttggtcgggcggcttggggggccccgttggtcccttccacaccgtgtgtggacttttgtcacttggcgcgggtgtgttttttccccttggtggtaccaccgggccttggccggctctgtggggttcccccgttatcaccctttttccgggcgggcttggaggcgcgtccggtggggccccctctccg

SEQ ID NO: 417979 - DNA, 1044 bp, Homo Sapiens
agcggagttgaagcagccatgagccgccccctcgtgctgaggttccgcaccggctgatcccgaaggctagagtctggtggctcggggcgcgcgaggccctagaaagcggtgaaacttctgtgtggcgcgcagcgcgcgagatccacggccagtgtgacacggcgctcacccgggtcaccgtatcatactcgcgaccccgggccggctatcaacctgctgtcaaatgccttgtgctagacacggtctgtgaccttgaagtatgcattaagagaccattccgcgctgaaacaagtacaggccgaaggggggggctcaggtagcaccaataactctgtctcacctttgctgaattgcttccccgagacgttggccaatctctttgtggacttttccccgagcacagagtttctagaccccctacagcgttgccatgacctaagtggccttaagagtcgcgaccgcaagattttcgtaacacgtggttaagtcatcaagggcacagaatttataccatagagttatggcgtacctgaaaagccacttccgaacgccggactgtggggagaaaatttgggttctgccgcgaacggttagatccgtttgaacaaccccttacagcggttgaaaaaaccaaatttacgggcgaggtggaccataatatggcccaagtgccctaggggacgtgcggttggcagtgctgtagtttctaatctggccaactaggggttgtatagttgtgcacaggaaccttcgaccgtgcacacacgtcccaacgtcgcacactgttgcttgcgccatgacccagagttttcgttagattcggagccacaccaagggcgtgggccgacgaaaaggagaaaacggctttaaccgagtgcggcagcgtttatctgctagtttccggagaaagatggccgttacccacagcaaacgaaagtgagttttcctggagcagaccaccgcactaaggttggggcagggcctccttacatttaagagcgaacgtggttacaaccagtaggcggagattgtgtatgtccccaa

SEQ ID NO: 417980 - DNA, 1327 bp, Homo Sapiens
  misc_feature (490)..(490): n is a, c, g, or t
agcggactgtgatgcctggttgagcgcgctatttccgttgactgtgcacgctcttcccgtcttctctctgtatcactcgcatcggcgcagcgcgagaagagagcttgctcggtagcgtcagctgtctgtgtatctcactctgaggctgctcagtccactcgatagcttttgagcaattagagtgcttcttcgtctgccacccatgtatttgatgtggaatgacccttgggtaatcggcgctcatgagtagccacatgggcatcgtttgacacgcaaacagtcgactacctaattcaccagaaggctctgcagtcatctggtgaaggcccttcctaccggtccgtacgtacgcatgtattaaagaagcccgtgcaatttccctggtcgagaaaggtcttcgcatctaggtcgtactggtacgtattgctattgccttattgtagtttacatattgcgcttggccccggtggtccttcctcgacggtttgtnttccttctccactccattctcttggtgaacggtgtatgatgggatattattctgcccttccagttgtggtgtccgagggttttccaggaccggctcccatccaagggagttgttcgctcgcccggcattagggttgccccacttttggctgcacaatccttgtgccgtattgcgtgccagccatttaggcgagcgacagtcctaggcccatagggcgattcgcggcgaacggtattccgttcgagttcgcccccttattcctacccgtccgttgtggatttacctttgcgccttagttggggctcccctgccgtttccctccgtaggttcccaaaaacgcggaggcacaaagtttgattcgtcgtgccaagtttttccggcaggcattaccaagattccaagtccgacacgcaatgattagcgcagacttagcctcgcttgaattgttgggtcgatgccaaatatacttgcacccttggttgcgctagggcgggattccatggaaaggcgcgaccctcacaacgaaaattgcgcgttcgttacctaatagttggtccgcttggggtttcgtcccggcccccattggcagtgcaaggcgccaaacctctgaaagtacctacttcggcgtcccttccctggtgcgctcggcattgcgggacccattgggtcattggatcctcctgtgggttcattgggccacgcctttcgtgagctaacccataggcgggctctctttggagggacattcggccccaccgaccattttggccgcaccaccccgcgcagctgtccttattccttggggaccagtcggctcgaccattggttggtcctctg

SEQ ID NO: 417981 - DNA, 1503 bp, Homo Sapiens
  misc_feature (1275)..(1275): n is a, c, g, or t
agcggggtcgttcattatataagttttgtacctgtgtgaactgaggtaagttacatcagcgtatgacactctgtggtaactgccaatgttgactaagagatgtatattcgccattgcttaggatagagttagagactggtggacgtgaacagtgctcctgggaaagtctaggaggtcggagatgtagtctttcgcatgtgcgctatagggaagatcagaagtttcgcggaggtgacacaggtgaaataaccgacgggccatgccgggatatatcgattggctgctggtaaatcgattggtcctagggagactaatgttgaagcctgggaaacgtaggtaattcgtctttaccgattcttacagggcccaggggtacacacctgttagctttgggaaccacaagtttaagggcagcgttcaagtgtgcccttttcgaaaccacaactttaggaagtccaaaggaaccacgttttgggagttcacgctttggggaaaaggctagataggagtttatattctcgggagcactttttaaacggaagtgaaactttccgtttttgagaaaacgagaactttagtgtgttccgagactttgttgtgtaggagcgcttggggagaatttcacacaattttgggggcccagcacacctttaaggcgaaggcaaaatgtcgccttttccaaggttattgtggggacgccaaggggttacgaaggtggttcccccccgttacacttgcgctgggggcgttttaacacgtggccgaacgcggtttcacaccgcggggggggcgttccccgcgttatatatcgcgggcggtgggtataaacttcgggcggccacacaaaagattttggtaacgcggttttttatagacgcccctgtggtggacacacaatcagggcaaaggggctctttataccaacggttctcttgttgtgtggagcgcccttatcacacaaagcgttttgtcgggcttataggtttctacaacgacagggctttttcgtgggagaccagagtttcaggcttcttggtgggttcacccagaaaacggggaagaaaaataggtgtccgctgggacagctatatataaagttttgtccgcgtggggggcgcccatggggaagcgcgatcccttgtgggcactgtcgacacgcagaagtgtacagatgagagacacaccccgccgaggaagagattttcagcaccgcttttgttggcccgggggtgttcttcttcatagaaaaaaagacctcctctgcgggtgggtgcnttaccatttagtggggcgccagccttctttaatatcaatcttaacagtgtgtccagtcgttctttttcacacccggagaggagcgttaaacttgtttgtgggcggccagaagagaagcacatagcttttaaaccccaagggttcggtattggagatttacgtcgtcggggctgtcaagaccaaaaatcgtttttgtggggtttccgcgcttagtggcgtaaaaccacc

SEQ ID NO: 417982 - DNA, 909 bp, Homo Sapiens
  misc_feature (645)..(658): n is a, c, g, or t
agcggagtgtggaggcccgagtctgggacacctgcacgttgtctacacaaggtgatcccagtccgaagtgcccgagacgcaggagataccgcggccgtacgctcctgggaacgcgcacgtatggaacgagctcccctgcgtctcccctagctcagaaatagcccgtcctctttcgctattacgctatccacgatgccggagggggcttacggttcagtgatggcgaaggattaacccactgtgcggaggagcggagggggcggggctggcgagaaggtggtgagaagaaggaacctggattgggccctccaatggccgtgggtaacacaccaaaccggggggcccattgtaagggggccgtaaaaggagacggcgggggaggccccgggcgccgtaacggcagacatgcccaggctccgtccacgccggggtctggggaccccagggcgaaccaccggctccccggggcgaagaggttgcactccacagggaggaagaagcgcagtgtggggcgcgggggcccttttcatgtttcccccagaactgtgggtccaaggcgggggggtaggaaccatccaggggcgagacttccccggtgtggacggggacaccttgtcggaacgacctgtgggtggttgtaccccnnnnnnnnnnnnnncaatacagccaggttcgtggggggagccgcaccccattttggttttggaaatccacggcgaggggaggttccccattgggtcttggacccgagcttggttgtgaactctaaattggaaccgtttatttcaccgggacaacccaggaatttgcggctttttggagcctgtggggccactccagaaaacattggtagtgggtaaacggtatggcgaaacggagtacgcggcaacgagggcaacaggaacttgg

SEQ ID NO: 417983 - DNA, 833 bp, Homo Sapiens
  misc_feature (354)..(354): n is a, c, g, or t
tcttgtcgtgcaggcggttcgccttgcaacccatgtaaatctgcctgaagtatacgccggatcatgctgcgataaagcgcgataaccctagctggttggggattaatactcgtgaataaacgaaggtgttgcctgcgtggacaaattaaacggcactttgtcagcgggtttaaatttcagctcaattttaggcgtggggggtgaattgtaaaggtgcctttgtcaatcttcgggcaaagtcaaggcaaggcaaatcggaattcctgaattgagtgtgtgaggttttgtctgggttttcccaagaaatctcgagttataccgcctttttatacaaactggcgccacaggttttgncgccctcaaaattaaaacctcgtttgtgggcttggtagacggccttcacgcagtcaacattgttggtgtctcaccacttgaagcatcggacggattggtttgtcacgagggttaaaagcccttggtgggggacacaattttataaaagagccacaaattaaaacccgggttaaataacaccggaagcctttgtggaaccaggtttttggcgacggagacttttggtgccgggtgtggggcattttatattttcacatcttttaaatattcctcctctttcccttgtgggaagagttttaaaagaaggttccattaaaattccttagaaatttcaattgccgcagaatttgtggagaggggaagtgcgcggaaagaaggccgggagaattgtgagatttcccccacagagggagaggctttttaacgatataaagagtgaaaggtgggaaaagttgggggggttttgaagacgggaaacg

SEQ ID NO: 417984 - DNA, 1115 bp, Homo Sapiens
agcggaggcgcgtgccggaagatgggctgctagacggtgagtctgctggggcgccctgagcgctgacctgagcggatcgaggacatctggccgacaaggcggaggacctgtgagtgtgatgcaggggtgtgctgatcacatgctgcaaggcgctgagggtacaagctggcaaagtggcgaggactacacgggtgatttagacgcagttccatagggggaagaggcggacttgcactcgttgtttgaatggccctcggaaacaatgggcgggatgccgaagagggtgcgtgcaaacggggacccaccgttttgctggacggagagacggcggcacaaagatcctggggccgcagcgaaccgtggcgtaatcgccactcgggggtggtccacccagacggggggggcgcaagggaggggaaagggacggtggcggcgccgattgtgcccacgagtcctaggaggataaagagaggcagctgccttggagaaacgcgcgatcgacaggagggacgaaacatacacgtggcgcgcgacatccgtggtgtgggttggtgaaaacctaattacttggggcgcaagagggccccgtaggaaaaaggtagggcgcacactcaccccgtttgtggagagcagagacgaaagtgagcgtgcgggggtgtaaataaggggcctaggggggataccccccttcgggcgtaagtagcccgcataggtacgaacccgtaggattggacagcacactttggagaagcggaggaggggcgcgttgccacaaggtccactaggtgacgattggaggggcggcaagtgggcaaaaccccttggatatagtgcgccaacggggctggtgtgtccctactttttaagagcgggcgggtttcaacgaccggaatgggccgaccggttggatcggtagcacgacattggtgggcccgcctgtgggcgaccattttggcgtgggaacatagtgattttctcctcctggtgtgggatgaggggtgggtaacagcaaccctggtgaaaggatgtaagaggagggcccctctgtcagttcggagtgcccccacagtgtgtgtccactgggagactccacgtactctgtgtgggatagggcc

SEQ ID NO: 417985 - DNA, 1395 bp, Homo Sapiens
  misc_feature (1372)..(1372): n is a, c, g, or t
agcgggtgtctcccgcccggtcccccctcgcccgagcgctgcatcgctgtgctccggcacgcgccgagtgtgcagcgctcgtgctaagctaagccggttgtttcctgtagaggcgcgactagggagtgatcaaaacgggaacaacgtcaggaacgtgacatgcaggaatggtgctcccggaagtcgtggcgcaagtacacgagggaggaaaacggcggcacaggaattagggcgcccaggcaatgttggaaccgtgcccaaaccggccaacagaaagggacgagaacggggtcacgcaatttgtggcctgttaaacttcaagcgccgcgttttggcgcccggagaagattgccgcacacccggtgattggagaagggcgcccgcgcgaaaggtgcccccacgtgcgtggccgcgtatagaggcggcacaaagctgagatgctgcccggggtcgatgggagcacaaaacgcgcaagtggaaatacccctctggaacgggtagtccaaggcggataccacccccaagttttagcggcccaatagacggccaatgtcgcggtatgagcaaacggacacgcggtggccctctcagaatgcggagagttaaccatggcgaaacgttccttcctgagggacggagaacggcggtgaacatgagcattttgaaaccacgggacatatgaacggaacgaaagctccgggaaatccggaagagttataagacccctgggcctttgtggtgcaacattgaaaagcccggcggggggcccattggccccaggcagataaggtaggaaggtctcataagggcgcaagagcaaatatcgcgtttgggtttgttgagagcatttcggtgcccatttaaagaaacttgtttagtgcgacacttgtttgtgtcccaattttggaagatttctgggcgcttgggagatatggccgccaattttgatataagcttccccgttaggaaatattgttgcgacaatagtagaggtctttgggtcgtccgcgcaggtttaaagggagagctatttaccccaggcttcggacaagcgaaactagagtatggttcgcaactccgccccaagaaagttacggttagattgtcacgtttcgagcgcctctgttttgtacacggcggaagttggcgagaggcgcaccaagatggacactgttgtgtgtcacaacaaagacacacgttggtttgtacaccccttcgaatagatgcgttgtgggtgacgaccaaattttgtgggggagtaacctcctctaagatatagagcccgtaggcccccttccatagtaagatcgcggtagaaggaagatattactcggagagcgagagtttgttttctggaaagacgccaaacaangggcacgttggcagcaccaccat

SEQ ID NO: 417986 - DNA, 920 bp, Homo Sapiens
agcgggtgtgtcgcgaccgctcccccgtcgccctgtgcgctgctcgctgtggtccgtactcggtccgagtttagggtcctgttaactatgcgacggctggtcgttttccttcaggcgcgcacttagtagtatgaatcgggacacgtcatcacatgaagagattgtgctccggaagatcctaggaaggaccgcgaggaagaatccgctgcacagtgcttaaggccctgggccatgttggaccggtgtccagtcggttaccggatgcaaggggagactggacccaatttgggaactcaccctctttggggccggaagaaaggcgcccccgggtgtataaagggctgccgcgagattggtccacggggtttcgcataaagaggcaaaatttattacgccggaggtctcgggattaaggcggaagtgaaacccagttgcagcgttgtcagggatacaacctaagttgaccctcgacaagagctaatgggttaaagcgacaacgtggcaatcagattgagttagcagttgaaaactcctgatgcaaaaggggctcaaaccgtttgaagagggcacaaagagcacatcgccgaagatgtggaagatacaaacatggccttgtgacatgaaaccagggggggcacattcacgcaaagtaaagtctgaggacgacacaatcggttggttaagattgccccatgaaagctttggcagggtcccgtagaatttgcgctgtgaaagagcccattttaaagatcccgctgaaattgcccattgaggtctgtgggtatcgcacattatggagagtttaaaccgagtcgggaggacaattgtgatgtcgtcagcgggcgatatattagatggaaatagtaggctcttttcaccggggagattgtggctgtcaccgcaagcacgtggcgtccaag

SEQ ID NO: 417987 - DNA, 104 bp, Homo Sapiens
agcggagtggagggtctcccgagccggggcagaggaggcatccaaggaggtgtcgaatgccagagggccccgagttactaattaaggaagcagctgtggaaggc

SEQ ID NO: 417988 - DNA, 123 bp, Homo Sapiens
agcggggtgtgtccctatggggtacccgtctgtcctgaagctcttctcgctgtagtcgcggccttgcggcaagtcggcagtcattcaagcgcgcccttgagagtccccgaacagttgctccta

SEQ ID NO: 417989 - DNA, 1523 bp, Homo Sapiens
  misc_feature (484)..(484): n is a, c, g, or t
  misc_feature (582)..(582): n is a, c, g, or t
  misc_feature (1054)..(1054): n is a, c, g, or t
  misc_feature (1138)..(1138): n is a, c, g, or t
  misc_feature (1402)..(1402): n is a, c, g, or t
agcggatggccttgcgttgctgtcgccgcaggctactgatctattctcactccatcacactaggctcgcctctcacgtgctccgccgcctgtggtaatgaagaagaggtctggtttaggaccacatatgacgaccaattggaattctgcatagtgcaatacctcggcgctcagggccattccgggaaggctccctcgagagactgggcgctgagtcactcgcgcaaagcctggtgacgcctgccatttgtcccgggggcgcacttgaagtagcccccggagagtgatatcacccctgtgggggccccgtcgctggaaaaggggtcccagccagcagatggtggcgagtcaggggctaaagccagggacaccccgggtaacaaggcccaagattgggccccggaaatttgtctcacaggaataaaagcggtcctaccacttttggaaattgagtgggagcaccattcgacggccccgtttttaangccagcacattgcggggttaggcgctctaagcgagaagggaaaataaacagcaggctggatcatttcttgaggacaagacgattggagaaccgccatnttcgtggggccaacgaaacttcgtaattgctaggtaaacgcccccttggttaaaccccgtttggaccccgagggtgcgaacattggggggcggacacacttgtgtggggtccccccctttttccaccaaattagaaatgccctggggacgattcttcccttccttcacttggggaagaacagcaaaggggaagtacaatcgaaccaattatgcacctttttggaataccgtgggcacgcgaaaacgaaaaatgcggttagcccgcggcagcaagaatggaacaccgtgcgttgcccctctagggcggggtttgaatacaccccaattggggcgcctcgttattgaagctcccccagagaaaagtgtggcttcacgttagataggaaacccccgaccgagaagggggaagaacacagcccaaaacgccggccgagggagtatggcggggccacccacgctttgggaagagaanagaaatgggcgggcccctttgtttcgacacgctggttaacttacaaaagcgggacacaatgcgcggtagtgagcgtagcgaccntcacaaacttcgccttttatatgcagacacgggtttttatataattttccgcagaaaaaggtgggaccggcgagaacaccgcaaaggaatacaccgacaaattacgagagagagttatatacacagcagcacgctgcttctcacccaaacgagctttttaggaatgccagattggtcttgtccccacgttaaaccctgtggcggtggccgatatcagttgggggggacaatatttagcccacggttaacgagaaagtttcaacnggcggccccactttgttataagtacacagcgtttcagtacatgaacgcacaaaagagcccgctttttttgtaagattcccgtttggacggcccccacaaaatggagtatgagaacatcatc

SEQ ID NO: 417990 - DNA, 1266 bp, Homo Sapiens
agcgggttgtagagtgatggaaggccgcgcaagtttgcgtccttctgggctgcaaacggtgctccgcggctgcccggcgcgatagtcgcgcagtttaacgggagcgcagagagtcactgagtgctaacgtggagcatgcaccagccatcgttgcgggtttcgatcgagtgggacctggagggccagtcgaccccggaaatagccttccggagccataaggggagttaattcatgtgagcttgcgcattgagactggtggggattatccggaaggtggggcaaacacccctggagaggtttataccgaggctattgaggccaccagggtaagagacgctctccgaaacggacacgatttgattcgggcgcgaggatttgcaccccccgggaatatttgtggcccactccctcgcgaataaattttcgcgtggttatttacccacacgcgcgggcatgagtgaaccccgcgggaggcactcgccaggggcatatataggcggagccacctctgacctgatttgggctttcatggttacctgatgaaaacaccagggcctttttgcgcctttgtgtgtagagacccccatgaccgtttaacccaatcggtaagtggggtgcccccaaaagttcaaccgggaggacccagggcagtaaagcgcccccataaacagctgcctggaggagaggttccgcacatgccgaagttagactcggtagtaccccggaaggagcattgtatccgcggcaggaaatgcaacaggcggagacgcacggcacacaacccggggggccccgcacgtcgattaagagacccgcacctgtgttaataaccgcacgttactccggtgtgcagaagctaaaccatcggatgaagaaagtacctgtcgaggagttaatattccgggcgccagtggtttcatgtgagcaacgccacggagccctatgacgaatgctcatccccgggcatttttgtaacagccagagatgaggggacaaccttatttgtcacgtgttggcaggcaacccgtgtactgtgcggccacagtggactccttaagcaaagtgggtggtaccggccgcactcaccgataatggacacttttggaagtctcggagaaaaatgttcatccacatagcgggggggcgtgtgttgcgtaaaaagccgtccttagcttggccgttatgcttgtccctccaggcggtcttgtgctggggtgggacaaaactccacagcgcgcggagactatatattttgaccagcagcaa

SEQ ID NO: 417991 - DNA, 1483 bp, Homo Sapiens
  misc_feature (1013)..(1013): n is a, c, g, or t
  misc_feature (1287)..(1287): n is a, c, g, or t
agcggggttgtctaattgctgaatgccgccgaagtacgtgaagtagtgcctgcacggcgatgaacgacagcatgctcgccgtacctaactgtccgtccgctgtggcccagcaaggaaggatcagggatgacgacgcggaaacgtgaagaaccaagtgacagtgtctgccaaggtagtcgaccttagcgaggtcaggccgactccaggaagcatccatcgtacatagggcgccttgatgcacattgctggaaacatccaggtgggaactgggtgcccattatcccagggggcttggagatgcccgtggaaggggaaccaccaccaagtgtgggcgccgcgcacggggaaaaaagggcgcgctcggaaacgagtcgccgggaattaaagggcgagaatgcggagagacaccgcgtgggagacccgcgccaagacttggacgacggaaatgtttgccggccgagatatcacagcggtgcggagacattaggggaattgtaccgggaaggacacaccgggaggggcgacaatagagccgggccaagtggtcatagacggtcgagggagcagcaaaaataaggcctgactgcgcacaatccaaagcaagggacacatggaatgcccggcagattggggtgcaaggacactgagtcaagtccaagcataagggaaccccttggtttggcccgttttggccccacccaggtgttgccacaccgcgcggggtggaccacaaagttgttgaggttgggcgcataccccaaaaaaacgggaatcgcgcctggaggaggttgtctcactcccaacagttgcggcagaaaaaacagtgacgaggctccagccaccgcaaagaacggccctgtgaaatatcgcgggcagggaaagcaaaacaggcgtggctgctcgccgaggcgaaacaaagaaataagggacgattccgcacggagaggcacgatttggaagcaccccaagatggggccccggtttgggaatgggatagccccccagcaaggcgngaacttggcgcgatgtgccattagacaaaggtaacctgccgtcacacaggtggtgaagaataagcgccgagtggccgggcgaacaatgggtggcgccccccacgtgtttcgtgcaaaagaggagaaacacgcccagggcaacatgttgggccacaaatgtgcgcatctcccgaagggtcggacacaagggggaacaggggccacacgcccaaggtgcgaaaatgtcgaaaacgtgtaacgcggtggcaaaggaggatacccgagaaaggcggtnagtggaaccacacagcaagagagatccgcggaagagacgggacagagatttttatgcgagaacaggcggcatacgtggcccaaacacgattcttgtagggtcggctgggtgtgacacccacggtacagcggtggcgggagacgaacccaggggaggcgaatatatttcacgcacgagttaaacgataatttcccaa

SEQ ID NO: 417992 - DNA, 881 bp, Homo Sapiens
agcggggggaagggggcgcgggcaactgcagtatggcgcccaaaatctactgtggttcggcgcagcggatcaggcgactcgggtctatgtgctggcctgagtgagcaagcctcccggtctctgctactgagagacgagtgtatgatgtgtacggtggagccagagtatggggtaggaggtgtacttcgatactgataaatagttagaagtgcggaacggtaatagtgatttgcctttggaagcaaatgtgttggtcaacgaatttggagagagagggggccaatgtggataaggatgatttaactttcgtatagtatgatggaggagcacatatagtgtaggagaagagtaatggcgttcaagtaaacaagtgagggggatatatagcgcagataataatcgtcggtcggtgggtgggaacaaccatttggtgaaatgaacatagtggaggcatagaaataattgttatcacacaccaagaaggggtggacaaatagtgtaacgataatgtcgaagattattataaggagaagttatagccactgtgtgtaacttatgggagcgacaaaaattgttgtgatacactctaggagatgtctccatcggtggccacgaacatcattacaacacatagatagtacgtggggggcacagtgaaagcacatgatgatagattaatcaccaaggtggtgtacaccaacgggcgttttaagtaagacacccgcccaatgagtaacacaacatgtcaggagggagacaaggggtcgactggtgatctagtcaaactgcccacgacaagcagggcgttatccattattaggttgatcgcccgttactatctcacgccgtaccccactagttgagttagatatcacaatcac

SEQ ID NO: 417993 - DNA, 1424 bp, Homo Sapiens
  misc_feature (1038)..(1038): n is a, c, g, or t
  misc_feature (1254)..(1254): n is a, c, g, or t
agcggggttttgaagagactgtatgttgttatatgacagctttgagaggggttcgtggggcagtgtgggtaattgtgtacagatatacaacacgcgttagcgttggcatcatggtgaatggactgtgcaagactgctgtcttataatcactaacgatgcatctcatatggtcagcaatgggtcgtcagaaagccgaatatggctgtggaactgtaggatagatttacgcatgaaaagtatgactgagatgactatttatttggtggccccctggtaaggaaactctgacttccaaaggtgctgaggaggtgcggacagcgaagcagactccaaagtgctagtgtcacgaaacccaagaggggacggaacaggtaagggagtgcgtgggaaatgcacctggtgaggtagggtataggcacacttagcgaggggagggcatccgaagagaaaattccatcttggagggggagagagggaaacgcatcaaagatccgcgtgaggtggatattaacccacaacatttgaaagggagttgacgcccaaagaggaggcggccgattgaataacttataacctatggggagggtgaaggtaggtgggttggcgggaaacttttaaaacccttaaagttgtcaccccacttattccatattgagagagggaagtggacgttcttttgaggtaaataccagattcttacgtggagaatcaacttattttaaagtgatgcgtattaacttaattcggtgagaagttgcgctatgggtgaaaattagaggtcttggtttgggttaaccatagctaaatatttactgttagacgcattacggttgtaccgcagaagcattaaacgagaacacactggttggtggtgaccccacagcgtggtcaagggttgacccacgggaagccaaacgtatcccatcagtagctgaaccggcgcgaagttattcaggagaagcaataggcaccggtgataaataaaggaccacaaattctcacaggggaactcgggagagagctcgcaaaattctcttnacaatagcaattcgggcgagattagagacatcttcccaacggcgcaactttgctcatttttacgaacgagggggcgccttatggatacagggcggaaaataccccctaaaggattagagatataaacagttgcccaaagaaacttttaatagatgcacgccggcatttggcaacctcatacgaccggtgttagatcatattctgtgcgcacctagnttgaatacgccaacgacgaaatgtcatttccttcctgggggtagagcattaacaacacgcgacacacacaaccacacagggcacctgcagctccatttatgatagcgacatgtgcgcggaacactatatgtactgataggcgcttgtggcatgtcgcacatggagcaaga

SEQ ID NO: 417994 - DNA, 942 bp, Homo Sapiens
  misc_feature (922)..(922): n is a, c, g, or t
agcggggtggagcctttgtggctggtgtggctgtgccgttgctccgtgctgtggttgtcacttaatgtcgagatgcctgaggaagccgaggcgctggagcaaccggtgcaggaggaggagcgtgacgacgctacgacctgatgacggataacttgtccgggtggagatgtcattgactccatccagtacgtttctgtactcggaaccaaagaagagctcgcctaagaatacgcgtcattacgaagttccaatcgaatgcgtttggagtccattccctggcattcaatcgggacgggaccagaatgcccagtttccacggttcagcattattttgtgggacacggcagcttgcagataatttgtactgtttaataggccgtgaaaccacaaagaagaaattcgtttacgtactttcacatttatttggcggggattacctgggaagtaatgccgggaggcgagtacacaagagcggtggaagtgtgtagaacctccacttgtgaccccttgtgtgccacgttgggtccgggtcccgaagagtgcaccggggggaaaccgcagaaagagccctgggtgtcccacatttgtggccacattgagccattatttgatcgacagtgggcgtttgttgactggcacgggatataaactaggtttggttaagacctgcacaatggggagaccccctgcgggttacagggagacttgcacaccggagtagtggtgtcagaaaatttttcaggttgtccagtgttaattgtgtgacgcggtgattgtgcaccagttacgccgaggcatagggttttaaaagcatggtcgtgagaattcctgacgggacctaataaggccgccattgtgatgccggcgacagtgcgaagactgtgacgacagccgagattgttactggcgcttgtgcgaggangaagaaatctcgctacccgc

SEQ ID NO: 417995 - DNA, 1062 bp, Homo Sapiens
  misc_feature (1021)..(1021): n is a, c, g, or t
agcgggtgtgtcccgcccggtctccccgttgccctgggctctgctcgctgaggtccggccaggcgccagacgttgacaactcattgctgaggttgcggcgctaaggagtcccggacgtcgtcgactccggagtgagcaaatcggggagaacgcgggaggactcgacacggataggggctcccagcgagtcagagtgagtgtcccgaggacggaaacggacgcacagacacagagtctcatgaaatgtggaccagtggcacaacgggtgaacaaatggacctagtggcacggggccacacaaagttggggtgacataatcagcgcgtgaagacgaccgaagaaagaccgaccacgagaagtggagcatagcgcccgcctggagaatggccacaggggggggtcgctactgacgcgccacacgctgaaatgagccagaggggccacggcagaaaaagaggctgacgggaaaataccttgggggcggagataacggagtagcagcgacataaattagaacgagcggaactaaacaagcaatataggcagatgagaaaacacaccagtggaccagcacaggaactgagagaacgaagacacagaacgctccttagtggagacaagggaggaaaggacggagaacaaccgaggtgaagaaacaatgccccgagttgagagagtaagaagcacggacgttgcgcacacaagaccagggggggcgagtggctccaccaaaatttacgtcggtcgacggacggaacgatcaactcttgatgttgtgagagaaactggctcgtgagagaaactttttgggaaagacctctttcagatcagtaattaatgagcgcagggtgagtaggagcgccatttgattgattctccttcggacagttgccccatcagaggatgtggtgactgtcccaccataaagaggaagtttacatttaaacacggcgggcggaaaagaaatgaagggtatccgcctccggctcgaatatgaagtgtaagtaatagtgtagtcagntttcgtttgcaaacaaggagagtaaggataggtgacccctg

SEQ ID NO: 417996 - DNA, 1116 bp, Homo Sapiens
aggcgggttgcgtcactaacgtcggcacgtatcgctggcgtcgggactccgagccggcggagccgcgtgtcgcgcgtcgctgtcggctttcggcgtcgtggctcgcctacgcgcaagagatgccatcaggtagcgttaagtccaagtcccagagttagtgtccagtttagagatgttcccggagggcagggaaagagggatgctgtcgcagcgatacctggggtaggagacagcagcgggaatcccagaagtcgccaggagggccacaggatgcgaagatttgagcaagttaccctggtgtcagcgggaccagacaagatagaagctcccgcctctcaagaaggaagccggcgagcttttcaacgcagttgatgagaagcgtggcggccttggcccgcagcagacgagtagagagccccctcgcgaagaggagcgtacaggggaagcaccctttgtggcagacctcggatcatcgtgttagcgagggatggtaagaggcagcgccgggggcacggggtaggacgtaatccccggcgcagtgtgcgttcgaaaagcagcccccttttgaagaccagcatgttcacaacaccagggagggcagatgggggcaaaaactatcctcgcgcagaagaccaaggtgacgagagcccccaggagtagaaccgcagagagccacaagatgggtcgaaaaggggaggagaatcaccaaggagcggccccagaagattttggagcaccgcgagatcacagtggagggaccacgggaagaggacaacgcttgtcgactccgggtccttcctcatggggggcaccgcgactggagagttcccccccagggcatttgcagagcgcgggggagaacggcgagcacagtggcgtgatagtgcaagctcagcgtgtggccccccgtggaggagcgagccttaaccttcgagggctgagataagtctgtgcgaaacacccagtattcaaaagagtccgggaggatttcaacccggcatagaagcagccggagagacttctcccaggggttattgtcataaaggccaggtaatttgagaggaagcttgccgtaggaagagaaattctctactatagatccatccgagacctcgg

SEQ ID NO: 417997 - DNA, 1299 bp, Homo Sapiens
  misc_feature (768)..(768): n is a, c, g, or t
agcggattagctaaccatgtgggtgtttatctgacttgacggtggcggtccctctgcccgatgcttccctggcgtggtagggaatgttggctcagcaaccgagtagcgtgcccaacgggcgagagatagggcacgaacacgtggaagtcaagcgtactaattctgagaatgaacaggagcaatacctctcgaacggctaagcctgcggatcaatagcgcgggggccaaatgtcgctttaccggcgccggtgaggggtaggggtgttccctttgcctccaatcttgcccgtcgatagtgggcgccctgggtatgtgtgcgccctggggcgtcctaggatcattgtgtggagagtttgttgtgggcccccgcgttacccacctttctccatgcatgctgcgaattgcgtggcgtaagtccaggctgtgttctcctaggaagagaattaggagggggcgcgttgcattcgggaataggggcggagcgctatgggaacgacttcctaccaagtgtggatgggcccccagggaccatttgtgggagtacagacaacgactggctaaagaggattggtggaaaccggctcctcttgtaagccagacgccatttgctggtcgacctagaaggttggtttcccacagccttcggtgtaattcatacatacatttaataaagtaagtccgtcgggggtacgccgtccttccgtagaggccgataaacataagtggcatccaaaatgagaggacgttgtggggccgccatattttaanttactttcgaccatagatagggggtgccttgcaaaaaatagtttgcggtcagagttgacgcaccccctagggagtttgcaacctttgtttgaagtaacacaccattgtggggaagccccccacggtggcgtcctattggaagacctaccatatggtggtaaggaacaagcagcggcaaggcaggccgttagaactagcggggaaagcctgtcgtcttgtgttagaggagctagaagaacacctgtggtttaactaatttgcccccgtttttggtcggactttgagagtggctgcagtcaacaaaggagggcacacccttgtgggcgctcttgggggtggttgggggcgtcctttggatcaccagaaggggatggcactctagggagcccccctacaaaatagaccttgtgtgttggcaaacatagtccggggtgttcctcaaggtaccacagagggggcccgaaaaaaaggcaaggggttcctcagagagagaaacaagaggggagacaaccaatatatttcctcctgaaa

SEQ ID NO: 417998 - DNA, 1124 bp, Homo Sapiens
agcgggttgtttgccgccggctcccccctcgctgcagggcgctgctcgggctgcaccagcactcgggccgagctgtcgggttcggcgccaagaaacgccgtgctgtcggcctgcgcttgacgtacgccagtgcatgagttgctctacacgcggagccttcgtcggggcaccgatgtacgatgccttcccggacattcttgcccgtgtgcccgcggggcactggccggggtggccttgttccccctgttggggggggcagggccacagttgtgtgagggaacggaggattattagggtcacacatttggcacagcacgtcaagcagccattttggagtgggtaggacatggtcctcccgggtgttcgcaatagggcaccccgccaaggcgggcacagggcgacccggggtaggcaccaacgatggaagcagacaaaatgtgttcgcaacatgtttgccgataggaaatccatgtgcaagacgggtgaggggagagggcaaacttggtgccgacaaacgagggcagacgtcaccacgacctacagggggttaccattgtgaaggagattaccactgggggagggcctcgtgccccaaaaggggggaacctggggggacagcacaggggaggaaatctgttagaaaggaagggtgaaaatggccgcctggaccgaaccaaaaggggggctacccacgaaaatgaaaagtccccagaggcccacatatgggaggcgaaaaaacacgcaatagaaaagctcaagcacagagtcctgggagaagagggcggagaaaagagactgagagttccaccattgggccaatagacaggaagagcccaaaagggagagacagtaacacggggccgaaggacattggggtgtgtagaaacccccccaaaatactactttgaacgatgaagacggtcattaaccaggaagtttgacgtccaaagaactttttggcgctagagaattggttttaccagaaatagttggcgccacatatacgtttgcaaggaggatcgctagaaaaccgcggggtacggtataaattacatctggggacattctggaggaaggttccgaaggcgctataacgagagaacccccaggaggcgttttcacaa

SEQ ID NO: 417999 - DNA, 1515 bp, Homo Sapiens
  misc_feature (824)..(824): n is a, c, g, or t
agcgggtgtgcgtatgccctgatgcgagacgcagccggtgatctctgctcccggtgcatactaggcgcgcttataatgtctaccggggtgattgtaagtagggcctgtttgactcctggtatactaaagagagatcgactacgggatagcgtcctcggacaccaggatacaggagagctcagctgaaagagaggggcgggaccagggcgccaaagggcgtaggaccgtgacaatcttcctggggacaaagtgcccagtaaagagcgactgtgggacccacgcggaaccgtggtgtgaaccctggcgcatgaaggataagctgtgacacagcggtcttgggggcaggatagtaccccgagaactgtttttcccaggacagtgttcctcagttggagacttaggaggacgataaatagacgggaggttataagacgacacggccgcgcgggtgcatgaaacgtattattggcagaaggaggaggcttcctgtaaaagaattgcgaagcttctggccgtccacttggtatgttcgacgaggggcgtgctgttgtacctgttaagacgatgaaatactgcgcgcgaactagatggatgccatcgagaagaaccacaacgacgcgcagaaagcttcgtacgaagaggagaggtgcagtatatttctatcgagagaattgtggcggaagaggcggccgcaaaacgatggggggcggcgcggcgcaacaagcacaaacgagggcgctcgtcgggaaggaccgcaaacgaagggcgccataggaatatggagacacacgctgaccggggtgccgtttagaagcaccaccccntgcaagagagctgcgttggccgagatagccacgtcctaggttggtcgaacaagagagagcggcgttcccccaagagggtcaacaccgtaagtatagcatccgggcagggaagtcgcaaggcgaagtggaggccggcattaattactctcacaacggggagccggagacaggaaccgaattcgaggaggacacccacttgatccacaaagcgctcgtttgcgaggaaaaccttgttttgtggtgagaccacataacttgtgggcgcctcaatagttgagggtacacacaaagagaatgaggggcgccctgtaaataattacgaaagtgaatagagcctcgcccgtaatggtttctagggtcccgaccaatacataacaaaacactaggggggattttttgcccagccaaagcagtggggggaacccccaggggacagaatagaaggggcgcagggggatggtagccaacacttagagagacggagggggcgagcagcgcgtggagagaaaacacattggtgtctgggttgagagcaaccacattcaatacagagagagaggcgcagataaaatattatcgacggcgccggtcacttggtgaagtagtgtggtgacggacaacacatagaggggggtgtgcgacgcagacgaaaatctgcgcctccgcggccggcatcaaatctgcagcgagt

SEQ ID NO: 418000 - DNA, 773 bp, Homo Sapiens
agcggggaggtagcccatatgcagctactgcaataatcaaggtgaaaatgggggtgataagaaggggccatattctgaatctgttttgaggctagagccaacagaatcacagccagaccagatataggatgttagggaagtaacagggacaacatcagattttttggtctgaacaatgaaagatgaagcttccatctgcgatgagagagaaggactgggagaaaagagcccgggtttgggggaaggagtcatcacggatctcacgttttgggacagggttgaacatccgagtgagatattgtgtgtacaaaatatgggaagtgtgacactgtgttaactcacggcgaggatggggaaactctgtgtcaccacggtcacgggggggacaggcaacgggctgggagatcatgtcggggacatttcagcaggatgagatacctgtgccactctggggagagacagaggagaacgacatttgaagcacggagtgaaagttcagatccacagtcagtctgaggcacctttcatccaagagctggggttggggtggctcccgagagttccacgaactttgttggcacacaggaggcacgagggtcacatatctgtgcccaccgtggggtgagtggcgatcctcagagatggggctcgacttttttcctgtgttaccgcattaccggctgtacgattgactgtgagaaccggtaccttgttgtggaaactgcgaactggcgcatggttcacatgcccagggatgtccctttttgtacccc

SEQ ID NO: 418001 - DNA, 1104 bp, Homo Sapiens
agcgggggttgtggctctgggtgtccccgctcggccggggctctgcgcgctgaggtcccggccacggcgccgacgcgggccgagtgccttgctggggcttgcgggtcgagtgtcccggtggcgcctcgggagcgagagatcggggagaacgcacgaagcacgggcaacggatgaggtccccaagcaaataaggggacttgcacagaggagaacgaccgcagagcatacagatctcacggcatgtggtccacggggcgccacagcggaacacaggcaggaggacaagggcgccaaaatggctgatgcagacgggtttagaagccgcagaagaaggaccacgtaatgagagctgaccaggcggaagggtccaccggggggcaacctaagggccaacgatgtgagtgcacagagtctcgggggtaatagaagagagagcaaaacctgcgggagacaaaccaatgaagccgatttaccgagactaagagacatttgggaggagaaacgacccagggaggaacagagtggtatgaaaaacgaagcgaaatacaatgaggggggaagaggacgtacatagagtacgagaaccagctggaagaacaatccctgaagggagtagaaaaggacagccaggtgcgcgaaaacaagagggggggcagcacgccaagtaggtggcggaacaggacaaaacgtctcgatagaaggaagcgacctgcaaacacatgggaagaccgtcctaggagatgaaccgacgtgtaggaggcacatgacaggctggcaagtgccctgaaagaagggtgtcccccacaaaggagggaattaaaggccggcagaagaatagcgccgcgataaataggaaagaaagtgacgaagaaggccacggaatagaatagcaccccacaatagtttcacaaacagcagttgaaacctggatgaactaggtgagcacaagacggggcgatgaatcccaaatgaaatgggacccacacatagagtgacagcaagaataagaaggagaatggggaagaacaaccactggcatcaaaacaaaatggggggaaccaccccaacacactaagcgacacatcgtgagagttgaccccatca

SEQ ID NO: 418002 - DNA, 766 bp, Homo Sapiens
agcgggtgggtctctggtcgatgcaccagtcgccggtctttgtgcgtcaggatcgctggtgtgacttgtgggaggcactagggcaaagtggagagagtccaggttgactctgggaccatgaccatatggttgtcgctggtgtcttcttgcgcggcggcacgcttgggtgatttcctccggtattaaaccgtcggttcagcacggcagccacttgtcagggaatggtgtttttcgcggtgtgaggagcctgaggtatgtttgggtgcggactttgcggtggtggcccgtggttccagggggggcgacttgccgtatttccttgtctgccggggctgttgtcggttgccatcggagatagagtgctcgaggagttactcctgggggtgctcaggggttgagagcctggggcgtagaacttgggcgttagctaggccatgccagttaatatcgcgtaggatggggcgcctgtagggcgatggatagagagagcaccgccggggggcggattccttcctagcggggggggatttggggcgttttgtgccgtcctaaagaagtgcgtagattgggggcgcggttcgaagtacttcgtgggacggcgtttagacaacgggtttggcagtggagtatttgcgcgacagtttgggtagtgcgccaccgacgaggtatttggcgtttgtgctccaacgttcggcggtgttggcgcctgttgtggtcccccttggtgttcagtttgtatggccgattttgtaccccgggggggcgt

SEQ ID NO: 418003 - DNA, 1105 bp, Homo Sapiens
agcgggtgtgtcctgccgttccccctcgccctgagcgcgctccgtgtgctccgtgctcgctccgagttgacgcctcgctgcctagtagctattcgccggctcgtcaggtctgttccctggcagtcgcaacctcactgagttgatgaatcgggagacatcgtcaaaacgtgaagagatagtgccccgagtctaggaggactccgggagaaaacgcgtgaacgaaagggcccgggtgtggacgggcccactgtgccaaactgacgaagaaagggtggcactttggggaacatctcgcgagtattgggcgtgagattctgccctgtttgaagatggcgcctgtaaagtgcgacgaggttgccctcgatgggcgcatggttgaattagccgggtgtgcttgcagtaatttgttggatgggagaccattttttgcttgttaagaaagacgacaagttgatccgcgaactaaaagcaagaagtcggtggagaaaacaaaaaaggtggcgctctggacgtggggggtaccacctgcggaacttccccgccgcaaggggggaaaacgttgagagggaatgaggaagacccccgaaattgaaggtgagcacatcgcctgtcaatatgaaagccgggcggggatgccggcaagatacaagatccgaggagaacattatccttgttgtagagcatctgccttaaacacttttggcaacctttccattgattgcgctgttgaagagacccatttttgattccccgcgaaaagtgtccattggaggaggggacttccctcactttaggggcgccttaaatgtcgacttggggagaaccaactgatggaggtcgcaaatgcccccgccattattcagttaaatgtgtgattccgacccatgtttttacaacgcgcaaactgggtagtgtgtcgcaccgtataacaacttgtgttcacagaaaaaccctgttttttatcccctggcatgtaaggctttgtgttccacaaccgactttgtgagagggggggagtcccctaagttttaaccctgtgggctcctttcccaaataatagctgggcggacaatttgctgggaggttgtgttttggaaaacccccc

SEQ ID NO: 418004 - DNA, 244 bp, Homo Sapiens
agcggagtaaccgcgactgagcgtggtcagtggacccgagggtggctggagcgcagatgagcctgaggatcgctgttgacgtcagaacacgcgagagcgcagggatcgtagcagcgcgtgggtagacaccagtgcgtagactggggacggctccctgcaagcgcgcctcgagggtactaccgaggggactgcccgtgtgagcacttcccagagagtagggcaggctgctgcagggggcccccgt

SEQ ID NO: 418005 - DNA, 1270 bp, Homo Sapiens
  misc_feature (948)..(948): n is a, c, g, or t
agcgggtgtcgtggctctggatggccgtagtgctgtgctctgctggctgaatccgagcaggagcagacgacgtgaccaggcgccacgttcaggagccggtcaggctggcggccgagcagtacctgagaatgtgcaccatctggtggctggagaagatcggggagacacgaggagacacgtagaacccggtaagagccccagcggagtaagaggagttcaacatagtagaacgactcagagaaaccagagtctcagcatagttgacagaagatggccgcaatcgtcgtgacaacataggcactggaggcacggcggacgcccacaaggttcgcttcaggtaaaaagcgcgggggaagaaggccttagggagcacacgaccaacggtaatgtggacctgggccctgggcttgaaagagattacccacgaagtgggggttgcctcactcagaggggccagcactgcctgttcaggcgacagaggagatccaccggggggcattaaatggccggaggcgacactatatacagcactttggttgggggaagcacaaaacgaggtaggcacgcactaaattagacccgggcagcgaaaggacgcccgtatggcgagaggagacggaagccaccacctgagggtgaaccacagcacattggaggggaagaaaacggcaggacacgctacacttgatggcgaacgaacgggagtgaaaggcggtgaccacaacgaggagggtcgaatgagacaatgtcctcgaagtcggtaaagaaagagagcgaacatacgtgatgcagcacaggaaggtacaggagggggggagaggcaaaccacgctagaattggtcaggatccgtacatgcatgtaacgtgacggagtcaacgcactttccgattgtgtgggaccatgtgccctatgttaagaaacccatgttggatagtcccgttgcgaantagcaacacgagacgtctgtgatgaaaggcacacccactgtagtttggcatggtcgttgtgcacacagttctcccgtagaaaacagtggcgtttgtcgcccacgctaaagtggggggtgttacattgacccgggggcaggaaagaaagttacgcacgcctcggcctaaaatatcatgcaaatggatatgcgactatgctattcacttgcgagattgaatgggtcaccccatcatattatgtgtacatcacaccgttttttgaacgctttgcgtgcgacagcttctgtgttgtatcaccagggtgtgtgtgtatattccccta

SEQ ID NO: 418006 - DNA, 1088 bp, Homo Sapiens
agcgggtgtggtcgctctggttcccgccgcttgcgttgagctctgctcgctggtccggccggggggcagaacgcggaacgcggtcacttcttgaccgcgatcatgctggcgggcgagtagtcccgagaggcgcgccctcggggctgagaaatcgggagacacgacagatcacgtggaacgaaagggcccccgcgaagatagaggggagttcaccatgggagaaacgcgtcacagaacgacagagtctcagtacgtagtggacccagggcgcgaaccgtgtggacaacattgggacggaggacccgggcgccaaagatgcgcggagataaacagcgtggttggaggcggtctagaaagagcgcgcgctcggaatgttagcagcgactgggaaaagatgcgccgagggtggtcgccactcagggacaacacgcggtaggtgccgccgagatcctgcggcgataaataggggagcgagcacatacccttggtgggggagctaagaggtgcagcattaattagacgaggtccactaaaggaggcagtttgggaggaaaagaaacgaccacgggggaacaccagccagtggagggtacacgtaagacgccacgaaaggtacatccgtgggcacaccgcggtaagaaggcggccataacaaagcacgtcgatgatagcacttcccggaagatttgaaagacaatagacgcagatacctgtgcacacagaaatcttggggggagagagtatccactaaatggtgtcgcgcgggaggacgacagccacctacctgtgattgtgaagacaccgtccgctttttaaagccttttggagacactccttcgacatagaaatcgtagcgctgtttatgtcgcccattagtttgaatcgcgctgaacacgtcgcactgaaagtagtgggggcttcgccacactaagtgaagggttacactaacagggggcgagaaaaaagtagagacagtccgcgcggagaaatatcgtaggaaagaagtagcagctgtttgtccctggacgttgtatggagcccctcggaatattttctcgcaagacaccttgttttaaccatggtaggga

SEQ ID NO: 418007 - DNA, 993 bp, Homo Sapiens
  misc_feature (521)..(736): n is a, c, g, or t
agcgggggtgtcgttagctgagttgggtggtgtgtgccatgctgcgcagacggcggacagctcgagcccaatgtgtcagttgcacagagctgggtagtgagtcgaagatactgtgacccccggaagaaccattagaagacgagatctactcgggacgcaagacagatgaccggcggacacacctgagcactgggccaccgggagacggcgctcaaagctggagacaggctcagaagtaaacccggaggcaaaaaagtcgccaagaggcgccccggaagacaaggagagacagacccgcatgaagaaaagaacaccacagagcagaaaatggtcagaacaggagggaggagacacaggctataggagaagaggagggatcacacaaataagagaggcgacgcgagacagaaggagccagaaacaaacaagcttgcagtacaacaaaaaaaggagaagctgaaggcacacgaaagcgagaaaaagcaatcagaagaaacacacagagaaaaaccaacaggagnnnnnnnnnnnnnnnnnnnnnnnnnnnnnnnnnnnnnnnnnnnnnnnnnnnnnnnnnnnnnnnnnnnnnnnnnnnnnnnnnnnnnnnnnnnnnnnnnnnnnnnnnnnnnnnnnnnnnnnnnnnnnnnnnnnnnnnnnnnnnnnnnnnnnnnnnnnnnnnnnnnnnnnnnnnnnnnnnnnnnnnnnnnnnnnnnnnnnnnnnnnnnnnnnnnnnnnnacaccgtaaagagcagatgaagcggaaagacaccaaagcacaacacctggaaaagaaagaaacagccaacatgccagaacaaaaaggagcaagaagggaaggaggaaaaaacggagcaacgaagaagaagaaacaaaaaacgacagcaaacaaaaggcaacaaaggggaaacatacacacgaaagcgcaacacccataggcacagacgagaaaagatacatacacccccagaactatcacatgcatcaacaacacac

SEQ ID NO: 418008 - DNA, 1006 bp, Homo Sapiens
  misc_feature (905)..(905): n is a, c, g, or t
agcgggtgggtctgcgtcacccgtccccgtcccccggtaccataatcaccttattcttcttgatgagggaacctgttatcaaccgacagaagttgagggtacaggcctgcctcataatccgtacagcacgtgaacctgtgaagtggacgagcgcgaggcatccccgggaaggcaggagcgaggtcacaacggcatactgggagctgaaaagctacaagaaagatgccacaacaaggagatcctcaaaagaagacgctggaagggtgccagattacgtggccaaatgcctggggaatgcggccccaagggcgcggaagaagagccgaagcgtgaggggcaccaaggagagggcgccaacccttccgccggggagcaccgcccgcagagagtgcgacacagagagcatgcccgtgggagggggccacaatggccgaaagaggcaccggatgagcggcgagcattgggaggacccccgagaaacaacctttggaggcccaacaataggggttagcacagcaagatttggtgaaccccgcgacgaggggccgcgagtaccaacgaagagaaagcaaaacacgtgaggatgaccaaagaacaggagtgtccacaaattacagaaacacacatacgccgaggggattagccaaaacagacgtgcggaagaaagcgacatggggaaacacaaaccgggaggaagtagcgcccacatgggggagggccccagcacctcgggacagcaagaggagggagggtcgccggcagaaagtgacgtacgacgggacggtataccaacggtccgcttgaaagcgttgcagtccctgcgaacgctttataagcagacgacgccgacggaaataatacccaaggggagaccgagcgaagagccatatattgcagtaaacctntggcagataagtgcagcggtactcccctctggtaatggagaagagaagagcgggctagtgcgacagaagaagtaaagccggcccccaagaattaccaaaaa

SEQ ID NO: 418009 - DNA, 1203 bp, Homo Sapiens
agcgggtgtggagaccgttggtaggcaggcacgcagtagggggcgtaccgtccgtgcagcgtttggacgtgtcctctgtccaatcctccgcgggagcgacgctcggtcgaactgtgtcgtccagtcaaccttagtgccaaggatccccgcgaacgattggatcgactagtggagaccagggaaggaccgtggtggacgcatgaagcgtagtaagtgctcaatacgactctcttgtacgggaccctgcggaggacagcaatgtaggagggcggaaagctcgcacgttgacgccaattgaccgagcaagttgcctgcgtccagtagccttcacgtgtccgcatggtgagaacagctagcgtttccgggtccaccaggctggagacgatggatgggaacagaagattagtatctcctgtaaaggccccagtttttgttagcatcactcgccggaacaaggggaattctttttagcccgtccacacggaagagcccgagatgggaaaacagagatggtgctgcgagcggccagcatttctcccagaactcgaggagatgaaagagccagtttgaggaagcgcgagcttattattttcgagtcagcagacagtcttgtgggtagccggaagcagacgagcggtattaggttgaagaaagaacaaggcgaaagcagagcgtaacacggagcccatacagcatgagacgtttcttttcggcggtgatcagaggaagaaacacccttagataaacctcggtaggagagagaccgggtgaagagagcccctaaagcaagggggagggcgaaacaaagttccactaggccattgtggaaagtacgaagttcggtagggaaaggcgctcaggaaagcattccaggggagatctccaccgtgtgagggtgaaacccctataggggccacggtttaaataaagccttggacgctattgtgagcgcaaaatgtagagcctttgtcaggaaggataggctgtggccctgttagagaccgaggaaagcgagtatgggacacaattagtgacgaaggaagatccccaagggggcggtaaaggggctctacccagggacagaagtattggaccccttggtggagtcccactttgttagagtttcttgagaccacaccgggtgtgtgggcgcctaagacatatcacgggtagagccccccggacaagtggacttaacgcaca

SEQ ID NO: 418010 - DNA, 1479 bp, Homo Sapiens
  misc_feature (978)..(978): n is a, c, g, or t
agcggactacgtgaggggaggcttccctcccacaggaactcacacctgtgggcaggaagccgggaggcccgccccctgcctgggttcctgcaggggaaggcgagggtggctggatagagcgtgccctgtagaggtggttgggcacggaggctgggcatggtgtggcacgctgcgcatgggtggaccgggagggagggcaagaatctgcggggggcgcccagatcacttccctccacggtttctcggtgactgggggcggggaacgagcgggaatgtggggcgtttggggaagaggcgagaaccctgtgttcgttccccacgattcccccgttattattcaagcccagcagggctattacaccgaggggtgccgcgaagaacaggggacaatttattcttcgaagtagagaaattttcgccctgggggttttaacaattacttttctttttaacaagaaaacaccggaagaaagcatttttggcaaaacacgacagtcgggaggtcgttatagtaggcgaccccgcgttccgcagaacaacaatttgaagccccctatttgtgtaagttgggccgtctctgcagaacagcacaggtagttgtggggcgaaccccccgaagtcggagatttaaggagttggcggatatatagatgtaccggtatttatataggtaccagtaatacggtggtaaatactcgttaccggcaagtagagaactttgtatgacaaggcggccttttttccttttttcctagaggagaacacacgacaggggtgcgcaccaagggcggtgttcccccctttttgtgaacacccccacgcggccgtttggaggaagagtcttcctgtgggaagtttggtggccgacaccgccgacaatttaacgcgttaaatttataggaacacgaggcagaaggcccacggcgcacacttttggggagtcgccccttatagtaggtaggcgcctcggagaagaangcccgcgaaaaaaacagggttatcccaacaagtgtgccgttgcggagaaaacactttcctaaaagagcaatttcccaacgcaaagcgaggtacctcaacaaacgattctccgacaggacgaagacgggcggctggacacacacaaccaggcgttaacaaagttctcggcgttttttcccccccttttgaaaaacttggcgggcggaagagttgggggcgaccagcccaccactcttagggttttggtagacccccccacatggagaaggaggcagaacccacatagctgtgtgggggggcgcacagcacattaatttctcagacgacctgtgtgatgtccacccagataggcgtggccgtacccccctttttaagtttagttcttgaaaagtggaaccgctttttcacaaaaacacaacattatgataagaaggaggacagaagttatggagtataatatctcccgcggaaacgcacactctttggttaaggacccccgcg

SEQ ID NO: 418011 - DNA, 816 bp, Homo Sapiens
agcgggggccttcgccggcgccaggagtacgcggggtagctgcgcaacgtcggccctcgctagcgtgcccaggttcggcccgtaggcgtctggctgaccggagccacttcttcatgacgcgtccatggccggagactgcggggcgtcggcagttcaggcggggtacgtgcattgcatcgcgtcgggtgtgccttgtggtgttcctgagtgaaccagagggtcactgacctgggggctggaacagaccctgaatgaactgtttagcgggcgcgaattgtgagaagcgtcatttacccttcagatagtggatctgctgataaacgaagactgcgggaaaaaggttggagaatacgccaagttcccaacagagatgcgaacaaggtggtgcggcaaaggctaacaggactgaggaagaggtggaccaacatttggttatccccctgataaatttcaaataaagaagatgctcccgggaaaaacaagagggcgtggtacaaatcatcgggtaatacaagggttgaccacgggggtgcacaacattggttaacgcaacagagggaagatatgagaaacgtaattcgtgccgggctaaccaaaagacttatttggggcagagccagacaaaacatcgggtgggagtgcaaagggaacgtggtgacacaaggagggaggaattagaaggccttcccaccattgtaagaggaaacccaaaagagaaaataggttgctttacaaagaaagcgggtgcgtcataagggggcgtatggggagaataattacaaaattaaggaagaaaatgaggagaaaaacacttta

SEQ ID NO: 418012 - DNA, 1288 bp, Homo Sapiens
agcggggggtagagggaggaaggctcctgacgtcccggctgcgtgtggccctgcgaaagccttaggcccctgccctggacgccggcggatgagccgaggtgcgactacggaacactggagagattgagccctgccgcggtcatccctggcaataactggcgcctggtgaaggcgttgcgagaagtggctgtggaggaagactgtggggcctttcttccatggcagggagcgcgcggagaaacgaggagggctgcaagctattcctgcaatgcccggtggtgctagaggccacagcgttttggtgccacagggagtgtttgctgcggagcagtggccattagcattggtgggtatatcgggagcgaccctattgtgttcacgggtgaccaccttggaggacagaagcgagaggaagaaccacacggtgcacaggacgaaatggataattgagagcactagcagggagacggaaaagagaagcacttgtcaagcttattaggagcgggacaaaatgggctggctgaccaaacaacaggggacggcatagacacgcgttgaagcagggaggccccacaattcttaccaccaagagaatgaaacaagttggccaaaccgggaaagaccaaagagggacccacaaaaggggagaatcgaggaagtgcacaccgacttgtgagggagaagtagccaccagcacaccaaagggtggacttgcgagaagaacgcacgggaaggatgttccgaccaccaaaaaaatacgtgtgggagcaacactaacaagggggggatacatcgcacacaacagaacgaaggaggggcgcagaataaagaacacaacgaggagtgcggtgggagagaaacgaaacagagataggaaaaaaaaccaaggggcagtgaggtattggccccacctcacgtgtgggggataagaaacgcccacacgggaaaggagggcgcacactagagtgactacccatcgtaggggagcctttatgagatgaaaaccttgtgggcgcccccgtagtgtagagaagcgggttccacaaccaacaagcatgggggtttggcaagagatagatacaccagcgaggtaattaggacagcccaatatggaagggagacccatggaaggagcggggtgaagaccagcgccagaaatgataagtagagcaccaaaacacaattggcccattaaaaaaagtaaggggagaaaaaacaaagaagattttacccaagagagcgccccagtaatagtagcaaaataatatctcccacaagaaggcaatat

SEQ ID NO: 418013 - DNA, 672 bp, Homo Sapiens
  misc_feature (440)..(440): n is a, c, g, or t
agcgggctgtcctcctgaggtctcgtcctccataccccgacctcctccctcttggggtatcgtgtgtgctggtcttgaatgcctgcggggcctgccctatgtctctcttattgccacgtcctgctctctgcgtactggctgccctcgtcctagtggcctgcgtgcccctgaaacgacgctcttctggcaacgtgtacacacatagctggcaaactgctacttatgaagatggtctaccaagctgtctgtgaagacaccagctgcaactcgttctggtcatcccatcgatttagatatccttatacagtagtgtagatctagcatgacatactctaggctgacgatactcttggtgtagtagtgcaattaaaagctcgtatggttgagaatagtgctcgcttgcaactgcatggagagttccgagtcaaagtattcctctnagtgcgcggattatcttgatgtcgacgccacttggttcggccaatatgatagttggatgctgcgttaggtgtcatgtcatgactgaatcatttttccttttacctgtgttttggaaccaggactgaggcacgttcgccggactttactgacctcaacgtgacctagttacttatcgctcgtcttcattcaacctactgcctgagacctattctgtcctcggcatgcacctcc

SEQ ID NO: 418014 - DNA, 1119 bp, Homo Sapiens
  misc_feature (323)..(323): n is a, c, g, or t
  misc_feature (333)..(333): n is a, c, g, or t
  misc_feature (340)..(340): n is a, c, g, or t
  misc_feature (342)..(342): n is a, c, g, or t
  misc_feature (458)..(458): n is a, c, g, or t
  misc_feature (483)..(483): n is a, c, g, or t
  misc_feature (534)..(534): n is a, c, g, or t
  misc_feature (536)..(536): n is a, c, g, or t
  misc_feature (543)..(544): n is a, c, g, or t
  misc_feature (551)..(551): n is a, c, g, or t
  misc_feature (583)..(584): n is a, c, g, or t
  misc_feature (613)..(613): n is a, c, g, or t
  misc_feature (717)..(717): n is a, c, g, or t
agcggagtacctccgggatttatacagagctgaggtgctccatataacagaatcgaatatcttgcattctagtaagaggatgtccattctcgcgtgtacccagattttcactcctctaatagaaatctggtgttaacacacaccataccagctctgctcaatctcatagaacaacgtatcgtcgaaaggttggcacgagagaagctggtagcgcaaaagtgggtgccttgccagggatcgatcgcatcctcaggtgatctctggagtcgtcactatagtcatgcattactatttacagcttcgtcgtggttttcattccatancatgtatgcncataagntncaccaatctcacttccagttcgccacatgggttcacacgtggcacgtgaagcgatacacgtatgcaggcacgtatttgcagggcgaacacactatcacgggaggcgagcaaccctntgagagcatatgctaggtggcatantggcaatgcatgcggtgtacgatgggtatctggagacacaatgcgactacngncaccaannacacacnctttatgcgtcctagattgaaatatgcccccnnttacaagtaccatattagaatctacgttntcggatttggggggaattgaaccagaggagcttaagctgtgggtaagtcggccccaatctggggacagtggattgaattatagcagtggacgatgtaagacagnggtaagtaattctcgacgaatctctggactgttctgtggtgtagaataacactttagggaatagtctcacggtttattttcaccagttgaaatcacgccagttgggttaagaggactacaactatttatcggacaacacgacagtccacaggccagtttgagtcaggcaatagacaaataggctggaaggttcccccaggtgaggacaagggtattgttccattcgttcttcctttctcccgttttccgttccattaaatgtaaaaacgaatttattccagtttacctaagttccaatggtgggcaacaggaaaaggaactgccatgaggattgggcggtattacacgaagaaaaggggcttaccttcaatattggatttgtgcagggtggacacctctccg

SEQ ID NO: 418015 - DNA, 786 bp, Homo Sapiens
agcggagcgggcagacgagcagagagcgggccgacatcttgagatccgtacagtgcccgggccggccagagcagggggccgaggacaccaggtctgtcctcataggcgactggggccgcggcagactgatctgccgccgatgatctggaggcttattcactctactaatctagcaaggagtggaggtgctcatcttcccgaagtctaccgacgatgacgactcggcgagtgaacgctacgttggaatgctcattgtcgaggttcaatcgttgatccagtgaccccgggcagtcagcgtgcgacagcgccctgatctagcaagcatcgtctcgacgacacagcattcttccacagcttagatgcggtcctacatcagtttggtctggacacgtcacgtgcacctaagacagatactgctcaaacaggcgttgccactgggtcgttcgatattcactctattaacgacctgtgtgtgtacctgtgcattcgtgctgccttatcattcgggcaacgtatcacgctgatggaattgacagtcaacgacacagaattttgctcgcttcagtactattcgagtcctgcctgggacgtgacgtacttcttacgatcatctgtcgggctttacccccaaacaagccaactttgccctgatggaacgagagccgccggcttgaaaaaacgcgtttcattctagctgcacagcaccgggacagttcaaccggaggttcacgcaattcacgatcatacacggacacgagcgagttgtacctgcattcgacccatccc

SEQ ID NO: 418016 - DNA, 843 bp, Homo Sapiens
agcggagtccgaagaaggaggctgggagagaccacggtatccttccacgctgaatcaacagtctgccacaaagcagactatccagccggctacaattggagtcagagtccccccagacctgggcttgtctagagtgctgtgcaagcatgtctggctagcgggcccccttttgcttccctggtgtccacctggattgtgttccttctggggtggcgactgtactgtggctgtggacatgtaagcccctcactggcacagaaagagcgtaacttgagaccgtattactccaatcaacgtaccaagacgtatggagtatctcatcagatgctgatccatgcgcttccaggtatgtcatctatggaacttgcctctttcttcttcctttatgggtgccctccatgctggctgagggcgttctacgctcaccggcgcaagtccaggcgagatcatttgtgcgacgtacccagaccaccgatcgtgctggcatagggcccttgagcgtcaaccgagttaacagaggcgagccatgacatagggcagggggctacccaggacggcccagaccagtcaagggctcactttctttctcgctacgactgggttggtgttcacttagcttttggagtaagacatgtccttagggaccactcctccgacacagtatctcgtcgtgcgcatcacccttatgccccttgtagcgccgttggtggttgtgcctcccttggggtgcttttggcccgtgcctctttgcctgttgccgctgtgttaccagtgtaagctctcaaactacccttgggacccaccctgaccaggatcctattggccctccccgcagctaggacc

SEQ ID NO: 418017 - DNA, 704 bp, Homo Sapiens
agcgggttgaacaagatgggtgcggtggatctgacttatgctccggtctcgatcctgaacacgcagacgcatctccccgctgttggcttcctccccacaacccgttcccgtctctcagactctctggttatatgcttttgccgctgctgctgctgttatccatgtgactgctgtccgtgcgtatgtgtcaggatgtcgcccggggtgtctgcccgtctgccacctcagtcatgttctaccgactgaaattcctgacctattctcctgtctggatcggttctgtccccatcctatattgacttccggtgcacgattactattgcgaactggctatcgactggactcgtgatggagcctgtgctgcggcgttgcgctgttccctcacattggccagcttcctgcgtgcatgcaagctgcgtggggcttataatgccccgtgttgatactcccctgtccagatccggagttcaaacgaaatgggtgcttctcgagcaactgacatggctgcaatgcgaatacgatggaactcaatatactagattcaaggctggctgtgcgatccttgctgaatagactactcatgactagagagcatgtaacgtggactcgcttaagggaagaaccacgtaactcacttgccgaaagagcatggatcggaatgatcaaccgcgcgaaagtgggttccgttcatgaaggaaaaatcc

SEQ ID NO: 418018 - DNA, 560 bp, Homo Sapiens
  misc_feature (64)..(88): n is a, c, g, or t
  misc_feature (210)..(250): n is a, c, g, or t
  misc_feature (370)..(430): n is a, c, g, or t
tacatacaaaaacaggggccggggccaaagggctgggtctcctcgtttcccagggggggaattnnnnnnnnnnnnnnnnnnnnnnnnnggagaaatttgtgctccaaggcccaaccgagattctgacttttctcctttggccgttgctcatcttcgctccacgtgcgccccgcagctgtccgaagctacctctttgttagctcacggaannnnnnnnnnnnnnnnnnnnnnnnnnnnnnnnnnnnnnnnntgggattttggacaatatctccttgtttgatcaatctcctcggacgtctttgccctcctcctcgtattattcccggcccggggggagacttactcccttgatgtatctttctcttaccgnnnnnnnnnnnnnnnnnnnnnnnnnnnnnnnnnnnnnnnnnnnnnnnnnnnnnnnnnnnnngtgttggggttttataggtgctagaggtactgggttattacacacttccggtcgctcgccaggggcgccgatttgccttaaccttgagccctgttttcaagattcgttgaaacacattgtttccgcccct

SEQ ID NO: 418019 - DNA, 521 bp, Homo Sapiens
agcgggcggagccccgggaggcgcgcacgaaccacggcggtcaaccccgcgctctcgcgggcgtgcattcgttcactcgctcattcattcgccgccgccacactccccgagcgcgcccgttcgccgcgttgcggccaagatcctcccagacgtggattttagcaaacagcccgtgagattgcgcaacggccgggactggtgtggagcgggcgggcccggggcccgcatcccgcgggaccctcacacccgggacaaccaggatgatccacacgacatgatccgcacggaggaacgggccggcaggagcaagagccaccaccgagatcgaacgttcccggggaacccggaggggctgggaacacccagtgggaacagactgcccgaaggaagggcagccaattgggcggaaaagccataccaaccggagagaggtgaacaaagcgagagaaaggaaggcagcagacaggaggccggagtgacacaaacagggcgacaagacaaccaacaaggaaaggagtgca

SEQ ID NO: 418020 - DNA, 842 bp, Homo Sapiens
agcgggtgcgtagaggacgacatggataacaattcttgatgatgccaatgttctctaaactgtgtggcagtcgactctagcagggcttgcgttgctactaggcatcactagggcgtgaagtctgcgggttggataaggattcttgcaggaagacagattatatctggagtaatcggatagtatattagagattagtcagcctgagatggtctgcagtaaaatggaccggtgagtgtggggcgaatcggatacatgagaactatgtaattgttgtcattagaacgtgaacggatttgctgaggggagtagaagtgcgatggctcagccccatgtggcattgctagcccacatgttggccgtcgtcgcaacggtggtcatgaatcacggggattggtgcgcgtagtggatcgacgtcgtcgccatatatgcgcaatggccacgggactaggcagttcactgctcattgtgatgattcgcaaggtctgacgattccatgagggagagcgctcatgagggaagaagggtcgtggaatgccgagtgaatgtctcacagaatgtcgagacatagagacttcagtgagcgcaggagcgggacgtgcgagcccggtgacccgagttggtgagccattggccaaaccttggcatccaatggaattcgcttgggtagattgccattgagagcgttaacttagcgcacacattcggcaatttcacccaaagcctcacctcgtgagtcgtcagctggcgtaggccaactgggtaattcacgcccccaatgaagggggggccctgtgaatgaacgacggaagaggttgatttgtacatcacggccagggatacag

SEQ ID NO: 418021 - DNA, 674 bp, Homo Sapiens
agcgggtgcggtgtaggatgcttcacgaggtataatcctattcttattagcactaaacttgctaggctaattatcatgtttatcttctgtccagaccaggacaccgtctaggtccgtagaatatctttacatggaagcaagatacatctattactactttaccgactttaccccctttctttaattctgtataattctttgtactatatatcgattgtgtaaatgcttctagatgtcttcatcatgaaaatatcaactataatactttcatttagatttcacatttcatacctctgcgtataaaatgaaactttttaaattcaagtgaaatgcgatgactcttccctcgagatggaatacgttgataggtcaagcaaggtcctgttataggaattcactctagtcctagggatttatgcactaaagaaactactcttaaggatattctttggacaaacaagcatgaactaaaaagttgtcattgcactactgtttagaggacatacccgcacatatcccgtgttaatacctctacctcgataccataaattgttattgttgtattgtacattttggttcacacgtattgggcgcttatctagctttcttgccaaatgtgcacccagtgttgcgggcattgtttattctaactcaaacaactaaatctgtatgcc

SEQ ID NO: 418022 - DNA, 303 bp, Homo Sapiens
  misc_feature (104)..(188): n is a, c, g, or t
cgcagcctccgccattcccgggccggggggaccgcacagcgaggaactcgagcacgagcgcaccgcgacaccgcaacaaataaccacgaccaacaccgcacgcnnnnnnnnnnnnnnnnnnnnnnnnnnnnnnnnnnnnnnnnnnnnnnnnnnnnnnnnnnnnnnnnnnnnnnnnnnnnnnnnnnnnncgcacagaaagcggcacaaaacaacaacacagaagaagcaccgctaagagagcagagaaagaacgacaggagaaaaacaaaaagagagcggagaaacgcagaagcgtagacaagg

SEQ ID NO: 418023 - DNA, 736 bp, Homo Sapiens
ttttttcccgccctatctggggactgtgtaggaagagaggaagaacacgagagacagaggattgcattcatccgtatagcgttctctgaaagttatccgtaaactagcagggaccacgtcgaatgctggttgcagccctttacagaatcttgcacacaggaatattaaaacaataatgagatagacagacacatacacaacgccaagctccaccttcccgggccaggtttgtcgcctataaacgctgccctcttgaaccttatatattttcccagagagagagatgtcttatcgggggaaagcacaaatagttccacagcagtcactacagacgcaccgtgctgtggtcgcttcaggcgagtggtgttgaaccttggtacggtgaatcgggccatgcactctagcttcgtggcagggacgacttgtcctgagtggaatccatgcaggtgcgcatcttaacaaagcattgtgctggacggctcccggtgattgatgcatgcccggaggtgggccgaattccagtacgccgcggccacaacagcaccggagctagggagtagaatacccttgcgcgaggcaaatatggggactacccaaaccctcggtaacgggccagaatctggttccctatgcgggggaagttgccattcccggggtgcggaccgaattatgtctgccccggtaccatccgtgggcgttctgtttgcttgttggcgaacccccatctagcgccttc

SEQ ID NO: 418024 - DNA, 861 bp, Homo Sapiens
  misc_feature (308)..(308): n is a, c, g, or t
agcggaggacgatcacttcgggcagttgtggtgtcggggagccggctgcacgggtgcggataacgtggggtcttatcctcctgctcttccatgcgtatatcggacgtggtctcatacgcgttgctgcagtgctgttgcacgcggacatgaccatgcacgacgtaggatcacacggagcgcgcgtaacacacggtagactctggcagccccatgcgcactgcgttctctcccggtggccgctgatagaaccggcgcgcaagttgcctcaagactgacttagaggagagacgcagggagagcatccttangctcaccccaagtgtacctctgaggagtgggtgcgttgcgtcatgtttgccatacgtaccgggtcaccttcgcgtgccataaggaggcctcagaacctttatctgttgaagaccgcaacgcgaacggtaagaacacacgagtatcgtcgaccgcaagccagcctacttcgagtccagccaaatggaacacttctggaggccagcaacccccagagagaaaaacggagcgcatgtggactgggaatccgtgcgggaacacggccgtgattttgtccagttaagcagtctctgttgggcaacccgaacgaatggggtgaccccttcgtgcctgcgcaatttggggggccggagaaaaagatgttccctgggaagtcaccgcccctgcctgtgagagcagttttcggacctttccagaaccccccgtaatttgaaccgaaaggtacgttacaaatggggaacccaaggggcggccctttgtgcccccgttgaaagttagaccgttcaatagaatccttggtccccagggctgggttcgggaaaacaaggagggcct

SEQ ID NO: 418025 - DNA, 620 bp, Homo Sapiens
  misc_feature (462)..(472): n is a, c, g, or t
agcggttccctcatgtatatgatatttctcaatatttaaaattttttgaaaaaatatatgtgaatgacttaataatgaaatgttacagttaaatatttgagtttggaagaccacttcatgaagaggacagtccccttttccacccctccgtacccttagtcttgctctccaaatgcctctttagttaactgtctgacttttggtttttctggtatgtcacctttttatttctaaaaaccatatgcttatgccactatgaaatgtagacggtatctattgatttctggctacaacgaggatttactcccacacattattccctccttgtgtttctacccatattgtcttgtcacttttttcaattccttaagtaatcatttctccaacctcagaaaaatctacttaaacttccatttcttgttcttttaaacagaagactatttcttggagctcccctgctannnnnnnnnnnaaataaaaacattagcactcttacgcttccctccttttctccctctactttccaatctctaaatctaagtttatgttttccttaagtcagggttgatatgatgtctgtgttgtaatttgtctgtggtttatttttaaaaatagaaaaa

SEQ ID NO: 418026 - DNA, 649 bp, Homo Sapiens
agcggctctcggctccccgtgtccgccagctccgtagcactgttggctctccgaagcggggctgcacctgcgcctggtcgccgggtggttactcctatgcacgtctctggcaaagcctccaccacgcccatgtcgcgatcccttcgggttcgctgctgcatccaggctggcatcacctcacgggagttctgaccgttcgactcgcctgttgcgccgtgacagtccgtaagatcaccggctgtctgtgttcctctgtgtgtggccctgcagtcgccgtaccgtgtcatgcacgcaaccgtgaaggaaggaggagttccctgccgtccagcgctcggagctcacgagggccccctcgcgtgaaggtccagggctgtctgatcgccgccatggatgtgccatcgatcccgcgtctgccgagcgtccccacacgctgcaattgcacgacgccacgcttatggggtgcgccctctaagctccaccacctttcggcggaacccacaagactcctggacgccgtctccgttgcgccgcgtaagctgacatgcgtgggacgcatgcgcgacattccacacgcacgccacttggggctgtaaggacgcctgctgtggcttcccacggggactttcccactgtcccagggcacccttgc

SEQ ID NO: 418027 - DNA, 1474 bp, Homo Sapiens
  misc_feature (476)..(476): n is a, c, g, or t
  misc_feature (1232)..(1232): n is a, c, g, or t
agcggactgagccgtgtggattggtactgcttggttccgtgtgtctggagagcttgttggactgtgtctttcgtatctacttgagtcgtaaatgtcgcgaggcgcagtgagggcagggccgtgctgcggctcctgaatgttgcaggggcttccgggaaacacaactggcacgacgagaggtcgtgaactgacctgttatagagaatttctggcaattggtctaccagaggcttgtagcatgtttcagtaatgccacttgactggatggcgaaacagatcggccttagtccctaattgaccttccccattcttcgcactgtattgggctcgatacatattttggcttatacagcgagtcttgagatgggactttcatccactaagggaattgccgtgacctgggtatacttgtgttgtccacaacgcagttgaaacacgtacttttgcgaaaacgcaacattcaataagcgcgatcntccctagttggtgtcgttaaaatttatggcaaggagcacgaataagcccatttctcttgataattgactttgatactaggtcagggtcagtccggcaacttgcggttcgatacggttccccggtaaggtgggttggaatttatggtttcatcagctggttggaagatgggttcttggtccttttgagtgcttccaaaaaaccacgtgattgcttccgccaatttttttgcgggctttatgaccgggtaccgggggtgtcttcaattaagctgtaggggcccttatatgaggagttcgttcgttggagttgttgcctacttcctaaattgatttgggtaatttccctttttttatggggcaaggggttttacgtaggttgggccttaaccactgtaaatagacccaggtaaccaatttaagtttaatttaccccccctttgctgaagaattttggcttgggtaagttttaatccgcgaaggagaatttgcctttttgcaacttcctttttaatgttggagaagcgcggccttgggcatttttattaaaagggtaaatagcgcgccggcaacgttggggaaaggaacttttattttgtcgcgaagggtttgaagaatccaaaccaaattcctttgagatttttatccccccaagacaggggttaattaaaacgaaggggccctcgtctgccaagttggcaggcgttttttagcgacagtccggcggtacaatctaattaaaacacggttgggcgtcanagggtgtttcgccaaaaagcctctttttttgtggggtagaaagttgtgcgcacattttttgcgttatagggagcggtttataattatctaccctttggagaggtttggtttaaaggttctatctcaacggcgcttgtttaacaccgagttttgggcggtttaaaaacataaccgttattaaacaattctaacagcagaaggacaaagacagaggcgttatacaaacaagaagaagggaccga

SEQ ID NO: 418028 - DNA, 563 bp, Homo Sapiens
  misc_feature (60)..(97): n is a, c, g, or t
agcggagatctgcctctcgctgtgtttctccccgaggggtgcttgtggccctcgaggatnnnnnnnnnnnnnnnnnnnnnnnnnnnnnnnnnnnnnngcctgtggcacgggcagcgaggcccgaggacgtagcgacacgacgctgcaggacggcgaacagcgagaggacgcgcgctgatgcgcggtgagcccacgaacccaggaagcgaccggaggatagagccacgagtgcacacaccaaacgggagaccgatcaacgccacaatacggtgaagcacgcgcggtaggcgctcagggacacgatggaggtaccagacgggaagccagggccaggacacaaagagcccagtagaccacgagggaagggatcgcgtggagagatcatgcagaggggagcataagggcacgaaagcagtagcagtccacaagcgagaaaagcccgcaagaagggaagtgcgccaagcacaaggagagaaagggcaggaacggtacagccgaacgagatcggacgacagggggcagcggaacggtaagaaatgagacagggatcacgagggaaacgg

SEQ ID NO: 418029 - DNA, 984 bp, Homo Sapiens
tttcatggaccgggttttttaccgtggtcaggggcagtcgcaacagtcattatcaacgtgacactcactattgccgtgaaaggtcatacttgtcgtgaaccatggctccacatctggataacatacgggcagccgtacttcagcgtgagcccaaatacccaagcttaacgaggataccgcctctacaaccagtaggggtcacacgggacgacgaagaacccaggcgcgcgacgacatcagcagccacaccggggaaactaccacccccacataacgcaaccgccgccgacccccacagagacacgcgaagacaccacggagacacccagctgaacaggaacccgcaccgagggccgcccaagaggcgcaggcgaacagtggcaaacagcgacactgtacgaccactctgtgagggccgcacagaaggagagacaggtgaccccgagggggacatgacccagcggaatccgcgaggcggaaagtcacggaaccataggaagggtgcgaacgcggcgaaggaagaacagaggagcgaaacacgacaaggagtgcgcacccacggcacgagcggccaaccggacacgaaaaccccgagagataaccaagttgacgacgaagagacaggaagggcgcaaaaaaagaagaaagaaggtgacaacgaacgataagtggacaagcgaggcaaaccgtaggccacacagattggacacaacacgcaagacaaagtcgcgcagcagcagcgaaacacacgacgtgtgaacaaaagcagccgcacaccaatagcacacacgctggggaagccccgccgagagagggagacacaaacgaaggacaaactagcaaaaaggggcgaactacgctgagagaagccacaaacggacaagctgtacacacagaagcaaagccagagagacagaagaacaagcaaaaacatgcggcgcgcgccgacgcgagcaccactggcccagaaggcagcaccaacac

SEQ ID NO: 418030 - DNA, 761 bp, Homo Sapiens
agcgcggtggcgggccgggccgagagaccccagaaaggccccgatttccgcagacgaagaatcctgatggcaggcactctaatctcaggtggacatggagtgcaggtcccatgcgagccatcgtgcctgacgtgggtgctagcaacatgaccttgtgaatgtgatcctgcatagaagcctgtggagtggagccgtccacctccatagccttaggtaccgatggaatccatcttatggggcttggtccagcttgactctgggcaactggcaagctgctacctggtcgagcgaaccccttgatgcggtcccacgtcaggagatggaacagcaactagggatgaacagtcgagggcgcctgtgatcacttcactaccgaagatatacgtccgtgctcgagcaaggtgctctgaggcccctggacattgcagcacgtcccttcccctggaaaccaccctcccaaactgtggcccgttctgccagtccgactttctcgggacatggcggggcctaaataggcggcctttacagccgcatgggcaagtcatcgcacgggtaatcgcctcgatgagacgcttccttgggccatgtagcccttgggtatcctgggcgaatatggccgaaaccaattgactcctttcaccccttagggcggggccccctgagacatttgtggcattaacccaacctaccttcacaggaaacagcacacacggggggctagttagaaagcccactagacttggctccttaaccccttaata

SEQ ID NO: 418031 - DNA, 694 bp, Homo Sapiens
agcggatcttcccctttggtaagtgccactgaaccatactgagtatcgtcatggtgccacgctccggacgttgataccggataatcgtaagaataagaccgtacactacatgtatcgcttctgcctagataggtgtccccatgatgtccgataagatgtctggcaagctaaatctgatccctggtggtgctgcgattgaaatggcataaacgtgcgatgaggctatcacgcgatattgttgagcctacagtgtgtggtcacgattgaactactgaagtcacgcatgctcccatcctgtaaaagccccctgggaagggggcgtgggctccggactatgtaggtggaatgggacccccccaccttataccggcttatttccacctttgcggggaattataacattaccacggtggttgtggcctggcgcgccatggagagcgggcaacttttggggcgttttgtgttaaccactccaaaaatttcacatttctccccccgtgtttgagagggtttctgcgcaaaggtaatgttttctccacctaatccaacccaaccggttttttacccccaaaagctgaggtaacggaatttgcaacctcggcctacattatctgaaaaaccttaagacgtgtaaattgggttttaaggttacccctttgggatttgacttgtggagcctgtggcctttggtacg

SEQ ID NO: 418032 - DNA, 915 bp, Homo Sapiens
agcgggatcttgccatagtgtattccacgtagctctgctgagacggtgctcccgactctccctcgaggctgcacggtcgaatgcgtcccatggccaacgggtgcgcgcgggggtaacagggtggtccctcattcccgcgaggtgcgagaggcaccagtgccccacctgagagcaggcgcttgccctggacgccaggagcaatgagagctgggcgccacgggtgtgctgtcataggcttgcactgagtcccacacgaggttcctttcgtctgaactccggaatgggagcgtacggcgtcaagatgagcgacgtaacactatcgcttgtataactccgagtgagaggcaaggaggattggttggagaggaagttagccggaagttgaaaagcgtcagcctcgtcacccatatgcaccaggcggaactacagtatccgtgagcgatgaaacccgttgggagtgggcggtatggtttgacgtgaaaggcacttaggttgtgttccttgtaccttacccgtgggtgtacagaccctgccgtaccatgctggtggcttgtagcccttggtttggtgtccttggtggcaaagggcccacgggggatgggaaaccccctcttggaaaacaggtgtctttggcctaacgtggggtccgtacgtggggggcttaacgagggtgaagaaccaacgcttaaacacgggaacagcccgtggtaataagaacgcgcctgtgggacctttctccccttggcgttacccgctatcatgtgtggggcaagcattatatatggcgaacgttcctcggtaccataaagagataaggcttgtcccctggaccttggacagacacctctttggggacacaccgtcatataatctttggtatgggtgaaaaccaacaccgtgtgcacaaggtgttac

SEQ ID NO: 418033 - DNA, 1341 bp, Homo Sapiens
  misc_feature (244)..(244): n is a, c, g, or t
agcggattataccctatggcagcgcgggaaaatgagcctcggactgttccacgagcgtggcgtggaacgcgctggtagcagctgcgataattgaacaagctagcgcaaggaaggacattatcgctgtcatcgttgcgtggaagctaccggagactaggacttcatgtgtcgtatgcatgatagctacactcatagacggtcgacttttgatgggaacaagccgactttaaacagatagtggttngagcgctaatgcacaggcttagtcgaagcggaaaccactagcgtttggtgcctcacactagggaccaccttacacttgaaaagtcctaactccattgtttgccaagcattagacacatagaagacctgccccgctgtacagtgaacgtgggggcgacatcaaaaccataggctacaaggagcgtttaggactttcacgaacgcgtttaaaacacgcacttgtgttacgccttttcgcgtgggcaatgcacttacaaccgtgtgtagagcatctctgtagaccttggggtacgtgaaaaccttgcaggttcatgtaaaaaccgtcgggagataaccggaacgtcacggaagaaggcctctgccgtaagaagaacgttacaacatatctcccaacaactgtatttctactcgagaaccagggtaaggacatgcgcacccggttggctggtaatcgttgcgtaaggttgggagggattacacctgatagcttcgtgacaaatcaccatctttatttttaacccctatagaggcagcagttccacgttaggcgatacgcttccgttttggcgaaatatatgcatgtaaaagcctggtcggggccggcatagcgggttcaacacttattaagccaggtagagttagttctcccgttaatataatgtcccttatttatatgcgtagcgcggcccacccaatagagatttagttaggtaacgcacgggtgcaaatacgcggatacacctattggagatacacaagggttattatctagaccatagctcatattgggggccgctggtagttggctaaatgcttttatgccaaacgtgttgtgtcaaataagtagacctatagtccgtttgagcaactcgcaaaccgctcaacgacttaggtgagacgcacaaactcctgtagtagggtagcctacctaggctagtgtgggcaactgtctagtaccccttttaaacaaatgtattgagtccttcatatctaccaatgtaataaattggtccgagctacaccgtttaattggtcttctcaacaaacccgaacccggtgaaacacatgcggcgtaaccaccacagtgtaaccgtgctc

SEQ ID NO: 418034 - DNA, 1193 bp, Homo Sapiens
  misc_feature (1018)..(1018): n is a, c, g, or t
agcggggtgtcccctttgttcactccgtcggtccatactaataccgtgtgctgtcataatcaagcggagggagaacaccggagagcgctgcagctttatacagacaagcttactgtacatcctcgatgacttggtaagtgtggcgcccagcatcgcagatgttagttacggtgatctgtgcctttccttattccgtcttaggtggatagaatcattcctagggtctataacacgagattcaagcataaaccagagttattactctacttggcgctagtattccccacacgtactcgtgtccaagtgccactggacggaggtgaaggcctaaatatggggaggtgatcaatccctacctctctctctgaacgttagggaactcattagcattggtcctctctcgcctagtgtggacttttgatatgtactccaatgctacggctaagatcctaaccattttctttttacccagctttacccatggtcgaaggaatgcaacgccgtaagagacttaggtctaagatggcttatagcaagtacctcgctgggacattccgttggccgcttgaagctaagccccgaagttacgaacctcctgtgttggtccgttttagtctagagacttaccatatgtcccgttagcgcccatatcgtttattagcgcacagggtgcaaacctccataattttgtgtgaagccttgaatccctaaagctaggcgaactttgcaatcctttgctcagaagctttctagcgatttgaacccgctgcaataaagagtttatttgagcccaccgaccgagcctttgtggcgatgtccgaaacgtgggggccactggacgccgtttggtacgaggtcttataacggctgttacgtctatggtatatgtcgtttggattcaccgtagtctatatgggtatactacacaacgccgtatgcgaaacatatatgtttagccaacgagcttcttgtaagataaccacagtccgcttcctaatcgtgactttacctgacaacnccggtctatatatattcgctcactgtcccatggcgagttacttgtccactacgaggttaggaacacccgtcatggcgacccccattattgcgaacagtagttctcactgtgcttagcttacctcaggtgggcaaactcatcttcatgctaccttctatcgtgtggtgccccgcta

SEQ ID NO: 418035 - DNA, 1051 bp, Homo Sapiens
agcggattctccggtccatggctccgccgccagctacaggctatgctcccgcaccgtatactcctctgacgctggctcgaggacaggacagagagatgaggagcgagaaggggcgcagtctgtcatgacctgtgatatgatcagctatggccctgacgaagtaatacaatggcctctactgcatgtccattcatgctgtgtgacgatctggatcagtaccgaaccttgcacatagcatgatcatacagtcaccatagtaagagatgagctaacatgaaggcgagggcttagtactgtacagtaagattgcttaggagactccggcaagactggatggcaggaagctagtaggcgcacgtacgtgctctcaacagggtactccaagggacggtgtcgagaaccgttggttgagttacgatcacacagtttccagtgcgtccagtgagtatcttctgagaagcacgagtgatcgtgtgctgcaagagtcccagaaaattgatccttcagaccttagagtcgaattagatccttgggatcgcgccgttgagtacccaatcgataaatccgagagttgactcgagtgtgaaacctaaagaagaggcctaagagtattgagcacgaactactatggtgcacgatcgaccaccgttgcgagataggatggtctaaatccacctatgccacaagttcacgttatgagtgaataccatgtggatactgttaagcaatggatgagttcatattacgactacccttaggagagcagaaaagcgggttaagcctggtaggcatgcgacatggcgtcttttcctgattaaggtactcgaattgtgacctttgaaaacggtgttatcgagcataccgccttaaccctacttatggagaattcctaataggatatgaatcatagggctaaggatgggcgaacacttttggagtaaaactaatgcatcgagtatctcagcttacatgtggagtacaaacaggtgggatatcactagagaatgagcaagtcatatgtataccgtgagtgcgcattcccataccaagg

SEQ ID NO: 418036 - DNA, 866 bp, Homo Sapiens
agcggcgttttccccgttgggcagtgccggtgtagcaaccgtgacgtgtcgtcgagcggtcctgatgcgccgcggggttgtagcacgggaaccggtataagcggtgctgtccgccaccatgtggtcgacgttccatgctgaatgggagtccgcgtagcttgcgaatgatgtgctcaattcatccgtacccgtctgtcgcgtcgagcaggcttggacactcgtcttgggctagtacacacatctgttgcgcctacacaaggtgttcacactggagcatactgagtcccccgtgtgcctcatgcaagctcctggagcacgtaggcttgactggtaaatgtaggcctcgcgtatcccgttgccacttagggactagtagagtggtcgctcggtcatgctctggactagggttttgcccagtcgtctcctaggacgtcagagacttctcttcatcgcgcgttaccggcgggaagatttcacggcagaactccactttcgtagtgcttgtgacggttcatagaactggtacggcctgaaccaaaggcaaattaaattcgtgggtccgtgccgcgagccgcactgttatcctgtaccaaggttggaaaggagccgatacctaccatctgtagctctctacgtccgtatccccgttttcaagtttacgatacttccacgtttgtgccagtaggcatggaatgtcagccctctactacgtagtgcacgcatgcgcggcccggtggtactttgcacacgactttactcacaagactttgcatagcagaattgttctccacctgtgtgcaacctgtttcacaattggcggtccagtcttgcaatgcacattgacaagttccgtgattgagctatta

SEQ ID NO: 418037 - DNA, 790 bp, Homo Sapiens
agcggctcttcccctattgccactaccatagaaccaataactcaggattcgtcataggtccaggccgcttccggccgttgataccgtgaataggaaaaagtaagccgatcacactaccaattatcgacttctgactcgtagggtagtaccctacatagcgcaaagatgttcgcaataatcgaacctgaactagtcggtatgagtaaggcaaaacgatgcgcctaggacctcatacgactaatgttgactcacagtagatagtacactattgactatagatccagcagtcctaacttgcaagtccctcggacagggctggctctcagcatatattggttagctccacttataccttaaacgtaagggaataatacctgttgtggtcaggcggctaagagggaatatggtttgtactcaattactacccctgaaggtccaatggtttaacactaacacacgtatacccagcagtacggattacacggcgcgagtactgacgaactaaacacgtaattgctattaagttaccccttaagttaaactctaaggggaggtgcctcaggaaccaaatgcgtcaaagaagacctctgaggagtgcccttaaggcgcgacaccctgtaatagtaaaagtggagcccaaggttatatgatgacttgatacctaacttaaatcctttcttcacattatcgcaatcggagctttgagacgtctaataatcaaatattgtcacaacttatccagacgaactggcccattaaaattggaagaggggtaaaggggcaccgcacg

SEQ ID NO: 418038 - DNA, 1201 bp, Homo Sapiens
agcgggtggtcccctcttgcattgccgttgtgccatactgatacgtgttgcgctactaaagcctacggaggttgaagacggagaccgcttttagagtgtgactcgtcgcactcctgagctagcatccattcttagtaggggtcccaagccttgcgaacagattgttagtcgctaatctgatccctgtcttgtccgtctggatgaatgaaacagtgccatgaactagactacgacgtgttgagcctacagtgtgtgtttgcactatttgcgtcctgagtcaccatgtccatctgcaagtccctggacgagggtagctctaccatgtatggaaagaacgacgttatcctgttgaccctaggactagatcgcagtgtggctcgcggcttggagcgacattggggttgctacccaattatgttctcgtaagactgaaaggatttcacattacgcgcgtatcgacaggctgtacgattgaccggcacgaagcaacttctcgtagtcttgaggaaacgcttcggtggaactgggtcgaaggcttagaacccaagaggctagtatgaccgtcgtggggtcctatcgcccgtacgccggtttgttaccgacgtacataacgtttggtagcccagatctatacttttcatcatctttgtaagctatagatagctgaccgtgatgcctatgtttctacttgtatctctagcttccactcctatatgtgtgcgcatttaactatatactgtattgtgctgccccctatctaccgctgtgtgaagcctttcgtactgggacccccaattcggattaactttggcagaccctgttaacgtcttgtaacgcttaacgtccaatacttttcgtcgcaacgtggggcccattagtggcgtaccatccaccgtattgggtgcataccacctatgttttcgcccactcagacgtactggggtggtatccaaaacgtacttcctgaaagtgtgggtatacccttccgccgccgagtgtgtttcctcacgttagaacttctagcgtgcaagtatttactcacaaagataactacagcaacacactccccaagcgttggggacacacttacgccatactgctatcccatttgatggcgtccttcacaccgttccagttccgttgtagccacacacaccctatattcataagcggcattctcaatgacggcgcgaataaccac

SEQ ID NO: 418039 - DNA, 1145 bp, Homo Sapiens
agcgggtcgtttccccttcggcgtgcaactgaacaatactgatgtttgtcgtggtgctcgagctccggacgttgtaaacggataatcgcttaagaactatagtaccgtagcaccatactgtatcgcattcatgctagatagggtgtcccatgatggccaaagatgctgcagtatcgacctgcgtgtggattggatggcgaaacgtggactgagctatacgcaatgttgagccaacagtggtggtcccgatgaactactgagtcacgctgtccctactggacaagtcccttggaaagggcgagctccagacagtatggatagaccaacctataccgtatacgctagggatataatacaccttgttggtcgcgcatgacgacttgtggtcttatacccaataccttccgtagagtgcagggatttaccataaccaccgtataccaagctggatcgatttgacccgctccgcttgcaaacctataacgaagtgcattaagacatcccccttgtatggacattggaggagggccttgataaccaaggcggtctgtaggaacatttggtggttcttgagcgggcccttttttcaactggtaccacagtttggtggacgggttccctactctaaacatgtttgtactatatgtgtgagtcgtttgtggccaggttctatcttgtctgcgtactttccacttggcaacgtggcgcacctaatggaaacgtggattggtggccccctcccaattgatagtagaaaccattccaaaggagcccaatgctattaattggagcgcagttaaccgctataccaaaagaaaaagggccccgacaggagcatttggtgtcgcacgcaagcgcttggacaccttattttccaaacaggtttggaggttcccacctcggttcaaagcgggtgagaagccacacgcaagtttttctcccaattggcccatctggaaatttatccagaattacctacaaagaacatcagcccattttggaaacctggtttaaaaagggtatcctctttttaacgagctataaacatgagcccctttccgttttacccacgccgcccagatcaaaagagggtgtttaacaagcgcggggtataaaacaaactcaaccctcttgggtgatagaac

SEQ ID NO: 418040 - DNA, 512 bp, Homo Sapiens
agcggggatgaggagtgagaaagctactctaggtgcctgacgaattagggccgtaggaatgaatcctgatggcccgtgcagctcttatctcactgtgcgacatggactgccgggtccacattgcgacccgatcgtgccgtgactgttgggtgctatcgaacgtgactcttggcgatgtatcctgcgtagacagactgtgtggagcggagccgtccacatccaggccatggtcccagtctaactacctatagggggctggcacgactgactcctggcgcgtagaggcatagacttgcaagccatggagagcgaccgtggtttggtcccacgttcagagaaatgggtagtaccataagaggatgtactagttcggggcgcactgtgagaaagcgcactcccgagaatacgcgtgctgggaggtgcccgacgcccccgtgcaaattgcggaagtccctgtccttgtgaccacccttcgcaacgatggccccttcggcaggtcgccttccgaaact

SEQ ID NO: 418041 - DNA, 1070 bp, Homo Sapiens
agcggagcatgcgcctatgatgttcaagcgcggggacgagaaacccgtcgggagcctcatgctcttgcgacgtccgccagacggggtcgcgaccgagggatgctgagggagcaggtacgccgtgtgttgaccagtatagtgagagcactcgccctacaactgaggcgcgggacggtctttgggcagtggtcagcgtagaatgctgatacatggactaagtcgacgtcagtgttcaacaccccatgatggtatgctcaggcatcagatggcatcgtcagtcattgatcgcgaagcttgtctgctcggacgctgatggatcgggagcctatgcagcacgtctattgggagaactaactggtcgagtctgcgaatggagcatgagcacggttgctaccttgtgtcccaggtcccgattattgagtgtgaggactggctttccagtgtagtagtcattatcgtgggagcatgttgcttaagcacctaggatgaaatggatggaggtccttcattaatgtaggaaaatccggcgggtaccggccgagacacagaaataaaatccgctggactgggggaagacgaccagggcaaagcggggaaacgtgagtaggatattctacaaaggtgcgaacagtagagtacatacggagctgtcgattgcacttcttcagcgtaggaacgtgagattgtggtccttcaacccacttatgaactagggtggttttcaatgcgaagagtatccgactcacgttccttcacacatgacacttccacgtagggaggatgctcgttcgtatatttgcgaagtgtactaggtcctgtccacgtgacacgggtggcgaagccctggtgtctactataggtgcggcttgcattgatgacggcaacgtggtcgtgacaggattcctatgttccctggtgcatagttcagctctcgttactaactcccttatgggacttcaaaaatggaagaatttctgtcttgtggtggcaactccaggatatggagactgtctctgacactgctatccagtgaacgtcctttaggttatatcacgattatgagttgactc

SEQ ID NO: 418042 - DNA, 1297 bp, Homo Sapiens
  misc_feature (838)..(838): n is a, c, g, or t
agcggggcatgtcctccggcgtcgttatctctagcgcacctcgtccgggcttccgtcttccataagctgaaagatgagcgcaggccttgggctagtaaagtacgagactcaagtggtcatctctcaagcgatcctagtgcaagcgtggcaagcctacgttatcgagtacttgcgacgaagtagatctgcattgtgagtagccgctgacttcgtgcttgtggtcgttcacaagacggtgcatacttttacagcacgcctttgcctgggtggacgccccatgaggagttcgccttgttcgacatctttgagctcctttcgtaaatggaacgtgcctcacgttgaagaggcatacgctgtgtgatagaatgggatataggccacttcgacatgctactagggaggggaacgggatttgcaatctagccattgtctaggtgcaccaacggatacaacatcattatactctcacttgaccacgctctttgtcaccccagtgaagtcattttagtcaaagacgcaccataacttcgccagtgcggtgtctcactatggaaatcccaaatggatgaaccagaaatttaggaatctcaacaacggtagtaattgtccatctcgcaaggcatttggtcgaatatcggttatgacaagcgttaaggaaagaataaaaaaacctttggtggacgattgggtatcactcgggggcatatgttccacgcaaaaaaacctggtctcctaagtataactttaagggggttgaaggaggtttaggattcctccgcgcttttttgggcgtcctggtttcccttgctccgaggatatggcccatagggtttaggcnttcctgtttttagggtatacagcaaaattggaggaggggagtttacacaccaccccaccatagagataaacccctcttgtcacacacaccaaactcccagaacgattcggaaattaatcttccgggaggaccatttaggtggcgccaaacccctttctcctttgtaaataacccatttctaaaatgtcctccggtggagggcttcaaaagaagctttcaccaccgggaagatttggtgtccgttcaaaataagattgcggcctttcggcggtttccccaccttcatgtttgccacgctgtggcgtatatttcggtctccatcttgccacaccttttggttgtaccccaatggggggagcaacggttgccctttggggtaacccccaattttggttccaacaagggcggaaacaattgtgtgccaagtatggacacaattacagcgttttcctccccttg

SEQ ID NO: 418043 - DNA, 1019 bp, Homo Sapiens
agcggagcgtccgcttctgatttcaagcgcacggaagggagagaccgtcggagcctatgttctgcgcgttgacgactggggactggtaccagtttgctgacgttaggtagccctgttgatttgactggtatattcggaagccatgcgtcagaagtctgatcacgggtccgctgtctgctcgtcggacgcgttgaagctcggctcttggcttaagtacgccagatttaggacttaccactatgtagatcatcactagcgaatcgagaggccgtcgtcaccttgaatggcgtaggcctctggcatgagcgggaagtagttagaaattcggaagtatctcgtgtccaggtcgtctaattggtgcttactacctagggtaagtcgtgcatgcgccacactgctacagaccatgtcgtaatcatgcccgtaggacgtgatatgaatccttaccccaggagtaactatgacccggagtagacaagtgtcctgttcttaagatccattgagctgaacgctcttcctgggggactaacatggggagtgttgcgcgagctatccgaggacaagccggcgtgaaccggggcgacaaccgaccaagagacaacgcgtgcgaacccatggataaggggggccggacacgaactgtgcacagtgagtgcgagcggcccacaccaaggcaccatcaccagaagcgacctttaggatgagggcccgccagaaccgctggccggaaccaggggggtcaccgagcagaaagataccgagtcgcctttccagccccccggtgataccgtttgacgaagcgacgtcaaccgcttagcacgaacttggcgcagtgcataaggtagtagcatagtaggcaacggtggcctctctcaccgttataacctaatgcaggagaaggcgtcttgagtggactcagaagacattagaacatagcatgtattttacttgtgacacacttagcaaacgaggattaactccataaaggaacactaaagagctgtcaaacttcgtcttcc

SEQ ID NO: 418044 - DNA, 994 bp, Homo Sapiens
agcgggtgtaagtcctgtgtgctcgctgtggtgtgtcctagtgacggaccaccgagtgacaagagtcacgacatagatgcctagtcgagtgctcgatcgtagttcctgagtccgaccccgaatatatagtgttcaacaccgtcgagagccatccatgtgttgaaaaggacgctacattagtatccacggaagactatggaccatgactctgtgcagctcactgtgcctccaggatggttactgtcaaacgtctgactggctctcaatggacgcagctggtcgtgatcctggactccacggtccagtgggtgtttgcctgaatggcatcgaatagcaccatccagtagacccagcgtgagttgttgcatagatcgtgttgattcaagccgtgcgttactggagcgtcgtgccttcctttgggttgtttgcttcctagctatatcgcatttcagccgtgagaatcacttaattgactgactttgcaacgttcttacgttgccgaataaattgaactttgaattcgctttaaccccaaagtttgcgaaatgtcgcctgctgagaagacatagccagttcacctcgggagctcccttaaaggacgtttgttacgaaattactcagcagtcttgataaaaccgccgtacgcaaagtttgaacaaatacctagccaagatggcacatgttgtcgagaggaggacccgacacgtggagaggcaggcgctatcaatacctctgtgccgagacctttctctgggtaacggctgttagtattcccgcatcgatgcgcccattgtgaatccccccttcttctgagcaggttagagaacctagtcaggacagaggggtacaaccaccggtatgctccttaatacgagatgggacgaaacctttccaagagcgaaagggtcggggaccattgtcctaatttcttcttggtctacactaacgaggcaccattaacctttccaaggtctcgaaacgtaaacactcatcc

SEQ ID NO: 418045 - DNA, 815 bp, Homo Sapiens
agcggtgtgttaaaagtaagacattttagttctctgacaatctcatgggctcagtaagatgaaattcaagtgggatcatgtatgtacccagctcttggtagattctagagggaagaccagaagcatctgtggttctgtctgtccttgtctttcttggatggcttggctctgttaatctgccttcccggtccttgtttgaatgtaagctgaaagctcattccgtctgcttctctctgtgcttttgctttctgccggcaggacaagcaccttaatcctctagacctgcctgtcactgtaagtagcactgccatgtggaaagggccccagctcttgcaggtggggaagtcaaagctaggcaagaatctcatggtctgatctagatgttcagggcatgccaagacccagggaaaggttgtgtgctgtgaatctcctttgtcaggacacttagggaagtactgcagattagagtcacagaaaggattaagggggtacctgccccaggcagtgtggccccagccttctttataacttgcctttgcatgggtctgtagttcaactagggcagaccagactcagaaacagctcgtaactttgatctagacaataccatggatgcgtcaccttcttacttgctttagtggaagagaaaaggtatccgtgccctttttggactcttactaaaccgtgggaatccgaaaaggtttagacaaatcgaccaaagggaatttggatgctcatttctttcattaataggggagctctagcagagggtcagccttgccaagagaatgaccgggggattaggtggcttcccc

SEQ ID NO: 418046 - DNA, 410 bp, Homo Sapiens
agcggcttccgacagggccgcggacgcccgggcagccacggcggcggggccgggagggcgccggctcagccgccctttctcccgcgactacccgaacgacagcagacgagcacggcagaagtcagacgtgaccatcagagatccggcagaggagcggggtatgcatgagacgcagcggcagaccgagatgatccacgatccgtgggccattagagtagcatgctgcagaaccagaccggagagctgaattactcgcagtcatgcagactcaccacaggtcgtcaatgaaagaacgagatggacgaagaacagaacactcaaggggaacccgaagagccaggacaaggggaacccagtgacgcacagaatcatgaaaaaaatatgggatacacacagctatacagaagaga

SEQ ID NO: 418047 - DNA, 1004 bp, Homo Sapiens
  misc_feature (457)..(457): n is a, c, g, or t
agcggatttttcccctctgccggtgccgagaggaccagtcctgggtgcttgtccatggtcttggccgtgtgcacgcgctggtaagcgaggcaaagtgataaacgcataagagtggagccgccaaggacatgtctcgccatgtcctgtgtcggaaggaggtgaccgtgcctatgaactattcattgtgtcagtcagagagaacccagctgtgactggtggaaaagcgctaacgtctgtacgtccgtgagaccaatacgacgcctgttcgagtcgacatctaaggtgtgaacgacttggacttattgaatgccaccgtcattgcccatgattacattaaccgcgtgaaccgcgggggtcaccaagctaatggtatgcatcgcacagtttacacctgcatcgtcttcgaggaatacggtcccggtgttcgaattggcccttgataggccactggcgtctnttgacatcggatacgatagctcctgtagagctcgccagtgactttacactatgcgcccacggtttcactggagcagtcaggaaagcagcgtctgtgtatgacaattgaggtgactgccttcggcttcccttgattctacttgagggagtactgcaaccatgcggatgaatagcgctgtgggagctccgtgaatgtagccccctaatccctattgtggcgacaccagcatttgcaaggcgggttataccgcacattggaataagtttctctacgatggcattgggcctgctgtgcttcgctttccgaagttggtcacaaactgccggtgaactgtaccgatatgatggtgaggggatctgtgcctgctcatctcatgcgcatgatgagcgctccactgtaagctctccatacaatgcgacacggttatgttctaaaaccaggagaagaggtccaccgataccgtctatggtgtggccccaagagagggcatacattttctttacaaccctggttttgatccgggcgcttccgggggataactcacacc

SEQ ID NO: 418048 - DNA, 894 bp, Homo Sapiens
  misc_feature (747)..(747): n is a, c, g, or t
  misc_feature (774)..(774): n is a, c, g, or t
agcgggtcgtcccctttggcagtgccactgaaccatacctgagtagtcgtcatgggccagcgctccggaggttgataaacggataatgtaaagagtaagaccgtagcacctacggtatcgcatcatgcctagaaggggtcccatagatggcaaagatgtctagcagtaattcgaccctgtcgtgtgcgtatgagaggcagaaacagtggcatgaggctatcacagcgatatgttgagccacgaatggatgtccacgatggcgtactgatcacgcatgctcctcatgcaagtccctggaagggtgagctcagcatgtatggatagaccacattaacgtagcacatggattatcacatggtggtgcgcatagaggcttggcttgacacagtctcccggagtgcaggttcacatacccgttaccaagcggtacgattgcaccgcagtcgaacctggacgagtgcttagtaccgttggtgacttggaggagctttgaccagcgctgaggacctcggtggtcttagcgggcgcatgattgatacacagttgccatagattgtgagactgatcatactaatcatgtgtaatatatcggcatagtcgcaaggtcagtgtgtccgagtacgatcgatgcacctaagagagagtggcgcacgcacggttgaactacagggcccatgctgattgggcctgacgtgacgtacaatagtgcgcgaggaggctatggggcacacagggtggaacattgtntccagggttgggtaccagccgtccaangagtaagctcccgcagtttgcacagtggctaggagatataaccaagcataagcgagacatggctagtagcaagttacatcggtcttgtgaacgaccaaattggcttcgtgtacgcgccca

SEQ ID NO: 418049 - DNA, 669 bp, Homo Sapiens
agcggggtgtgcccttgggtgctgccgctgaaccatactggggcttgttatggtgccgagctctcggcggtagaagccggaatgcgattaaagattagaccgatacaccgacatgtatcgcattcattgctggtgggtgtaccagtgactggcctaagatgctacagtagatcgacctgcgtcttaggtggaagatggcgaaagctgtgttcgttgagcctatactgcgtctggtgagcgcaacagtggttggtctggactgggcatatgagtgcaactcatgtccatctgcaatgtccctggaaggggtagcttcagaatgtatatgatgactccctcttataagcgctatgctgggatatacgtaccgggtgatcgcgcacctgagggactggtgtatctcatttacttccgtgatgtcgacggttactcttacccgctttccatcgaagatttccggcgaacgaccgcttatcgctttgtgcctggatactggagggcctcgacacagtgatccactacttggcgttactggcgggcgaagtaggctgacgagtcgtagacgatcaaactgatcagctgtgctgatgagtgatcgcatttcagttgagagtcgtgcagcgatatgggggatggcactacagtgaagctacatggatcgcatactgg

SEQ ID NO: 418050 - DNA, 949 bp, Homo Sapiens
agcggagtgctttccccgtttgcatgctgccggtgaacgatcctgggtagctgtcaatggtcgtgacgtttaacgcgcggtgctagacggataatgtaaaagtgagaccgtacaacgaccatgtatcgcattcatgcgagatggagtcccagtgataggactatacaatgtttgtaggttagagaaccttagagctgatggatggaaaggactaaacagatgtgctgaggctaatcacgacgatcttgtgagccgaacactggttgtcccgactgaactaactgactccagtcatgctcctgcatgacatgtccctggaagggctggcggtagcatagtatagggttgcatccacgtttacaccatgatcgattgtggaatgactacacagggtgggatacggcttgataagacatggggtcttaacatcgaataagtactcaggaggcgccagcgatgtacacaatcacccacgtttctcgaacaggtaggatgcaccgtcaattctagaactgaggtaatgctttagctcacatgatgacttggggatgctggaaccagggctagaaccgtgtggggtactggggacgccttatgtctaatggcgcccagacttgagggagggtacgctacttgatcagtgtacatctatgggctgggcccacttccaagtgcacaactccatgaacgcgcatttgagagtctgtgctccccgatgatgtaacgttcaagttactattcataaatgagacgttagcgtaaacaagacaaaagaccgaagaggcttgggtgcccaggatgtgcacttttttcacggttggtgtatcaggggttcaaggggaactcacgcgttattcccgtggttaagtacatgacagagaacttggggaggactaggtgcaagcttcattcttacgttaacgtcattgaacttcaattcgcgccgcaa

SEQ ID NO: 418051 - DNA, 972 bp, Homo Sapiens
agcggagcgtgccggctagggacgtgccgcggagcacagcgcggaaacggtcgggcgcggcagcgccgcgcggggccgggcacggagacggcaagagccgtggcgtagggcacggcaccagcagaccgtggtggcagggataaggatagggtggcacgtatggggatgccggggagctatgatgagcatcctcagcgtaggacgtacctcatgacacgagtcgcatagcggggcaccaacgaataggatgttcacagtaccaagtgaggagccgcgaccatgatgagaaactcgggcagcacagaagcatactggagttgctatgtgataatatggtgtgcattggactaatgtagctggaatgaggagcagtggaaggcgtacagtagagtgtgatcccgggggcgccacggagtgtgaaaatgcggttcccggtgtaaatatgtcggttggatcaatggttgataatgttggagagttcggtcatgttggtggttcttcatagtaagcaatgcgcatcggggagaaccagcgaggcacacggagatgagaccaaggaatgacaggccagtcaaaacagacttaagtaaacgtggaataagaggaaaagttaccaagtacaacggaaggatacgtagagagatagaggcccttcccgatgcaacattcacaacctggcatgacatgagcttagagatcatagagaaggacctggcagagcaatgagggcctgacaggtggccaacagattggcgaaaatgctcttaccaagctgcgaagagggaactttgccccagtgtgtacagcgagtgaagaaacctttgggcgatacacgttgagggaccaagttttacaaaggttagccaaccagtacgtaaggcaccatttgtgggccatgtacacttgtgaattcctttttgaccttagggtataggggaaacgatcaggtttctctttcagagcgagccacaa

SEQ ID NO: 418052 - DNA, 720 bp, Homo Sapiens
  misc_feature (149)..(149): n is a, c, g, or t
agcggggtagccctctgagaggctccggcgtatgtacgagtcgagtaatgattagtatatacctacgttggggtgagttcggagtcgaaaagaggtatcagtgtgcaaaattcggagtcgtaggctcattagcatggagcctagattantctgtagcaccgaggagagtcctatcagcacgagaagtgctgtactctctgtgctcagtcgtcagtctggcgaatgcacctgactagcacagctgagttcgcagtctcctatgagaccttcgttatagtacaccgtgacgcctggccttgaggagtactctcctaccatgcgatccatctccacgagacttcgtcagactctgtggcgtcctgggcctctgacatcagtgagtccttagattccacagtgctgccatccccagattttcgctcataattcttgtcgacgtaactggggcggtccaatcctccacgaagcatggccagagtcgccccactgcgctccggcaacctcttggcctgcgccccaaacacaaacctgggacctcgcctccgtaacacacctcgcggcgacggcgcggccaacgcccaaccgcggacataacttccctttgccaccgcccggcctccaaaccgaggaccgcccctacgacacaagacgaccacgaaacgccgcgcagctccaacgtggcacgagcacccggaaggcccggtacaggacaccgcaaat

SEQ ID NO: 418053 - DNA, 931 bp, Homo Sapiens
agcggggtctcccatcttccagacgggtgtgccgcgagaagccgtgtctggctaaggtcaggtcggtttcgttgcgtacggggagcgtcccgcgatcctgtggagcgctcgttactacgaaatgtcacttcggcagggggaccagtcctttgcgccgacgaagagctcgatacgcgcgtgaacactcgcagtatgtgattaggcagagtaatagcatacaagtgagagagcacacgtcagtacggtcgttgcagcccaaagggtgatgttgaccacatagggtgccgattcgtcctatctgccttgatggctgcgcccaggtgcaccagcgtacacttaaattcaagtcacgatagcccagtaacacctgtcatttaagtaggtagtcctcagttgtgagcgaagcaatagagtggagaagggtccaaagcggagcgttcgcgtgtgaggcccatgtcgccttgtcgatgactagctgttagcgagggcactagttcatctgagcaaatcattgatatctaatccttatcacggttcacgccaagcaggggcttctcaacgtcttgacgactgcgatcagcgtcggttgcatcccgaagagcacattccctcgagcattctaagaacagctggaagttgaattcccatgcgagtagcttccaccgagacgggagcgaatcgcgggatgaaaacgcattgtgtccgttttagtttcctaaatagaagcttgaagtggcgctttgatgaggtgtcgacgttgagcgtacccgaggggaagaatcttaagccgagcgcagagagagctctagcggctctcggacggggactctgtcacactgcgttccagagatgaagcatcgtcgagcattggaagatgccccgtaaccaacgggagatagtagacataccctcactacggcgtgcacagtgc

SEQ ID NO: 418054 - DNA, 680 bp, Homo Sapiens
agcggagtgttgcaatgtggtcctggatcgtcgtgcagattccttcgtcctctcgcagagcatggtgatttcgtctctacggcgtggccatcgaggctcgaacgtgtggggtatgggaggagtgggcatagtcgagggatagttggaatgaggaatgaaggatagttgggcagtacatgtggagggagttcgttatcgagagcttgcatcatggcgagtgcagcatcatgggagaagtgtatgtgtctggaggagtgagtcggagaggcatatgtggttggaatcgattgtttagcaggcgatacttggaaagtatctgaggttgccctgtaatagtgtatgcgatgcttgtacttgttggagggcaagtgtattggtaaagcaaaatagggaataatgtttgtggccatagagggagcgacaacggggatctgcagccacagagaggcacggtataagcctcaaataccttccgctgtttcttggggacgacatgctaggacattgcatgtacaccgagaggatgggacgttgacaacacaggaggaaataggaacgttggatgtagttacgctaccgtgattctttggggagcaatcaagggaaggttcgatttctctccgaggcacattatcttgttcaacatgcgcatggaaacacgctgggtggacgatgacagc

SEQ ID NO: 418055 - DNA, 457 bp, Homo Sapiens
agcggagcgcagacgctcatgtgcattcctggtacgaggggcagaccactttgagctcgctaatcatgcagagatcgccagacgtgagtgccagataaaggctagtcgcctgttgggcgcatgggccgcgcgtggaggctaggaagggatagtaggagccgaggggcaggaagttgaggagtatccgtggtgaggatgcttcttgcaacacgcgcctgagagtaggccactcggagataggcgtcacacgtgagtgactcatctgaagtgcagcgggatcgtgcaagaagcactcaggaaaccacctgggacgcaatcaatacgtgcagcgtgaccggagcggcaggcgtagagagcacggagcacatggtgaccgctcacggtgctaaggatgcgcctccgacttccacgtccacgcgaggactaggcccgccgcccgtgcaccagggcctgcaca

SEQ ID NO: 418056 - DNA, 467 bp, Homo Sapiens
tggtgccgcctgcgggtggtgagtggtgcgcgcagagggatgcaaacgccccaggtgcggcgtctgatgcagcgcgatgatgattcgacaagtgatagtgcgtgatcgtatgacagcacgacgatagtgagcactgtactcctcgactctgtttcctgcgaatgcaccgtcatcctactcgtgcgactaattgcgaatcgttttagaactcgtaatgaggcacgtgcaagcgaaatgacttggtggacacgtccatactctatctatagcaacgatcactcgtgctgtctctcacgggggatcccatggtgtcgcttcactcagcaagctcgggtgacgttgtagtaagctcttgcgcgtgtaccttacgtccgacacaacgagcagaggtctggccataaactgacaagcagtgggttgccaaagcgagagtcggagcaccgttggtgcccatatcttcctttcca

SEQ ID NO: 418057 - DNA, 953 bp, Homo Sapiens
agcgggttctgcccgcggcctctcagtagcaggctcaactgggtggcttctatgctggtgttccgtgcactgccgccgtgcagcgtgcccgtaaaggccgccaagccgtctcgatctcctagtcctagatcttgtcgtgccgtgatgtggacctgtctggtctcatgctcatgatcttataggcccaccagtgctcgttgagcatctgggatgcgctcctcgcgttcatctgaccatgtacctcgtgtggcattctcttcgaggtacgggcggtggtcaggcatgcctcggtgcctaggtaaactagtccacacagcgaaagtcgtaggagtactgtgtagcgataacttgtcatgtagttcacatcgtggcaagattcttacagtaaggtggaccgaaaagtcaaagccaggctgatgagagcttgctctgaaacagattagtgcgatagggcctgttacgtcccgggcatacgtatacccagggtgtactactcggggcttctggcaagggtcttcttggcgcagtcacattccctccgaggacgcccgggtcgcaccgccgggaacttaggcgtgtcgtgggcctcacattccttaccttgatgtgtccacacctcttaggcaagcgttactacgactaagagccctaccggggatggctgctggcacccagtagcctccaccccgtttgtgcccccgtggtgctactccgctttataactctgggccttctgtccctggacgcacagtgggacgcccttcagcccatccgtgcatccggtcccactggcccctttctccaaggcgcctatcaactgcctctcactcccgcgtgtgtccctggatctctcttgtcttgatcgtccttcgctcatcagtgccctgtctgtcttccgagcgacgccgttccttccccctcattaccccgtcctcccctgagcgtaaccttta

SEQ ID NO: 418058 - DNA, 1284 bp, Homo Sapiens
agcgggtgggtgctgctggcggtagccgggctccgcatgccatcctaggcgtccgcgttcccgagctccttgcggcccggtgcagtccggtcctcggccgcacgccgcacgcgaccgtccccctggctgcgtgagacttgcttgctgcggagctcgggcctgcattgcgtgcatgacctcgacgtcgcgaaggggtggcgcaccgctaacgcggaggctcccatgcgcgctgaaccttgcgctgagcgccgttctgggagccccatgctcatgcagtcgccggagcgcgtcgtggtcaccgcgtcgcgccactgtgacgcgggctattgggggagtgtagctgcggccgtgcccccagtcaccttggagccctgggatccacgctcgacggccacggcggaaccacgcggccacggaggggcaggcatggtcttgccgacgaggctacctgagctcccgtcgtgaggagttctcggggacctcaattttgcgtccgaatcttttaggtatgtgccatatgatatccttgtacgtggcggccagcgtatatccgcaatactggttgctcgccatttgtgcggggcctttgcgatgcgagcgcacgcaacacggttgcgccttagatatatgttggaattgcactgggcatgcacccttctttagcaggtatttggcgatctttccagaggcttatttttgtagacgatggtttgcaccttagaaagcgtagattggttaggaccctttgcagatttatggtatacaactccattgttggcgtgcttctccacggggggaaactccgagatttgggaggaccaccgagatttgtcccccccctagggggcctaggcgcttggctgcaaaggagcgaatttaatcacagagagcggcagttgggtccactaattcggcatgaccgttgcgaaacgcattggcgcattgggactttggaaccatttccaggttgccgccggttcgggaccaacccttcttacggtgggcgaccccagcggttttccaccaaggaatagggacttgaccttcttgtggcggtcccccttggacttccccaacggtgggacaacgcaagagggaaggggaacgcggacattgatggcgaatattggtggaagtccgaaagggtaggccattgggtttgaccatcacccaggaagtaagttgttgccccattggtagcgcgtataatatggcccaagggttaacttggagaagccttgcatggcctgggggtggggcccagggctttggaggtactctccg

SEQ ID NO: 418059 - DNA, 1521 bp, Homo Sapiens
  misc_feature (521)..(521): n is a, c, g, or t
agcggacttgccgctgctctcggcagcccgatcggtcggcctggcgccgccttctgtcctgctagcgcggcgcgacgcgatagagcgtggcggcgcgcaggggagcccagcgcagagggccgcgacgcggcgagcgagcgcgtcagcggaacggccacgaaggaagtgaccgcgtcacgcatggcacggggccgtccggcagctcatgagtagggagaaaaggtgcgtcgcgggatacctccgctggtgcgccgtccgtggactcccgggaagctccggccggtattggccggcaggttcgatcgcgggaatcaggatcggacagtcctgtccggagctatgacggactgagccgccaaacggccccgagcgtccattgcagaatggctcggagtgaagcaattgaagcatttgccggccattctttcgtggcccacagactcaatgcaacgaagagaaaccagggacctctatggtttggcccccaaattccacccaacaagcctttggacccctcaagngacgcataaatcatgaacgggtatttgcccacctttttccccattggcacccgaaggtcttctccggaagttgcgtggaaacccagagacaaagaggcgcctattttgtgggaacaccaacgtcttaggagccaaccatgggagagctcggttagcagttggggcgcaacaatcctttttccaggggcccccgaatacaaggctaagctgggacattcgctgttggccatcaccaatattttagcaccagtgttccgacaccgtgtccagaaagtccgatggtcaaagttggcgcacacttatggcggagagatgtttgtctcggcgccaacgtaattatcgcaaagagactttatggcctggtgtggagcggtaatagagtcgatctcatatccccggcatttggtgtagcactacaccgagatgtggatacaacgcctttttccataaccgggttggaaaacccgtttctttaagcaccccgtggaagctatactagtccctttcggactatcaaagaccctatgtgcccaatttcccgtccagaaccccttgggtttcccaaaggatagcccgttacaacatgattggacacgagggtcacatagccacactcgcaggatgatgatacattatttgacacgcgtaacacaggcttaaccaaggggtgtcattcaaattcctcgggacttgtgcaagggtaagtccctctcacttccaggttgggggcccccccaattttcgaaagtaagtttaccaaacatatatcacagggccgtttgaaaaaattccccagttacgagagtatccccccagattcggagcattccttgagacgagaaagctcggacgagccaccccttttgtcttcaacacgggtacagaacgttacactgccgatagcgccgggggagaaatttccacgcgaagttaattctttatcgcgagaatagtgccaaggcgcaacacgtataattgaggcgggaccaaaggaatgtcg

SEQ ID NO: 418060 - DNA, 1404 bp, Homo Sapiens
  misc_feature (470)..(470): n is a, c, g, or t
  misc_feature (584)..(584): n is a, c, g, or t
  misc_feature (848)..(848): n is a, c, g, or t
  misc_feature (1090)..(1090): n is a, c, g, or t
  misc_feature (1147)..(1147): n is a, c, g, or t
agcgggtggtcgacgcaatgggttcgccgccaagagacactggtgttgtgatgattacccctaaaatgccaaacacgggcctggattatgacggtcagtatcacactcttgtcgtcgaatcggacacgatagtattcgggagaccatgtccgacctacttgatctggtcgctatctgccatcttatagaagtgcagcgcgtgtcatcgtagcacatcaggaacctttcgagacacagagtgtctcgagcagaggcatgctgcttcgagacttgagacggggctccttatccggttagttgcgcttgggctctttgggattacacatcgtggaagaagcgtagactcggtggaatcggttggtactcgagtcaattttgagtagtcgtcctttgattgggagacaattttcgacagagccttaggcaaggataacgtaattgtggatcgtaatcaaattttggaatgcccnccaagtgatcttcactgtatcaactctttagtcacatcacacacggagtgaattgcaagtggggaccatcttccagtgcatgcactttgtagcatagctcgcctgcagtgtgtntagcttggcttggactgttctgagctgtcaaatgttagaacgcgctgggtgagtcagtcccacattgaagtggggtccgaagaaaccggcggattgaggcgagtgcacttgtttcttgggcgttgaacacaaccgttgtgtgtctcgattgcagtcactataaaccttaattcttctgtttcctgaggatgctctagagccaacactaaattgggcgcattgtccctgggcccggttgaatgcccctaggccttaagtgagccncagaggaagaagaaagtaacttatgcaaagggggaaacacggttctggctacagaaggtgcgaaaaggctacctaggccaccactttaaccaattttaaccatgttaccaacacttttggcgtgtcttgaccacaacgcggccggaatcataccacgtgggatgtccactttctaaggtaaggtccctacaaggtgttgcttgggggtttggcacagaagtatggagatagatagcgcaagnccatatgggctatagagacaagcgccccaaagaggttggcgtaccaacatattgacngctttatgtgcgttatgcaattggggcgaattcgcgcacagaagattcggtaaccacgggtataaagaggaagtgggggggaaaataggcgcaacggtatgaggcaaagagccatatacagcgtagggaccttttgatccgcactatgcgttagggtaggttatcgagactccttgtagaccagctcagagactccggttcacactatgagattatagacaagggcgccccgttgcgcgcccttgtacatcctttcc

SEQ ID NO: 418061 - DNA, 1021 bp, Homo Sapiens
agcggattctgtcgaagtctgttcctcgaagcaagctggaggtaaaccgggagcttgacgcgaaccagttgccggcactcattgctagtggtcccactccgcgtcatgctgccgcacgcgcgccagtggcattggcgagccgcgtggcgtggcgcgagcgcgttgcggctcgaggtagaccatgcggaaagcgggcggaaggcgcacatcagggcaaccacttggaaggctccagcgctcgctccatcagaagccgagccggtgcgtgacccgagtggcggcagggagccacagagagctctggccccgacgcgctgagggtgtagctgacatgcaagcctgcaagacgtccatcgcgtgctagcagtgttggcaactgagtctgacatttactagagatgagggactgctcgaatgtaaaggaaacctgggtttctgagtccatttttggctaagacagctgcctgcaatcaatcggcctggacatatgtccccctggtggccacggcgatatatgacgacgagcttggttccaatacgagaggtgctagagagatcatcgtggtgcaacaccttcaaagtgctccttgggctgtacgtaatgcgatgctatacatgggtcgaacccacattataaaaggcgtattctaaagtggaattccataacagcaaagttccccacggtgcgacatacccaaagcagccgtagattacccagcgtaacacaaggttagaatcgataatggaaaaaacggagctacgaggttcccaaaggtagtccgcgaagaacgaccctcgtaacagaccatttggtgataagcggcatacgagaacccataaacattttcactctgtgcagctaagagttccgcagttcgaaaaggtaagtggccagtagatatcgccacatgttagcaagtgtatacagcacgactatcgaaaagaatttaggcagattggggccgtaagattggaggattgtgccgaagacaatgttcctaaagcagctataagagtgagg

SEQ ID NO: 418062 - DNA, 531 bp, Homo Sapiens
agcggagctctccccgaccgcagggctggggcgacagaaaagccagactaatcaggacgagttcgggcgtggaattgggcctgaagccctcatgcccagccaggcctgaatgccccagaccccaccgtcacccccgtggcctggatggagcaggggacggccggctgaacggcgctggggtggaaggggagcggcgacgaaggcgcgatggagctgacgtgggaatccccaagctacccgaggcaagacactgaacttgagtcgcacttattcatgcctgtagaaatgagaatgacacgctgtgataaaaagaaaacaatttcagtctagaggcggggtcatcttgggacacttgttacacggcggaaacagacgaaattgcaaagggaccggtacggcattaaacgccctcaaaaaacaggtttatttaaagggacgggacgaggaacacttgcaacggtccctcgttccctccgtggtcgaggccaaaggggctttgcgaaagttgcaaggtggggccggtcggattcc

SEQ ID NO: 418063 - DNA, 862 bp, Homo Sapiens
agcggctcttcccctttggcatcaagtgaagatagtgacagttgtcatggtccgtagctccgcgacgttgtcgacggataccgctaaagtattgccgacgcacgtacaagtgtagtcccgattcgatactaagataggagtgatcccaatgcttgcgacatatgtcaacagtcatctgagcccttgctgctccgtcattgagcaggctagaaacactcgtctagagacgtagcacaagcggacacttttagagcctacacgtgtgttgttcaccatgagcatactagacgtccccgcgtcgcatcctctttgaattgtgacagaggtgcctctctgagcaaggagaaccttaatcatctcagcagaatggtaaagttgagaagaagccactacttattaccgcgttatgaccacttagggcgatgatattatactacgtttgttgatcgctctggcggccttagtagactagagacgtaggcgagttttataggccccaagttaacgttctccgtagatggctccgaaacagggagaattatttacctaataactccagcgtttttaaaccccataaggcgaagcgtaacgtgaattttccaccccggagctaaggttgacgcgcaaacgctttagaaaccgataagagtgtggccttattaaagaacaagaggtgcctctacggagtataagtacctttaggggttgcacagccggttcccttgtgcaaactctttagaagactggcggtcaaaggttaggagaaccccttacctgcaggttagaggtgtaccacctataagagcgcatggatggcctgttgtaatttctgcatataaacacattggtagtgtccaccata

SEQ ID NO: 418064 - DNA, 648 bp, Homo Sapiens
agcggagtatccccggagtgcctcgcggagaggaccgcggcggcctggtccatcgaggctggccgtgcgaccgctggagccagcttgcgcatctgaacagtctggccactaaggacattctccagtttctgcaggagcacggtccgattcgtttgttgcagaacctcaattattgttggacaacatttcataggaatgtggccaatgagcaagcctagtaccagctcgtaccacgtatgtgtctaacgatgcccttaataagtcctatccttcttagattaccttaacgcaggtatcctaaggggatactggaatcgtgatagagtagaatctgttcgtggagcgcatggtacataagacttgtgacaacgcgtcttgaattgactacgaattaaaagcccagtaaccgttagacaaagcgaaaggtttcctggaaaggaaggatcccccgtgcggaatgaagggtggttccctacccggagttggcagtgtatgcacagtgagagattgcttgcttgcttgggaaatagagggggggaaccatgcataaaccctttagcgttgtgtggccccgcgttgatgagcggaagtaactggtagcttgcgagctggctttgattaattacgatgcacacacgtcacgtcgta

SEQ ID NO: 418065 - DNA, 986 bp, Homo Sapiens
agcggagtaaacccggagtgccgctggggaagatgagcggcggactggtccatgagctggtggcgtggaccgctgatgcaggcatgcgtcattgagcaagtctggccaacaacggacagttctcgaaatcttcatgcgaggagctactggtcctaggacttcgctttgtatgcagagacacctacaacttatgatggaaagcgattactggagtgttggcccaatgaccgagctagtacaatcgactcacgtgggataaactggcctagtatccagtatctccttgcattcccttaacgcagtgattgaatggggttaacatggcaagaggtacttcagaggttagcattgctgttcctggacgccgtcacgtcaagtacagactggtggacacttcggtttaactggatagaagtagaaggctcatggcgtacacatgcgacggttccttgggaggggaagaaaccccgtggtgagtcgacgggagtacgctatttcgagtcgcccttgtgtttgccttatagagatccattgggaaccatctacgaaagagacacgcgtggtgaatgactttagatgaaaccaccagtagccttatgggcaccccgcgatttagaagcgggaaacgaactgggtaacgtgtttcccgatggttggggcctgtattgtacattaggccgagtgggccaaccgtgcgtgtcaatcgacaccgtatagattgtgagggaacctgttgggttgcactacggggcagttgacctttaaagttactctccataaaaggcgaacgtttgtgtcccagacgaggaaaaagcacagagttcacgtacatggttggttccaaagagtgcccacatttcttaaagaactatgtgggaaaccggggtttccaggggagattagagcgaccaaacagtggtttgacctatccggaagggcaaattgaagtgagaattggcagaggacctatctcacttgtggcacgt

SEQ ID NO: 418066 - DNA, 652 bp, Homo Sapiens
  misc_feature (127)..(281): n is a, c, g, or t
agcggaatagcagaccggctcatgtgtcagtcatcccctcatctgtcattgtgtttaagaaataacaaagtgatttcattaactctgactaaatcaaaataatatttaagctaaagaacctgtcttnnnnnnnnnnnnnnnnnnnnnnnnnnnnnnnnnnnnnnnnnnnnnnnnnnnnnnnnnnnnnnnnnnnnnnnnnnnnnnnnnnnnnnnnnnnnnnnnnnnnnnnnnnnnnnnnnnnnnnnnnnnnnnnnnnnnnnnnnnnnnnnnnnnnnnnnnnngtgcctgttaatcctcgcatgtcatcctcagccgacggctgaatagcctggtgaattacgcgtcggtgcaccaagagagcgcgccgagtttgaatgtgagcacgagatcggctacagcgtaggagctcccatcctttgggtaagcaatgagcgtgggaaaactcctgggtatcttcagagttagtaaagacgtatccggacttcttaaaacagccttctcataaggggtacacagagtgggagtgacacgtgtatgttgaagaccgaggtgaagttacagcgtgcagaaataaattcaggaacagtagtggcccatttgaacagagggggagtacaatttgctgattagctgagtgtgcaaatcaaatttc

SEQ ID NO: 418067 - DNA, 951 bp, Homo Sapiens
agcgggtccctgccgggacccgtagcatcgtcgttgtacgtcttcaactgatcagtgtctacttgctccttaccacgaagcccacgtgttctgctcggagcctcgtcatcctagacagggtactagggaacatccacatgtctatacacgcctagttgaccacagcctgtaataggcctacaaaatgggaccgactggacgacttctagtgggtagtagtgagactcgagtaagagagttcatcgttgggtccggattgagctagagtgccgtagagcacaactgcacaggtagcactctattataggcgcgtggtgatgtaaacgcaagagactcacgagatacacgcctggtttaccttgtagggtatagaaaggcgttatccgcttgtgtcatcatacacgcacaggacgcattcgtatgtgaccataggtcaatgggagcaaagggcaagatatcaggccccttgggcaatttagttggagaagtaggacaattcattgaatgcgttaagctcaaaaactatgtgtatgaattttgtgacctagacactagaggggaatgaagtaaccgtgcaatcattgcacgttaggcatcattgatctcgtattcacgtgaacctgttgggcactacagttgtgcacctagcgaggtccacagtatccgcatttccttaggggacgcataggtaccacagttatatccttttgacgcaaaaatctttctatgctccaatgtaacccattgaattaggtcaaccgtcaccttggcttattagtataggattaaagcaaataagtccacctttttagtatattcctaggacaagaggcttccagcaaaaatcatttcggtcactctggatactggcaggcaccatggaattacaaggttggtcgcggttaataactacttggtatgcttgtggctgtggtaaggagtacaattaca

SEQ ID NO: 418068 - DNA, 2718 bp, Homo Sapiens
gagctggattgtcccgctcggggcacacagaggctagagagcagacaccctcgaggagctcgctccctgagtcgtagatggcccttgcgactgcagagagaacgagagagaccacgatgacagaggccaggacacgcaagacacgatacggtagacccgccgagaacaaagcctgacggtacgggtggtcacatcagatagcggtgttcgacgttgtatcacagcctagagcttcagcattgacacttcggtcattaatgtgtaatgtcattccaagtacaaactagtagtgaaataaggagagaagtaacagacacgagtgatggcaaggcgcgacaacggcagagaaaggaaccaaagaaagggacagaaaagagagacggccgatagtgcacacagagaacgatgcagacggccggaaagaaccccggagggagacacccggaagagagccgaaagaagaacgagcaagaagggcgaaacatcgaggggatagaacagggagaaaaaagatacgggtgaccacacagagacaagggaaccgcgacacagtcgcgcaactgacaacgccacacagtagcccgtgacacccaagataccacatacagccaggaaaaggaccccaaagagagagcgaacccacaggggaagaaagcagcgttacccccaaggggagcggaaacaaaattgcaccagggagagacagtcagaggccccgagagcacgtggaggatgggcactgaaggaccgcagccgtgatgacagcaagaacagaagagcagcaggcgcgcgggggcaagcgcgaggggcgaaagaaaaggccgcgggggcagtggcaacaagagaaaaggaggaaacaacaagccaacaacaggtacagaaacacaggggtagggacaaaaagcggcaaaagcggaaacggcgcagaacaatgagatgagaccgtgcagacgagggggcgaagcagagggggcagcgaagcacgcaagaggagaagacatgaacaagcatccgcggaagggaggacaccaggcgtgcggagggcacacaaatagagagaagacagaagccaacagaggaggtggcacagacaagtgcgagcgaaaccagatgaacgcaatatgaggtgacgagaatagagcggcgacgagtcatagggggacaagaagcagaagagaagaaaggcaggacaggcggaacacacgccgcacaccggtgtggcgtccataaagaaagggtgcgccaacagagaaggggcggaccaaaaagacggacaggaggggagggacccgagaatgcgacgacaccacaggggaggagtagacggcgccgacgagcgaagtaggagtaagacacaagtgccacaggtgagcgagtaagcaggcaacacacgagaaacaagaagaggagacagacaagccgaacgacagtaaacagcaggagggggagcgaagaagagcgagtacagagccgcgtcaagttgtacacgaacaagagaagcaagatgagaacgagaagcgcgacagatgaaccagacggagcacgaagagggagagacacacagaacagacgacgaggatggggcaacagaccagggggcgcaggcgagacgcagcacgacagcaagaagaacttagggaggaagacgagagggagcaagtagggagcagacaaagggcaggcgcgaggcgaaggagcgccgaccaacagagagcaaacagagcgatggatgagcgagcacagagtagcgaaaaagatagcagacagacacgatgagaaagtatcgaaaagaaaaagcgcgagagaaggagacggcgtcacaagccgttagagccgcgtaaggtagggcgcggcgccagcagacgagagaaaggagaggaaggaagagagagcagtaagaagaggcatcaacgccacggaggagaagacacagacaggaagaagactcagaacgcagaaacacaaagacaggcagatccagaagtaggcgcacgaatcacagaacacaagatggtcggtcgaagcgagagcgacagcaacgaccgcatacgacaatgttagacagagagcgacacaacacacagatacaaagagcaacgaagcgcaagatatgcacacacacacgggagcaagaagcggacaagcgagagacgacacgatgagcaaagagtactagcaggacagacaactagagtcagcatcggacagcgctagcgacagacaagaagcgacgagagtagtagacaggctagagcggagagccacacgagcgagctaagaaagcatagagacaagcagacaacgccgacgagtgaacgaacaagcagaaggcagatgcgcaggtgcgccagctcgatgcgagagtagaacaacgcaagcgcgccaaccagctgagagaaagagacgaagagccactgccaggactagcggacgagatagacggcaacgagagagaggcagagcactggccgagcgaagcagacggcacgacgatcgcgggaagcagcggacagcaagcagaaaccgcaggatcaagaacaggcaacatgagacgcgagcgtggcatgcagaggaacgaggagacggacaggaagcagagccgacgggcctgacgcagcgggacaaacgcagaggaagaggagaaggagatggcagaggaaagcggaagcgacaaggaccagcgccggcaggaggcacgcgagcaggaggagagaggaa

SEQ ID NO: 418069 - DNA, 1128 bp, Homo Sapiens
agcgggatgacataagttgtcctcccactaggattgctgactccgcgccaccgaagatccctcactgcaggctcctgtgatctccacagggacctatgcgctcattgtcctgcctgcccacgctcgaccagagtaatgctaccgtggacccgtacggttcgatcgagctcgactggtatcatacttgagactagcttctctggtaaacgcgagacaccttactcgcagagggctatcctagaataacgcacattcaaacagaagtggcatactcataggatgtaacatcagctgcattgagcctgcaggcatcggccagagctcaacttgggaagaatctacttcccataggaaactcatagccagagtgcaatggctgcttacatagaactccgaattgtaggtgccccggacgcgtctcgtttttgtcccagcctactcaccaggcaagcggtccctcgagcagagagggaacaccaagggtcggtggatcctttgcatggcgcggccagtttcgcttcacacatttcttacctaggtcggcacaatcctatacgtagaagagcacttggtctaaacttggaaaagaacaggccagcttatcactagaagtaccgaatttccagccaaggcatcccagtttcaacaagggcatccctctaggggtcgttaacatcccactgtctggtccctcatgtggcccacccggttcctttcaccctttcccccgagtattatcccgccacacgataaaacagaggtacagattgtaaaccccatttgacttataattacctagtttgggtcgaaccagtttgttacagtgagttatgaaagcgaaagcaagtgcacctcccttccgtaaggttccgtttctctttgagaataatttcgggtcagaggtcacctgttcaaatatactttcgcgcgacacccgttgcagcgaaatttgcctacaaatatcctatgctcgcatattcccccgctttttttggagtcccgcggcgccacacatattaaggaagcagccactcaaaaggacacacgtgtcgacatgtagcagagagagagcgtttgcggccagtagattgcacagctatccggttaatatataacgagagtgcaact

SEQ ID NO: 418070 - DNA, 666 bp, Homo Sapiens
agcggagcggaggggcggtgttgagaccggcggagcggcgtgggcccctatgtggacggagtggacgctccgggaaagcgaggggcgctacgagctctggcccacgatgaacacacgactgacacacattcacacgacgatacccgggaaccgaaccgaacgagggagacttataagtactgacatcgaaatggaagggaagaattagataagcatgcagcagaaagaccatgcgtgtgtcatgataacgaataacagaaagtggaaagcatatctaggccataagaaggccatggaccattgaggaagagggggaaaccgataatagtgatagaactcaaggaagaactagaacagacggacatgcggcggatgatcaatcactagtagaaagcatggcaaaatacagagataagggaaaacttggaagagtgaacccgtagaaaagaggacagagtttacgccgggcctacataacaacgaggacacaagatatagggggagcagagtgcagtgtagatagggcataataagggcgagttgcacgatatagtgacgaaagaacgccagatcaagaacagtaaagtcaagcagaagtcgacgtgcaatgtaagaaacccgcaatatgaaacgatagtgaacgatacatgtgagacagaacacagg

SEQ ID NO: 418071 - DNA, 575 bp, Homo Sapiens
  misc_feature (76)..(152): n is a, c, g, or t
agcggaataaaattttcttctattaatttttgaattattgtctcttctccaattgtggcacttccatttgtggaannnnnnnnnnnnnnnnnnnnnnnnnnnnnnnnnnnnnnnnnnnnnnnnnnnnnnnnnnnnnnnnnnnnnnnnnnnnngagctactcctgtctgccactattttaggtcttaatgttaatcattttgcttttactaatcccctgaataatttgcttcaaaaatgtaaaaatattacatttttaaaagtttgagagctcttttttccacagtgcttgaattttattaaagtttatattgtttttgtttttacttaaattgttttctgtcacctgcagctgttctatttctctagatgcttgttttgtaatctcaggcatagcaggctttgctctactgttcaactgctcctcaatgtcatacaggcagagtgacatgtcctgggggccatgttagtctcagcccaagcagtaggccagctttgactgttagattcctctcatggcccaaggtctcacatgcagccagctgctagtcagttccagatgttctctgaaggagca

SEQ ID NO: 418072 - DNA, 814 bp, Homo Sapiens
agcggcttgagccagcgagcctagcaaggcaggatggacggcttcttgggcccctagggtgatggacacatgagcacggctggggcatggctgcagtggcaccttgatgtgcttgacgcatccctgatctcatatcagacatcaaggttccactgttctgctgcctatattatcccacaattccacgagcttgtatccgtctaatctcccctttataattacactgaactcacctagccatccgtattggggacgcccgtgggaggatactctgtctcccccttgcttcgatgtcgcgcgaatgtgcgtgcaagcatggtgcaaggtgcctgcaacttacttctggaacagctggctctggtggacttttgcgaggcacttccttgcttcccttggtttgtccaactctctcaggtatacgccattttacgcggtgtaacaaccccactggacctcgctgaaccatacttggcccttttgctctattccccccctcggcggctgtgcacaccgctttgggacccggcattactccctcgatgtcgctgcttccccttggcgcacacttcacggtcgaacctcgtcggctccatcgtcgagtgcgttctcccgctgtcataggtcttttgacgctcgtccctacacgtttccatctgtctgctgccacacgcccgcccctcttggcgcgccaaccaatcgtctcacctggccctttttccttcgctacttcgcttttccgcatggactattactctactcatgtggtgccctattatgggactgtgcctccttactaacatctgtctcggccccg

SEQ ID NO: 418073 - DNA, 913 bp, Homo Sapiens
agcgggaagggccgggtgcgaagaagatcctgtgccacatcacgacgtggatgtgatcgcagcgtcgcggcaccgagggtgcccgccgattgcgcacgccacggcggacgcgtgccgcctggatgcgatgctgatgagtggatcacttgtctctctcatgaagcacgatgagtgagagcgcagaagtacccagccacagtgaatgacacgacgaggcgtacccccatagaggggatctcacgtatatcagctcatattcgagtacgagcgcaagatcttgaagctagtttctgggttcactcctaagaagacgcatgcatgtacaagattggctaggtggatcaaactctgaaccattaggcaaagcgaaggggaaatctactacattgtgtgggggaagtggtattcctagaatctatacgcaaaagcctcgtgtattgggtgaagtacatactcctcaatggcctgggaagatcaaggtggaatttcttaagactaggcgggattcctgtttgtatgttgcattggggcactatacacgtgaaaaggaagcttgaaagaaggcaagagggttcacttaagaggaacggaaacttgcataacgatgggtgtcacacggatattgtgaaggaagtgaacacaagcagttaacagggaagaaaaacacattgggtgcgttggcgtatgacaagttgtcgcttttaagagtcgaaaggaacgttgggagatattttccgggggaaatatgatacaacggcgtgggtcgatttagtccaatgttaacacgaaggctgatgtcgtggaaagaaaagtattaggcggataatgggcaacggttccaaaattgcacgctgaaattgattgtagacgcgcaaaatgtggtgtcactttggaggaaagcatcaaggaagga

SEQ ID NO: 418074 - DNA, 1003 bp, Homo Sapiens
  misc_feature (469)..(469): n is a, c, g, or t
  misc_feature (494)..(494): n is a, c, g, or t
  misc_feature (762)..(762): n is a, c, g, or t
  misc_feature (971)..(971): n is a, c, g, or t
agcgggcggacgggtccggaggtgacgcttgatcgggcccgagttttctcgtgtggtgctaccgaggtgtccagccaggacaggtccccctcgccgggtcctgtctctcctctgtggctacgaggtgccgctctcgcgtcggtaggcgctcgtcgcggatctgagtatcggaggggctgtttggtgatggccatggctgcagtggcatgggggtgcgttagccggttgaattgggatgctgtgagcggcgtgcatgttctccatgactgactacgattgagttacctggagcaatatcaacagctgtgaatctgcttgcaaagcacaaatgtgccttacaaccgaagacgtggagaatgcacatttgaatgcgcgcacagcgagggcaagtgcttaccgcagtggttccaggcctcatgagcggtgcatgggggatattagagaaacgtgaaaattgttagaatcgtgntgattgaacgcagttataatggtancttcctaggacatggaatttgtcaattgaaagatcaagagggggaagagtctaggacagtgtaggcaagaaactcttgtccttgtagagtcattactcattcgagggttggaatgatgggagcattttaggagatgcaaggagggaaggaaaccagttttgttttccttcacgtaagttccatggatggacaaagtactttgacctgggttatccaagggaaaatctcagcgtgtagatttccgtaaaaaatcacgatgtggtatacngcgaggttaagccacaggacacacgagtatttcaaggcccacaccacaagttttgttgagggaattgtgattcggctataatcagagggcaaccttttgggaaaaagacccattgggcgttcttttcaacattttaatgaaggacgataggttaaaatcacaaactcccaacatgggtaaaacgcacaaacgcaacggccgtgaatacnacagtgaggaacagattgttgtttcccccccg

SEQ ID NO: 418075 - DNA, 945 bp, Homo Sapiens
gagcggggacacactgtgactggctgcctgaagctagtgagtcgcggctgccgtgcactggtggttgggtcagtgccgcgcgcggattcggctcgttacctgcgatgccgccttggtggccttcaggctggacggcggcagggtcagcccgtggttcgccggctttctggggtcttttgaacagccgctgatgtccgatcttcacccccgaaccaaccaagatcctgcctaaccaattgtgcgccagtggtacggactgaaggctgtgccggtggcaagcgctttcggaaatctggcctgctaacaaaagacaaggtcgtcgtggcttgggctgccagcgggccgttgccacgcacaaggagccttcgaagtggaaacgttacatggcagtattcgcacatccagcgtgtacgtgtcacagtgcttctcttagcaagggctccaggtttgccccaaaacatatggacgagaattcgtccattcaagttgcgtctactgccgacaccagggacagtttgcaccccgaacaaccgtgcgccaaacctccgtggataacgtccgcggcacatacttcggatcggttactccgtgtgcacgcacacggctccccacgcggccttcttccacggtaatttgagaaggcgactaactgttacgcgagcatcgcaactatgactttgtgtcagcccagcgcagtgtgtttacagccgtgtgcaccccaatttgtgccccagaacttatatttggggttggcggcaagtgtaaccaataacagtgcgcgcgcttgcaatattccgctttgggaaatcctccctatacacggcaagctaacgcaatgttagccaatcccccggttagggaactgtcccgtttcataatttgtggcgccggtaacgggatatgtccctatattggcgaaagatgcgtgcagcaacattccgccga

SEQ ID NO: 418076 - DNA, 696 bp, Homo Sapiens
agcggtctcagtcgccgctgccaactctcgacactctgtgcttccgccggctccgccgtcgcgttctctgcctgagtcgcaactggaagcaagagatcgccgcgctggctcattgacaatggctccgtgcatgtgcaaagctggtttttgctgggtgacgtactgctcccctgagccgtgatttccttccatcgctcgcggtcgtccccatcactaccagggtcgtcatggtgggcgatgggccagaaggactcctacgttgggcgacgaggcccagtagcaagcgtgtgcatcctgaccctgaagtaccccgattgatgcatggtcgatcgtcaccaactgggacgcacatggtagaagtatctggcatccagcagccttctacaagcgagctgcggcgtggccccggaggagcacccagtgctgctgatccgagagcccccttgaaccccgaatggaccaacagacgagacagatgactcatgattctgttctgagaccttcatagcatcctccggccactgtacgtggccatccagggccgtgctgtcccttctatcgcctctgcggtcgcactcactggcattgttcatggatctctggaagaccggggtcacccacacaggtgtcccatctacgcatgggctacgccctcccccacgccatcctgcagtctggacctggcatggccgtgga

SEQ ID NO: 418077 - DNA, 845 bp, Homo Sapiens
agcgggagaagagcgtctagacccgtggagcagaggcggccatcgagacccaaccaaggcgtcggtcccctctggcggctcccagttgctcccaagctcgacagcaggcgcgcgtccccttcagctaggctcgcatcgcgtacggcgtcgtgcttacccactgctgtccgtgctgctgccactgggcggttgcgcgtctggcggcgctggacggcagatcgagaccggaccgtgcggtcaagggcacggtagccacgcctagatatgcacgcaattgcaagggataggagatacctgcgagatagccatggaagcagaacgttgccaagagatgaagtgtcttccccttccaagccctttaccgaaggcgaatgccattttttcctttgcctatgcaagacaaggcagacaaaggcgagtaaatttttgtgaaatcgtaacccaaacggggaacttggagcgtccctcgcggggctatataacccgagaaaagcgcacccgcgctaagtccttctaaccaggaattgtggcttagcggacttaatctagaggcgaattcgcttggccccccaaatggggttatacactttgtacactttgactagaccgcctagcgtacacgagtaatggcggaaccctcccgagacgcgtgagcccttggtgaaagcgggccatatagcggattaatgttccgccccccatttgttacacgcggagatatatcgcccaataggagacggaaacggcaaaagagacaactcgggaaacgggtggtaacgtttttacacacaggcttcgagcggcgcgctttcccgcgagccacaacactgtgaaaacatccccca

SEQ ID NO: 418078 - DNA, 1052 bp, Homo Sapiens
agcggattaccccctcttgtccactccgactgaacgatacctcagtacttgtcgactagtctgacgttcacgcggaggtatgcacacgtcgacaaactcgcaataagtagtcccgagcacaccgtacccatgtactcgcatccatgcttagatggatgtcccagagcaactggatatcgatgtctagcaggtaatgcgacacctagctcggatcgcgatgtgagaagcagaactgaagcagtccgctgagccaataaacgacattgttagaaccgacacgtaggttgtccctactgaacctacttgagtcacgtcattgctccatcaatgacattccctgtaaagggagcttcacattgtaaggatagctccaacttacacatttcgctagggataacacactttgtggcacgcgcttagtaggaattcagttgacaacgataacgtacccagtaagtcccacaatttacacatcacccacgttaccaagcaggaagattgcacgtcactactagactagaactagtgattaagtacacctgatgacctagtaaggtcttgcatcccgtggatgtaaaacctggtgtagcgtacttagagagaagcccctaatgatatacgcgacacaaagtataggagtccgtaatcgaaccttgatccagtgtttaccatctatggaggctaaggggccagtttcccaattgaagcaaccttccatagaccgtcgagattatgaacgaaccttggcacgctcgatggatgtaaaccctaccaaggtacctatcattataatgggacgtatgcactaaaacaatgaaaaacggacgactaaagtggacattgtgggtcccaaagagtggcacctgttgtttaccaccggtttgtgtaaccaagccgtcccaggagagagaccaccgcagttatacccaataggtacaagtaatgcttgcacagagaggaacctgagagagcgacctagattggaagacggttaacaaagcgttccgttagcacgttcacattaatggacttatagattatacaccgcaacc

SEQ ID NO: 418079 - DNA, 1195 bp, Homo Sapiens
  misc_feature (295)..(295): n is a, c, g, or t
  misc_feature (325)..(325): n is a, c, g, or t
agcggcactgtgcggcttcctgacccatcggtgcacactaatgcctttcctgttcatagctcgcggagggatatacgccgatcagccatgacagtcttgaatagctagctgtaacctgtacagtccttgatgactagtaggtgtgcactcgaggatccgtgatgttattcacatgatcctgaccgttaccttatactctaggttgttacaattcactctaggagttaattaagcttgtgcgtgacactagtggtaggtactgcttggacgtatgtccctctcgtcatagttgcanagtgatgcatctatgtgactccccataganacggttcactatctcttggttcgtagcattgggaatctcggcacctgatcagcagactatatgactgagagtactcatgattcgctgatgagctaaacttcactttaccgcttaccctcgcgaaggatcagcgagaagaacagctcaaaggcatgacttagtcctcttgtcccggaaacgcgctttaaatactcgacgacgatatcatcttgtggtatgccgacttcatatcgtgttgcaatgtccttaccaaagtgaaatccaaatcaggaggcatagctttttagcagttagccatatttacggagtctagtgctagaccgcaaataggagtgatctacacctcgaggtgaggatcgataactgggtctggagacattgtaggagcaataaaggttccccagccatggattggctacccagaagttgggtgtgagaacagctatagagactatatacaatggtttgagtaaccaatccctttttcgaggttcgacacctgcgagaacgaaactgcctagagtataatgacaaggaatgtgagacaatagggccctggttttggcaccgtgttcaggttgaaccatccgaggaaacaatcctaccttcggtagccaccatacaggttaacattatccgctttttcgggtgcacacaagcaaacccatgggttagaaggactcgatgaagaaggttaagaaacctccgttcatttttcccgcctattttaccaattccgccttaggtaaacctcggccgcaagtaatatagaagtagtttggtcgtgggtccaggcagatatattgcttagaaggagccgcttgatttcggtacaattgtggctccacttagggagtatagacagcattg

SEQ ID NO: 418080 - DNA, 1059 bp, Homo Sapiens
agcggattttcccgtcttgcttccgtagctaccacctgctgctgtcgctcgtctctgccgccgagggttgtgcacggaaacttatatcttgcagtccgatacagtagagactctatctgagcaagtgtctccttacattggtcatatgggtattcatggaaccctatgaccatcgacatattgagagtctctggtctacaaacagtaacgtgttcgccacaaatgctgttgacagtggctatgagtcccctgtgcctttggcaaggccccgtcagacgtacgtgactgaaatgatagcgcgcgtaccggtgcgcttagacctgacccgtgtcagacacgtatgccaagaggttgcgacgagccgtcctagacctaatcttggatcatgaggatacggggtgacgattccccggggaagcactgaagtaccctgaggacagctcgtaaatggaggtgctagcagtgcgcaaaaacggtgagacgtgacgcatagggtgcatacgacaccaaaattgaagggcgacaatatccaaagagtagtcaaagggagttaccgagtgacccagttgcagaagtccacttaggacgtctaacggtcgatgagggactatagccgagtgcgacgttgaagatcaatggcttcgtagacagaggttactcacaacaagtagggcagcgcaaaggttaccccagtgagcaagtttttcacatgattggggctagtcctcgaagcgtactcaagcagtgttagaggaccaggattttcacacgtagaagaagcaaagatgcaacgccgtggcccgtaagcaagcaccactatcagtacacaaaccttgtaaaagggtcttgagcacgttgcactagacctggcatggagcggtgatacgttagccatcattctgccaggacagatggaatgacgtaaagggtcttacaagggcggaagcaattgtgggactagcgcggacccagcaaataaaattccagtatgactaaaaggcgaccccgtatgttaattcagatccatactacaataagggattacgggtcattactcag

SEQ ID NO: 418081 - DNA, 970 bp, Homo Sapiens
  misc_feature (184)..(184): n is a, c, g, or t
  misc_feature (565)..(565): n is a, c, g, or t
agcggccatggggagcgagccggtgcttgctgcagtgctgagggctgcggcaacgcggtgacgcgcgcgcggtgaggacggacagtcaccgacttactccagcttccctgttatctcgacacacaatcgttgccgtcacggctcctggacacggtctccaagtcaagttgtcatccttcttcgngtgtactagtgttgtcctcattcgtgacttttagtcactcgtgacccatcagacttggactagactccatgcatgagagatagctgagacctaatttgcaagtgatccagggacttccttcaattcctactcactgtcgcctgcttctcatttcaccattgtacacgcagatcaggttagagaattccactatccgtctagcaaagtctaggatagatagatcgctatgtttagcgacaaactcgacttgaatgagattgaataacgtaaaaatactcgcacaagaaaaagttacgtttccaaggatagattcttccaaacgatagggcattttgggaattggagcgactaaatttgtcgctccaaagaaggatttgcttntgtaacaagcaggcgacaatgggaaatactttaggaaaattttcgggggattactgtggtgattaaaggattccattgtaaaggtgttggaaaaagtcataggttgcacataggaagtcgttattttgaaaagattgcaacatttgaaagttaaaagaattaccaacgataagtttggccaccttatagggttgtaggggagtccttgtggtacacgaccttttaagtttggcccttgttaacacatgacaattctattttaacttaagcgtgtaaattccaattggggggctccaattttctttgtccaaattacatttcccccaaggaaaacgtacaacgggcgaacactggcaccattccaaccgcttgtcaatcttgtctggggccaagggtttattccaa

SEQ ID NO: 418082 - DNA, 719 bp, Homo Sapiens
agcggatctctccgcatctgacaacagacggagcagaggaacgtgtagcgactctaagcgcgtgtgtatgtggccgtgtacggacgttggagacttccaggtagaggccggctaggaaactggcgtaacgcagtctctcttctcatattccatgcaagttgcgatgctatgtgaagagggccagctatcttctgctcttgccatacaagtgtggcagcagctgcctgggaataccatgacgacttcattggggaagaaagtagcacagtggggagtcttcttctgattgtctgtagtagcagggagcctgaagacagtccagctgagtagacgtacactcacggtgcgggagacgtacacgctgcataggaccagttgtgcatgggctcgtcatagatcgccaaaggatgattcctagatataccactcatgccatgcctcaagcccgaaggtccctatgggggctgaatcctggcgaagccctgtcggtggggattccagcagcgaataggcatgcaaagctgtccaacaggagtgttacgcgcttccgcaatcgggcaacaagctatggatcagaacgttctcgttagctcccccacgcgttgcctccagaccgtgcacaggaatgtagaactcccctctaggctcggatgccaatcgacagtggattaatcgattgggcctcgtctcctaagaggaagacgagaacgtagacccct

SEQ ID NO: 418083 - DNA, 1001 bp, Homo Sapiens
  misc_feature (696)..(696): n is a, c, g, or t
agcggattgtcgctttctaactacgtgcggcagtctgtgcaatgcctactaccttaatactggattgtgcgctccagtggacatttcacctcaatggtctggcacgccatcgattgtccatgctgcatcgaagtgagaagtgaattgtacctgtaggtcacactctgcaaccgagacccactctatctgtcaagtcgctggccaagtactctgcatgttacctgactagccacatgtggccatactcatacatggagagaaagttgcattgtgccttctagtgatccatacattgctcatatatctcactgctgagcaaacttccgtgatcgtacaggctacggcgcaatagatgtgttgacccaattcgcaccacaaactcctcgtctgcatactcaggttcgttaactcatgacatctaatggcacatttcatggtgtgccaagagtgcgtttgtgcctttaacatctttcgtgttgcccttcaccaagtcgcgaatccacatatacgctaatggagtcgagcgtctctgccttccggcgtacccttggtagatgctttccaagcgtcaattccgaccgtggtccaccagtgccagtgcgcatctactggttgttaaggcctggaccgcgggtctctgttatgctctgttggctcctaccgttggtcaacaccaccgccagaggtgagcgttgnaggaatcgcacattctaatggcgcacctttttttgttgacccgggtatagggcgcccattcttcttttttatacggctattgccaccactcttcttcagcacctttggcgcccgtatgcttattgcggcgccgctttgtgcggttccacggacggcgaacaggaccgcagtcctcttgtggccccattccatgtcggccgtgggcgttttagctggttggcgaagaccgggattgcctttgtggccgaatgtcggcccctgtaggtgtgccactttctccccaaaaggagcacaaggcgggttag

SEQ ID NO: 418084 - DNA, 737 bp, Homo Sapiens
agcggggttggattctgtgggatgcagagtgaacatggtccctgtatcgttaccattgactgatggcagcatgcttgccgaagccgcatgccttggacggacctatgcacaaggagtcagcgttgtccctagaattaggatgaaccttgggcgccggattcgtattaactcgaattaggacgtctcattacagcttgctagatgtccttgtaggaggcgttcactaggagcagttgagacatcagatggccaagaggattctgggccgtactttgagtggacgcgaggctactgagggcctagtcctggccgaggggaggacaaggcggttggcctaccgtaaatggatgtcgcgtcacactggttaagctcctactttagacggcgatcggtagttacatcttagacaggaccagaatgtttgacgaggtgccctggtggggagatcaactttacgttagaggatggttgatgacagactacgccgtgagtgcttacacatttggaaggggtaccgtacaataccaacccacgaggtttcggccttccaattcagtggatatgcatttgtgactcgtatacagcagcggtaagttgattgagcctcgagagggttcgtaggagtcccttaggggaggaggacttgtgtgcaaggaattgaccagcgatacgtggcctatcaacaggctagtactcatatgcccgggcaaatctagaggaggttaaagagcccccga

SEQ ID NO: 418085 - DNA, 795 bp, Homo Sapiens
agcgggtgtttctcgcgcggtctcccgtcgttccgataggagctgatcgcggtgcggccaaggctcggtcgcattgttgcaggctcattgcgaagctagtgctgattgttagttgtgtctatgcaggacagacgctcaatgagtaaatgttacgcgcgaatacatcactgattgcccacgaggacaaatgaatcttccggaaggttcgtacaagacttggcgtgaactcgcgatgaggcgcgtaggtgcccattgtgaaatgctgaaagaggcgtacggatggctcaaggagggaaggaaagagagtggtataagaatatagttcgcgacaagtatgggaggaaaaaaagcccgtctcagaaatagaggatggtcccccgcagtgtgtcgcacatgtgttacccgagaaggcagcatagtaaagttacactggatgattggtatctggggtacaatgaaatatccgaatcgatgctagaaggaatgaacaatgttatacaacatatatagtaaagttgctatcaatgaaagtacgatcaacaaggaagtttcaagaaggtaaaaaacattccaccatttcaatagagaaggggtgaaacaatggtaatgcacgatccacaaaaaggacggaagcccaggaagccgaagtataagaaaaccggttatcgtcagttgaaggatagggaggcatagaggggaaaaactacaagtccacagggcagcataccataagagtaaaatcacatcgaaaagaaagtaagcacatatagcattaactataggtggacaacaaca

SEQ ID NO: 418086 - DNA, 1385 bp, Homo Sapiens
  misc_feature (305)..(305): n is a, c, g, or t
  misc_feature (854)..(854): n is a, c, g, or t
agcggttggggcccatcaggtatatactctggagctgggaaccggagctagtttctcgtgtcgcggcgttgtctcccctcgcatgtcgtgtcgcacctggcctggctcatcgtacatagacgtgagcctgaccttggtctctgggcgtgtgctcatcgtctcgcggtgtgatagtcgccttgcgtctccggagcatgacgacgcctgacgggtttctgtcgtgctctgggtcctctccacgcgtgcttcggcgtagagtttgttctgagaaagaccagttgaccaggaagtatgacgaacaggtncccatcgagtagactcgcacgtttgggacttatccagggaggtgacctagctcgtgatttggctgtcaatgatttgccagtccaaactactcaattttggctttgcgcagtggtctcgtctggaaaaggaatccgtcaggtaaagtccaaaaagatcctatactgggcaaaatcctatagatcattgccgcggtcgcaccgacattaaccttttctggcgttgaaaaggagtttgggtgaaccaattgtgtttcccgtacgggtgtcggaatattcgaccaagcggaagaaccgcgtgcaatggaagaaaacggcaaacgccacgaagtgggcgtttcaaaacctgtgaagcggggcactgtcccccgcacgtgttttcgtccagggtaattggtttggccgacgagaggccgggttgtggtcccgcgcaagatggtctttcgcccaagcttcgcaattgcccctacccgaagaggcttccaaagtggcaagaataaagccggtccgtttatggcctgtgtgcgttgattggagacaccaggccaaggngaaattgttgcggaggtggacaacgtcggggcgacttacagttgcgtgacaagagttggtccgtgcctagggtaacacccaaaagtattgtcttggtggccctttttccaaggcacttgtccgcgacgcttgaattaacgaagtgtattgtcaccttttgccgttcccaagactaaatgtgtgcgccggtccccttgtggggcacaatatgcgatggggtggccgccttccccagaccctcggttagtttgacaccccaatcaccatagggccgaggatgtacattaattacacttattccagttcgcgccaaagtaatgactcggtttctttgagagataagtgcgccccattacagggcggaggggttcaccggcgacgagcagacggcacgtagcagacacggttaggcgcgctgagggaaaagtgtcacaggcttctttaggcccccgcgcgtctctcttggtggaaacacatttgtgtaaaagatagcaagacgctcgcacaggtggaccaacaagtgaaaacctc

SEQ ID NO: 418087 - DNA, 1138 bp, Homo Sapiens
agcggatctgcctcggcagccgtcaccgtgcgaagggagtataggtcacttgattccctatcattagggcaacctgtatgaatggctccttgaggatactcctgtctcgttacttcttagaagcgagtgaagttataactgctgccgatgaaggaagagctggcgcgagtcaacgacaagcaaggatcatacgtaagagcccattatgggagcgtgtgcagtttctcataagaagccgaagagcacagtagtacctatctacagtgctcatgcaggtccataaggacgtaccaatcatcggatgcacttcggaatacttcgcagcaagagtagcggaaacccattcgaggatgcaagagaataggacccacgacgacttcgcagtagagcataggtagccagaagtggcttacacagaagcgtagcaagcacaaagtgtcaatatagattggagagcgtaggatattaccctccgtatttggattacctgaattgaaggatttgaagcaatgagaggggaaagcaaagaaaggttttacccccttaagagaggaagtaagcaagcgtaagcgaagagacctgttaagcaacctaagcgagaattcccacgtgaatataagaggtcaaccctaatgggagccatttttgctgttatctccgtgtatggaactcggtagggacaagttcaatgcggtcacaattgcgcacgatacattgagatttgcacacgaccccgtccggtaaatattaagcaaggtagtataatcaggttggacggtggttagaaagcacgagagtctttaccaattgtgttacacagttgatacaggctttgacagtcatgtgggagaggttttccaccagacaagcagagcgacagaataagttagatatatccacgaaaggggggtataagcgggggtactgtcacatataggttcagttaagccttgtcacaaaagaattttctgctatgtcctcgcttgggtataggcatgaaaactatagcggagccatagtacgacgaaaacacagtttcacgttggaaacactacactggcattcgaaaaactaagagaaagaccgtacaacattatatagaaccgcgcgaggtgaactacatttggaggaaacacct

SEQ ID NO: 418088 - DNA, 865 bp, Homo Sapiens
agcggctttcgccctgaggggggccggtgtgcgacgcggacgccatggtccactctccggcgcccgacgctcgcgtggcgtgggcagcccgatggctgctgtccctgctctgtcgtccacggacggccgcacgggcgcaatcctcgcgtctcagccggcacgacctggcttggactggaagagcctgttgagcggcggctcggtcttgctcggccatagtaggcctgtgcgctcccgagtcggacgccgggcgtcgaaccgtgctgttgcgtagcacgtgtcgcgagccacggcactcaccacgggagcactctggcgcctggcgacgtgtctaagacaggaccagctgtaggacctgccattttgtcgccgcgattctcgccagaaggacacagtggggaagtcgcatccggcgcatggctatggagggagcggaaacactagggaaccaaacgagataggcaaaacttaactttgccagcgattgtacaatgcagcattcaagatgttcgacctttggaagcgaatgacaacacaaagattaagtaactctatcccaaggagacgggccccgtttgggcacaaaagtcctgacgagcgtcgagctaacttgtgatggaataactttgtgaatgcgaatcaaagacttggtgccttcactgaatggtatgtacgcagcccgggaagctaaatgcttcgtcacgtacatgaaattctcagtgaataccgagacgcatggcaaatagacaacacaggaaaccaccgtagtgtggtggatgaaatgacggaaacactaggactaaaagttcccagcaaataagaagcgctaaaaaagtataaagagacaaagaggaaaacatccccg

SEQ ID NO: 418089 - DNA, 1002 bp, Homo Sapiens
agcgggagggcgggatgcgaagacactcacccggactcaccccgaaccctgcgccaggaaagacacgcgcgactcggtccaccttgggcctgaaggcaggggagggaagctgatagaaagctctaggggctaacgctgtgcgaaggtcccaagattacgtacttgcaggttttccgtgttcgcggcacgatgctcgtcacgcattcgtcgttcccacagggatcgtagcgagtatgccagaatttgctggaagcgagcgtgaacaggaccatagagcttaagggaagctcaagatgtacattcccttgtgctcctgctcgaaatggccggtcggttccactatacctcagtcgctgggccttcgcctccggtgcttaggctacctctgcacggagactgcggatggcggctgggcaggtctgtaggacgaggtccctgctgcgttccaggccgggagacttcctccatacgggcctttgacaggggttccgaagatgcagctcgggttgcacccagggccctttccccggacatgcggcccttatcaagtgaggtgcaatagctttggacttgtcgacgcgagggcattcaggttcgcagtgcgagcggtcgtccttaggggcgtgaagcgccgagacggacctgggtgcacttcctaaggttacgcaacaaagatagttcccagccgcgtggcggagaaaaaactttcggaggaaaagtcctggcttgcaagggaagaaaatttccccaaaaggaccatgggctggtttcacccttggagggggagaaagtagacgaaaggcggttggtggaaaaaaggaccaattcctttggtggaatcaaacacacagaaactgtccactgatacttgaaaccaaggtatttatgggaaaaacaccaacaccctgattacaggagacagaagaaatgattgggcagtgtttggaacatttttggtaattccaacgcagaacttattggtacttgtgggacgcgactcga

SEQ ID NO: 418090 - DNA, 896 bp, Homo Sapiens
agcgggttgcgttctcctgcgggcggcacgcgtggtgtcggcgtacgccggcgcggccgcgcgtgtgcccagagtgtggcgttcgggtcgtcgggcccgcgcgcctggcgcctgtgctcccatgttgcgtggtccgctgcctgagttactgttcagtcgcgggagcccatcctcgggcggcgaatgcgtgatgcttggtcccgcgatatgcttggggttgtgaccgacggatctcgcattcgggcgtggtccactgtgcgtgtgtgcgccggtccctgtgtgtgctgggcggagcatggagtcgctgtgcgggatgaattgacagaatgatgagtcgaggatggtcctgctgtgaacgcaagaatacacggaagtggctgtcactgggtagcacggttggggcatcgagatgaaatggccgtggatgctcgagtgcgggcgcaaggataacgtaaccatgactgggaagggataagcaaagtgtgaagacaagggggcaatgaacgggagacagagaagtaagcctccaagtgcgaattactgcttagtgacccgatgagtgggaaatggtaggaaccgtaaatgagttcaatacgaggaagaatccataggactcaactaaaagctgcagatcttagccgaattagagggaggtcagcaacggatgagaaagtatgcgacccgagtttcgtcggggtgagctgtgcattggggatttttcggcacgatgcctgtgaggtccggggagggaaacgcggactagcattgcagtagttcgaccacccgagtggctgccgtagggaggaactgaccctgcagacacgagatgaatggtgaagcgatagttcgcaatggacttgggaagttatgaccggattaggcagctaaggaattgc

SEQ ID NO: 418091 - DNA, 1037 bp, Homo Sapiens
  misc_feature (1025)..(1025): n is a, c, g, or t
agcgggtttcttccgaacgctgccccgtcacgctgagacgctagtaccggagggtcccgtggcccgagtgtgagtgtcgagcgtttcttttaactgagcgtctccgtcgtctgccctatgacctcgtgacataagtaactctgtcataccggcagagttgatcactccgtgagtgacatttgtactcgccggaggtcctgacagcaagtccggagggagaatcgtgaagcaagaaggttagcatacctttgggacggtctcggcctcggaacatgactggtgacgatcgtccacagacgggtaacatagttagagctgacgtcggcggtctacttaggcctcggaagaaattgacgcatgcgcgtataggagatgagtcgcgcagaagagtgtacgaaggtaggtagtccattgacacagtgccacaaggcttgtcaccaacatagtgctcagcttgtacctattatggttccatagatagtcccattgcaaccagtagtaatggcaaaagcgtaagttcaccgtcaggaagtagcaatgggggttaaacaaaagaaatgtgtaggccactttccagtggtggaagtaacatctaccgtggaagtacgtcacattagttcataaagacgcgggcacgacgcgcccagagacggtcgatcaaccggaaagaatacgcaagaagttcggaagtttaaatagaacagcagatgtgggcaagctcgaaaccgtacagtgatgatggcaataggggcaccgaaaaagcaatagttgtggcgaagagccagacgagagataacgcacgtgggcctagataaagaactactgccagtgtaacggaagctattaaaagccagattcattcccatatcgcaagtagtgcggatgaaaaagactcccatagttgctacagattccccgaagagaatattgcgcttgattagaggatagggatattcccaacgggttaggagacactgttttcccgttgagtggaactagtggaaattagagctatggctcgtacncgcctacaaaat

SEQ ID NO: 418092 - DNA, 1029 bp, Homo Sapiens
agcgggttgtcgactgtggagtcgccgttagtacgggggtctctgcgctgcaactcggtgctcgcgtcgacagggcccggtgcaactggtgtgggcctgccggttgctcctgagaacctgcaccgatagtggtgtctaagatcgcagaagacatggcaacggatcagtacataccggtgagggctaccaggatgattaggggcactttctccatctgagtgcgtctgcaggggattgtatgttctcatgaatgtgttgttgtgcctagtttgtgacaactgcaggacggcaacagcaaatagccgctaggtatagcgagggcttagtagggcttaggagaacgcacgcgggcgatgtgggagatggcagcgggactgttggttcccctggtggttttcctctactcagtggccaaagtgactgtgcacggaagtagattattcctgggagatttagactgactgctcagctatgtacgccttggtgttggcatccaggggttgccgcacgtatttagaaccgtagagtagggagcggctttagggagagacaaccttgctctgagttaacctgaatacgtcggagtctgtttaagccagaagaaaccctacctggaggagcgcacaaagaggatgtgaaaagccgtttcgacacacagcgtttggctgaaacatttccgtagaaaatttccacaaagttggtacgcacttgttactggtgtaatactagaagttgggggaggaaagccacggatgatgcgacgcagaaccagacgaaggggtgcccaccgagtttcaatttaaagacttgccacttctttggaaatggttgtggtgacacccttggttgaaatagacaaattgacagacgtgggtaagattacccatgtggctgaatttttcctccccgtgtgtcttatgagatgtctgtgagagttcgtagtttactgcggaattgtatattgagagcagcgcaggaattcaagtaagtactgccccgctacaaattcgctacgatagtgttgcgcac

SEQ ID NO: 418093 - DNA, 814 bp, Homo Sapiens
agcgggtgtgctccctagtacgtccctctgaggacatgacgggcggtcgcctgcggtctggtccgactgtaagcaaggatgagcggtccttggatggtgtcgagaggaccacttcccgtccagagccactggttcattattatctgacacaagtcccggagctaccaggatgcgccaccagtgtctggaggctccgaggatgcaaaggcagaagagctgacacagtgtgcatggctggagcctgtggtcgagggaggctcagtgaagacgtggcgctccgtggctcactacggcggttaaaccacgaggggcacgaacagctatcgccgatggcatgtccgaaggtaccgtggtgcgcatagatcgcccacatattccggaccgtgtgtcaggggttacggcataatccactgttgcgtgaaaggcaattagcatggccatgatagacagcgagtacagacttgcgcgagagcacagggcttacacaagactcgatgaattaaggaggaaattaactggggacaaggggaatacgggcgaacaacgagggatagaaaaacagtgaggttgaattggggatatgagagcgatggaccggggaacccaatacgaaggagttcaaggtcgagtaacgccatggaaggatcacgagcaccatcgtgcattgatcggaccaggcattgaggcgatgggaaacgcattcaattggattgaacagtgtatgggccgcattaattgcgcgcttggacatgtccagtgaaatcggttcttcccacataaagccggatttaagtaacaggaagaagcaagaacc

SEQ ID NO: 418094 - DNA, 942 bp, Homo Sapiens
agcgggtgtctcgctgtcggtctccccgttggcactgcgctctgcgggctgacgtccggctcggcggcgaacgcggaccgagtcgcgttctgcgggtctgcgtggccgtttgtcccgagcaggtcgtcacctcgtggttgtcgaagtcggggagaacggacggatcagctacaacggaagtaggtcccagagaagtaagtggaggttgctgcattatgagaacgtacgcagttgaatagcatgttctcatgcagtagtaacaatgtgccataccttgttgaccacacttgcatgacgcccgacgacaaggtctcgctaaattaacacgaggcgaagtgcgcttagaaacctccgcgtatatgggacttgcctggctgatagttacctgtggtgtcccatctgcaggcagattcgtcacggcggatttcccggggtatagcgacggaacaaacaataacttggtgaggcaatagggatggcgggactatgcactgtcactaagcgcatttgggaagaagacccaccatgaggcaacccgagccatggacgcaagtaagacacaggacgatacatcgggggcacaggaatgacggcgagaagcagaagcgggtagagaacgactgccgctacgagtggcgatataagaggccgtagtacgcgggcaaagacatagataagggaggggggagtaaccagattaagtgtacgcttcgacgggcgcacggtgtatccagcgggtatcatttgaaggcctagccacctctttgcgaacagctatgtggagaccccacttccaaatacgaatcgaacgcatcttgtatgtcgcctatgtagatgtgatcccgtgaacaagtttgccataggacacgtcgggtatattccccagttaaagcggaattttatattaaaccgggcgaagaaagcaggttaacaccccatggt

SEQ ID NO: 418095 - DNA, 816 bp, Homo Sapiens
agcgggttgtagacctgacggaacctcccggaacttggatgctggcctgggcatgtcatgcgtgaactatgggcctggtgacaccttgggcggactggccggagggcgcggcctcgcgaggcgtattcgcagcatctccatctatcgtgtggttaccacgaatagacactggggctctagaacgtgctagtagaggcctccgacgaagacagcgaggatcctcaatgcagtgagggcagtaaatgtatgctgtagtccaaaagtagaacaccgcggcgttgtaaccacgttgatttgagccaggagtaatgggtgcatcaagtagtcaccatataatacatgcgttttaagtacgaaaactcctagagattggttgctgacatgtccaccgcaaggtaagttaacggcgccgtgtgccaagcgacgaattgttgttgcacttcgtaagcaggtccaacgtgggtgcgttgggatagcagagaaactcacgtaggtgtaggaggaggcaccatttgctagcagaggagatagaagaacatgagttagcgaaagccatgaaggagagaccaatgagcataggggagcctcggcggtttgttaactgcaaatgtcgttagggtccctattggtacaagactcctgcaattcgtatactgggagggttatccagcacttcagcttactgtcgaagtcctcattagactatgtttttccccagaaaggaaccgctgtgagcgggaccaaaaacgaggtttgccctaatacgcattaaagaatgggccttctataaatcgaaaataaatcgatcgaggaagg

SEQ ID NO: 418096 - DNA, 978 bp, Homo Sapiens
agcgggtgtctcgctatcgagctccccgctgctcctgcgctcgtggcgggctggctatccggccacggcggcaaacgcgtgaccagcccttctgcaggtctgctggcggccgaagtgtcccggctgacgcgacctcggtggcgtaggaaatcgggcagagacgaggatcaactagcaacggcataggccccaggcagctaaatggtagctccacatgagagaacgtaggtccagtgaatagcatgtctcagacatgtgaacaagtgtccaacccagggaaaaactgtcatgagatccgagaccgcaaagttggcttagctaacatgggtggaagccgctttgagtccacgtgcccactatatgtgactgccttggcttgacagtaccttgttggttgtccctatgacggacaactctgtcagtgcagagttccaggcgatttacgcggcagccctatcgcttgtgaggaactaagagtgaggaattattgacttggcactaagtgctttgggagaagaagaccaacaatgggctaacgagcattggtagagaagtaagacgacgtaaatacttgtggaggcagaggcttacaggggagaagtggaagggttagaggaacattcctgagtcgtgaaaaagagacgtagacgcgggcagacaaagtcctggtgtgaaattatcataaagttcctcgacgagtgacgaaggtaccaatggcttgctttgaggacacgcagctcgtttcaaaagcttagttggaaactcatagttcagtaagaatccgaaggtgtattgtgccgcgtttgactttgatccgccgttgagaatgttccccgtgaaaatcgagcgctcttccgcaccttaaaatgggactttcatttgaacagggggacaagaaccatgtagggccctccgctggggttatttcgggagaaatttgtaggcatttgggttgtcacttggaatttgatggcccct

SEQ ID NO: 418097 - DNA, 767 bp, Homo Sapiens
agcggaccggccgcggtaccctagccgtgcaaaggtgaccataatcacttgttcctaaacttagggacctgtatgactggctccactgagggttcgggctgtctcttactccttgaccggtgacaattgtcctgcccgtggagaggcgggcgtaactacagcgagacgacgaagaccctagtggagctgctaattgtataaagtgcaagagcagtagctaacaggatccacgatgtcctaaacgtaccaaagctgcgattaaacaatttcgcgtaggggcgatcttcggagcagaacccagagctccgaggcagtgcacatgctaaggagcttcacctaggtcaaagcgaacgtagctatacgtcatatggcatccaattaaccttgacgcaacaggacacaagattacacctagggactaacgagcgcaactccgtatatctatagtccagtatacaatcaactacgggtggactgaccatcgattggttggatcatggacagtccacaagtggtgcatgccacgcgtattgaaaggttcagtatgattcacacgagttacaagtcctacgatgatcgtggagttcgagaccgggagtaactccagggtcgcgtggcatatcgtaccttgcagaatgccgtccgctgtacggagtaggacacggagaagataagtgcctgacttcacgatgagcgccgttgcctgcgtagaatgcatatcgatctcaaccttagtcattagtacccaggaccagcgcaataaacag

SEQ ID NO: 418098 - DNA, 990 bp, Homo Sapiens
agcggagtcgcctgcgccaaccagcttctcaagcttgtagtcgtgtcgctcgcctggggtactccgctgggcggcgacgggcgcgtgggggagggggttcgggccgccacccgcgagcagaggacgcagagatgtgctgcacagcaggaagggcccgcgggctacggaggccagcaggcccctcgaggcgagtgatggggccgagtcgattcgacgcgggacatagcagggcaccgtgcgccaggtggctcttccgagcgggaccacgcgactggcaggcgcccgtgagaaggaggctccagtgcagggtcgggtctgcgctggcggtcggccgctgtagggtgctggccggaccgggcttggactgtggactgggggggcagatgagcgactgaggaggcgcgctcggtcaccccgaatccggcggtgttcctccggcctactcgtattccgtacacactgctacgtcgacctacgttcagttgtagcccttgaacggtgtggaacgggggcgaaaatggttgatagcaaaaagttaacatatggacgcgacttgtcgtcaaattggcacacgaacattagcaacgagatgcgtggacatgtggcaggcagctacaaagggactccccgcgagagacagagccttacccgtgggtccttgagacccacgcgcccttgaaagcggcccccagacaagcggtttcgttagaagacactcacgaatggggtgcatcgatgtgccatctgggcctgacatgtgccgtcacgacgcgtgtggaagacagaaagtctcggctcttcgccagttgtacccccagatggaacatggaaagggcaagcaactcccatttagaagcgtgacgtgtgtgaagttcgcacatgggtggggacacgaaggcaccccaaaggaaaactaacagtatgccgtcccccacattcctgattctggttggcaattaacctggggctcctggggcgatttaaccgtga

SEQ ID NO: 418099 - DNA, 1194 bp, Homo Sapiens
agcgggttgtagaatgaggaaggctcgaaagcttgttggcttcctttgactgggaacgctctgcccgccgtgcaaccaaggggggaggtgccaggcgagcaaagccaggaactcgttgaaacgtgcgcacgatgtggagagttctaagcagtgacatccaccggtgtggtagcagacctagctagatgatcctgtagcgtacaaaatgtgtgtcgtgtgtctcaatggctagtggcttggcatgaactgttgtcgctgcattgtatgtatctatgaaacccgcggggtgttaaaccacagtagtttgatgctagggagtggcccctcaaaagtaggaagccttggatgctgggcgttatgtcgcaaccccactggatctttgagctagtcatgcagagtgagtatcggaggaggtatggaccgcgcgtggcttcatgacactaaggagaacactgggtggatggctaggacgcaaaatcatcgttcaccttgggtcgcgattaggaggctgaggggggaaataagcatgtcgttatggcctcttggaaggaagtgaccgcaacggtttgtgaacggaattactttattggtaacacccggggtctgacgtaggagcacctaggtggagaaacgcaattattcaaaagggactccctcggatgtttgtctcaaggtcccataatagttgtactttagagccagtagcaagttaattccccaaagaaattaaaagctgttggggaacaaataaacaggagggggggacccggggaaatttgtaatgtggcacttgtgtgatttacacaaagtgtctctgggaaagaataggatactagcatatgtaattaacctgtggcgtgatatggtcccaccctggtgctatataaaccccggcaagtatggggattcactacggaagatataatcatccgggtcaaccctgtgtggtgtgaaatccttcgggccaggtatctatatagttaggctttcacccagtaaagagtgtgttgtcgcgaagttagtaaatgcaaggaagttagctataacacatttagaggagtagtcccgaaacggtctgctggtaaacacgcacgaagtttatgggggaccattatccagtgtcccttggaaatgaatttgcgaagactaaaaaagggttgttgccattagagaacacccccgtgatataacagt

SEQ ID NO: 418100 - DNA, 1022 bp, Homo Sapiens
  misc_feature (997)..(997): n is a, c, g, or t
agcgggctgagcgctaccggccgctcgcggatgaagcccggcgatcgactccgcacgactctgtcacggccacgaactcagtagagcgcaccaaacaccctggacactaagagcctctactggacctcattctccgggatctgcaactcagcttcactgagatttttacgcgcctctcatgtcaccaacctggtctcacgtgaacccagccataagtcctaggattgctcatcagagtacgtgtagacggccgaggtcactctgtccattgtagccgctgtactgtagaaacgatgtcgatgaaatgaatgcttgtgaagactaggacggttccgccgacgagcacgacacgatgcgtggcggaagcttctctgtcttatcttccacacagatcttccactccaattggtaccgtgcttctacccaggttacatgctgggccgccatcttcgaggaacatgtcgcgaagaaaagggctgttaccgaaaacacatgtaatcatatgggtagcgcgtccatcatatcaagtttgtgtaaacatgatgcgtttgcctgcacccccgagagcaggggtgcataaatatctgcaagaaaggcgtccctagctcagtatgcctagaaggcaagaccatgggggcgtaatacgattttctgttccctgaaacccaccggaaagaccctttaacccacgcagtgagcactttagcatgtgtccacccatttgcttcactcgcatcgagactgcgtagatgtaaaatgttctgcatgtcgttaatgtagatgaactgggaagcggaagaatcatgtcgcgaggaaggagttgaccttgttgacccaccgattcttgcatgtgatgtagggcttcacccaaattcacccttcaatttcaccacctttcctggggtgcatccaactcgagagtcatatgtccttctactcaaaaaaggatccaatgggtatggccaagggatgggcacccagaacaatttccgcgcantgtaacatgtaaagagaccccttcg

SEQ ID NO: 418101 - DNA, 880 bp, Homo Sapiens
  misc_feature (769)..(769): n is a, c, g, or t
agcggggtatgccgaggcgggctggaatgatggacgggaaggtcgtggacccgtaaaagtgctgcaaccgtccgcagctgagcgtgatggccctcgcgtacggagccttgaccgacagacatgcggaagcaccgtgtgcggagacgtatagaaacgtgtgtatccttgcgcaagctcacagtgggagggcgcgaacaagtctgccacgtgccgtcagccggctgctcaatcgtggagtccacccctggaatgacacgcacatgctagccggagccatccctatctaaagacctggcacagagatactccaatgctggttggaattagcgcgaattccggctatgtcacgtatcgatcatatacgaaactgcccgtacacgttgccattgaattcccgaattcgaaatgaccgtctgtgccagttcaccacgtgttagacgccacgttagaatcggaaagaggcttgccttctgcccagaacccttcccttgggccgtgccggcaccccacgacaacccttcggtcttatctacgccacattcggacccaccgcaagggcctttttctagaggtgcaaagcagtgcaccggactaagctggacagcccaaggtatggcacaaactgcccgtctttacgcaagggcaagagaattgaaggccgatcgaacgaaactatccggcaacacgcggaattcacagcccagacaacttctaggcatgcggacgcaagacttctacttcgagactgacacacgcggtaaaaggcttngccgggattatttcctcgaaattagacccgagtacacgccctgtggcgggcagcgaaaaattattattaatagtcctccattccttgggaataattgtccccatggaaccg

SEQ ID NO: 418102 - DNA, 838 bp, Homo Sapiens
  misc_feature (714)..(714): n is a, c, g, or t
agcggagtgagcgggccgacatgatgcagctcaatgtaccgcttagccacgtctacttcgagaaggttctgcttcctgtaacaggcgaaaccaaggcgctggctgctgagctgaaccagctgcgggccatggtagcccactcaatctggcatgtacgtctaccagcgctagagctgcgagagctgcgtgctgcggctcagatcaagctcgaccgccaacgagcgcccgggctggaggtttgatagggactatctggcgacaggacctggtccactgtgagtgcagaacgctccaggatagatcccgaccttgaggctgcgtagcctatgaactatcctgtgctgcctattatacagtgatacgcagatgacatgccatccactggccctgtctgtagtcttggcgaggatagattgatgtcgctgtgaggacggagatccgagttccttgatgtgaagatctcaggaacggcaggaggttccgggaaactctcagcgagcaggttggccctcgaggtgtctgtgtcccatgtggccgccttgacgttgggccatatgccatgatgctcgtcgcgcagactcctgaaaatcacggatccgtcactgctagttatcgagtgcgacattggcggtaccatcgaatcagttgcatgcacagctcgaagatgttgcgtaccggttcgcaaggttaggcgagaccatgactgacggctgnctgcccagcaacgcggagcatgttcccgccaggccaagcactaagccgacgactacgcggcgccagttgctggtccttgacctgtgacctggcagtctctgtcgcggacacgaaccgagtccct

SEQ ID NO: 418103 - DNA, 1075 bp, Homo Sapiens
gagcggtagcacgcacgtggagcaggaggtttcggggctaacgttggaggtacctgggacaccgaggtgctactgccgcagctgtccacgtcatggtgatagccttccgcacgggtcgtacccacgtggaggcatctgccgaacaagcataggtacgtcgtagcgaatgctcctaaaggtagcgtcacgtactagtgcatccagtctgtatgctggaatacggcagagacgtattgctatgcttggcgtacgtcaatgtaaacctctttattgacgctcgtctcaacgtgtgccgaattctttatagcccaagtatgagcaaagtagttatacgaagatgggcacgcaagactcggtatgcattagaacggtaccaccgccgttgggacatggagaagcggggggtgcacatcacaagggactcgcgcgcacaaggagtcaaaggatgtattggatcggaaaagtattgggtttcccactactttggtacccatacccaatgggttacacaaacacttgggttcgcatttcactttgtggccccacacgccacttgtgatccccttcgagaatagggcgaaaatccgtatatggacgtggacctccaacaggggttgatcctggatgggcaatgcgtggggtgttggggaacagtgttgtgccacgcattggttaggctccaccagggcggaacattggaaacggggaagcacatatgcatagggcctacgaggaatgggactggcaaaggcaattgtaggtggccccatcctatgggtagacacctctcgagcagttataaaaccacaaaacggggcacatcttggggcagagcgtcgaatttccactggacgtcgtgttgcaaatgagttcgctgtactcatgcgagacaccgtgaccacagcgttaggactacccgctgtagttgcaacacgatcgttgttccacagattccccctgggggcgagaacgggcactggggacagggagggcaaggcgggtatcgggtcacaccaatgctggaaagataaacacacccggattaccgaaaggatctcgcattcgaaataaccca

SEQ ID NO: 418104 - DNA, 733 bp, Homo Sapiens
agcggagtgtgcgataacacagtactacaacgaggtgcttacgtctcgttgggttgtctggctcctcgtcgctagcatcgcattgcttccttgaccaatgacgatggggtgcactctaaacagatgctccatgttattcttgtgggggtctgcagatgggcagatgttatggctacgctgagatccgaggggaaggagtaaggtggtgggcctttcaggttagcttgattgccaactccatggagtggttggacataggacggcgttgccgatcacactttctaagtgattattagtaacttcggagccgtagtctccaggacttgggattggggcccaaactcgtagggtagattgtatggacggatgaggactggtcttgagtcagccaagggaggatgtttgttacaagagttgagagcaggtaaacttgtctgtggtccactttcacctgattctagggcagtcccagtttcgtggtaagaactagttagaggtacaggctaagacccgagaagactttgggcaggggtggtgagcactctaggagggttcgtagcttcccgtgtatccccgtgcgctttttagtattcctccgtctaccgttgaagcttacagaagggtgaccaggctgtgtgtcaggatgtgaacgaacgctgtggtccatccaggcagggaaaaaacttactgagtatggagtgcatcagcccagagatcgtctaattggtaccaa

SEQ ID NO: 418105 - DNA, 837 bp, Homo Sapiens
agcggagagtctgttggagatggaatccgatgaggggagctctgctcgctgtatctgaatggtgactgtaggccgaatgctgtgtctgactggataagggaccgatgcggtgagccccttgagttatgtgcgagcgtactcgtgcaggcagaccactgatggacgggtcgcacttggtgggacttacggctcttggtgcccacttccatgtgcgggtctcgctcggtgagcctggatgctgccctgtcctcggtaccatctcgggagttggtcgagtgactctgtggaacgatagcctggcttcctgccggcaccagctaaaagatccgagacgagatcacgtgggttacactgaagttgggtggtcgcaaagccacttgagagggcaaacggacagggactcgggacgaaatttggtccatgtaccctgaggacataaagcataaacgcgcaatggcgatgatgagatgagacccgagtgggctccagctatgtctgaggtgatccccctgacctgtaagggggcgaaacttttcaggaggcccatggctcccttgaaaagggagccacattcgcgaatgaatagcagatagtggtgcgccatgggagtagttcaaagacgaaatcgttcttgaccactcttggagttggccctcttcgacgatgacaatggtatcgagccactgcgaagtcgaggccgtaagtgctacctcaaattgtcgatgcgacaaccttcggtaacagaagcgtcttaatgtagtcgccacgctttgcccgagaaatttggacatgtgtttaaaaacatcgtgccaaggaattttcccatagagtgtccct

SEQ ID NO: 418106 - DNA, 938 bp, Homo Sapiens
agcggggtgtgcggcttcgtgagtgtggccgttagcgagatgggaggtttcctgttgcatgagtgtcccgtgagtatgtgccctgacgtgttgcgagcggcattgacgctcgcatgaggccgtgggtgcattccgttgacgtgtcgagtgactatgacaacggtactataccgccaggtaaaggggtgcggcccacgtctcgatttcgcaccactggcaatgattgtcatcgaattcgaggttaacttccgcgtgtctgtggaagtttttccatggcatcgatgcatctccttacatcttggcacgcagatgggataacctgcgaaagtgaatatgtgcccgtggcggaagggtgctgggtagcgagggcgtttggaaagcatgtcagaaagaagggaagttgaaaaggctagcgcgtaacttgtcagggcttgccccaatggggatgggccaaatggaagtccaaccagtcgcggtcccaatatccttggcaattaaactcatgtttcagagtctggctgttggtggaacgagagactccataccttagtgaccgcgttttcaacatcttttggggaacggaaccccctcggaggaaacttagagtggggtggataggcttacttgacacagtggagggatgatttacacatgtggataaacgctcccttgaccgagcggattgccctaagagtcatagggtggaaaccgcaatacaggtccgcaacagtgtcggggggcaatcttgcatgaaattgagaacgaggtgggtaagtgagcgcaaacgtgtggacatagggggcgagtaactgtgcgaaagtcggattaaatcccgagtaaataaagggggccttgttagattctgcacaatgtctggattgggtttcaccctcccctgggaactatgggattgagacgactttgaattttcataaaac

SEQ ID NO: 418107 - DNA, 739 bp, Homo Sapiens
agcgggggtgggctagaggggcgaagaatatgatggacgatggggccggaggataatcagtgggggtgatgtatgctatgggatgtgataggcgagcgagcgtggagcgacaggccagggacgccacgagtacgatgtgccagacggaataacgattgcctgggcggcgaacggaacaggcacccgagcagttgaccaggaagccccagcgggagatacgaagcggagcggcgagccacgcctgatagcttgacaggggtccatgcaagcgcccaacgcaagggactcggcccggtccgaattaagatgaccgaaaccgaagaagcgtaggccatactgtgtggaacgttgcacatttgggttgccgggaaggactgtggcccaacggtgacaccagggtgagctgacaagagatcgagccattctcgggaaagcggcgacgctagaagccattggcagaccagattccaggacacacattcagccaatgggagatcccacacaaccttggaaagagcacgtttcaaagaggtgatgtagaaacgtgtttcgaaaggagagatgtaacaagttaatgacagactgagagctcgtgtgcccttagagactggaggccacttatgtgagcgaaaatggctgcaaacggggatcgaattgccgtgggggagaggacacaactttgggtgactggggggacaaaccctagggggacatttcggagaatcagtttgacggaggg

SEQ ID NO: 418108 - DNA, 1251 bp, Homo Sapiens
agcgggttggtcttacaacctatatcccattgccctgagcgtatgatccggagtctcgggcttcgcgccagtgaccattatgatcatatcaagccacagtgaacataggttccgcagacagcatagagtgcagtcttccacatcgatgctccagagtgcagacagagcctgcagagcaatgaagtacttcggatctatgacgtcgataccgcgtgaaaattggactggacgtgaattttgctgtgcggctgtgtagagtgcaactactcggttacagctaggggtagaggtgccgacctgtaggcagtaccttaagtcaggtcaagaacgtagaagtgctttaccgttatggacttgcttgtataatggctacctgagagggtaccgttaggcgaacttatgccaggttgtctgcgtaaggggaatccaggtggagggaattcgagttcccctagaactcgccatgctttgttttagccaaagattcaatgtgcgaattgctccacaaggcaggccttctaaccagtatacccctttggggaggggtaaccttagttttagggcagacaaataaaacgcttgagatgagcaactagttcaccgtaccgccagggtaataacggtgtttaaagtaattcgaagttcgttcataagaaagccacagtgactacagttacccgttaaacgttattttgttacacagtttggcgttagttggtaagatgttacagttctcggcaataatggtaacggttggcccagttgtatcaggttgccacatcttggagagtggtgacggcacggaattgagatgaggaccccagggtgaatcgtggtccacaccgtaggctgtgaaatgtcccgcccaatggagagcgcgaacttaactcttccctgggataaccaagtggaagtctaggctgtgtgaccgtctccaatggtgagggaaatcggttctttttccgacccattgtcttccccaagcggcggagtgtgggtcggttctatggcacgaattcccattgggagagaacacctatgctttggtttgaaaccctccgacacagtagcgtttcagctgaagcaacgagggttttgtagagcgagagccctcaactataaaaaggtaagggttctagatactaaacttagagacgttagagagacttctcggaagggagttatagattcgggaaacccccagagcacacaagtagtgatcgccccacagggttttcttgagacgcacgc

SEQ ID NO: 418109 - DNA, 797 bp, Homo Sapiens
agcgggtgtgtcgcggtgacctacccgtgccccttggtagccatagtcgcttgtaccttgattagggacgctgtatgagagtggcatctcacctgaggggttcaggctgatctctgtgacttctcttggccaggtgacacgatgacctgagccgctcgaagagcgcggtcagtaacagagccaaagacggagacagaaacctattggagcttcagaggagtaagtgcaagacaggtagcctatgtgttaaactgcagggtccctaatagcgtacccacaaagtcctgggcagtttgggcacacattttcggcgagagtgggcgaaagcttcgggccatcaggaagcgccaacccttttcggaggccggtatcaaatgtgctacaggagctatcacacagggtcccaacatgtcgaacgctacgtatatctcaattttgaatccagaatttacctttgagccccaagagaggtgatagcgaacgttgtatcacccctaaagggaagtttaaccacgtcatgcaaaaggaccgttaggttccttagacggtctcaataattagacggactaagggagttagcagaagcgtctgaaaatggttggcagaatcaggtgaaaaatttcgcggaattggtagcaatgccaggggtaatcaaagaagggtgtcccggaaatgagtcacaccggacttacaacagtccagtatcagttgaatcctgagagtttcgggacagctggaagtaatatcccaatgagttcgacgtttacgactcctaagtttcaaaaaattccttctcc

SEQ ID NO: 418110 - DNA, 906 bp, Homo Sapiens
  misc_feature (303)..(303): n is a, c, g, or t
agcgggtcggtcggcctagagatctgcatcgcatatggctacgctagaacccgtggggaacagcgcaggagcccggtgaagggctgtactggcggggccgtgggctctgcgtgtttcatgtccgcgtcgtcggactcgtgtggttgcgccgctggggagagccgtcgatgcgttcggcttcgggtggtgcgtcgccgctgtcatagcaggtcgctgggtggcatgggcgtccgtgcttgatccccttccgtgttctggaagctgttggccaaccgggaacaacagaagggcaagggagacccngggtttagccaagtgcgagcgtaacctacaggggaaggcatataggcgctgttgagcacggggcctccggaaaagcggaccttgtccctcgccggacgggtgccgacagcgggggtcacgccctaaagaacggggccccaaagtgcgtgcaagcggcccagggggtccacagcgggggtcaatggggggcactcggcatactcgcgtttgggtgggaatatggcaacgggtatgcgatggcatattgttgcgacccgtgtggtactaaccccggacatattggggggtgagaggagaccggagaatgggttagaccatcacccggatggtgtggaaggtcaagcaaaagtctccgctccatacattgcgggcgcaaaaggggcaggtacaaggatgacggctgtatgcatagaggagcctgtgagggagcccacttcgccctggaatcttgtgcagagtttagacaccgcagccatgggtgtgctcagtacgaaaccgtgtggggggtgggcagttgtcaccacacaacagtgtcgggtagtccaccaagactgcacgcaatatgctgggttagtgacgccatcgctcgcggttccacccact

SEQ ID NO: 418111 - DNA, 1061 bp, Homo Sapiens
  misc_feature (858)..(858): n is a, c, g, or t
agcgggtgttgttccggccgctcccccctggccccgagctccgctccgttcgtgcgccgtgctcggctcctggagttgcaggctcgctgcttactatcgccgtcgtcggcttccttcagtcgcccattgatgaattatctagcggggagcatcaatcaacacacagcataaggatgttcctccggatgatcagtacgcacggaatgcggtgagacacgggtgacgaggatgtgtccctgagacggtggagtgtgcagatggtccaagaaacgacaaagaaggtaacattgatgaagtctctcacttgcgtagggaagatagcgctcgcagttggaaaggcgcccggagaggcccagagggtgaccatattatacaggcgatcgagttggatctacctgtgtcgtccgcaatatttgtgcaattgagagcgcatcaaacgtgccagtgtaaaacatatgtctcgcacgattaacaggaaagcgctgacgaatagaagtgacaatcttaaggattagcactggaatactctgaatcgaaaaggggcgaatacaccgtagagcaggagcatctaggaggaatgccgctgtaagagaagattaaaaaaagccatttatggagcccagggggccgtgacaggaaattaaccgtcaagagacgagagcttgcgttgagcgtaaacttttccgatagagagctaggccaaggtatccgtttattatggggtggagagcaccttatgagaattccccacgaagatgtggaagtgagcccttggagtctcgaacttaggaagacgtacgcccagtttgagaccggaacttttggatcggtcgtaggaccgcgtctaattaaataatngaaatattccctcgtgtaaaccaagggaggttggggtctcacagaaacacgttgcgaacataggaaccttgttttaaagccaaaacatttgattggactaacacaacagttttttgggagagattccaaaattatacgcactgggtccaatccaacaataacattagaggatattccaaggagatagcttaagaccccccaag

SEQ ID NO: 418112 - DNA, 337 bp, Homo Sapiens
agcgggttgcttccgaccacgcccccttacccggcgcgtaccgctccgcggtggctccggggccggtgcagatccgggttgctcgctgttgatcgcgctacctagcgatggcattcctgcaggcgccagactcaaagaggctccaacgggatagccacaatcgagcatcgcatcgcaatggtgctccagagaatcatcgagtaaccagccgaggaacggtcgactggcataagaccctgggccatggtggaccgtttgacagacggagtcgcgtaatggaggccccgggccacaattaggcggaacatcagacggaaattatgcgccgtgtggaatg

SEQ ID NO: 418113 - DNA, 832 bp, Homo Sapiens
agcgggtgtctccctcccggttccccgcttgccctgggctctgctcgctgtgttccggccaccgcgccgacgctgacggtcgcttctgaggttgcgggcggtgtcctgtgagggcgcgcctcggtagtgtcaaatcgggagaaccgatcagtcactcaacgaggataggtgcctcccgggaagtgtggagtgccaccagtgaggaacgcaggcagggcaatcaggccctcaggacagtgtggacctgtggcaaaccggtcaacaaatggacgggaacagggacccaaggtgtgctaactaaacgggttaggcgcttgaaaaatagcgcaccgttatgtgaactgggccttgggttgatagttgcgatggtggttttcccttatcaaggcacaattgctgtcagtgccggtgtccttcggattaaaggtacactcgcatatacctttggtggtaacaagggtagcgaccacttattgcactgtcactacggcattgggtagagactaaacatgtgggaacgagaggttgaattaagtaacttagtaaattattgttgggaaaagggagtaaggaggggtaggaggagagatggagagagacattgccttgaaatttgtgaatggttagagactagcactcgggacacacgaaagccggggcggagaggtcaagtaaaagtacgtacgacgggtgaccagcaaaaacgcgttggattttgaacgactgtgcccttcaaagctttagggacaccctcttcaattggaattgaacggttttagatggcaccattgagtgttcccttgaaatgtgcctgtgattgtggtatttcgca

SEQ ID NO: 418114 - DNA, 1383 bp, Homo Sapiens
agcgggaggagcggtgatgaagaagccagtaacggagccccggatcagtaccaagaacctgctgcgccgttgcgtccctgggtgcattgaatcgcatgtggcctggttgcttgttcgtttgactgctctagcatagtaccggagagagaccgggtcgaagggggaaggaagtgcgaagagaatgaccgcctagggtgtagaggaaccgatccgggagataatgagcctgagacggttgacttagctaaagactgcttcctccgaacttgttggaagccagtcgtgtctaaaggacagtgtgcgccgggtcgacatgagagggaggagcagagggtcattcgcaatacgcggaggaacgagggggaaacccgctgcatggctggtcaccccagggggagtagataaaggcgcctggcgatgagtgacattgcgatgaccgcgcaaagagcgcgagcccagagacagcccgtggagggctcggaggagagggtacgcgcttgtgtacgaacttgtgtccccagcggatggaaaagggtgtgcgaagcgcctctcgattgtgagtggaaggccggggtagataacgtttgcgtcggtcgaacccgttgttggtcagcgcattggggtaaaactaaccattagtttatttgtaactgccaaagaggttttgagagtaaggaaataatgtgcccgacacatttttggggtgcctccaacgagatgttgggaaccaattttgcttttgttcctaacaccttgcagactatgtgtgttgtgtgccaacggcgaacggccccggtggaaactctggtttacacggaggaggcgttcgggtgaccttcggcagacgctgtcgggaaattgtgccgcctctattttttgactcaccataaggataaaagagactctgatttttctcagaaattcggcaaggaagaattctatgaggggcggacacacaggggaactctaggcgcgttttggccccaaatggttattaagaagctaatcagagggcgccgagagaatttttccctcttgggagcgaagtttcccccgcctggtggtaaacactttggggatatgaactgatccccttgagacatgttgcagtcctaggaagacactctggggagcccacactttgtgcgcccacatggatataaacaccgcattattgtggcggtttatctcaacgaatttaccccaaaccaatggggcgtctttggcatttgcggcccacactccaatgttgggccatgtcttgccagaattttaaaccgccttaaaaaaaggcttttacaccggaaatatgaggacagcccccaatgtaataccaggatgaaaaacccatgggcccccccttgttatatgaagagctaacat

SEQ ID NO: 418115 - DNA, 1021 bp, Homo Sapiens
  misc_feature (474)..(474): n is a, c, g, or t
agcgggtgtcgtcgctatcgagctccccgcttgccctgggctctgctggctggcatccggcccggcggcagacgcgggacagcccttctgcaggtctgcggggccgaggtgtcccggctggtgcacctcgtggcgagaaatcgggagacagggcggaataactaacaacggataggccccaagcgaacttaaggggacttccaacatggagaaaacgaacgcagggacagcaggtcctcaggcaagtgggaacagagttggcccaaacagagaaacacaatggcaggacaagagggacaccaaaggttgcgttaattaagagggggttagccgccttgaggggcgtcacgcgttatgggactggccttgggctgaattaccttggtggtttgcctaaggaggcaaagccgtgacaggcagggttcccggcgtttaaggcagccactatatcttggcgaggaataaggactgggnattattggaccggtcattaggggccttgagcgagagaaccaccagggtcaacgggatggtagaagtaacgaaggaaagtaatgggggaacagggattagggggaagagaaggtggagggaacaggcttgaattgggaaaaaggcttgaagggaaaacaagaccaggggaggagtacacataagtcctgacagggggacgagttccatggtacattggagactacgcgctccttagaagctagtgggacccacttcaataggaatgaacgtttgtatgccgtataattggctcgcgttgcacatttccttggaatgggtttatcccctgaacaggtttatatacgggagaatcagtaccccgtgggggataaatgcgcgaaaatgtgtgagcgccattggtttgacactggaagtggaagaccccctatgggttgggtaagaaacgcttttgaaagctggtacaactttggttcaaccagtggggttcatcctaaatttacaccaacgcttcctaaatttgaaataataggagggggatgggaaacca

SEQ ID NO: 418116 - DNA, 1423 bp, Homo Sapiens
  misc_feature (207)..(207): n is a, c, g, or t
  misc_feature (731)..(731): n is a, c, g, or t
  misc_feature (1021)..(1021): n is a, c, g, or t
agcggatgggcgaccgtgatgtcgcgggccagaaggcgagtttcctgcactggtgccttgctgacacgtcgtctgacatgtgatccacgcaatcatgctcggagatcacgtagctcggaggagcgtccctagacgaccgtgtcaccatacggtacctgtcaaccgatcgcggaaggagaccgcacagacaggcgagaaccccggaangcatggaacagtgagaggggattgcgtgcctcctgaagagagaccgcagagaaagcatggtgtcaaacaatactggactgttgcctaaaagggtggcaacgtgcgcgggcacgcagggcagaaagggctagctggaaagatcgcgagccttgtcaggcccaaggtggacgacgaggtacaagcggcttggtcatgggcctcggaatggcggccgcttggggtgtgacattcatgcccgggcctaggggctgttgactgtacagcaatgttcgcaggggcaaataggcgcctagcaccgagaataaacgtcggtggggggaaaaggccgctttaccccactttttccaccgcgtggacgtagatgacaggactttgtggggagccaaacaaccttttgtacggtgaagataacaacgagctctgcggaagacgatgtaaagcgaaagcgcgtaatacattggcgagggccaaagagtcaaatagaagtagccgcatatccaagaagagcagtaggcggagaacanactcggtggccatttttcaaagaagggagggacgtttgcaaacaggtgccgtttgattaaaacctaatgaggggagggcagccccatgatgagggtccgggacgacacgtatacaggcgtccaccccccgcggggcgttagaataccgagaacgcaggagcttgtcaagaatggctactgtcgagagagaacaacgttcgaagcagaagagacactacctgccagttgtgcgggaacgagcccgaaaaaacgcccagaaggatgcgctcgccacacagttgtcgcaaaangaaaagtgacaggtggtgaactccgcccaatagcgagcagacagaaaatcaaaaggaggagcacggggccaacgtaaatcaccatttgggtggcgcgcccggtgtattaatacatccgacggacatcttgtggacagcaatatgtaacggcacccagaaagttccgacaaggtgacccattatggtaggtcgcccccaaacagtacactgtttgagatcgcctcgggggaagaaccacattgtgtcgcgcccaccaaattgtttgccacagattagtacccactataagaaaattctcacgcgggcgccccccgaaagagagtctatcgaacaacgaaataatagaaacaaagtttgtttattcgatgaacggaccgccaatgtacatcgaacatagcagac

SEQ ID NO: 418117 - DNA, 1375 bp, Homo Sapiens
  misc_feature (1111)..(1111): n is a, c, g, or t
  misc_feature (1312)..(1320): n is a, c, g, or t
agcgggttgtcgagtgaggaaggctcaatacttgttggggcgtttctgactgggaacgcatcttaccgcctggcacccgagggcgccaggtcctgggagcagacatcgaggagtcgtagcggaaagcacgacgatgaggagtcgcccacgcagtagcaccggggggtcgagccctcacggggagacgacgcgacaagagggcgttcatccatgtggcgagctgccagggacagttgaggatgttgaagtcctaagaccctgggtgttgtccaccggcatggggtcgcaaggagaagagggccccagaaggagactcgcatagatctggggcgtgttgggagaagccccaggaaatctgtgcacgtcacgagacagtgagtatgcgtggaggatgagacacccggtggactaaagtgaacctgcggagagacgccaccggggagcgatggaagacagagtcatgcaacgtttggggggcgcaaatatagggcctagcgccttgcagaaaaaacggggccattgagggagcatcgcgtcaggagtgaaacgcaccgccacatggcggcaggcctaaattggtagaggggtgcagcaccaaagggctacaataagagtccactagtggggaaacgcagtgcgccaaataagactcccggagagagttagagtacaagcccacgaaagtaaggaggcctaaacgcaggagagacctttgattccggcagagaagaaaaggggtgggggagacccaaccaaccacgagggagaggacgccgggcaacgcattagaaacttggggacccggtgaattaaaccagccagatggcctggcggagaggaagatacaacacttagcgccaacgaagtaaaatcagacagagggggggataaatgttgaagcccccgcgttgtctaatttaaaccacagccgagattaggggagtttgccgccaccgaggagttaacactgcacttggacgccgcaactatttaggggtgttcaaaactgtgtcgccgcagcaaagtgaatcttttgaaaaagctttggttcaaacccccaaaaaggacatgtggcgaggttcgacgaagagttattaagcagcagctgaanttttctcgaaagacccatattgtgccggagttgtgccccttgggcaggtggtggcgggttgggaagaccccacgagcggggaaacattgattgccccgggaaacagtaaatacacgggcttgtcccaaagtgggataatggatgttttcacttagaggtacaacaacacagagagtgtggtcttgacccctaaaaggaaannnnnnnnngcgagagtgttatttcaaacgttaaagaaacttttcttgaggagacgcacatatt

SEQ ID NO: 418118 - DNA, 753 bp, Homo Sapiens
agcggcatttagattacctgcaaaaatggaacaatttactactctgcctctaaccatctctttcctcctttttcccttagttgacttcttgtaactaattatttaaattctgccctgagttaaaattagtcatagcttacatgtttcacatgtatgtaaatgcacttaagtcctacctcaagctgtatgatgagtccatctagacagaagtgacaggaagggaagggaatgtggatgttgataggcagaagccacagtttataatagtttcacgattgaaaggcatatttgaactttttcctggcagtgtttaacctttaaaaacaaaatcaggtggagagaatgaactcagtagctttttgatgataacatattgtagcaagaaaggtaaaacacaaagtgttaagtaaatgatggttggggatttgattcctatagatgtcttatctgtaattttttaaacctgacagtttcctctatggtacacaagatgtaacatgaaaattacatcataacattttctgtcacgaacaaaagagtggtagtccttcttttccccccttcctctctacccaaaaccttttctgggtaagtttattttcaaaattatgagagccaggtaacattgactattctttaactgcttcaaatggttcatagtcaaatacttctcagtactttaattttaattttagagcaaaatataagaaaatcaattttaaaagcataaaattgacactgaacagagatata

SEQ ID NO: 418119 - DNA, 284 bp, Homo Sapiens
agcggcccaaatctccagtactttttctgctcataaaaatctgattatttgctaatcctttaaatgtatggtttctattgacagttggaaaaggatcacttcattcacgctgcctagtcaagtgaccctagcctctttaggtaagtgattcaatatattattaataaaagttacctttggttcaagctttgaaaataaattatattgtttatgtaggtaaaacacaaagatcagaaatcaatgacatttgaaacagcaagacgaaagggagtttaacatccagc

SEQ ID NO: 418120 - DNA, 773 bp, Homo Sapiens
  misc_feature (201)..(201): n is a, c, g, or t
  misc_feature (508)..(508): n is a, c, g, or t
  misc_feature (568)..(569): n is a, c, g, or t
agcgggccaagacggagcagacagtgggtgagtccgtgagagctgaggcccccctggccggggctcagtcctgctacgcatcgaagggtctgagccagtgacagccatcctctgaggtctagctgctctgctggaatgttgacctactagtttgtgcccgcctgcccatgggccgccctcacgcgttctccagcacgtgantgaggggttgctggacgtactcttctgcgcggaattccaacaggtacatctcattgcgattcatgtctagccgtctgtcagggccatgcaacacgttgtaccctgtacagccacgtaatacctatggaatgacggaggcaatagtgggtgcacgagcgtagagccatcggagacacgaagtcgctttggattcgcaaatctccgcgagctctctaggcgcattcacgaatgactctttggcgtaccctcactctttactagaccccgatatgaatcgaaaagctcctctttcggaaccccatcaccntgaatagccctctccaatttcgctatgtccccccctgctttaaaaaggcagaaacgctgnntcttagggtctatatgtcagtctctggcgctctggggaatttaatcgcttaggtggacctagagaatccttcaggccggagaccatcttcaaaggcctagggagttaactgtgtggccctgggtgggggtgccaggtttggggtgtggcagttttcgaagtcaccagggaggtacttctacgttccgtttccgcccccagggcc

SEQ ID NO: 418121 - DNA, 739 bp, Homo Sapiens
  misc_feature (325)..(325): n is a, c, g, or t
aggaagatgtgcgaacgtggggctgctgttccaggcgagcgcggtgggactcggacccacatgtagccggcccctgctgcgtgctcgtggacatctgcaacaactgctccgcgtgccctggatccacagtgcgcgggaacgcatgctatccccgggtcaccgaggagctctgtgcagtgctgtccttgagcacgcatcaagcccaagccccacgtgacagcgtgtccccacgtcgtacgcgtggaatctatcgtccaccggtggctgctcgctgctcctgcatggtgttgagtcgctggcactaacagggcgctccatcggtgcncgccacaaccgttcattcaaccgcggggcatgggtgcagtgcacgcgtgcccttgctcggtcctcgggagacgctactccgcatgcgatttgtggagttgggtcattgcagaagctagggcctggtaggggtcgtttagcgtatcccgtcccatgtgcccacatgtgcccctgtggcctttccacgccttgttcaaccaccatcccggcttcaaggtagccctcttcggggctgggctctggaaggacagaatgaccgggtccaccccgttagggaagctttttttctcccttggggttgtggtgaccaaacggaacaaactgggagccccgggattgagacgcgtagtcccagaatttgacaagtttggcttaatgcgggaaattgcccaccgaagaaccgtggcgttgctgg

SEQ ID NO: 418122 - DNA, 1059 bp, Homo Sapiens
  misc_feature (431)..(431): n is a, c, g, or t
  misc_feature (525)..(525): n is a, c, g, or t
  misc_feature (544)..(544): n is a, c, g, or t
  misc_feature (757)..(757): n is a, c, g, or t
  misc_feature (906)..(906): n is a, c, g, or t
agcggagtgtgctgttggattgctcagggacgagagctagggcgaggcccgcgacgcccaagataccgggtaggcggtgaatcgcagtgagagacagtcctaggagttatcataccagcttgccgtttactcgagtgacgaagactccgcgagagaccctcgtaccgggtccccgtgctatgagtagataagactaaagctcgcatctgatcatgcgtgacgatatcttactcaatttatagttagactcgagtcatcttgtagcactcgtatgtatattggacatgtatcaactactctacgaggacacagtatctactctatcctcgcctccatagcaagtcttgagctatagagcttcctgaggacgtttggtggcgcgaagtatatgcgtcatcgtcacgtagcaaaatgtaaatcgttggagctcngaaggatcgatcttctacccttgtgtggaatcattaggtactaatcttaactcccatactcgtagtcaaccaatgtgagtccttggacgcaacntgcgtctctacgctctagnattgattgtgagacgcaatctatatcaagatcgcaatggcaacactatattggcgcactatggtccagccttggtcttggcccactttgttgtcctggtgccattggctggtgaatagctttggaatttatagtccagcacagaatgtgagtttcccgcatgacctttctgtgtggtgaaccgtgttcctacgtagtagagtagtgctaagtnggaaacgagagcacttgaggtctaacgaaccaccagcagaggactgggggcaagaccgttcctggtaactatgctcaaaaccaatcgacaaggaaggattgtgttgcctggcgccacgcatacacgggcgaatatgtcatgggccgtgnccttggatatgttgtgggccttggtaggcaacgttggagtctccacctttactcagtatgctcatgctaccctgtgtgctcggcccagagtagaccatgttaatacgaagccacgctattaggccccagacttttgtagcaggaatgtatgtg

SEQ ID NO: 418123 - DNA, 1480 bp, Homo Sapiens
  misc_feature (354)..(354): n is a, c, g, or t
  misc_feature (364)..(364): n is a, c, g, or t
  misc_feature (445)..(445): n is a, c, g, or t
  misc_feature (521)..(521): n is a, c, g, or t
  misc_feature (529)..(529): n is a, c, g, or t
  misc_feature (1228)..(1228): n is a, c, g, or t
  misc_feature (1316)..(1316): n is a, c, g, or t
agcggattgggagcccagccttctgagccggtgcaccattagcttgctttgctacgcgtcgactgcgccctatgggatagcctgaaggtgacgcctctgctaagtccgtgacagattgcatggcccattgtcggagttttcggcactaatgatggacatgtggtgtcgcgccgtcaatcttgtggagtaggatcgatgtgcatatgtgaaccttgatagatagtatagcgacgagtgagcaatcgaaagacgaaagcggggcagtctgctgtctagtgagacgcttgccgtgcgtgctggcgtcgttcctctccctggacaccagtctcacgcctgtgtggtgaagctgtcggntggtgcgtanccggtgggcgcccatgggctctgaagcgtctctctacgcccagcccatgtcaggtgtcatccgggctagatcctatcgaangttcgatgctctctaaacacaccgacaggtgtctagagagaaagagctctgaacgaaatcggagaccgaacgccantttgtcanagagggaccttcccgttagcgcatcgtatggaggaatgcaagcccgcctttttcgttcgagtagaccgcagcgcagttcgagcaagaagttactagcgggaccttgctcgttgctagagttgcctaatcgttggagagcatgctagcgatcgtgtccattgggaaacccctttgagagggaagcggcgtcggttccctttgttggtacccaaaggggacaccttggaggcgggggatttttccttctttaagacaagaattgtgttggctaagcggttcccaatgtgtagtttgttagggcatcccgtttggaacgccgtgagcctggtttgcggtgactgcctccattccttgtgcaaagactatggctccgtgcgaacgctctttgaagcggtggcttttccaagatacggtgctttgggataagcggttatctccaaaactttgttgttataaccattcatgaatccctgtgttaatgctgcgtaagttggttgttgaacagggcccatcccacgtggcgctaacggggacatgtgtggcgtggcccaaaattcaatagcctagcggcggagacactgtaggttaggcgcgtggtgaaacttgcggacccactttggggattggccttgggtttgcgatggcgtcaaaactagccaattttgccagtggggcttgagcagtgtgtttcgccccagnggattgccccatgagaagacaggggcacaatggccttgctagggttgaagaacctgggagatttgttgtcccccgcactccgcgtgtngttatctggtgcgaccatacatgagaccttgtgtgtgaaccatgtttacttggtaggcttgggttgtgaaaccagagttactgtgcactttcctgtaaacttgcactttcaactatggcaaatattttggaagtcggttcctttttcccccacccctttcctct

SEQ ID NO: 418124 - DNA, 1264 bp, Homo Sapiens
agcggtctgtcccggcgtgagccagcgccagtcggacccagcgcgagccgacgccgccatcactgccgatgcccagatcctccagccgatgccgccgcgcacaatgctatgcgtaccgatgcccagggcgcccacgctgggtctgcgcaggcatgctgcagcgtgtcgcgcggcttggctctacctgtcacagcatgcgtactgctagatcaaacatagtagaagcatagtgatccaaaacttagacacaaagatccagtagagagtaggatggaaacttacatccatggcatgagacgtcaataaacgcgatactgtcaaaggaataaacataacacaccatgttagtggaacgaagaacgaattacggatgtatcttaccgaagcgcaggcaacttttggcacctttgcgcagcgaattgaaagatccggcttaacgatcctggcatctgggcacgcaggagtactgtcgtgagtgatgaagggcgacccaacggaggagagcactcatggtatgcccggggaatgcttttcagtcggcacgaaacagtgcacgtaccatttggttcgaatcgacttacgcctcgacgtgtgcgaacttctcattcaacactgcctttcgacggggattgtgcatcgaacgcaagggaaatcttaccgaccgaagagggcctcatttgccgggcatagttttgctggggcaggaaaccctccgtgctgtgcatcaagccgcttatcaactcgtggagcccgcctgaaccacatttctgaagccccccgccggggtcaaggtagctggttgacacaatttttctggggctaccaagaactcgggacatatacacgctggcttggccttgtgggaaacctcaatcatcgttgcccttctgttacaggtgtcccccgaaattgttacattgacctgagcatgaaccaattcaattccacttttcttcgtttggcttctttagaagcgcattagcccttggaagggcttgccattactcttaccccttaggctaaggcactttatatggactcgcagaacatcatttccgttacattgaacatggggctcctaagaaaagcgcgaacattgggtaacgttgtgcagaaggtcagcgtacacttttctgtgtaaccttcattcaagaccgtgaaggttacagttggcacctgtttcctagcaccacggggttgcaggtgtgacccccataattgactggtgaatatcctcgcgaaaaggcgctttgtggacgagcgt

SEQ ID NO: 418125 - DNA, 599 bp, Homo Sapiens
tgagcgggtacgtgtgcttcctggtggcggctgtgagtgagcccgtgagtggacgcagcctgtgttcaatggcagggcgcgtgtgtggtcgagtggaggtgcttgggctaggtacagatcctgattggccatccttcctctgtgcgcacaggagtaagttgtgcaattagatgagatggactgttatgaatcctatcgtcttgttcagtactgagataatacacattagacgctgaagggagtggactatcagatgacgtactaggtcaaactagggttgtacccatatgaggcctgacatatatctggtgaatccaccagttagtgtaacattcataatagggtcatcgaggaggccctattccagagattgaggacaagacagataaataaagaattattgacacgccttgtttatgtgaacgaccatcgttaaacgcatagttatatacataataataccacacgaagaaaatagtatcatagatattaatatacagtctatactgataatactatatatatgaagaaagaataattacatgtcgaaataattcgatactgaacgcggaatgagaagagcacccacagcattaacg

SEQ ID NO: 418126 - DNA, 731 bp, Homo Sapiens
atcggggctcgtgggcgacgcgggctgttggtcgcctcggcttgcattctgtggggcactgattcacggccggcctcgtgctcgaagttgatctgcgtcagggaatcgtacgtgcgttgttgctcgatttgctggtctgtggttggtccctgtgcagtgaatggatggggttcaacctgagctccacccttcctcagggaataagcagtgtgagaccccgtatatccactggctgtcttgcgatctccgcgggtgtccctcgagactcctatggtctatcgcgcggtccccgtgcaggtgtgggcctccgtcggccccctggtcccaggctcttggtggtgctactccttgctcgggtacgacttcttggcggccacgccccgcttgcctgctgtaagactccagtgggggtgggacggtgcatggctgtccccaaccggtcggtcagaggccatggccagtgccttggggctgtgaacttacccatgcacaaggtgtttaggggacatgaagagacgccttccctccagggaggtctgcgattcctcatctggaggcactaccattgtcttgttcatggccccctttccctgcccgtctggaagtttatgctccacaacataaagcgagcccaccaataggcccctccaatagtgcccttcctccacaattctccgtcccccaggaccaagggggattttcactcacttcccacctgggggaatggctcc

SEQ ID NO: 418127 - DNA, 871 bp, Homo Sapiens
agcggggaggaagaggcagaatatatggctgtgtctggtccacacaggactttagattaaaagcttttttttaagtctgtcacaggagtagagtaaaaataaataggttttttaaagccacttttagtgatacattaagcaacgctttcaacagtggtattcttggtatctaagtgaccttgatccatacataacgaactactgcttttgcacgttaactctaaaccttgctgtttcacaacattttaaatcatacttacagcttaagtgacacactactatactatggctaacatccacttgtataacaactatgctgaactacagacgggcagcatttattctaagccgacacaacttagcaccagctactctagtcactacatcacgtccttctcgcactgtctgcggcggcactactctccaggtggcttgccgtgcatgcgtcgcctcaacattccgaagctcgttctgtcatatctcactttaactgtcgctctctcccacgctggctcgcgcgacttcttctcccctctccctctcttcagcgccacacatcttctgccgcctctccttcataggtcaacacttctccatcctaatcaaccccccagcatgtaaaacacaacgtaagaaagcaaggtgaaagttcattgcaaaccaactacccagtggactgaaacgacattacccattagattttccataagcccttcataatcggccctacagtcacacattgctggatcttttgcgcacctccgtggttgcgacatttctgctcaccgccagtagctcaaccttaccacatgcatggaatctgttttactcataaaacagcagttacacgcaaggtagtaataattacccc

SEQ ID NO: 418128 - DNA, 1171 bp, Homo Sapiens
  misc_feature (315)..(315): n is a, c, g, or t
  misc_feature (376)..(376): n is a, c, g, or t
  misc_feature (563)..(563): n is a, c, g, or t
agcgggaatcccaggtcacgttgggaggcctgggtcgtggcggatctctacagcggcctcacatgacctgataggcaagagatgaaccttcagtcgctcaaggctgcgcaattctacttcctgtgcagagagacgctagtgccatctaggcaaagtcatagagcgcccagcccgggcaggggactactctagcgaagccggacacacgtgcagtctgaacgcgtttgacaacgttagtgcaagacgcctctcgacagatcgtagcatacctccgaggcagctgacgtagaaccacgctgaatcctcgggagttanaaaccaatggcgcgtggaatgtgtgcgcagaaagtctctccagacagggtcaggacactgnacacgctctcgcagcatcctcgacagctccaggattagtaagcgaagcagactagctatggtaagacgggagctccatgcttatatgaaggacctctgttgcgtacgatactatagcacctgcaggtctctcctgcacgagacgtgcatatcccatggccctagacatacatgaactgcacacgtcntgacgcgcggacttggacaggactcttgggatggcaacgcaggacgcaagggacgtgctatacccgtggtacgcttctcagaaagcagagactcgcaagagggagtcgaacgcgagacaacatctagtgggcacacggatggttagctccacgttggagaaacacaacggtccataggctcccgcaccctagatgacaactaggagtggcccacttgggcccctaggaaggggacccaagtaagcgtggcccctggggcgggtgtgcgtctttgtgttcttgtggttccggcgtcctggtcatctctttcgcgccccactttcatgccaaagcgggcgaataccccaagcaagggtccttggtcccttcgtctcccacgtctctcatactgggactctggaccaggataggggacaggccttctccaactttatgtttggtccatagagcaacctttccaacttgggggggcccccaaggattacccctggaaaatgacaccactttcctttgtatcccagagggccctggaaactctgtgtgcaagcatgggcttgtccccgggtggaactgtgacaagggagcctccaccgtcccactgggaagtc

SEQ ID NO: 418129 - DNA, 687 bp, Homo Sapiens
  misc_feature (345)..(373): n is a, c, g, or t
agcggcgtgaagagaaaatcctgtgtgtgtgtcttcatacttgctggctctagtaccagaagagagggatctggcttcagagcgggactgaaaacttctcaccagtctggggataatagtgttgaggcaaattcattctcttgacttgcaaaaacagatttttctcatcttcctccttctctcaccttttttgcagtagcatttttcctcaaagtataactcatttttttactaatgcctaactaatcctagtgttattttatcatatttttaccaagaatgttctaaaaatcttggagacgttcctccatgatcttgggaaaaaaagttgccaaatgctgtgcnnnnnnnnnnnnnnnnnnnnnnnnnnnnncatttacagatttcaggaaacttatattctgtggctttgaccctcaccaatcttggaagattgatctctcaaggacaaacccagtgcctatttctcagtcctttttctacttgacatttgcagaattggcactttttgccactgttatgccttaaatcttgagcttctttcaggatccatgattctgtgctgatctacacttttcctacctctcagcatttctttgattgtcaatgatcagctctgtgatttggggcaagggttaggccagaattatctcattttatcaagttataaaacttgaggtagtgcaa

SEQ ID NO: 418130 - DNA, 1122 bp, Homo Sapiens
  misc_feature (623)..(623): n is a, c, g, or t
agcggaagcggcacgggtgctgtccagacttcccggtgcttgaatacaccggaagtgctcgtcatccagcattaccatgtatgtggaccactgagaagggctcatcctggtcgcagggcgctgttgtacatgagtagggaggacttatctccatgtctaatgcacgctgcgcgtgttgtgaagattccgtcgcgacacgcgcgactagtgcaaggtcaggagcgtaccgagccacaggagcttcatggagacgtcatgcaatgtccagatatagatatgcggggtcctcgacccgtgtgggtcgcgtaaggaaggccttgctggtgatggcctgcgcattgacttggggagacgagagcgtaggtgtcccgcacacggatgttctctggctcgatgtaccctacctggacttgtagtagcgttctcctgttggctcgcgacatggaattggcgcgctgggaagatcctactctggcgctctttgcggaccagagattgtgtcccgttgggaacacgcctgttcgtgatggcctcaacctggcatttggcttttggaatgtgcgctgcatgccctgctggtgagacactgccatgcatcccctctgaggccactcctgtggtcnacccttcggagacgtgccatgtgccagcagatgagcacggcgcctcacgccaacacgctctgtcttagcgctgggctgttgcgtggccctcgtcagagggttgggtctatgtcgctcatggccaattgaattgtcacgacgcgtgcaccaccgcttcgtggcgcgagtagaaaatagtacttcaaaggacgcaagttgaccgtgcggagggaaaagaccaggtggtacttcgcaaagaatcggaacggttgccttggtgcgaacggtctggcttacgtacgtgggggcattcgcttgtagggtggccggttttgtctggccccagtggtttctaagcggtagtgacttcccttgggctgtgctcctgcggagggacctgctttggggacctttccgggggaatccgggaacgtggagggttccccctctgggatccgggtggtaccgcgttgtagttgcccggacgtgtccctttcgcccggtgtaaacatgcccagag

SEQ ID NO: 418131 - DNA, 1422 bp, Homo Sapiens
  misc_feature (645)..(645): n is a, c, g, or t
  misc_feature (1175)..(1175): n is a, c, g, or t
agcggatggggtgccgcaccatggcggctcccatggacgctcgttctgctggtcctgcggctgcgggctggcgttaccttgacctgcacagcctaggcgcgctgacctactgtcccgacttataatggcgtgcgtcctaacgtgaatacggtacaccgagaatgagccaaggcccgtggcaggagtctctatcgggcctatgcccagataatccctgtgtggtgaagctctggcctgcaccgttctgaaccagatgcatgggatacggtctctcatcgagtcttgcaacacggaactcatgcacccacacgcgtatcgcaaaataggagcaacgttgaccacacttgcgtcgcatctcaatgacttctttgtccaagacctcctgtgcgaaaggcgtgggcacgcatcgagcacccctagggcacatgtacatattgctcttgcattctcgttggaaacgggatggagaaggtgtagcgtaccctccgcgttgcctttgggtaaacgataagcatgtctctcttgcgcagttagggaaacgaacccgagaggagaactcacccgatggcgcacatggatggacctctgtgcacaggctagggctaccttgcaccgagggcgtgcttattcgtcgccctttatccncgcgcctgcgatagcgttttcgtgtgcccctcgggcgtgaggcgccgccatattgacgacgccccgggccttccgttgagccgattggcggtaggatcggggtcgtgaccggacgttcgttgcctttgggagcgtcgcggggggaaggctctaggccaagggcgggcccctttgagggggaaggccccggcggggtaccccttagagccccttgcgttagggaattaggggggtaggggctttgggttagcccccggaatgtacacgggtggtaaccgtgggtaggctttgttccctgggaggcgcgcaatggagcttcccttccgtgcaattccggggcgctttgcggcgccggtaccttccaagacaaagggtctgccgtatccatgtctgggaaggaagttggacgcggccccctggtggcgttcccccttttggggtaggcgggccccgcgtgccctttgctattgccaggcgcattaagcattctcgagggggcacacttatgtcctttgacgttgtgcccaagncggggcgcgagggacgtccttaggggaaccgaccattgggtcgtgtgtggcacacattggccctctggcaccggcggatgctgcttcggcccccttgcctgcgtggggggcgagcttggcgcgccgggggagaccccattccctttgggttttgtcacccttaatttttcgcgcgtaacgcgcagcaaccgcaatgtatgtcgcctctcccaaggtccccttccgcttaagaggatatttccctccg

SEQ ID NO: 418132 - DNA, 905 bp, Homo Sapiens
agcggagggggggagcaggcggtgagaggggtagggagcggtgtgtgcccgggatcgaggggcacagccagtgtgcatgtcatggctccacgggcagcgacctactccatttgtcgcgttgaacgaagtgtgcgctggtgacacgctcgctatccagccatatcgcctggccaggactggctcaacagctccatcctccactgcgtgttcacatatgaccacgttacttgccacccgacagtgtttggcctcagctgtgataccctgaggcagctcagatgcccggcaggtcctgctggtaagagggtagtgctggaccttggtcctgtctggggacccgggctgttgctggtgtggccggcacgggaccgtgggtagcctcgtaaccatcgctggcgagctgcgtcctggtctgtatcgaccgcggctggcctgggcataatgtgcgacgtggctcctccaggctccgtggcgcgcccgatgcccgtgccttcgtgccgatccttcctgggagtctcgtggcctactgaggactctaggcctgtcccatcctgtgcccaggtgtcactgctgagtgtcccttcagcggggctctggtgctcgtccccggctgtttcgccctccagactactgggctctgccccagattcccccccgaggcttctcccattcctggtcccaggctgtactagcgtatccgcacattgatgccttcgccaagccagccccgtgcctggtggatccaccagtcctgtctcctggctgctctgccccttgcccgggggctgggaaacctgggagtgacctgagggagggtccgggttgtgttacaccagcaggcaggtgacgagttcctgtgccggaagaactggccagggagagctgcgcctgtggcatctctgcct

SEQ ID NO: 418133 - DNA, 726 bp, Homo Sapiens
agcggccgggtgctcgtagatacccgttgcggagcgtggtagacggtccttactattgtacactatacactgcgcaggtgctgcgggtccgagggcgtggatggatttgctatacctgaccagatgctgggacgcttcatggcaggaaagcattaggcgcgtagacgaatggtcgatggtggagaacgaggatcgtaccaggaggactgcgtggatcagagtacgctcctgtctgattgttgtaacgtgatcttgtacccatgaccacttaggcgttacgttgaacgggaatgtaggcgccctcggctcgggagtgtcctgctgcgaagattgacgttgttgctgcagactgtagggtgccgcttgatagtgatgtagccatactagtagggctcttcttagccttcgattcggcaaacttagccaaagcttggcagcaatacttataggaccgctgtgagacgtaggcgagtaagagcgagaggtctcagggggcctgggaaccgtatcggccgacacacagtgtccgaagctcaccgcagtcgtaacatttctaacgctggacagagcggcgggagtgaaaggaccatcgtggcacaaactagaggcccactgatacaaaaggttagagagaaccctcagaggagcataaaaagcgttttcaacttgcgtagggtaagccaagctgaacgacttaccgagacaatgtggttcaacgctcctccg

SEQ ID NO: 418134 - DNA, 1358 bp, Homo Sapiens
  misc_feature (215)..(215): n is a, c, g, or t
  misc_feature (327)..(327): n is a, c, g, or t
agcgggacagggactgagttgctgggactctgggctggggctggggagaaatgagagcaaactcatcctttgtgcccctctcatggcgtcctggtccagagtccccgcctagatacgggtactggcgacaacgtccatggcgtccgctcgggaggaccatgctcactggtgcacgtgcgaaatagatggtgagtggtggctcggaggagacaagnggagctagaggcagcagtaggaccaggtgtatgtgcatatataccctgccatgcattcttagcgcttcgccatcctgctcgatctagcatcctcagcgactagggtgaaaanctgaacgaacgccccaaaagttcggagcctatatcatcgcagaatgggtctgagaagacagcctattcattaaactgctactcatgagcaacaatgtagcgagaggttgagagactcttgaggggcatagactagtgcctgcagcgatagagctcggggaggaatcgatcgcctagtgtgactagcgtggctagacagcttgcctttgtgttcagtagtgttgcctcgtcagccacttgcccgcgtgggtctgtgcgtgcgcgatagtctgctaccttaaccacctggggctgcagcccgttagtttgccgtatccgttcgtgagaccttttgctgtggtgcgggggaccccggcgattaccattgcatttgccggagtttttgcggcgcgtttgcttgtgtggccgaaccctcttgtcgcgagctcccttggtggcgtagttgtgccccagcctttagctgcgctttggggaggccccctggccgcctcaaatggcgcgacaggcactgccttgcagccttctccactttacgtccccgactctgtcttctttgtcgtagactcggtgcccctggcctagggtcgcctgcggagattggggccctgtcccaacctagtgtcgctggagggaaacttcttaacccaggtgcttctagtcaggttgcgaggcgccctgtgttgcctggggccccagatgtcattcggacggggtctcagacccgttccgtggaggtcctcgcagtagacttctcccccgagcccgttgattgggggcctcgcaaggccgtgggaactgtgctttgtgtgggggcagtattcatccccgtggggttccgtgccccagcccgtgcccagtaacctggggccccgcttgtctcctgtggatcggctagcttccgcgtcgcttgagcttgggtggcgcttccggtggccctttccgggggctggcttcgttggcgccccctgtggttgacgcttttcggcggccatggcccgacccctcccttgcgttggtccgggtgcgcctaac

SEQ ID NO: 418135 - DNA, 1145 bp, Homo Sapiens
  misc_feature (406)..(406): n is a, c, g, or t
  misc_feature (491)..(491): n is a, c, g, or t
  misc_feature (564)..(564): n is a, c, g, or t
  misc_feature (652)..(652): n is a, c, g, or t
  misc_feature (714)..(714): n is a, c, g, or t
agcgggggcgccctcgtccggcgcgatgcgctggttctgcaggaagccgacgcgcacgtacgtctttagtatgtcagcggacccacgcgaggagtcgcactgctcgctcggccggctgccacccgtcgtcatcgcttgcagccttgctgatgcgctgcaacggggcatgggcgccctcggggagccgccgacccgtgttctgtccgctactgagggaggtccgcgcgaggatactaccggcgtagtctgccccagtgctcagtggcccaggacagacggccggactgttagcagcaggacggggcacaggtagcgtctacgttcggcctacatctctcgcgagggattgacagagaggagaacacggagagggagcacatgccgtgtcgtaacggcgacacctganttagcagaggatagccacaatggcctgaggtagggatgcatcgacatggagatcggtgaactggggttcaagaaccctgccgtgnttcgccgattcatacaacgtctcctgtcagaaagacaactgttcgcgtcaatgcaattagtttcattcacgtnagcaggccgacacgcaactcgtagcacaattggacataatccccctggattatcaaagactccaaccgatgactttgatcaatatgantatcgctcagtttcctaggctctaccggcacacggtcttggcacgggaaataacagcgtggnctgaaacgtacccacgagcgaggtgtatacacacctctcgcgtgtaacaaccatgtggtctgttgcactactaggtgcccgttctatcattgttggagctgagcgccaacctacggtgtgtgacacaacacgaacgcgggcctgcgcatatatactccgcacttgtgactaggtccaaagctgcgtagacgacactcacgactagacgacctattaactttcaccgttatgctggcatcagtggggcaccgctatcatgagatatcgcttccaacagttctgcagcgttctcgcactcgtaaccggtacaaggaaacagacaacgtcagggaaaacaatatctggctcgagctatagcaccacgtgttccagagcgcgcgacatgaagtccgcacttattccaaggcacaactgcttaacagaaaatcccc

SEQ ID NO: 418136 - DNA, 959 bp, Homo Sapiens
  misc_feature (686)..(686): n is a, c, g, or t
agcggggcgtcggcgctcaggaatcatggcactctggtgggcataccagctggtgccctgggcgcgtcaccgcgtgagaaagtacacggtcctgacagactgggtccctgcatgggcctgggtgacgagttatctcacagcgagctggtggagaggcgtgggttctgctaggaacatccgagaagaggctctggtactcgtgtaccaatggtgctcccgtgggcttagtggctttgtggacctctgctggtaaagaggcctggtacaaggatctttgcgaatcagcgttgcaattccacatgggccatccatccgaaagatgagaataggcgacttggaatgaaagatgcttggtttgcgagtcacggaggggcaattagtctcgccgaatgatacttctagggactgctgtgtcgtcacaactgggtaacgagagcgaactctagagtagggatcctgtcatgccccagagacctacacttgtggtcgcaatatctactagcggtgattcatccatgtattgcctccgttcatcaactctaactgtaactatcctactgggcccattgcatgatgcaagtgtaagacctcaaccttcgtaccctggggtcccccccgtatcatcttacagagttaagagccagtaagtccatactgttggtgggcttgtgtagtcgtgtggaaancgccctatctcgtagtcccttggaaggcagcatcccggcgtctaaagaccctagccttcaactccaagcagtttcccaccttgcacgtagatgcagactttgcaccgcatggaaaccggtcaagaacaatccttccgtctaaaaagtggggccataacctagttttccactggggggttggggtttgcccgagtcagaagcttaagagggacctagcaacctgcaagtggccctcttgactctttaaatgtaccactgactggcttacagcct

SEQ ID NO: 418137 - DNA, 1101 bp, Homo Sapiens
  misc_feature (175)..(175): n is a, c, g, or t
  misc_feature (556)..(556): n is a, c, g, or t
agcggactgtcgtgggattcgtcttcggtattgctcttgcctatcgacttaacggcactcccgggtctacgtactatcactaccctgccggctgtctcctgtaccaccggaataccagtgcctctctaaccgtaatgttgcagaatcttcatgatgagagagatactctgaaggntcgatgtgtggaagagtagcctcacggatcttgtgacgtagtacaacgacacactgttcggcagtagtattgcggacactggcactggactgagaggacgcatagatagacccccacttgccgtcgtaacaaaagtgctgaccttgcaagcaactattgaacaccatggtcattcgagctaggtgctaccgctactctagcatacgtgaatgatcgcctgcactctcgtgcctgaaagtcacttgactcgaggaagcataagatcatggcgaacaagatgatatccacttgatgtgggacggagaaattcctgtaacagttctaccaaagggcaagcaacatatctgtacgcagaacgtacaatatgctttggccttcgtnaaccactgactcgtgaggacgatacgaataaggtttcgagcgtgtgcatgggtttgagcagtggtcgagaagcgaacgtttggtcagtcccaaaatactgggaatccagagggggcggaatgacgtcttgcccgtcgcacgtggaatggaagttacccgcgccattgagcacctttaccaaaatttaagtgccatttaaaaagttgaaactatatcctctggatttccatagtggacagagataagagcccccgaaaggggtttcccagctgagcaccggaatgatgacgccatatgatgacacctcgtatgaaccagattgaagacgacaagaatcagggttgttgccgctaagtcgcggttgcaaccaacggtgggtttcccaccgaggccttgggtgactggggaactttaggcttaccccataaaatttaaccataataggtcgaagagccctagaggatacccttggatggttattgaaactgtggggtaaagcacaactttttggagacacaagccctcacgataaagtacccaaacag

SEQ ID NO: 418138 - DNA, 1300 bp, Homo Sapiens
  misc_feature (376)..(376): n is a, c, g, or t
  misc_feature (1140)..(1140): n is a, c, g, or t
agcgggggcgtggcaacggcgcatagtgcgagtgagccatgcgggacgcgaagtctggtgtgccgagtgcagtccgtacgacggttcccctcttgagtcgagggtttgtgccgtgccgttgagtgcgagggacgacgtgtggactccgggcgtacttaggcatttcggcgtacgcttgccggcgtagaccagtcgccttggcgacggagactggtacttgcgcggcgcgctcgacgtgcctgcccttgccgagtgacgttcgctcgggtggcttgcgtggtacggggtgcgcgaggggccgctcgggggtgctcgtcatgcgtgcctgcgttatctggacccggtaaatttggttgggtttgggctttcagttatngatctcggtggaggaattgaagagagcgaagccgtctaagcatcattagtctagaaatcgaggagtagtcggttgcttcatcgagccaggctgtgaatcagtgttgattggttgcatggcttcggaaatgcatctaaggaagtgaagagagatgcgttgggagatgtcaaatttgtacattctgctgtctatgccatagggaatgggatcgcgcgccccaggcgagagcgacactgctgatagaatcccagaagatcttgcggtcgattaaaaagaagctcgatgtaccttgcagtgatcggaaagccagatgcgcattagttgggactcatcggatcgcgaatcttccaagcgcgatttcgatgagcctagcccatatgccatagtccttcgaaacggtaaaacgaggaagcgcctatctcctttggacccccttttggggctttggcccagccgatgacgaggttagccccccattggggattgcgagaatgtccttagaagtcaattggaaatccggcgcggttaaccggtgaccaagttgggtccccaagaggtgttttgccttggttccatcgccaagacttccttgcctcgaggaaaagaccctatgggcaatatggggggaaagggaacatcactgtgtgtgcgaaattggcccagagtccgggggtggggccgaaaggcgggcccatgccagcctgtgttgtggcttctccccggggggtgttgacccaccttgggtgaggttaagcaccgtcgcnaattgaaaccagaggtgagaagattcacaatgtcgcttgcaaggggctgtaacttttcaaggcggtccctgggaaccagcgcccgtataggataattccccctatgtttgtgtgaacagcttattctcgatgtgacttgtggaattccccccacggggtt

SEQ ID NO: 418139 - DNA, 961 bp, Homo Sapiens
  misc_feature (479)..(479): n is a, c, g, or t
agcgaactgcaggtcccggttcctgggcttgacactactgaggccgcatagctggaataggttctcgtctcgcgtatgtccctgtcggttgacgattggtctcctacgtgatgctctcgtacccatgcgtatcatgccactgactgcttcttcgcgactcgtcgagtaatcgcgatgatagcacctagcgatttggtgcattgctagttctccacgaggaccacgcatgcacctgcgagtactcgaagaaaggcagatcactctcaagtagggcctcgctttgcatgagtagttgatggagcaatctctggagcaattagcgactggtccccagacgatggatagtagtcctggcatccaacccatgtgccagagaaaatcttgcgtttgcggcctcaccccatcaagcgagatctcgatagtggtagcgaagccctctattagatatgagcactttcagctagtctgcgggtgctccntcttttcggcgaatcattcctccttgacgcaatcggtttgggcaagagcatcagatggtgggccgacatatcaggttccttagatgggtactattccgtgggataggactcatggggagtatctcgcagggacccttcctagagaatcctcggtgatccctgcttggggacaaaacacccaggacttcactgtgattgttcgtaagcaaagagattgacacccactggaacaaccttggcgaggacgcttttcccggttcctggaacgaagcgtcttctcgaagaatttggcccaccacaaagccaaattccattcttgtgtggaaattcgccgggcggtaacccagttgtaaccttatttcaccgatgggacttgtagagttggcgcacaccgattggtgaagacccaaatggaaggaagcttcccctttttaactcggagggcacaggaatttgagaggggcgtacggcacggaaggacg

SEQ ID NO: 418140 - DNA, 1049 bp, Homo Sapiens
agcggattgccgtcgacacctcgtactcattcctgtgtgattgcgcgccctatttagactgtcgggatcttcgttgagagcgtctgcctgtctggcgtagttctcctgtctggacatggagaaccagaagactgcatcgcatcacatgtggcatcaggtagttgcactcttgcgattgcgccttagtgcgtttcgtggctagcgcatgcacttggtccgcgtgtctgagtgggatcatatgggctaatgtacaaaagtcaagcatggggtgccgtccctgtactcgcagggtgtgcgtcttttgtgaccatggtacctaatcgcagtggtcatggtggtggcgttatcctagacatgtcgttagagaacttccacaggatatccgtatattggcgtcttttacctagaccttactaatcgtagtgtcaccctatgggacttgcgtatgacctgggaatttgaaggcttgctacacaaatcttgggagagcattccatgcgctgcgagggttctcatttgacacggtgtcccaaaatcttaggcctgtagtgggattccgctcagaaggtttgtgcaatgttaggctactgtttcagaacgagaccctccactttatggctccacacggtacatggtggcccagggcttcaatcaactgtatgtagatgagatttatataagattctggcattcttagccagcgtatatccaggtactagttacagagaacactattgctggcaggccatttctgggcactctgagccattttgcccttagaaacaggagaacatccaaactatgtgtgaggagatgggtgggcactagtcaggtacctgaatttaccaagcctgcatgagggtggggaagctattggtaacagcaagggagcttttacctaaggaccccttcatagagcttggattccttgcatattgaagatggatcgaactccttggctggattctgtcaggtacattctcaggggtagaaatgtacgggggtggcttttccggggctcgggaccgtattccctgcctctaggaaaa

SEQ ID NO: 418141 - DNA, 1011 bp, Homo Sapiens
  misc_feature (189)..(189): n is a, c, g, or t
agcgaagtgagctgcaatgcatcctggactgcggcagagagcagggatggcgtgcgtgcgagcggcgtagcagtgcgtacggtcggactctcggagattgctgtgctgtaccgcgccggcaaggcggactgcatcgtggtgctctcttccgcagtggccgcttgcgaaggcctcttctgctggggcccncgtctacagcatgcgttgtgcgcttagcgcgaacaggttgcagttggtggcctgtgagtaattgtaaggtagggccgacgcgcgtagccactcgagtatgcttaataatgactacactcgattcacttgagtcaggcgtggactcaggtgcacttagcgtatgtaccgtctcggacatagcctcttttgcgggtccgcaagtaggatagtgtcggtatttgcgtaatttccttttagcagcttcgctttcggaaatgattggggccgggcggtgcgcaaacttgccttcacatccaaaagtcttcctcgtatctaagaacgtagtagaccttgatcgttggacacgccagatggcgataattggcacaatcggaacgcgatactgtcgcgagacccaatgctaggccttaccaaagcctatcatcaacacggcacacgggaggacctccatgaacgccttgacgtcttggcagcaaagaggcttgccactgcgcattggggaactccctcgtgtttattgaatcaggggataactggccataggcgccaagggggttgctatgtttcgactcgagacgtacctcgcacccatgaggcccttgggcttgggagaacgtaaaccgcgtctgggcttttgacccggccgcgggggacagagcgtctcaatcgacatagttgacttccgcgggttcatccctgggattagccccgaatggaaacagggaaaattcaatggccttgcaaggctcgacattcagcttcctggtgaacatccctttagaaataccttaattgaaaactttccatgaacttggtatcaca

SEQ ID NO: 418142 - DNA, 160 bp, Homo Sapiens
atacacaatacataagtgaccatgctaaggagcaaacgaagatataaacagtttttaaaatctgagaatcgtaaagtatttgacaactggagaaatataaagcatatctaaacacagtcttttgcagagccatatgtgccaactgggagcctatgtacag

SEQ ID NO: 418143 - DNA, 776 bp, Homo Sapiens
agcggggtgcgcggacttgcttggaggaaagacagggggctgcttggaaggaagggtcgcacaagttgacgagtgtcagcacagtggagctaccgtggtgtgatacagtgatttgtgactttgtggaacacgtggacgatcgcgtcgtgatcgtatgagatccttgaacgagtgcaggatgaggcgcttatgacacgtcgttagttgttaatgaatacgttccatgattagaggcacacacgcgcgttcgaggcgcattaatcaataggtcgcgtgactggagttttggcgcactggttaattgagggtgaggcggaatgcgagtcattacgtggattgatctggtgagaagctcttgtctcattgaaagcaatgaaagtaatcagagagtcgccgtatatgagtaaggaggtaagcgggagcgtagatcgttcgatattcgtcgcacacagtgcattctatactacagtcgcgtgtgttccgacatggcttgtcagctacagattgacaacataggaggtcgtttctgtagatagtgagttagtgattgaagtcaattaaggcaaatttggaggtgtaataggttagaccctagtatattagaggtcgaaagtatgtcgatggttagagggaaaaaaggcgtcgagagtgagtctttagttggagggaactcagaaattaggtatagatcgcggtgagaggagaacagtcgtaataggtagatagccattggtataaaagagtgaatgctatgggactgaggatttgagaagtcg

SEQ ID NO: 418144 - DNA, 774 bp, Homo Sapiens
cgctaacggaagataccttgcgatgctggaaaaaatcgccccttccgcactagtgatatgagcacatcgagcgcgatgagtgcctggtcgccaggtcgtcaaacggtctgagatagaagcgcgagctaagtgcgcgattttcgtagccgatgggctggctcgccagactagcggctcgcggtgatacaatagcatctgccgagatactagaggtccgtgatgacataatgcgcgctaaattgccctttgacacgacacgaataatcctaggggactaacacgggcgtagggcaaggttcaactagtctaacccagaaatgggaactagaaacaagaccatgaggaatacaacacgtaatagcgcaacccgcaaggagcgcgcaataacgggcaaggaacagcgcaaagccacactgacatttgacccctggacataggcattggacgacagacgaattcacctgagtaagtcttggtgaggagtcatatgaacgcgaagcggtgctcaactaagcaaaacaacgattggtctaggagccacatgacggttagacccaactgcgttggaacactgtgactcatgtcagaatcgacggctatacaagcaacttcacatttaataaatcaggccataagaggaaaccttgggagcgactcggaaagaaatagaatcagtgctagggggggatccccatgcagttaagacataggttaatgttcaaagcaaatatccaatatgacaaacggtcatcaataatacatagggcgccgaaa

SEQ ID NO: 418145 - DNA, 1178 bp, Homo Sapiens
  misc_feature (583)..(583): n is a, c, g, or t
agcggggctctgtggctcctgcctgctggtgcctctgcgtcgtgtgtcgttcaggcgcgccgtcctggcccgactcacctggtggcaagtgtcgtgtactgagctactggttccctgctcgcggccttcagctgacagtaaaacctacaacagtgagcatgattagaagcaaaggcaatagaggtaacataggcatcaatatcaggcgacaacaagggccctagaacgtgctgaaaccctgtgttgtcaccgggcgtctgtcgagtgcaagaaggacctctgtgtcttgtgaagagagactaggacgttggattccagaattcgggcctcatttcccgtgcacttacgagcagatgtgtgaattggcatctcgagacgtagaagtactgcttagattgggcatcgagggagtgcgcatgtctgcctctctggtatgcctcatatcttaacgggctggctttgcatcacctatcatgtgtgtaggaggcacttattagatggatccttggtcaattggcttggcgatactagagctcggggaacacaaggattctaatcgacgtcggtgtggacgtttgctttnactggcactttgcgcccgtttcctgccatcctaaacgttgattcttgattctttaatgtgacgctcgcattggttgctccttcctatgtctcggaccttcttcatttaccctagaggtgggccccacgccatatgcgaattagcacgccgtttagctcctcggaaatagttccctttaatttgtggggttgagcataggtatacttcgtagggaaaaccttcaccataacttcttcgtttacttggcgcaaaagggcaaccaaattcagagcttcctttatcattgcccataggcccttccagcttctccacgttcgggtttttccccagcgcgtttgacaaatattggtattcgccaaggccgtgtggagcaccccgtggtggacacccggaggttccatggaagcaataccccttctctttcaaaaagagagggcggtcaataatcccaacaggtatgtacccaagcagggggaagcatattggcagcgttttggcccacttaggttccatgggaaggcctccacaagggaaagaggaaacctaattggcgatccactttgcgcgaaattagaccccacttccttcaacatca

SEQ ID NO: 418146 - DNA, 1174 bp, Homo Sapiens
agcgggttagttcgttccgtccacgtacgtatgctgtgagtagaagactgacagagcatgcgcattctggagccgttgatgactagccgttggtccttctgggagtgccacttgctctgggcaacctgcatgagccagcatgaaactgggagacgcatacacttggactgtacctatatgggcgttcagtctgagatagggggctacaatttcccgattccagtgctcaatgagttccgagtactggggtacacgtgccatcgcgaagaatgtacgaaatatgaggtgagccactaaagatacaaaggtgcaatagtcctaggtgcacttggcgcattcgaccctctaacgcatattcgagaccaagaggcactccacttcggcaattgtcccagagatgggtaagactctctgatttcacaaacccttggtcaggcttaaacacaaagcgtagggacattgaagtccccgtcatcctttgggccttgcgcggcggaaataggtttcagcatattgccccacgaaagtcgcttgccttggatagtgcaactttagcgcccagaacaaaacgttcgcgctaatcggctcggtaggagaccttggctgcacacaccccagcaaatgaggcggatttacgttggagtgtggacatggtcctttacgccaaacatcgtggtgtatcttttgcagcggtatcgataaggcaagctttggcttaagaagcgggtttcgccgcttagagtcattatagccgccatgtgtgcacgcctcgtgtccccactatctccgagagcttccgagacacagatggtcaagtaaagtggaggttcatccggacaagtgggcttgtggtattccaatctaccatttcgaggagagccacgggaagaaggacttctggacaccgggaacacggcaaaccttaactcttggccgtagggccaattggggggatagtaaaacctcccaaggtgtggggacctttctaacagcagttgcgatatgtatgggggatccgtttactgttgtgccaccccaccttgtggcaacatttcgcagagcaacctctgtcgaaccatgggcatggctagcgttacgctatgcacacacgtggttttaagatcgcctcccagaatatcgtggatacgcctattgatcggcacaacccacacca

SEQ ID NO: 418147 - DNA, 505 bp, Homo Sapiens
agcgggttcgcctctctgcaacccgcgggacaggcagtgtgcctgcagcggcgtcgctgaagagatgcaatgtggatgactgcgagacgaaggtccgctggtcattgtggcagggcacctgctgtcatccagttcaaagtgtctccatgagtcttatcacttttgcagtgacattgcgagtgcaccgacttggcaaaggatgcatccaggatcgcagaacgagcatgcaaggtacatgccgacgtagagttgccaatgaaggatctacaacggcaaactgttcaagcatgagccgatgggtgaccaggcttcgatggaaccagacgtagtgccaagacaagaaaggtgactacaagtccgtatcgattaccactttacttctgtgcgtggtaagcatacacttgacgtaacacgtcaggaaacgtaaacttgcgttcgtggcactgacacgcggccgtgcattgcaatcgatagggacgtcctaattcggtggctaatttcgcgc

SEQ ID NO: 418148 - DNA, 985 bp, Homo Sapiens
agcggagtgggaaagagagccgcccccttcgacgccgcggactctgaagtcaatcgagcgccagagactgtccgagcatcatccacgcacatatgagacccccgctgaaagtgtgccaagcatgaagcacatcgtagagcgcatgattactccgtgttagatgtccctagagcggtcgaggcagcaggcccgtcgcagagcatccatcaaaggtccatcggtcttgtccagaagtactcgactttagagtcagataatagtaggtaaggagaaagatgcggatatgctagataggcagggatgcgatcttgtgaggtagtgatctgctggcgaagacttgctatgagcgagtctcaggcccaataattggtgtgtgtgacaataaagaaatcctgttaattcacgaatgaactcagaatgagtatggtcaggcatgtaatacgatgtacgcacattcacaatggtgcgactgtccatgtgagatgtcgcctgtgatcacgtttttacacaaaggaaatggatgtatgcttaatgtggagtggcagtaaagccttcaatgattaaaagagagaagagaaagccttgtagcaaataccggagaactctaggaagactgagacccccatattggcgtcgaagagggtgacatcactcattctagtgcgcatgatccattctgttaaaggaacaaccgtgtacagattgggaagacatccaagggagtgcagacaataaaagcttgttagagcttggtgaagatacgcttgcgaatgacggtcacttggagagcatacaccaaagaatttacattcgaggaccctgtggctcataagctacgcaggttgctgggacaccatatcaaagcggatcttaacctcaaggtcgaacagaagcattgttacacgtcgaacgatcaacgggtgttggccaaagaaattgctgtaaatggaaaatacttatctaggggggtccaactgagtaccag

SEQ ID NO: 418149 - DNA, 968 bp, Homo Sapiens
agcggagtgttccagacgcgagtggttggcggcttcagcggcgacatgccaagcaaatgagtgacaccgtcgcacgctggtggagccggcggcgcccagagagtggtgttgcgcgcttggtgcgatcgggcggccgcacgcagcgtcggcgagcaatgagatgtcatctactcgcaacctccatttggatctaatcaatgagtcatggcttccagacgagcgctgcacgtggcacggaggccaggctgatccacgagtaatgatgaccatggtttcacatgcattctgcgctcaatcgtcccatggaatcatcgtcgcgtgaactgttcctgcatgaccgagaaggtcaaatctacgtatcaatcctagcatttgatcttcaaatcggtagtacgtgcaccgttcatgcccagtcatgtgggagcggcttgatactgttgcggtaatacgacacgttgaggacgaggaaagggtgcgaacgacgaaaaagacaagcatgatcactgggcatcgccagatcacgaactgcacatgagtagccgaagcggtagacattagcgtacatatcctgcatgaggaatagataaatgttcatcatctcaggataagaagctctcatttgaactctctccaaaagtgacattcaagcaggttcgggccaggagccagagcagagtcatagcaatatatatgtgacacattgatacgggagggaaattcactcatctggctttactttgggcatgggaagagtggagccgggccttcgctttgagtagaaccaatcacatggtggaattcggtacgcagtgcgcggatgcacgaaaccggggggactgtgatccaagaggtaggccattcctagaaaaaatccattgttgaaacccgagatatactcgggggcacggagccaccataagctgaggtgagaccatgggtctcgtggtgacactgtaaatcttactcag

SEQ ID NO: 418150 - DNA, 210 bp, Homo Sapiens
agcgggtagacgcctgtgatcggatgtgtctggttgtgagctattccacagcccaagggttcgttgccgaatgactagtatgctgaggtctctggttgttccagtactgtcgaaggtcctatgtgatctgcccacttgcgatacacgaggaacgctcgcacggacacatactgacgaccactacggaattcgaaccggaagcagcacagg

SEQ ID NO: 418151 - DNA, 826 bp, Homo Sapiens
agcggatgggactcgaatcggcggccctggtgaggagctggccgggcgtgtgagtgctcgctggcggaacggagctgtgctctgcgccccctccaatcccagcgcaaggtgtgaccgttcccgttgagtggccaggagtggtgcttggtggctcgcggcgctgtcctctcgtgtcgcttgcccggcgcaagggcggttcgcgtgcgaggctgggctctgcggtgtgcctcgattctctgcgacgtggagctgtgttgacggatgctgtcggggggcccctcggtgatgtctggccacgtcatggccgcttgtgcgttgcgtgctgcaaggccaggctgggagatgggctattcgttgcgcgttcggacgttgcggacccagatcgatgtcgtcgaggcagtcgtatccagtgcattagtctccataagaaagctcctttgagctttggctcgacaccgggagggggctggagcagctaggacctgggaagctactaggtacatcgagcctatcccgatgaagctcaagcgcgggccgtaacctacgtagatgcgtaccagctagccaggttagtagccagtaaccaggtgctatggtatcctaccactgcaagcgagtgcaatgctcctatgtcgtgatgagagttgaaggcccgcggggtgacgtggatggctgtacttgcctgtcgtgggcatccgagggtaagggaacgagaatgtgcaggctaccgtgtgaaagggtcggtagccgaatcctggggttccattgcgtcagagtttactttcccgctgggacattaggcctgggcaggtaacggataccacca

SEQ ID NO: 418152 - DNA, 928 bp, Homo Sapiens
agcggatctttgactgctgactgttgccgctgtcatcccttggtgtactcgtgtcccgcatccgcgtgctccagatgctctggttcccgttcgcactgtgcagtagatcccgaagtcagatatcatgtgaagccggcctcctgtaatcgaggattgcgcagatggcagcctgtcacacatagtcagagcagaagggcgctagcgcgatgacgcactagcgtgtccgtgctacatgctctggatgtaaacccggggattgcggcaataattgtcgcaggatgcacaggggattcacactaaaggaaagagtcagggattcgcttgtttgatcaattcgtgacgagtgatcagttgtgagtagagcgaatggtacttaagtcgcactcggagtaagcaccccggaggggacttgatcgccatttcgtcctgagaatggtccattttctaacagggaatgtagcaccacgttgatgcaccatgcgcgtctaggttgcgcctctcgtgtgaggaggaagatagtcgcggggctgtgggagcggaaacctctaccaagtccgctcgtgtgcacgaggcaatgtccggttgggatccctccagggtccctaaatatccgttgacgaacgttgtccttggggcaaacctaaggtccttggatgtggtgcccgactaggttgttggctttgctggcccaactttaagttccgaaatgggaaggggaatccccagacagttggggctggaggtacgaaaccccctcacttccattagatcatcaggaatagttgttttgggacaaaggcttactttggtagtcgagatcggaaggtgcttgagacgattggggtcggtttagcagaccgagagtcgtgagccactacgacaccccgaatttgggtcgcctttgggacggacgagatagacgtcaccc

SEQ ID NO: 418153 - DNA, 821 bp, Homo Sapiens
  misc_feature (259)..(275): n is a, c, g, or t
agcgagtggtcacagactgtttcttgtttaacggcatggtggtaaccttaataattccttcctgtgtgtactgcgttatggccactctgtaaacccgtattctctccagaactaatctcctgtgtattatgtttctttattcttagtacttccagtgtctatacccaaattacaaatcccctctattctgaaagaccaaagaaaattttagcagatctgaactgggagttctgagttttgtctttggaattagggtgannnnnnnnnnnnnnnnnaatgaaatgaaggtaagaataattttaaccaaaggaaaacaaagaaagtttcatatgtctctggtgtaatttaataatatccaatttacaaaagcaggaggtagatttagctttagctataaagaccctagctgtccaaaagtagctcaaaatgtagtaagttgcttgtcactaagcaagtaatcaacaactataaggtagatggttgagtcatgtaccctcatggaggatacatcaacttctaattcatgtagaatttccagcagagaatacatctcagtagtcactgaagcatttaattagacattctagtacctatcagaatccaaagagtacagttgaattatactatacttatacatgtcctaataaattctcttttgaatcattcagttcctgagaagattatgtgtccagctgaactgcaggagaaacttagtttttactgatttccctagggggtgggttcatgttggctctctagaataattgatcccactgtgtccatcaaatactcaagcgttagcacaaaagacattcaccctc

SEQ ID NO: 418154 - DNA, 718 bp, Homo Sapiens
agcggagacttccatagtgtccatttgcatgtgggtcactgtggtgagtagctgacgagggacacgctggactccaacaactatgctcgagatatctgggaacgattgcccgcctgccgaccgagccctctgtggatcttgtagctcctgctccggggcaatcgggtatctctgccgcgagatctgacagattggcgcggaaagctgtacgtgctgtcgtgggcaatgcgcgcgctctgcttgcggaccattgggcgcgctgactgggcctggcggagactggttgttgcgtgtgcctggggccttcacgagatcggatggcaggacacgcaggtgcccagcgtgtccgaggattgcgtccttgtcgctacagggaacctagcttgctactaggtggaagtggggactcatcattccatagaattgaactcacgatccttcgagtatcgacaacgtagggtattgatcacagctcctgagagccatgatcctggcacgagaagtgacggttcattgagaaggtggatcgctctcctttgatacactgagggtggttacgacatcgtcccagatctcctgtgttatcagaaatgtcccagtgtggagcaatggtcagcggtaacaggctagtagtggaagggagcaatggtccatttgcggggagataagtgtttccgcagaggaagtgacgacatctggcgcctcgtcttggcaccaa

SEQ ID NO: 418155 - DNA, 1550 bp, Homo Sapiens
agcggggggcgcgtgttgccgtccctgtgagggttccgtcagcgctttggctgtctggacttttgaaatgctttcctccggcgttatctgcaggacgggcccatccgtgcacgcctcaggcgagaggtaagactagcgacgtgttatgtcttaggaagaagagcagacgggcgcgtatgcgacgccaagagttgtcctctttgaatacggcagcgagacctgcaccatgatcccaggttaacccatgtcccggcagaggagaaagaccgaggagtctacacttctagagtacccatcttgaccgcgaaggccggtgacagcagcggtgagtctctacgactcatgtagactcccgcgagaaccccgttggtgcgacatctaccgcagatggactgtggcctgcgagttcatcccttgacatggaactggactagcagcataccatggatccgtgccgtcttggcgtttgcccccgttgcccagcgaagggcctgcgtgacagggaaagctgtctgtcgccccacggtaggtgcttgcgaaagaggacgccgaaggcgatgggagacgccttgatgaggaccagtcaagccttgggcccccatttgcgcgaggggtggaccgttatcgccaaggggcacgcctcggttctccattggtttcacatttctccgctattcgaagtagcagttcgtcgtggtgcattgggtatacccaaaggatcttgttcaacgcctgctgtgcctagctaggttagacccattgtacgagcctgtcttggaacggtgaaactagatttacaccgcagactgcacaatttcccgcgctagaaccagttgtcccaccttacagcaacttgctgtgcaggaaccatgcaacgcccgggccaattgacacggggggcggaattacaaggtccacggaaaactagctgatatgagggcacattagagaactggtatccacagacttcattgataccaccattggaggcaagcgaataaagaaccgtaatagcagcactacaaacaagcgtgcgctgtatagagcccacacattcaaccatttctcgttcaataaagatgccttgtccagtatagtcaaacacttgggggctcaatcgtgcatcgacgcgaacttggatcgcgcacgtgcggcaaacacttgcactctcgcccacggcaacattccttgatctgcgctaacgcctagtcatccccgcgctgctcgcagttagcacccaacgtcaggatatcgtgcggcgcgattcacgagacatatagactcaagacatctcgcattgaaccaagtactgcattgtgacgacaacgcacagacaacgaacaaccaccaccctatcattgaatgcagcatcattcgacaaacttgcgtcatgaagccagacctgcacaacaggcaagtcgcaactaaaaatacagcaggaaagcacacatatatatacccaagaagagaagagcaagatagaagccactatgaaaacagaacgacgaacacgatctattactacaacacttgcaacgagcgccatcgag

SEQ ID NO: 418156 - DNA, 726 bp, Homo Sapiens
  misc_feature (391)..(391): n is a, c, g, or t
agcgggacgggcggcgtggccgttcggtgtgccggctgtctgggtgcgcgtgtcggtcgtgctgcggcttctcccgtcggcgcttgggcgtcggcgtatggctcggtgcaagggtgtctacttgaattcggaagctagggttgcagctatcaattggcgtagtgagacctatcgtcaaacgttgctcgtagacgtccagtggaggtgtggagacgtgtgtcccgacgcagcatgcttggaccggctgataaggcaggacctttgctgtgcagcggtcgcgctcttgactcgacgtggaatgcgaagcaatggtcgctccaatcttgcgatacgatgcgatcccggtgtagagccgatctgcagctcgttccgcgattcgaacttctgtccntatatgcgcagagaaggactgacgcaggggtctggcttcgatcgcagtgaaaggcgtgtactcgtttcgcacacattgggatcgaggttgcccggtgtggtattcaccgtcacagagtcgtcgagaaacaatgtggaccgcatgagcgctattcccctgaattcggcaatgtctcatccgtgttgccaccatgcgtagggcaaggcttcagtcgaaaaggggtgtagcgtgggaggggggctatgcacacagggtcaatcgttgctgatccctgtgtgattgcacggaatcacaagcgtttatgtaatgcgttagacatactttatgcgtccaag

SEQ ID NO: 418157 - DNA, 632 bp, Homo Sapiens
agcggggtaaaacctatagctggagcagtcaacagaggctaggtcaccttgttggcagctgccgtctgctagagacatggtgataggaagcatgggggcaggggagggcaggagatcatatttccggaagagggtgctgtggcacgaccatcctaataagggctacatggcagcccttctctaagaagtgagacatgtcttttctgaccagcagttgacagttaagggtcatccacacatgagctacatgcttatcctaaagaggacttggctagcagacatagagagcagccgaagtgtggttacacacttattccaaaagggtattggttagagacaataagaggacgaagcataatacagagggactggctcatttcttcctgaacttcctagtctgtaacttgtgtcaggcagagcctgaagtgctctgtcggttcctgtggctattgcccggccacttagcgaggacctcggagtctcgggctcgcacgcagggagtgcgagtagtcacaataagcatactcgtggaaggctcgattgacatacgccattaaacttgttggaacgagccatggaaatggacgaccattaaccatgtcttaggagctgtagcctgagaatgagtacca

SEQ ID NO: 418158 - DNA, 259 bp, Homo Sapiens
agcggcttcttttcgcgcgtctccgagatggcggcgccggcgctagccctcctcctcgccgtcgctgagcctgcgctgcgccgtgcgctcccgccggccttcccgcaggcgagctccaaccagggtcggcaggccatgtcgctgaggcaggcgtggcgaggtagttatacccgccatatgtgcgaagttggaatggcctataggtgcgcggagactagacgcccaggcatgacttggttgacatgaaggtaactacgga

SEQ ID NO: 418159 - DNA, 898 bp, Homo Sapiens
agcggcccagtcactgagccgccgtccaggattcagcagcatcctacggaggaccttcgcgagacctcaagagtcaggccagacgccgcaatgttgtcgcgagagagggcggggcgtgcaggtcggctcgggggcggcctctcgaacgaccggctgtcgtcggtgatatgtggcgtggccctctgtctgttgctgtgaccggttccgtatgcttgccgtcgcgttgcctgtggcatgctgttccgagcatcgggagcccttatcgctggcgtgcggtccggtacgcttgctttgcgcgctagatggagcacagcctgagggagcgttccacggacgtttaggtggtcttgctgggatgagttctggcctttcatcgtggtgaccggtgacgggcagagccggttttcctcgcgtagggcgccatttcagacgatccgactgcgcattgacgcttgcataacttgtggtgctctttgccctgcatgggttcccgtagtttaggaaaagaagcgcgtgagcccacttgtgacagaattgataagacgctttgaagggaaaggaccgtgaagatttgtgtacctggccttcgtacaaaaagcaaggaatagctaagggcgagaatgaagggcatatttaggggagtcactccagggtccctcatgggaaaggtgttctaggcacccgatacacttaggaaacccttgtagaatggatagaattgatgcacatccatggtaatgtttgcagcaaaaggctcttagttatctcaagagctaggagttgtaccccaatggattggcatgggcccaatacttgtgggatttgccccagcaaaatcctccttgccgaaatgccctggagagttgaagaggaacgaaaacaacgtttatggttacct

SEQ ID NO: 418160 - DNA, 429 bp, Homo Sapiens
agcgggagggcgccgcgcgtagtggccacgggccttgccttgggtagtcttagtgctggtcctgagcagcctgagaccagaagctgccaaagtgaagtcctcactacataactccaatgaacggcagggcatacgagacctgcgataacgattcacctgtgtaaactcactgtgaagccagaagcggacttgagcagcgccttgtgcatcgtcttgacagtgaagagcgcgaaagagaaagtgagatacggcaggaactcgtaccccttgatgccatgcagatctgcttcagtcatgctatacagtctacagaggtcgtcattcgtgtgtccctggcgtgacgtcatggcctcctcaccatggcccaacgtgtagcgtccaatgagaggctctgataatagtggaacaaacgacaaagcgacatgtgac

SEQ ID NO: 418161 - DNA, 1088 bp, Homo Sapiens
agcggggtcgtctccaggacgaggtgacagtcatggagcggatggcggacggaggccttctggtatcgccctggggcagcgctgtatctgtgaggctcgtatggagtcgtcctgactagaatcaagacgcatcgcgaagcgtctgagccgcgtcgcgtgggttaactactgagtcgactgtcggtacggggcggtctatcagatcctgggggtttgtgtcgtcgggcgtgtgatcgttgcagccagatgactggccttgttcccttggtatggtatcctgcattttcgtgggttacggcatcctcgtcgtagtccagttgttcgcagctaatcgtatcgaaatgagtgctcagagttgacccccctgtggtccactgagctggaccgtcccaatgaaaatgatgagccagagtagcacttactgaccaagggaattacacttgttggatatcatagaaggaagatggcgagccaaccttggaagtagaccattttattcctagggtctcagaaacattgaatcccacattgattgtagaaactaggggtaaccaggattctccaagcacctaacgggttggagaccatataccgatggaaccatctgtaggcgaagtactgaccgttggccccatgtgccgcttgtactttgataggggcaagtcctcaacacaagatttgacccgacggatctggaaagcccaattgagcaatacgagaacaacgattctggaggtgaaaaacggttactttttggcccgttttggtataacaccatcagggaagaaccgaacctggcggaaacctttagtttaggagacacctccccctttggtacaacgggcggaatgacaacaggcgtttcttgcatgacccagaagacatacttcacgttgtatccaaatacctttgaggattgtaaacagcatttgtgaaaacaacgagggatctccctcttcagagttatcttccccatatggggaactacatgagatcaatattggcacgtagataccacatcaccttcggcggcgttaacacactaagagcacttacattcacctataacaaatcgcgcacacgaacaa

SEQ ID NO: 418162 - DNA, 815 bp, Homo Sapiens
  misc_feature (355)..(355): n is a, c, g, or t
agcgggtggtccagtggttcctgctttcggctgtgctggattccctcagggcagcgtggcctgcagattccctaagaaacatgacgagtccgccggatgacgtagtgtgcgtgacggagatgataactcgcagcctgcgctcagcgctgctggctcggcgagagcacgtgcaagatctgttatagaagacatgcgtagctcatagaatgcgttgcagaaaggatgtactcgatgaatgagacttgcctgatatgctccctctctcactggcgtaccattagcgttgcgtatgcactgcctgtcctagtcaatgccaggtagggtaaactattgggtatgtttgcatgaacttaantctacctcaatcgttagaactcctatctcatgttaacagttgcggagtctcgttgacacttgtctagttggtaccatgtctaggtctattctagcctattcgtgtcggaatctacccatttgtcacctcaattgccattaggctgactcatatgaaattctgaggacttcccatctaggatggaaccgactctgagacatcgccgggcaacacagttcccacttggaacttctttgacttcgaaattcttagatctaaaactttctgcacctgcttgcagacttgtggtagtttagcgctcgagacatggcgcatcattctgtacgtgaaaacggagtgataaaacacctatgaattgtaacttccattcgtatgcgatggattctgtttcacctttccttgacaagctgctatcggatgggtgacttggagtcccctcggacacggtactcatcgaacc

SEQ ID NO: 418163 - DNA, 1061 bp, Homo Sapiens
  misc_feature (161)..(161): n is a, c, g, or t
  misc_feature (165)..(165): n is a, c, g, or t
agcggactggtatcgatggcgcgtgtgcggcgtgccaagacctgtggtcgtatcccggggtctggactcattgaggacatcgccgcgatcaggggtccgacacgtgaaggcatggttcccgtgaagtcgatcgcgacagagacccggggccaccgcgggantgcntgcatcgtctcttcctactgggcatcgtcgtgagagcggtgaacggcgcgctgggatgcaacggaggtgaggtccgtgagccacactagtagccagaatagtagtctgatgcgtgggtcagctagcttcagtagctcgccatggtgtatagcaataaaaacatgacagggctcaagtgggatgggctcatcgtgggacacccagatgtgtaataggtgacctgatggaagaactccgtcattattgcgctagtctgggaacaaataatcacgcgagttgctccagtttaaatagaaccccaaagatagactaaagactccccattgggactcttgatagaaatgagaaccttaccacaacaatagtttgtccatatccctcacagaaacctgggagaatattaccttaattggcttgggaaaaaacgataatagtgagggacaaacaggacatttgtacacgggagttaaagaattcgcgaagggagagtggcaacgaatgggaggcaacccaggagaggttggggcccttggctcggcaatccatttgtgcgcatggtcgtagattctaaccccgtaacttattctaagggctccttttctggcttatttctacgaacttgtctcaattcggcgtaagtctgagattgtaacccagctccgacgagatcaagtcgattcgtaggttaaaatgctttgtgtgacatttggcgggtgccccaatcctgtccggtccctgccattgcgctgtagaaatggcgtcggtctagggatatgctcatccctatcgtgaaggcaattgacacaccattactgccagggcccattttcaacacgaatggatttgtcccgcttgaagaaatggtttgcgagacaggtcacccttatggttggggg

SEQ ID NO: 418164 - DNA, 1326 bp, Homo Sapiens
agcggagctgatgacccgattctgtacgccttggaagggagcccgtcgccgagtcgcctagagacatcgaccgcggtgcgccgcgtgcatcctgaacggctaggtccagcagcctagaacgcgtcatagatgcacaggcacgacttcgctcggccggtccaagctcgggcactcagacattggctcctcataaacaagtgcgttagttgccttgatagcccccgtcattcgttgctactcggagccagcgagtggggaccccatctgcaggaaccgctatctcgcacgtgcaacctcttgtctcgtataccatcgcagcatctttccttacttatcccctcatcgattcaaaggacgccctagggagcatgtgactacggtaagcaaatacgccgaccaggggagctccaggcgccccctagaaacggcgcccatatctggtctttccttgtcccgccagtctaatcacagggtagtctccatcctcaccacggtctggagtggggggccccttgaaccttgagttcttcaacttcgccccatacgtgtacgtccgcgaaagctgagttttcaggggacgtaatggcttagtattgccagacattcacaagagtagaggtccgcggacttttggtcacttcgacttgggccttttgcccacatttgaacaatttccaactatactttggttaagtgaattatcttcgcaaacgaattttaagcggtggacaaattacgatccccatcgcaaatctcgaatgtcacgtgatcccagatgtaagagtcctatgtaacactttgcttgcgtacagaccaagaattcacctagacttagtgacacgttaccacctattcatagttagagccccaaccagaagtcaatatcgggtcgcaatgagtttttagcagctagaggtgcaagagtgactttacagcaatatgccaagggggctccgtctctccacttcgggcaaaggcgacttatacactttgcccaagacaaaattgacccacagacaagagagggttccctctaactgaagagccagactggggctatatcacgtaaggccagatcgggaacctccgggagcgaataggaacgaacagttgccgaggttgacgatggcctcagcgcccaaaaagttagaggcttttggcgagcgcagcaaaaatgtcgcgctttccgttgacagttagacaggtagcacccatttggatcgccaagcaatttcccaggttgtgccctctggtgtagaccctttgggtccccatccacgacaagatgggtccgagtctccacgccgaatagatgcactacaatgg

SEQ ID NO: 418165 - DNA, 875 bp, Homo Sapiens
agcggaggtggggccctgcacccgcgcccggcaggccagccctctcctcctacctgcgtggcgcagcacatccccctatcgagaatagctaggggagatgctacgcagatagcaagtccacagtatagcgatagcaccataccgggaaatcacgttcatagatacgatccagaaagaaacaatatgagaacatataaagaacagagacataagagggaacaagcaataccgaggaagcaaagtataaaaacaataaatagacaaagacaagcagaaagaaagtcgttacgaagatgaggacaagaagaaaccaaacgttgaacgctgcacgtgtgatcacagacgaagaagaaaaaacgagaggcgcagcggcacaacagcagaaaagaccaaaagcagtaaaagccgaggcagccagagagacaaagtagcatacaagtaaaaggaaacgatagaaagtagtcaacggctagaacaatagaaagataagagtggccatgggaatcagaaaaatgggtgggatgcgcatgagatacagaacacaacaaagtatggttgaacagataaaggagcgagtaggcgcatagacgcatgggcaccgccaccaaaaggcgaacaacacacgaatgtcgctgaacaaattagcagacaaggaaaactcgaacacacagtcgatacctagaccacaagcgaactgacgagatacgacgcaaaccaaatcgaaacaccagcagtctggggaccgatcacagtatgtaaaacacacacaaggaccaaaataatatcacagaagcatacgaaaagacacggtcatcgcaaaacagacaatagcgcaaaccacaacgatgaagcgacaacgtccaaaaccaacccag

SEQ ID NO: 418166 - DNA, 1034 bp, Homo Sapiens
agcggactgtgcgattttgggatgatgatctcccatgcctaccactgttctatataacacacgctataatacggcacgctcttaggcaccagagcatgcatgctgccagtaggcctccgagatccgcattgacggcagtggacactcgtcctcgataacgtactccctcattatgctacacgtgagagagatactattacgacagttactagagaacgttagtaacgtcgcggtacgataagtgtcgtcggagacaagtattggatgagataagatgtcccaacaacgaagatattcagatacgtgatagtcgacgatgtcctactctattgagcggttcagaagtggtaaactcacacggagcccgctgttgcctatgtattggtcattgtgaaaacgtccttatagaacaatgaagttgtgagcccagtagaaagtccttctctagtaagaatatctgtacactataatggcatatgcgcagcactgggagctcataccaatgatggtttacggtagccaaagatgagacattgtacatctactacattgtgtgccaactgcgcgagagtaacgcacgctaaattgggtgatttctgaaagatattgctccttgtactactatgattggcccttgtaaggggcgcttcgaacttggatagtttactccacctatagtaagaactcagctatggaacttttacccattagtccatgactattagtacacgcgtattgcttattactcgcacattaatagaataatgcaagcgaaacccctatatatggctcgtataatgcaccttgactaaagcacttgcgacaatcgcacgcagttggacagttacgtttggagcaaaataactggtccgttggccacggtgtgaggtggcacataccacatgtgtgccgtgggcacacatatcggttgtgccctggcaccttccttgaacaacgagttttgcactctccatggaatagtcgccccatttggctacatacttccaaatgtattactcgttgtaccccacccc

SEQ ID NO: 418167 - DNA, 589 bp, Homo Sapiens
tctttactttggataaatacttagaaatggaatttccaggtcggcctttagatattattaatggatttaatatgaaaaacctttacttgaggatgtataaagctttaaaagacagggtccctattcttaagttataagtaaagcagcatttgtaaggtaatattcagaaaacatcagataatatcctataaagtcctcctgttcttgctgatgacattggatggccagttaaggatgacacttcattctgtcctctgcaaccacggtcctgacatgtctaaatgatacttgccctatgagaacactgtggatgtgaaagcatttcctcaggttatctttttgacctgctggttttaatctaatgatgggatatccaaagtgaatctaactgagtgacatgattgtggatctgttggggggaatcagagacagctagagcaagggcagacacgtgctgaactcatctgtcttaagagccgaagaaagcagcagtgttactagcagagctactgcacatctgtacacgtggctccaatggctctgacctgtttttttcccagtatgaacctaatacatgaggcaagttacg

SEQ ID NO: 418168 - DNA, 164 bp, Homo Sapiens
agcgggttgcgttggtcgaggtttgcccggcgcttgcagctctcctcgatcctcggaggtcctgccttcgcggcaactttccgctcctcctgtgcgccccatccggccgccggtcggcgcgcgtacgcgccggtgtatccgcggcacggcgcacgccctcgccg

SEQ ID NO: 418169 - DNA, 1349 bp, Homo Sapiens
  misc_feature (1323)..(1323): n is a, c, g, or t
agcggattgtgcaatcctgctgcttgatgccccacagtgaacgtgaacagtggcactatggctactgccaaatctccttcacacgctaatcctgccgaatttgagcaagttgtctgcatatagtcgaattagtatcacgtactgtgtgggattactcactacctgtctgcatattgcgcttcagtactgcgtaggagggatgcaactctgtgaatcgcgcgtatacgcgtcagactggtagtactgatcactaatctgcctaccccagagttcgctgtttactctcagagatatgctgtggtacctttcctcactattacgtttacgccacagcagtgattacaagggctgagaaactacccttccactatgttcttagaattcaggctgatacctattctgtctggcacggtcgcatgtgggcttgcaacggcgtcaggtatggagtgagccaccgagtggcagtcgtgcggacgtatgctgatcccttgcgcgatctcctcactattgctatgtgccgctgcagtccgtgggcgtgtatcctcttacactattaccttcactgcgaccggttgtgccctttgtgtcggcatagcgactagccgtagtacccacttgattgattgcgaccccgagatacccatggaggagctgtgccactagcctgagagcttcctctgactattgcgcccgtggaagtataacgcgagagggtttagaaccaagccagtgtggagtatgacgactcagcgtagtgccgaatttgcctcttccaacgtgatcgttcagcgtagctagcacgttccgagctgctcggaaaatccacgactttcggcgagcatactaattatcggaaccgatacgcactgggaaagcgccgttgttgcagcattttgcccacgcacccagttgaggctacatgcatcattgtgcgcccccctgtggacactcttcgttccgatatagttccctttgttcgaccaacgtcgtaccaaactgctatccatgggaggtatttgcgtccagcgaacatttggttatctcaagaaaacaagtccctgcatagttcgcatctgataccctcgtaacaggtccccctcatggaaagcgctttatctgaccttcgaaggaaatcatggctcagcggtagactatgggcccttgtgaagagaccttttgaatggactgtgcaacgtgttcagagacacaacgaagagcgtgtgtctcaccatgtggagtacatagcctgtgatacttgcgatggccccatatcacggtttagcagttttgtggtgaggggcagtatactatacacacatgatnaggtgccgggttacacaagatcccag

SEQ ID NO: 418170 - DNA, 1390 bp, Homo Sapiens
  misc_feature (1317)..(1317): n is a, c, g, or t
agcggattgtcactacaccgggtggagggccctggaataggcgcgtctaccacgaccgtgacacgtgccactaacacgggacggcggcgtatacgggccaagagagacccagggcaagccactcggtggacatctcaggtgcgcatcaattaacctgacacctccccttctccccgcggtcatggaggagggcggcgcgatcccgtgcgaattgcgttgacagggacgcagcgggatggtccttgtagagcgatcagtcaggacccggcatgacagtgatacagctaatgtcgtactgtgctcccttaggcctcgaggctcgaagcacggcgtcgacttgctccgctgtgttgacatgggcctggcgaccttgtgcgcgcgccttgtagccctttgtgtggtctcgagtctcgacgtggatgctctgcaagtgcccgggcaccggtccaccgcgttgcccagggggggaggggtgcgtccagtggcgaggcttggctgtgatgctctccggagtgctggggagcaacggaggttgcgcgctgcatcctgaaattgtcctggatgcattcgccatggtcaaatccactagactgaagactcgggagttgaaaacctgggctgaaatccaagatggcggtctcgcttgcgatgtcatgactcggaggagacggattagcgaggcaataggttctgcggcacatgcgcctggcgaaccttgtgtgaagattcccaatgcatctgcttgccatgcaagatgccctcggacatcttttccgatggccttgcagcagacgtgagcctctcgttagtcaactgaggttacttgggttgtttgacttgctgtgcggcctccggaacgggactttggggcgcgtgcactgggcacggcggtcgttcgccttgttcgcaggcttgtgacaggggatgttccccggaaaggctgtgtctagtcgtcccgttgttaccgcaatccatttgccacgggggactccgcccgctcggctaggcttgttgccagcgtgttgccctggccccctgcggtggcggtgcggcgccatatgtcccaatgtgtttgcacaaatctggggttcttaaaattgcaccgcgcttgtgtaacccggtactgaatgatttgttccaaatgtgcaaccggtgtgtcccattgggcgcaatagtagtgcccagagcaattgtcactaaggtagtcactccagtgggggccccccggtattgtgtatcccaggtgacgcacatgagtgtgagcacctaattcggtgtacagcagcaggactgtggatgccacttaccaagtgtatngaccccccggaaaagacagagtgatctttccccgacgtcaggggcgacaagtacggatagtggtgtcccatac

SEQ ID NO: 418171 - DNA, 1450 bp, Homo Sapiens
agcgggcctctaactgtcagacctggtctcctccagagaaaggcatagtcatcaatcatgatactacatgctgcggactagtgtggctcatttgtgagaatatcttggtgatataatagtcggaatctactatcggcatctggaacatagatgattgtcgaactacgtgtatgtcttaaatagttgtgaaacatgaagatgagtccttctactgtgggcgtactgacggcttatgagatcttcatagggagcaatgttgtattcgcaatgtggtggcagaaagagattcattggcagtataatactagttcatatgacgcattcatgcatatgtgagatgtgaagtcaagctgtcatatgttaatttcgggagcgatcgattccttacatgcttattgtagtacaccattctataagggggccgtcctaggatgcattgcggactggattgaactatgtttataattggttcctcgacgttagtcttaatatcatggcaactgatgtttagaagagcctttaacgcgaaaccgaggcagtgtgatcgctttcgcgcactgctaattagtatttcgtcaggaatgaagagtatgactgcagaaattcactacattggttgacagggctgatgttgaacccctagtgggacctatcagctcggcagtgaacatttgaatgaagttgtgcgtacttctatgatgcgacagggcggattgacctcggatatcttccgagtccagtgctcggttgcttatttgaaccgctttgcgcaccgaggttgcgtagtcactgtgctttgcggtgtaacccaaagaaggtgccttggcaaataccccaaatgcctagagaaggccagaagtccctcaaatgcgtctcgtggtcaaggcggcaatttggcaattcgcgttggatttcactctggttgtgtgcccttagtttcgcattccaggaatagaaacgtaccctaggtatttatgaccatttagggtccctgagttggggccggttgggcctgtccatccggaagggaaatctaaccgcggtccaagggagggtccggacaccccaaccgcgtaatcgccccgtgttgggtaattcccaaacgccgacatgtcccatgtctttccttcaaagcggtatggccgaccccagtggatgttaacccggtcccggaacacaatagcttttcggggggccctaactcattcttgagcggtttgtgagaacctgcagcgatggcgaaaagacatggctcgttaacccttccaccttttttaaaagacgtgtgtgtcgcgaaaacatgttatttaccacgggtggtgtgtcaattagaccgggaacatgccgtccaccgggtgcagcatgaggtgtgtgagtcacccccctcacaggcgcttaatgagggggtaaatccctgtgcacacggtatgcgtgcatggcgagaactaga

SEQ ID NO: 418172 - DNA, 412 bp, Homo Sapiens
agcgggggcgtggctgggaactggaacctcctgaagaccagtggaggccacaagcagaagccctcggctccttcccttccccgatgctgggggccaagggtctttctctgaccctgtccccccctcacgttaccagtggagggtgtccaggttcttggcattttgaacaaagaattggacaaaacacacaaacaaagcaaggaaagaatgaagcaacaaaagcagaaatttattgaaaatgaaagcactctttacagggtgggagcgggctgagcaagcagctcaagggccccggttacagaattttctggtgtttcaatatcctctagcggtttaccattggttacttggtgtatgccctatgtaaatgacgaggatgaagtcaaagtcattttctcggctgagcatactg

SEQ ID NO: 418173 - DNA, 451 bp, Homo Sapiens
agcggacgagaggcgctctgcattgctagcagtttccaggatcgccagtgcgtaccgaagacattcaccccactcgattatgcctgcgctaaagctcgtcacttatgcgactctatcgatggagtgagcgtgactagttgactataacttgcggcgtttagttggcgacgcctgtgactcgtgtcgctgttctcctggctctcagcttaagtatcgttgagccatgtccatagctaggaccgatctggaacaccacatttcgagacatgctcgcccttgtggctcccatagaaatggagtaacgtcttaattgcccagcgtttccagcgtaactatagacgacggtgtcctccaaagactcccatgaccgctgtcccccttaatcatccgtatgttcaaccttgacgcacttcgactcatatgtcatagaaaaaggacctcttggacttca

SEQ ID NO: 418174 - DNA, 630 bp, Homo Sapiens
agcgtgggggtagctgctgctgctattgatgaaggctgaaagtccttgggcttccttctgctctggaattgtgtctgtgtttctgcacagtctctgtgggattctacaccttgtgttttcatctcagaacaactttatgactctaagttctggcagaggtaacttaagggaaactcatacaagtaactcacttttttttgggctcagtgtttacttgataacactgagactggtcccttaattactttgtacggactgactgtgttcttacttgatacacactgagactgatcccttggttactttgtaggaactgatgtaaggctgcgccgactaatcatggtggaaaacatttccagacgagtggcataatctttcctcctttcttctgttactttgccacttgcctactcatactgtactgtactgctgctgtattcgataattccacctttgccctatactaagatatatataacgactactggtacattctctatttaacaagcctaagtctctgctactcgacatttactgcgacacacttcaggggtaccaatgactttgccttcgttcctcccattcacaagagtcctgtatcagtccatattacactcacgtatgtaatca

SEQ ID NO: 418175 - DNA, 1090 bp, Homo Sapiens
  misc_feature (298)..(298): n is a, c, g, or t
  misc_feature (301)..(301): n is a, c, g, or t
agcggggtcgcctgatggggagtgagctcgacggcgggctccatggcagcgtcctcacccctagacgtaagcgccctgtccggctctcggctcgtgccggactgatcgcgaggggtccggggaacgtcgcgacgcccggacggcgtcgccgcgacggagtcacggccggcaggaggagtcggagagcctcgaaggcgtcgcagcattccagccgcacactgcggcaccagcgacacagtccgtgcgctcacccgtgcgtccctgcgtgacttcccgccctcggtctccgctcgggtgntantgggggcttcgctgtgggcgctgggtgtcgtaggtggtacagccgtccgccgtactcatctggatggcatcatctttccctgggtcggcatggagcagctgggtcgcctgacggagttgctcgagtggcagtcccgcatgctcgtatcgctgaagctggcttccatccaagtgttggcctcggtagaagtcacgaatgtcctctctccaacacgcatttggtgagaacacaatagtgtgacctgatcggaaagcgcacagagctcacgtcctttatgttcattccggtacgccttacaaatcccatcctggacgaccgaaagcttgactaatttgaatcgcagacacgtagcgcattgagtcagacgtactgatgggctgggatgccctccgacgcgggccgtggaatcgcttcctcttgcgactcgcattggatcgcttagagcctcgcgccttggcggtctataacttggggttgaaggattccggggtggggatacgacattcgagccccaaaagggcttattctgccccacaatcccattgtgaattgacaccgaagtcttgagaacactatggcgcctctccctctataactaattggaaaaattgtacggtgtctggatctgtaaacattctccctctgtgggaaagaacaatggcgctttgttgtaccatggcgaagtatcccctccccttacccgttattgaacttgaggtggatgtggaacggcctgggctgagttgggtcccctgtccaaatttgttccgggtaacccggaaccgttat

SEQ ID NO: 418176 - DNA, 1288 bp, Homo Sapiens
  misc_feature (287)..(288): n is a, c, g, or t
  misc_feature (370)..(370): n is a, c, g, or t
  misc_feature (473)..(473): n is a, c, g, or t
  misc_feature (476)..(476): n is a, c, g, or t
  misc_feature (648)..(648): n is a, c, g, or t
  misc_feature (673)..(673): n is a, c, g, or t
  misc_feature (700)..(700): n is a, c, g, or t
  misc_feature (709)..(709): n is a, c, g, or t
  misc_feature (758)..(758): n is a, c, g, or t
  misc_feature (774)..(774): n is a, c, g, or t
  misc_feature (780)..(780): n is a, c, g, or t
  misc_feature (791)..(791): n is a, c, g, or t
  misc_feature (877)..(877): n is a, c, g, or t
agcgggctggcatcgcgcggcgcgccagcgagatctgcgagaatgcgagcgtagcgacccggcgcgaatcgcagcggtgccagccgccgggaatgagcgtgaagctggagccgaggcaacggacggcagcgcacgcattcctgcactcgagtcggcccgtcgcaccaaggcggtctgcgtctgcgcccctatcgtctgaggcagcctgcagccgatagtgacctttgcgggaccgaataccataggactcccgtgatcacgccgatacagtagggtcagcacgtaannacagactacaacgatctactgcatccccattgcagtaaatcaagcggcgaatcgactcgagttccgtgtctctccgcgcagnagccatgacgaagtgacgctgcgggggagcgttctccgtgacagatttcgcgggcaacctgcgcggtgtgcagagttgcttgattatatcgtactcctccgantanatcgctcaatagaaggacgtgatgaaccgcatggagcgaatagaaccactactagtttgccaattgggaggtttacacttgaacgagttagctgattcgtttgtaaagcattatcggactacacataaggttggcaaagcgagcctttgatctccacgtggaggcgcgcccntaatttggccccacacctctccganttgtgcaccgactgacgtcctgtcccncgtgcggcntcgtcactgtgacgcatgtctcgcaccagcagacagtgaaaccatactntgtcccaaggcctaanaagccntgggaggcccntcgacacgttattaacttacatccacattgtgcttacaagagcgtgtcctgcccaagccaggtcacttctacaggcgcatactganagctgcttcgactaaccacggctacattcgcaacgtggacgacaagcctacgttgcaaccgcgacccgttttgcccacgggacgacaccgtgtgcacttctcacattgcccaagtggacttctgacagcgaacacttcgtactcgacattgcgttagagcattacagaatgggtgcaacgcgacggtaactgactcccccttgcgtcagaagggccacgtagcacaaagggcgtcgcaaagattggcagagttcgccttcactgcctggaaccctgtgtgaaaccgaggatcgttacaaacccttgccacaaaaacaaagttcgtcacccattggcaaacttcccccgcagcagacagtgtgccacgcttaacattcacatgtcccaaggcaagcttaaaccaggaatcca

SEQ ID NO: 418177 - DNA, 1149 bp, Homo Sapiens
  misc_feature (653)..(653): n is a, c, g, or t
agcggattggtcgcttgtgccagaatagatgaagtttggcctgtttatcttgttgtgtgctttcagtcgtgttacaaggtctctcactactagtcatgtggataccatatcgcatgtttatgtcaacttcagggacgttcattgcctcgccatgttgtcttcctattgaatgctgtactggtatattgatgctatattcatcgcgtctattgttcatgacacaccattcgcatccgacggtaagcactggtttgcactcgtcggtcgtacacctcgtaggtgtgatatcttagatggcctttctgtgagtaatctatcgcttaggatgtggttaggacgacatgaagggaagcaatctgtgtttgtggcgctgttatactagtagtataggcgatgactttagggagatctgatcaagcagtggtggctaagtacgaagttcgttgggacgttcgctaatcttcgtgtcgttgcgacctatgggactagttgtagcaattatgattctgacgaagtggtcagctagtttgcaacagatgcgagagttgcttcctcacatccctatgtggtaggtccgccaatgacctaatattcttgatgtgtctcgcttgcatggatctcatgatcacgcagtgaagatgaagtgatatccntatgtatacctggttatcgccatgtgccgtgttttacaaaagcgtattggtttgtagaggcccaccttttagaaaatatctggcgttcaatgggtcgacgatagtcgctagctccttctatataagtccccccttttctcataagttgcgtgatacttcctggccccttttcacaaagttaccatgtctgtggttttcgaccgaggtttttaacgctctaaaaagagggcacaagggtcgggacaatgttcttgggcaacagccggcaattaacgttaaacttgggtgcaccgtttaacaagcgaggggccaaccaaataggtggtaagccacctgtggctgtgcggcgcctttggggtccaaaaggcgaggaatttcggcgttacaccccttgaaatcccagtgggtgctcaaatgttggcggaatgggagggggcgaattggccggggggggcccaaccagacatttggacccaggggataatgggaaccgttg

SEQ ID NO: 418178 - DNA, 1191 bp, Homo Sapiens
  misc_feature (333)..(333): n is a, c, g, or t
agcggacggagccggcttctgtcgacggtgagctggctctgaacctgcttcagctcggcacaggcaggagctcgcggatgcgccgtgtcgtagtatgggtgcgactgagaagcccgtgtagccgtcgctagacaccggcgcacggagcacgcggccagggggcactctatcgaagtggcggcagccagagccgagaacctatagtggtgaacagttggaacagtgtcagtgtccaaactcttgtgccgcggaactggacgtgcacaggacatgggactggagactcaacaatagtcgcgactgaagggtgtggtgactaatttaattacacgncaaggcgggaaggtacgcatcgtggcgatggtacctggccaatgtgtagatgcacgtactgaattgctgggataaacacaagcctgttgtgggcgaacaggaaagggaagtcgcataggatggatggggatgggctattgggtggaatcttttggggagcctaaagtcgattgtagtcattggccttgtagccaaagaggtagttggaattgctcgtgagcgaatgtggatggtctactttaagttgtgtactagcaaattactaagttgtgtaatgcctaccatgtttcatagcaacgagcaaagttagcaaccagtttgggttaacttcaacttgtggtgggggcaggacttacaagacgttgaggctagtgctgaacccaagtaggtagaaatgggattggcttgggatttgaactttgggaggacgcacataacgttggtcggaggaaatttgtcggacacggaaagacattggttcatccattcacttaaacccaaggagaaagaaactggcggtgagaggaaaagttagtgattgttaggaccatttcggttttgtgggaggtggaaattggaggaggtgaaatcgtggcgaacaattttttaattacccaaagttgttgatgggctcttggggtaatcgcgctaaggaagcttttgtaagggagacaactcatgtttaggaactttccatttgctcggggtggaaatttgtgttgcccgatagggaataggtctcagaaaaccacgcggggaaattaccgcttttaactttggaactgtaattttttaaaagagatctttgttaaactccttgtgtgaaataaaaaggtgggtctcacattgggttggatc

SEQ ID NO: 418179 - DNA, 1032 bp, Homo Sapiens
  misc_feature (408)..(408): n is a, c, g, or t
agcggaggcggatacctagcccggaagggcggggcccggcggtcgtcgctgggggtgggcgcttctggcgggccgaggtgcacttcgaccgccgaaaggcccctggccacaggaggaatctggtgcgcgaaccgaggtctgctagacatatcgaggagacgcgcgcggactggaccggcggggaaagagcaaccagaggtgaagcgacggtgcgcgacctcacacggaactcgcgaatcacgctgcggcgctctccgacgtgcgagcgcgtgagacgacaacaccctgcctcgtggaagccgagcgtaagctcaatggtggcgccgcatccatggcaggcatggaccaggctgcatcgcacggaacgtcctgactggcatgtctgtgggatgcagccaagagctggcncggtcgctaggggctttcgcgtgcgggagaacatcgcgtcgggaacggtgcagcaaaacatcactgctggccgtgctttgcaagccaagcgctcaaagcactccgtggtgtctgtagggcccggggacgggacacccgtcgaggggccctgatgcctcgggttcgggccgtggtaaccggacatgtacaacgccaagctctggtgctagactaatcgctgtggcgcgatgggttgtagatggaagcctcctgaatggcgcggatcaaggaattatcgcctgggttgcagcgaagcacggcaaattgaccctgggaagcaaacgtgacgctctccgagaaaacttcccgaaatccatgttaatcgggggcacaaccatgtggcgagattcctgcgggcacaaagaccggctcggaaaaacttctaccttttaggaatcgggctcgtttgactggggagaagccggcccgtatttgagcccccggagtaaatgctcccgtcccctttgggtgccccgcggatgcccggtcggagcacacgttgagatagccgctcagggaagaaccgtagacaatctggccgaagacagcgaatcccaacaggggactagccgcccaggtagcggg

SEQ ID NO: 418180 - DNA, 1141 bp, Homo Sapiens
  misc_feature (888)..(888): n is a, c, g, or t
agcggaagtgtcattgcagggggagaggaagccacggcgggctcacgtgctatgggccgcgtagaagaagaagaaagcggagataggtgacgtaccggtggcgcgaggctcgtatcttagcttcgatgaggatgaagagggtggattacctggttaaggcgttccagaaatgcgggaagggtctgagcgagagaaggaaggcacttgatggagatttaactcaagcgggtgacatatgcatgagcatgaggaagctctcgggtcaggaggcgccagcatgaatagcttgaagaatggtggcagaggagcagaacagaggcctctgtggcaggaggccagtactgaacatggcaccgggtccgggtgcacgagccacacagtacggaggtcgaggtgctagatatgaacctacgcacctagagcacatgagttcacgcgtgaagacacgcattcagtgaaccttgggacccgtctctgcgaggtgcgcgcaggcgtgcttcgtgggctgagtcgcacacactagaggaggaagtggagcttggatagacagagggtgcgtagaagggaccgtgaagtgcaagttcagtgcccaccttgcggatgaatgacacagattctagatagagccttttggccgtcagttggtaataggtccagcgtacagatcctccaccttgtcttcctaaatacaaaggcagtgaatttcttccccttccgcgtaacaacaacgcattattcacgtagacaattgtccgactttagggacgcagtcaattactagggtccaaacagacgggagatatcgactcccgcgatcggggtggccattcgttggaagctcctctataataattgcctcccccaaatggggggccccctcggtccggnttaacgcaatggccaggatggtggttgtcgcctattgcgggcaccgggcccgcgtcacttcagacgaagagccgaaatagggccattcggggctaacatttgcagggaggcgcaaggttggaaagagaacccgaaagtgaaaaccggaaatgctggttggtccacctaagcttcattaggtcgttggcaggggagggcacctcattgttgccctttagacgtcaacgcttggggacattggtccccgatggta

SEQ ID NO: 418181 - DNA, 1006 bp, Homo Sapiens
  misc_feature (295)..(312): n is a, c, g, or t
agcgggctagcagcattcctggatgattggaattcagagtgatgaggtttttggtaaaatagtagtatcaaactaatctgttttccttatcagctagtcctttctcactacaactgctgtattaatttcaagatgagaactgtgccttaattatcttccagaccacctttccttctgcagtcatatgtcagtccatgagcttgaaccacctttccttccacccttgcaataatggcccagtgccggtggaccttttactctaatgttcaccctgttctctttccatccccagacnnnnnnnnnnnnnnnnnnggagcacggggtctggctctgtccgcccaggctggggctgcagtggtacgactctcagctcactgcaaggctctgcctcccgggtctcatgccgttcctcctgcctcggcctcccgagttacctgggacatgcgggcgcccaccaccaggcccggctaacttctcccggcggctccgggctacaacatgggcgttccaccgtgtttgcgccgcagatggctcctcgatctccgtaacctcgtgaatctgcctgcctcggcctccccagggctgctgcggcattcgcacgccttgacccaccacccttgggccttaccaatccccccagaaattcctctacacacgcgcctgaccaggatcacgcaagaactgacacaaagggcggcacacaccgcgagcgccaacaagcggcaccaactgccaccaccctcgagcgaaaaacactcggcacaggaggccacaacacactgaccacaccacgctggagtcgtacacgcgctcccccgatcacccaatgcgcacggcccaacagcggcacaactacacctatacggacatacgtgccgcacaacttgacatcccatcgcgcccacaccgagatgccccaccagctcgctctccacccacacgcagcgctgcaacaacgggacctctcccgcacgcgcccaccaccgctcggccggggccctagtga

SEQ ID NO: 418182 - DNA, 1617 bp, Homo Sapiens
  misc_feature (1134)..(1134): n is a, c, g, or t
  misc_feature (1494)..(1494): n is a, c, g, or t
  misc_feature (1545)..(1545): n is a, c, g, or t
agcggattgaaggttgtccgaccggtgacgaataggaggcatggcgtccatgcgctgtagcactgctgctgcgatactgctactagctaggtgtgcaacccttggagtcctccaagtggcgtcgacggcgtcggaactatcagctaggcgtatgaagaccttgagttccagaagatagctcctcagactagactcccttgacatgacaagcgccctatgagtgtcagcaagtggccacacgtttgcgcttgataagtggggcgtgtcgatgcgatgccttgacatggtacggtaccgcggtctgccacgggcgcgagaattatcggtacgcttccacacgggatggggacctcccggacggaacccaagtagggcgcgaagacgcaatcggacactatgacgatccttttactcagtccgcacgaatgccccctatttggggagcaccgttgttccgaacactcattatcctaagcgttctcgaacatgggggtcgccttaccacgtacggaacgcgtaggaacgaggcggctttcgggagcaagaaggatccagagatgccacgggaaaatccggggtttggtcctcaaacttgggacattcctgctgtgtgggaatgcactccggatggctcgactaggtcctagttccgtccgtttgggccataaattggcttccaatttgaaccctaatcccacggggtagctccgctaattgccattgtgtttcagtggtgttggagaggctttggagggtgcgcccctatggtgcatttagccagttcgggtgtaaattcctccccgttgtgagatgcttgtcgcctggcatactgtgaaacctgggagcacaggaccgctacagttctaagagtatggaaacagacttacagtgactgtttgcccaggcagtgggaatgtgcgctacagacgcgcttatacgagtataccagtcgtttagcagaaggttattttccgccactttcccgttccaaaaggaagtgtatcgacccggccgatttacgaacgctctacaaattctgttgatgcaaaccgataatcttttagagctgagaggaaaacaccctctagtggtgaaaagacactctaggtatgtggagacacggtggggccacgnttgtagtcacacagccctcagagcgacaatgctgaagtgtgtagaccatcccgtgacgatgggacataggaaggtggggcgatcacacggccacatagaggttgatacccccaatgaggtgggagtctggtaccgcaccggtaagtccgttaaagagcttgccccaatgtgtgccaattttcaaacacgggtcactgacaccgtgcgtgatgtatactgagaaacccaagtcgatcctgagatcacccattggtgatagtccgcggtgcccaaaaattctagatgtgagacgcgcccgtattacctgacatgtgtgtgaggatcactcgattttacgaggttggttgagtctgttgtganacgtgtgcgatgtgcggacctcagatggtagtgtgagatcattggagagtntcgcgagagccgcgagagagtcgagtgatgatcgtcttccacactcgatgtgcgttagtagacgacaagaga

SEQ ID NO: 418183 - DNA, 1316 bp, Homo Sapiens
agcggaatgaagtctccgagcctgttctcacacttgacatgttggctctgctgacacttcctctgtgcaggcgagtagtcatggcggtactcattaccatgcatgcgcctggtccgtcccatgcgattgggcttagaagatgattaactcttgacgacactgtacatatgcatgtagctaagtctcatcataataactgcgactattgcgcagcactgtgcatccgtgatacccatagatcgttaccgagcacttactctcagcacgtcacactaagtctgcgtcttggtctcttctcctctctagctgtcttcattccactgcaccggtttaagccaggagtggacgtgaggcacctccgctgaagcagaagagtacgtccaccgcgaacccaatccctatcgtaccctcattaaacattttggagctacgcaacaccagtcctcgcgtccttgaatcagcgcaagaccaaggccacacagaccatcgagttggtacaacttgcacgttaggtcacattgtgctcttcccgtaccggaagggttttacacgtacatagtacatgcgaattaggtagggttgtaaccggttggaatgtgtgactttggtgccttatcctttttaggtggtgaagagggaatccatagggtccgattgggaaacaaaatcgatgttccaaaggtaaacacccaaattttatttatctcgcgctgggcggttcccaagatttagtttagttgtgcaggcccgattgtcgcgatggggtaaattgaaaagtaaacatatactagttaaagacgaaaccttcttctacgaggcgatgcgattaaacacgcccatatgacgaacgcgacgaagcttattcacgccgtaatcagcaaccccatcgtgcggtcctcgttgcctggacctcttgtgattgagtgatagagcgcctttttcctcacgtcgaactgttcataatggccaatggggggcgtatattactaacaacggcaacagggtttctagatggacaaaattttcgtaggtcaaatccaatagcgccactgcgaacacactggataaaggaccgcaggtacgtcccaactgaagtgataattttcgcatagctcgccacaggagccgcccaaagaaggtctttacgagcccttgacgatgagtcacagcagaactttatatgaggcgcctagtggtccctgtgagcctgtcaaataccacggcggcggggtgtaaaatcctacacaggctttacgcttatctggacatccccacgccaaaacccttggaatgagcccatccctatctgcccttga

SEQ ID NO: 418184 - DNA, 690 bp, Homo Sapiens
agcgggacttggacgtgcgagtcaacaaggtacaggacacatttctctccggggaaatcttgtgtgggcgccgaggcccgggacgtagcaaccaaacgtcgggaagaggcgccaaataggatgctgggccgtggtctccttgaagcccgggttagcccgtttgtgagagccacaagcgaagaaatagaaatctagcacagagggggccactatctgcggcgagatacgccctctcgggcgctcctccagctcccaggccccctccctactcgaacggatggctgcagctcctccaagttactgtactcgttgccttccctccaagatgctacaggatggtctggatggtatttcgggaaaaattcagcccggcccagagatgaaagtgcaagaggttgtgtaattcatcgaggtgctgatcagcgaaccggagagcaaggtggaggtagcacttacatgtcaagtcgaagcaagttccgaaggacctatgccattaatgataacgcagaacccgtctggctctgggagaagtagaaatgggagccaatgaacatggatttgtgcagtagccacatgaaagccatcaataacgagagaagccaacttgccagaaatagaatgccttgctgggggatggcatctggtcaggcttgggataagaaagaaggggaacagagctaaagaagccta

SEQ ID NO: 418185 - DNA, 1009 bp, Homo Sapiens
  misc_feature (426)..(426): n is a, c, g, or t
  misc_feature (700)..(700): n is a, c, g, or t
agcgggtggtgcgagtggccgagcgtggcaggacgttgcttgtggcacgcatgatggaggacgacgtaccggagtctggaagcatccggtagaccgtgaagcagtctgtgccatggatcgatgggctttcttggtgaacgcatggagagagtcttgagccaggtagccgtggtggaagttcctgctgcccaagttagagggacgaatgtctcgacgtgaagagggcgggcagttggtcgctacgtgacacgtcgagcacggtgccatgggtggcacgcgactaattgctggatgccatgaacgcgtagccagcataaggttatggatggtgtcctattgcccaagtagggtacgccgccgatggtcttggccagagtctgagtgaatgcaatgcaggaggatggtagcgtgagcacaggcgcctantgtcaggcgagagggcagtaaactattgagtgccgggagcatctcgaatccgtcgtgtgagcctatccaagggagcagttgaaaccacactcgcgttcctcagacatcaaatagacttgggttctcactgggggttcctgaactagtattgtgacacacctcgcaataggttaacatggatcccggtggaggaagactacgagtgtgcgtaggtggagacaatgttgaaggactagctttctaatttaaaagagctgaggttccattccggagngaagcgctaactcggagaaggcgcctaatgggtctccgcctggtcggtcaacacgattcggtttccatgtggtaacggctaacacgtgtgaatgtgaaaggtggtgtgatagccaagcgagggccaatagtcattcggtgggcacccggcaacatacacagaggatagagcggcctacctcagaagggaggtaggagcccaaaggtcgtatgtccccatagcgggtagtaacacagagcaggctcgggggatgaacgaccccatgggtgggggcacgtcggagcgtgaacatttagtggtggaacttac

SEQ ID NO: 418186 - DNA, 910 bp, Homo Sapiens
  misc_feature (371)..(371): n is a, c, g, or t
  misc_feature (479)..(479): n is a, c, g, or t
  misc_feature (550)..(550): n is a, c, g, or t
agcgggccggactcccgtgtccctcccagcacgcggccgtgcccggaggcgctgcggtgccggatgaggcttgcggatggtggcacgcactctctcgatcatgaacaggagggctttctgccgcgaaagagaggacgcatagcaatatccatgtgctacaacggagtacgtctgcttgtcgcggcagaggaatggtgcatatgcacatacatgtggcgtcccaccaggaccatacgggcactagagacgtagcccggtgtatcctccttacagcattcaatggatttgatggaactgtcactgtaggtccacacgcactgtcgtgatcaggtgccaatagagtggctttccgttgtcaccctgcgttatgngcgcgccggaggttcgctgatccctggcgctaaacggcgtgtaacaagaaggttgcgccactgtgctgggtcacccggtgttgtgttgctacatcgcccttgggtggnacacaacgttttacgccacggctgcaaagtgagggcatgcccaaaatgcaaattggggttggcttcggcgnccttggataccgccccatgtgattacacactgtaacgtacaatgcaccccggctaaggcacgcttcggtaatgcgatcgctccctatctttcgcctggaatagtagggtagcaaacagaaccggggtcttcctggtaaaaggaggggggaccctcgtggagaacagtagcgctccattaatcagtcgggccgttgacagcgccgtggggagaaagcgagttccgagggtaaatctttacctttgtgtttacggccttagttgggaaattggggaacaaagccgctagaaggccctacacagataggaccagtggggtcaagacaggcgacttttggaggtaacgcctaaccggttttcca

SEQ ID NO: 418187 - DNA, 836 bp, Homo Sapiens
  misc_feature (376)..(376): n is a, c, g, or t
agcgggggtgacgctcgtgagatgtgcgcggcgagtcgctggcgtattcgtgtgagggccgggcgcagggccgtgtgcatgtgctcgatcgtcgtttgcgaggtgatgacggctgggcggacgcgaggagacgctggattgctgcacatctgtccgcatgaggccggacgtccagagagaccacggccgtacgcaaggctcagcttcgattattgtgctagattgaggatcggtcccgcattggcgtcccactcagtgggtcaagggaggcctagagggacactccaggcgttttgccacatagccgtattctcgaagccttcccatgtgacctgttgaaagagccagcgagcgttagccacattaccacctcgantctatagaggccatcgctagggccggtccaattaaccagggtgcagactccgagaagccttgcctttaaagcgatgtgccaatggccggaaggtgaatgcctctacccttttatgcgagcgctccgaacgggaaaaagttttgcgtcgtcccttggctgcccccatggggggcccttagacatggacgtagggggccactggtcgtttggacaacatggtggcgcgaaaacaaaattgagctactacaaaccggacacaacggaaacgccggatttagacgttaaccctcggaggtttgagcccagagcgcccacacccgtgggggcaacaaataggggcgcgaagttctctctccagtgtgagcattaatagatgtgacagccaccgcccattggtgggctgaccttttgtccccaggaacacgcgggacggcacacggagaggttacgcgtttaaatt

SEQ ID NO: 418188 - DNA, 1274 bp, Homo Sapiens
agcggggtgcccctcgaccttctcggtgccgcgtgaggccgaccgtgcccgtgcgtccgtccgtctgccgttcatgggactgcctcgtttggatgctcgtgaagactgaggatcagcgcaacgagtgagatacggcgctgtcgtcatggcctgagctcaagaggactctagaagaagcgcctaggtcctgcaggacaggacatggcagtgtctagctgggccgaggactcgctgtcctgcatgctgctgcggtagcttgcgacgaatgtgtggctcaatatgcgacctctttggtgaaagcccgagtgaaggtctcgtagcagtcgtgcaatgggggttcaaatgcgagcatgagaaagtgcaagtacagaacggtgcctagtgacaatcagatagagaacaataccatgaaccaaagaagggctatatcttggagagaaccgagtatgttgggcgcagtcattgaccgacatatccattggatgccctcgcctgatgggatgcgtagtgtcaaaaccgccagaagagactaccgttgcaccacccgtggcacataacgagtccctgtaggctgtttgcactgaaatggatgtgcccctgtatcgtctctgtaacttctccacccctacccgcggaaatgtttccgtaacttggacgacaatttgcgccaaaaggggacattccgtgggtggggggaacagtcgtgcaattgcaaatcggcgaagggtggcagcttggttgccataggcggtaaccggaaagcggaccttcgcggaatgtaaggatagcccaaaggccttgaagtatggtaacttgcgtgaactctcaaggtttactttattcacgtgggggatggataggtattccgaaaccgtttgacattctgaaccgttcaatgggtcctgggaacattattgccttgcgccgaaagaacggaacttcatgtgggaagccctggttctttcctggttgagacccagtggcttcccttgtaccattttctgcgaaattactttgtgagaagcacaaagttttcccagcggttgggagccacacaggctcgaacctttgtcgcgagccactggttttgaaccggctggggaggtggggcgcaggcggcgtgactggaacggtcctggaaagctggtgattcccaggtggcgttttaaactgaattgttgacctggacagttcattctttcggtgagatgggcccagtcagccatgtgttacaaacatgggtcaatcccgggaagaaacttccaagaacaacg

SEQ ID NO: 418189 - DNA, 1120 bp, Homo Sapiens
agcggatctgtcacggcggaggcaggagagtgctgctgcgcctgcctccgggaccgagccgtatccacagaccggctgccgctgccctgatcctgcttcgagttggagctctgaaggaagctcatgtagcaggatgtagtgttcgttccccatggtgcgtccttgtgctgatgagtttggagctcatcctaggcaatcaatgccctgatgcatgagttatacgattaaccgagagttggccggatgttgtcgggagcttggtctggtgaataggcatggagctcccttgggtgttgaggtccgctgcaggaggacatcagttcactgggcagtgagtcctacaatctctcgtaacgggcgtgcgaatagaaacgatgcatagctcgtgtcgaatgtgtgaagtcagacttgcttgaccatacgtaggctgtatcctgtcatgcattttgacagtagtcgaccgtacacacggatccggggaaagcctaacgcagtgttcgccggcagtcacctgcgagtccagagatggtcccattgcgttcgcacattgcgggcagcgagccttgtccactcacctggggttgtaactacgcgagtatttgccaatgacacgggacgaagtccctgttgggactgggactgctgcagaatggcactacgattgcttagcgacaacggagacttcgttgctgaaggaatacagcatatgaggggaccccgtttggatgaagacatgtttcccccaagttcaagtcgcccttggtgttgcgagggacacaccagaacaggttgtttacagtggaattaacggcccacccaagggtcctggtggaatgaggtaggcagcgaaaagaaaagtccgaaacgggctgtcgcaagtgccccaattgggcggcccttgcgagcgacttgggtacacggttgggttagcgccggtatctagttgaggccggaaacccattcgagggcgccataagacgttctaggccctatttatacctgtctgtataacgcgggaggtacttttttgtccccagggcgaagcccggttgcatccgaacccccttgggacaaaagcgtgccaggagaacctcgttgaagagtttttctccacgaaata

SEQ ID NO: 418190 - DNA, 1231 bp, Homo Sapiens
agcggaatcgcggctccacaccccacagcctagtgtggcggtgtgacagttggtaccttcggtccagatcgcagccggccaggcgcccactatttcgggatcccgctacgagcggtaggcactctcaagtggcgcgcacgtgatggagacctgcagcgtggaaccccgccgtcgcccttcaacgcgtgccctatctgctgcacgactggttaacggtcgacgtccaagctcgcggtctggctcatgaaagacgggcaaggaactgtgaccgaggccggaggacgcgggcagaggtgatagcggcgttccaaatgcgatctcgccacgcgcggacagtccgggtcgcagagtgggaacatagctagagggaacgcccatgcattcgcatgggcgcggtcacccaatgtttgcgccgctagaatcgaaaagagccctttcttgctttcgtattgcaatgctagcgtgaatgggtacttaagaccggtgttaatagacctatgcaggcgttgctaaacttgtcctaggcggatgcggacgccaataccgttcgttaacaacccacttgaatacttcggcgagccttcgataggccccagtactcgacccagcgtgttgagctacccgtggttgggaacgtagacccctacaattccaaagcgtaaatagcagtggattcacatcgtctaatagagtggacgggccccctccttggtccgagaattggcctcgcctcatgtcctcgtcttcttccgtgaccgcaccgacgaaatgttgcacacaagaaatccacgtgcgttaatacacacggggcgcctttctgcgaacgggcaacgccagccgagacgaggtgtcagcaccgcttccaactgccaacgtcccgcttgcccgtgggatccgcccccagggagcgttttgtgtgaccggaaattcacgccttgacgtccctgtggggccccccagcaggttgggccatctcattggaaccgttttctaacttcccaaatgtaaaaaccgtattccaagggccgtaactacgtaagcagaatccgatgaccgacctcctgggggactagacaagacgtggggctaacatgcgcgggaattacccccgtacatggctagacaagcggatatcaccgagtggtgggccccatatgctctcgaaaccctcacgcgaacacgcaccgctaacagccgtagccaccgcgttccgcggcacacctcctaatca

SEQ ID NO: 418191 - DNA, 1145 bp, Homo Sapiens
agcggagttgctccatagctgcaacgattgctgacctgagccgtaacaaggttctataccggcagtgtatccggtttccttcgtaggtacttggcctcgctcgtctgttgatcccagtgactcgtcctatgtgaatgcgtgctcttagccagtgcgtaatcttgtgcgcgtacaatgttttaggtcgtggcgactcgtgtgattgtcatctccagagctttatgactaacatgccaccacgagtaagcctccctgtatcgtgctcatcacgagacgcatgagtatccacgtaagtgcgttgcgcttcattggcgtgcttggttggggactactttaggggctatcagtcatcgtgctagatgctgagagtgtatcgccaaggcgtccctgatgagtgcccatgagattttccatggtaggtcctccctcgtatgaccctaggtcgtagagcgttgcggatgccatcaagtgcaatgtgaccctttcggattcatgtttgtggactccttgttgaggaaaatcatttctggatcaaccgattcgctgtgcgcagagacatagtgtagcgtggaacgacctaagtcactttcagcatatagacgaagcttgtagagttgagttgagtccagggggggctagcccgcaatgatgcggcatcccagtgattccaccgtgggtcacttgcttggaggaccttgcactgggttggttgacttgcgatagatctaagaaacagaatagtgcgcacgttgagcccgaggttgccctggtaggttacaaccactgcgaaggacgatttgcccctttttggcacgcccagacatagtcctgctgtttggaacttcgcgagtagactcgcttatggtaatttcacggcgcatttaacgtcccaagcagcgtgagacatagaaccaagaaatggtcaccttttgaacccaagaaagtacttgtaccgtggcagtcggattcagatccactgagatcgtcgcgcgagagacaagagttggtcacaggtgcccataactcttaaccgaatgggggcgacgttccgaagcttggaagataccagtttgtgggttgctgaacagtcaggttattgcctcccccccatttaatccggaatttacgtagttaaggggccttcc

SEQ ID NO: 418192 - DNA, 1287 bp, Homo Sapiens
agcggagttgccggcgtagtgagcgcctgcagccatgtgacatgtaaccgcaagagcggctcgctgagcttcttccgttactaacggactatcgtcgatcgtcgctcctcgagcctgtctctgctgagacggcctctttagtctgccgtgcagcgcgctcgccagcgggattcgatcaggtaattctaagtgatgatggttcttgagctagtgagacataatctgatcacctatggatgagctgaccatgaatgattatgcgcttgcattcaactgtaacgtgtctgcccgggacgcatatcatggggggttgatggtaattgtcaactccagagcgaaccagtcagaaggagacatagtaggtctacgctctttgatccgacacgtgactcagtcattagcctggtgcgaggcagccctgtccagactctttaatctgtgcctgtgatcctttcattcccaggccaataaggtggccatgtcagaaatcgtgtatgctagggaaaatgtgatcgcatagaaaacgaaaacgcccggatgtgtagttcccaaaatcccacgctacacggagctggatgtatacagaattatgatgcccgagaaaaacttagtcctaggataatttcattgcctattcgaatgggtttacctagggaacgcccaggtcgcgcaatttggccttcagttactctatctttgcgcaaagattttagccaatgccatggagactctaaggacattaaagtatatgaggctgtattccataaagaatatgcgaggaacacttcgataacttgcgatggaccttgaatgaaatggacggacggtaatttccttaacacctgggagataggtgtgagccatttacttagaagcaaggaacggagaccttagaccagaaataggcggcacaacgtgggtagttagcaagtaaatttttctccctagagagggtattgggacgtgttaacacttgaggagttaatagagtaccaaggtgttcgtgacaagatttttaaacagagagaggaaccacaaatcattggtctatttgcgtaaaaggagtataacgcacagaaaatatacgggtgactttgcgtgtcacatcggaccattcataaaaaggtatatcaatccagtgtcgcctatatataaagcgctactagaaaagaggtgacatccttggacagtgctttccccatgagagaactaggagacgcatagtttggtagcacccgtagaagcggacatataaacaagcagcaccgatgttgaaatatgacacag

SEQ ID NO: 418193 - DNA, 1364 bp, Homo Sapiens
  misc_feature (220)..(220): n is a, c, g, or t
agcgggccttcggtgtgcttcgaggcctcgactggccgcccaggccagcactggtgaccggtgactgcaggcgcgcttcagaaaaagctgggtcaagtgccccagcacctcacgggtggacgtcctagccagctcatgtaccgtgcgacgttcctagtacggcatgtgtgactgatcagcctgcgtgtcatgcgggtcgagggacagtgacctgtgatcngtagtattcgcagacagcttttctgcgagtgctgcgttccaaagggaaagagtgtgggacctctgctcaacgtagactctcactcatgaagtgccgcctagacgtgcataacagggcatcgcgatggagaattccgtgcaggccactctttggccacatggcacgttactatgcgggttgcaccaccagggaattgggcaatttctgtagacccgttagcctgatggggcactaaagacgtcattgcagatcatcgatgtcatatatcgcgtcgaccctcgttggtaataggggaacaagcggatccggaaggcctaggggcgtagaagcaccaatggaagttccccctagaagttggagtgggtccccctggatagagcccgaaaagggtcgctcaattggttatggcaacatatgcacccaatgcaagcgtagcacagcgcacaaacgataggcccccaatcaccgattggcattaggggtggagagaaccccaagcaattgggcggatgaggccacaacaccagacgagagaaagggggccctcctgtggtaccaccccgtcttgtgaggagtctctggaagcgggctaaacgcctgaagcacttgtgtgctggtaagcctgggagcggaaagaaaccgcgcggacacacacgtgggctctgtacaggaaccggccattacgattccccagtagggatacatccttgctaaagtgacataccgcacctatggggcacccttgttatgcggcatgtgttccactgtataagccgccgcggtgaacatcgcaaactgcggcataacaaaaagtgtgggcctcgacgcgcgattcgatgagcgattgagttggaagactggttgtgagatcactccgggtaaaataacatagtctaagagccacaggaattacagagcaatacacttgtggtccccattggtgcacagtgtgggacgttccgaacctcagaaggtattttcaccccgaaggacacaacaagagtatcctataaaccgttctacgatcggccgaatgaaagagtttacccctgctgtgaatatagcacaggtttaaccacctggagaaatctttccaccactatggggcaaatggactgattcacaatctatacactaaccttga

SEQ ID NO: 418194 - DNA, 869 bp, Homo Sapiens
agcgtgggagtaggcggaacaaaagtcatgtgtgcttggggcaaacacgaggacaatagtctatctcggcgtggactggtactcacattggccatcgtgactgcatacagtgtagcgcctctgtcccaatacttgaaccgaattataatcatcatcacaaagatgtaagcgagtaataggcttgagaatctgagaggagtcgtgtcacgggataccaacatgggagtgatcaccaagagcaacctggtctacattgcacctccgcgtcacacaagtccttcgctgaccagagaaccaatagtcgcggaggacaagccctttatgacaaccttcgaatgcgaagtcacaaagtgcttggattcagcagacttcgttggacaaagtcttaagcgttaggtccggtagcgagtaatcaatgagggccattcaccccggtgacgagttcggattaccgcaatgtggaatcgagttgcggtactccagaatcaaaggtccctcgccgaattttcgttccacgcggttcgctttgaagcgcgggtctgacgtatcggatcaggctgaaaggcaaaagcattcgcggcggaaccaggtttaattctgctccttttccattttcaggagcccccgggtggtctagaccgacgtgactggggagcgcagtggaaattcacccaagtttatcagcgtagaaggtccggcagcaacgggagcccttacttcccctgccggctttaaccccccttaggaaaatctgcggccgcccaagcaaaagtttaagaatcctccgaaagtttagcgcccccgcgctcattggcacggtctgcattcgacaagcagagaggttccgaatacacgggagccctagtaca

SEQ ID NO: 418195 - DNA, 1098 bp, Homo Sapiens
agcggctctcatactgtggtgtcactgcttgctgtacctgctccacgccgtcgccagaccaggcacgtctgtgcttgaggctcatgcgcacgttgaaggcgaccgaaaccggctgtgtgccgtgctgacccggcgactgcctgcgtccctcggccatcgccttcagcttcggcaaccacacagagcgtaaacgtcaagggcaaccgcatctcgcaaagagcgtcgagcggcacagctcttgacggcgggactcgaacttgcacatgggtcctcgcgatggggcaattgcctatagtgcctatgagagtttaccgcgcggaaaatttaggtaccatgcggagctaggtaaccgcacttgcccaggtcattcatctattggatcttcaattgcataaatccaaatcaaacacactactgagcgagcgcgtgcgcaatatggtaagttgaagcgcgacggagcgacgattgatatcgaggaaccacatattggggcctgattgtgtgggactttgcctgagacaaagatagaatagtggtagctgggtggccgcatgttgctctgtaatttggaaagggatttcctagttcgagaatagttgctatcttacttacgaaagtaggaagccacggaaatgggcacttcgaatttcgtgattcagtgcgaaggaacattgcgctggagaagtctccactatagggatagacacagacttatcattagaacacaatatgctgcggccaaaaacaagggtttgagtcacattagtagataccaataatacaacccttaactcaaaatgaaggactctggttgtacgaaagcaaagccccccgcggacaggaactgctggcgttttatgttgcgcttggtgaaatagagggtggacttaaactctatgtgatgaatgtcggggctcgccaagcgtggtccgaaaagcacaagttttgccatctcgttatgggcgggaattggcacgatttcccaagttaagcgttcgcgcccgttggaaaccgcatttcgaagttccattcgtgtttagagtgccctgtggtcccaggaacgtgggtttaacgaacaagttgtccattcgcgaggta

SEQ ID NO: 418196 - DNA, 1088 bp, Homo Sapiens
  misc_feature (863)..(863): n is a, c, g, or t
agcgggctgtgatgtaacttatgtcgtctgtggctcgtatgtgcatgcatgagtgctgactcactcgagacttgactcacttcatgctcgaggatgatgtgccgtgatgtgattgaacacggctaaagtgcagatgctcctgggcataactcagggtggcgatccggaatggtaaagcggtatgcggtgtaataaaatgggctgcctgttgacggatagtcgttagcatagtagcttgaattggaaatcgctatgtaattaggacctgtcaagcggccttaccagtgttgtgccgagtagatacgacgacgaggttagatactctgaagcacgaggtccgatcgacgctttgcaatcctattgtcactagtgggagtatcccagcctcggacgcgcaccggatcacgggatgcacatgagcatcgcgtgtgtactgtcgagcaccttgtgttgtgactcttattgtggctggtatcaattcgcgaagtcacaaaagattattgcagttggaaataggcttgagtaccccaggtcaagggagtggtttctaacccttgttggcaccccgaaaaagttaggtttggatgggtaggtttggtacacggcacccattccaggttggtaaacgaatccctaagttgggcccaacgtcaaaacctttgaggggccagcttcgcttttgagacggaagcggttggcgaggaccgcaagttggaaaaacccttaacgtggtcgacgcaaagtcgagattaatgaggggggaaccacattgaccgtgggttgaggatgaatgctgtccccttgaggcgccaatttaaccaaaagaagtggaggcaagcgtgacaacattcgccctttgagtnataacctggcacgcggtgtgctgagatcacctttcccatggggcgtcggaattttaccatgttgggggggaacattattgtggccacgacttaactcgccctcccaaatatgggcggagtcttaagtctcactccggtaccggctgtgtaccattggtttatggaaacattcttttgaggttttttggggccgctacttcatttggtgtagcacccctagctctg

SEQ ID NO: 418197 - DNA, 1052 bp, Homo Sapiens
agcggatagacccggctgcgcataagtctctgcagcaatggtgcacagatgcgcatccacgcttgcgctttcgacggtgtcatgtctcctcctcgcaattcgtccatagtatcatggggcaacgggtgaggagtatgaggggagcaagcgctcgtgcgtcaggccgaatggcgttgcctccttagtgagaactcggagtcgttgcgacgccacggcagagtaggtgagcacgagttgtcactatatgcatgaaacgtactcatggcagaactccgattctgccagaagcgagaatcgcgagaacatcagtgagtggtggatgtcgcggaccccatcgctccatgggcacagagaggtccatggcgtacttccctgtgtgcaacctaactaccatatgcgcaatgagggtgtggatacaccaggaatcagcgcctaacacgtgcaagcggagcaaacgaatgaataagctctgcttactgaacctgtgtgccttggttttggcgttgctggctacacactgtggccacttcaaaggagtgccgaatcaactgggcacaacactcgcaaaatcccggctgcagagagagtgcccccttccgggaacttgtgaggagaactaagaaggcactctcgagcaaaagggcccagtgcgcagatccgaggtgtgccaaggccatcgggtgtcagatcaccccaactggggatccttggtagagaggaaacccgagggagacatgaagaggcacgggggatggcattgtgtttgggaacacggtgagtgaactagagggaacatgtggttagactgcaaacttatcgtggaaaccgtggtcaaaaggcgaacgcacatggtgtgccttccggcaaaaaaccgaggcgcattatgaaacagacgtggccgtaattccttttccattagtagaggaaactatcgttgtttcaatgcaaacggcccttggacggatggcccccgatggagccgggtcgtttagccccccgacaactacttgggtgtggcgggccatttgtagtgtgagagttggaagcatcat

SEQ ID NO: 418198 - DNA, 1285 bp, Homo Sapiens
agcggggtcaggcgctgaggccggaccgtccgggactagcgctggacatcaaggccgcgatggcggcggggacaatgcgggcccgccatgcccctcgggtgctctgccgggtcttgcacttctgccggcctcggagcctcagccagtctgcgtgcgagctgcgtgacaatacttggcttgttgctgtcgtgtggctgcggcacgtgcctggcactctgggagcctagggctgcgtggtaagccgcctggatgcgggctgagcggcgcaccggggtcaggtaccctagagtgtgactcgtgatcatattgacaggggacgaccctataccctccttacatccagcgaactctagggcgacatgctcgggctcggatggagaagtgccatggaaccccgacatgacgactacgtcgaatcggcatgatacctgcacggggcatcgcgctgtaccccgcggtgcttggatgtaacttgttagtacacgatttgataactcgcgagaaagactagtccaggactttggcatctggttggtgaggaagtctaaatgcttgagccgtcaagcgccccaattccctctccacttgtggaaggtccgccttcgtgacttgccagggtgcggcgatctaaccaccggggtacgaactgggccatggcttagccgtccccgactcagccccaagcaaagcaagtgctatgctaggcgctcttgtgcacgggcttgggccctaggggcattgcgctcgagagtttctaggttcgcatggttgaagagatggcacccatatgccacaagaggtttgtcgccgttgaaaaaccgtgcgttgagcagcagtggcattccctgagacgaggcctaggggaaggtcggccacttgtgcacacacagaaagtgggtggcagaaagtgatatgtaccagcagcacacggagaaagcgagccagattaagcaaggaaacgcgcaacaaagaaggaatgtcggccgattggacacgttgtcccctctccacggtgggagccacttccacatccaagtggcacattaatggcatacatggggggcccaatttgccataccttataggtccgcatatggaagtggtattctggcgaattgccgggagattaccaagaaaaggattggatataagtagggtactcgcgtagaatagcctggagtatcacccactatgtctctaatgaagaagcgctattccagaagaagccaatcctagtagagattacagagatagagtagttgtataagacatccattcacaacac

SEQ ID NO: 418199 - DNA, 1294 bp, Homo Sapiens
agcggaatgacgctagaacagccccgtgaccccatcggtactaatccgccgtagaactaccatggacactcgccgtcgcgactcaggcttgagatccgcacgcgcccttattctgctttccactcacccacgcacgactcgtctgaacagcttgcttcggagagatcatgctggtttgggaggtcatgcactcgttattgcgccgcacggtctaccttccgcctgagctccccttcctaccctgtcgcgccaaccatccttatcgctgcgaggcagccagccttgttttgaccacattgagcgtcatacatacgcatggctgccctgcgaagaaacgggaccaggtctctcgtcggacatcctcgtgtgccatgtagacatagcaacttctcgacccaagatgcgaacttcataaagttccatgtgggtaaggagagagttgtagagtgttgacgtgtttgcatggaacataccattgaacgaagccgccacgagatgaattcattggattctctagtccttcgcgattgcgcgacagttcctacaacgtgaaaagctcccccgtgatccctcatcgactgagatgataatagaccgcctctatctatcctacattatcattctactcctcatgatcacttccttgaatgtgggtgatccatcagctttgttgcgaagttgtatcccatatcgtgtaacacacagtgttctccttgggccgcctagagagcgcacccgatttccctagtctagcccctgtgtacatggagatccgccctgcatggtcagcacgttaaggcacccccaggcgaaaaatactgatagcccgtttatccttgagatttggttgtttactctctaaagaaaaatgaacaatgttttgactccaaggcatgtggaaatggaggagcttcttgcgtgacctaggtgctggaagggacttcatttaaacttgcttaaacaggggtcatgatacctcccaagaattgacgtgcaacggtccttcaagtaaaagaatactttcaatttcaatgatcgcaacgaaaacaatagccaagtatattggttgccgtcacacgcgcgcattgtcatataccgagccagtaaagagtgggcccatgagtcctatattcagagagcggggtgccccggtgatatcgcgcaatgaagtgtgcccctatttacagtagagggacattgaaactatgacatgcatgtgtgtgtagtccattgcagcggttgcttggaaccctgtgatttgaaaagtgaatacatggcgggtccagaatcccgg

SEQ ID NO: 418200 - DNA, 947 bp, Homo Sapiens
agcggggtgacagacggcgcgggcggccggcgtctcctgtctctggcaggactgtgagtgctggcacttagctgccctgtgtctgctcgcgcccctgcctgacgcctcctttttctctccctacctctgcgctctgcgtgcagacctgctgagatctgggacggctgtgcacatccagcccgggagacgactggctaggaaatagaactgatagtatttttgaagcccagatcccctttcgtttcggtgttcactactattattgccctcctcaaaaactaaaaggttcatttgagctagatttaacttgtgttatctgagaagaaaattgtttaaaaagaggggggatggtgtgattaagaggggaccggtaagacgcccttttctgtaagtccgctttatccacctcttgtcatgattgctttgcaaggattggattcagggacaaactacggtttcccaaatgttcaaaccagctattttaagccgagtttagtttacagggtttaaacgagtcatttattcacatttctccatgtaacttatcgggcatcacatttcactcatgatctacttttgtgctagtgcttccagaaagccaagttgcagaagatataccttgacacgtgataacccctctaggtctatggtacagtcttttgctgaaggcagcttggtttgcaaggtacccgctcactttctcagatatgttccaattaacaagcgctctttgcggcgtttcctagatcgagcatggtgaatgaaatctacctggacagtaggggtgcaagaaaagacttacaagcggccttggatccaaactgtctcttgtgtagtagcccagttgctttacacacttgtagcctgttcacaacgccagggatctcatgtactccatcgtattttagggacacacgcctatatgatcgccctgacccatgcccgct

SEQ ID NO: 418201 - DNA, 1077 bp, Homo Sapiens
agcggattgtgagccccggcgacagcgggggaggggaagccccgggcgaccgcacccccgcctcacagcatgggatcggacttctcctcgactcgctcacgaatgtggcgccgccagcgcagtgcacacgatgcgcccgtgacatcccaagccgcggagtcccgacgtgggtccagcaaggctcgggacccggtgctgtccaggaactttctgcaccagtatcctgagatgatcccccgatggtccaaaccccggcagcccgtaggcttggacggaacttgatgccgattccatggtgccgcaagcagccactcgctcctgggatgcagaacagtggatgcccatggcacgtgtcgactcgcctgcagatgacccctgtgaaggcctgaagcgagccccacagtaagtccccggttgtcgagagaactacaggatcctaggtgacctgctagactcgcactccgggtggcatccagtatcgcctaatagacccctggcggtaagggagagaacttgtgacgcatcgccggcacttctataagcgcccacaaagccatgttgatcggcgcttgctaactggcactagtcgcatttcgcttgcgtggacctcaaaggcgacgttttcggcgaccccactcctttaggttgcatcccacacactcgtcggacggaggcagtctcaatctctcataagctccatcgtgaccgaatttcagcgtggcacacatcacatgataaatgcacaagtctccccctaaactccctactgggccccattatccattacgcaaacgtaccgcttgatgcggacaggtagtcgcgcggtttccaccaccgaagcccgaacaacgggcgccaattccattgtagtgaacatcgcctaacaagcctcccacaatggctatccgcttaagcccaatctcccccttaacgtctttggaaacacaacctgtatggcataacgtttgccgaacacttgtcagataggactcaccgtgggttcgctcccgtccactaggaacccctcacgcgatttgccgtagtgtccctctgaaaggccctggtattaaggcgccg

SEQ ID NO: 418202 - DNA, 1614 bp, Homo Sapiens
  misc_feature (297)..(297): n is a, c, g, or t
agcggataggacatcgagggggacgtgcttgccaatgcacgttgttgcctgcagaactcatgctctaattgaaggtcctggctcagaagggagcgttacagtaggggactaagtaatgctgtgcagatgaacgagaccgcagtcttcgacaggtgcacttccatcgagcaagtacgtatagctgcctacgaagatgggtaaagccaagactctggtagtgcacagcagactcagggagttgtgactcgagaacgctcgtctgctcatggtgcatgccctatggtgcccagcatgagncagtatgagcacctagaatggtaatcgcatgcgtggagaagactccatacacgagaccatcccgaagagcaacgccgccgttcgaaacttaaccgatatacgctcggagaccatatcacaaatgcacaaatttcactcacgaaccaacacgggcaaggtagccggacattgtaaacccccggatagaatttaccagacaaggtagtacaaaagccgacagagacgcaagcacagagagaggtgcttatagaatttaagccgtagtcttacatctgtgcagtacgtgactataggcaagatgcaaagccacctctttcattgcacaatttgcaagagacaattagtttggtgccacacacgacctctgagaggccaataacagtcgagctcaacttcgcccgttaaggataagatccacagctccataagtacctccagatatatggacctgatgacatatcaacaactcagagcaccaggcccccaaacaacggcacgaggcgcgaggcaaacgacacaacgacaacaacggcaagcggctgccaccccgcggtcataaggacgcacaagcacaaagcccaacacttaccactgcgggaaactcggcaacgcgaacagagaggcagacaccacgcagcactctggacaccagcttacacctttagacgagacgcttaaccagcaaccatgcgcaaaccacggtaccgacaccagcaccgccaacctggggacacggcacagcgacaagagcgcgctaatccagataaggcacaagcaacgcagcgcatagtctgtcccgacgaacactttcgacgactgcttcttggccaacacgtcaattgcccgtcaaacactacgttagcgacgtaccatgtgagggagctcacactaactcgtatcacgtgacgaaaacaagtcggttgtgggaacatcgatgacgcaagacgcagccgagaatcttaatcaggagggacacgctagacctcaacgtcaaccgcacacaatcgagcataccgcaataccccatctagtagtacactaccaaacatcttgctccacatcgaacacatccctgcactgcaccagcatacacctctttacccaagttttaatacccacgatttccaacaacatggacatctcgatagcgcacacaactatatgcctcctccgtctagtggaccatatgatagcgcgaatagacaaaaaacaacaatcaatttatacaccaatcagttaaataatcatatataccacacccattcaacacatttggacaacacaagtttcctaacaaaaatctccgacaacaccatt

SEQ ID NO: 418203 - DNA, 1061 bp, Homo Sapiens
gagcggagtggccaggcgtctcacactgtgccgccccgggcactctgcccgccaaactcacttccggctgcgtcccatgcttgtcgattggatcagcagcgagcatggtatcgctagcatcgacttaaagacgagcgatgcgtgacggcacgttaatctatgtccttgtgtagctacacgccaatcgcgttctgccacatgtccgcgccgcgagcagtctatggaccactgagtcttcgatcaacgcgagcatttgtcagagaacgtgcgtcccactagtttgccagagcccggtgggtgggattgcgttaggtcggagcgcatctggctgaggttcgcctctttcgcaggcgcccacgtagtctccgtggcttggcgactttctgcgcctctggcagtcttcggattgtgcggcacgtcccgtggcagcgcggcgtggtttccccctgcatgtcccggcttcccgcccgtaatagcgcgacgtttcgctccccttaggactgtacgagccgtgtgccttatagtcccgatgcccaagataagctattgcttgcccctttgagcgctgtgcgcagttcgggactgggtgtacagttgacaaccagtatgatgagactaccaccgatcttccggctttgtccccggggagagaaggtgagtcgtgaaatgaggcgctggcaactgtgcgatcgcggagctcgactcagacgtgcaacctccccattggagatcccgcgagtttattggaagaggaatctccatcacgagtaggatcgagcacggaccggcatctccacggacgacatatcagccgctgtgggaacggtagcctttgtacgatctggagcgactatgggacgttcgcagttattggccacacccaaatcgttaggctatggtgtactccttatgcgagatcagataagcttttgtacacagcgtggacccagtgtagctggcgctctgcagtaccaggagaggtggaacacgcggtaggcccccgataacacggacgcattgtgcggtcgcacacagagctaggcaccagtcttctacgaccg

SEQ ID NO: 418204 - DNA, 953 bp, Homo Sapiens
agcggattggtccgtcgtgccgccctgtcgccgagccccggctcttcttccatttctcctcgtctgctttgctcgaggctgtcatcggacctcacatgcaggtcgtcgtaccagtgaaatacacgagtaaccgaccgcgaaggcgccggcctacatcgtatgcttctgtgctgcagctgtggcgtgctcagagacacgtcgcggaacggctgtggcacgtactcctccttaaaggtagcataacacggtaggggcagcagggatgtgctgctgtgtccatgtctggcatggagcgactaggcccctggcgtcctcgtggtagccgttccttcgtttcctggcattgcgccactttagtctccttgggcgcttctactgttagtccagcagccctgtgccgtagaggggagcactcaccgcccggctcgcgctgtagtgcagtgttttccggcacttccggcgtccctatgtgccgtccttcatattcgccttagcatagctttcgcctccgatacggtctgtgtctcgcctttgagctggctcgctccctgattttccgctgttagcggtcgcctatttgggctgggcatgcaactgggccccccgtttggacgttgtacctcatccgagcctggctggcatctcgcccctgtttcgccttgggtccgcgctattgccgctgtatgtgcgactgtggtccgcccactgctcccttggacacccctggctggccgtgccttgggaacccccgttgaaccgtacagtgtgccctgaatccctctattgcctcctgcgcccccgccctggccgctcggtgtacgcttccgtcggccaggtcactttgcggctgcggaactctgctgactgacttctctcctgcgctgcagccgacgccatccgtgtgcgcgcggccgtaatcctcacgcgtctttctcctgtcttgtcacttgtgc

SEQ ID NO: 418205 - DNA, 1638 bp, Homo Sapiens
agcggagctggcctccctgccctcctgccgcgcacccagccccttttccccgtatcccgccgaagccgccgccctctggctgctgctccggctcctcccgtagggcgccagtctgcgcggctcgactgctccggtgccttgctgtcgtgctggctgcctcgttgctcgtcggctcacttggcatctgtgatctacgacaccctgcgtcgtctcttggcactcgtgcgcccgtgaggctcccctcgatgctgcgtcggacgcgcccccacgtgagcgtgatcaccttgttgttgcggagtccacaccttgcgtctactttggccctggtcgcgacgatcgctgctgcactagtctacctgactggcgaccctggcgccctgtcgcaactgctcccgattgcgcgtgccctccctgtgcccgccttcggcctttccgcccgcgcccttccgcattgcaattgccccatgctactctcagaccactctccaccgactcccttgagacaaagatacaacacctatcagccatattccgaccagcctttaagacgctttaccaaacacccacttccacattcctctgcaaacactccaagtggccacgaactctctaatttcacgcttacccttctgcattaaaccttcaaccccaaacttacaaacctaaccgcaagctccgttaccatccccgctctgacgccacatacctcaatacatcatcaccatctgctaaagcattttctcctacttgacaattagcactgtgaacagacacacagttgtcataaaactattcttagctgcaccggtcgaccaacgcttaccatcatctgacactcattaatcgtatagcatctcaatcgcaatgtcgcactcctcctagtatcacgcttactcgctgcacatccgtaaacacaacatttacagtcctccactaaacacaacaactactaacaccggctacgcatcacacatacccctacaattcgatcaatccacaccccagatgacgcacagtctcactaaatcagccgtaacgcgcatcccacttcactccgcctcgccattacccctttttcttccaacactccaccctacgcctctcccctaacactgcatgacacactattacttaaacttgactccttgcccagcaaccccacgcgactcgtaacacttgatctcctcaacccacgccattatactccacactctcctcttgtaatccaccaacactttctgcgctactctatcactctaatcttccacactcgccacacatctacaatcactcctcaaacagtcaacgatcaacgtcacaactaccgcacattaaccatcttccacgcagatgcacctccacatacactcacctttacccctcacctcgaatcccaatcctcttctcaccaccaactacaaccaccacgtctcagtctctcccccagaaatttgcctcacaatacacaccagtacacttgtccacacacatcgctcaatcgatcacacatcatcacctaccctatctcccaattgtgccactcctacacgttgcattgctgacaacatcacttcatacacgtcacactctctcacaacttctgcactactcacccctgacacacccacactctcataa

SEQ ID NO: 418206 - DNA, 1504 bp, Homo Sapiens
agcgggttggaccttcagccggcgtgtggctaccatgtgctctcgcgcgggtgtccctgtgctgtcggctgtggaccttgcaagcgcgcccatgagagttcgatgccgttctggaaagtatggcagagcgtactgaaagatgatcgccaggagactacagtccaatccaagaagagtcgcagaacaattacccagagctctactggaacacagtggtatcggcaagcagaagatatgcccgaggcctgaggagcacaagctgaatacgcatgcgtcggagatgtactactggcacttggcggactctgtatagcctcctgttactgcactagcaacgccgtgactacttcagacggtcggccatggaaagatccaaggaacgcaaagagtatccatccgtatagtaagggatggtgatccgtcaagaatcgatgtcagcatggtgactgtcggtgccgtaattcattgtcccttctcagtttgccgtacgaattgcgggcattgacagactacgtccggacgcggttgtggcgatacccacgcataaaccgaagcccaagtacggttaggagctaaacaatcaagaacgcgtatagttgaccttttgtgcttagggcacacctgtgcggggttgcaccctacatgaatagtttccctaggaagtggaggtccgagttaacctgttttaaagtattggcagaaccctttcccatgttagtgccattttggacccccccgaggggtatctactctcggagcggtgagagtcacacgctttgccgatgagaacagtaagaaggcgttgggggcggaacaactggacatacatttgtgtccgctcttcggtcactaaggcgtatttacggttggggagagctgtaagcgttcgccgctgatttcgagcgtataccaaatttgtgtgacctcctcattgtttttgtcacgagcatttgtactccttaggcagatggttggtccctgttggagtgacctttatgtttggcacgacgctttgtcttggcaacagttgtacggcaagcccgctttttcctcaaaggtaactaaggtatcgtgttatgtgagaagtcttagtatggggacttgtgccatggggatataccatttgtggttcacaaaatccgttccggcgtttaactttgaagtgttagccccggtaaagaggaacaacacgtatggtccccctcaacctccactgttgttgtccacacccttattagacattaagtccctggctgtggctcataagggtgttggcctttgtgagtcagacgtcgtccattgtggcagacgctacgttcctctcagtttgacgccggaaagttacacatttttgtgacattgtggcagtttcggagctcgtgtatggcacatatgggcccagacaactgatggttttaaccgccaaaaggcaaaaagttaacggccacacacatctttgtgggtgcctcgcgtgagcctagagttcaaaattcgtgtagccgtt

SEQ ID NO: 418207 - DNA, 1649 bp, Homo Sapiens
  misc_feature (147)..(147): n is a, c, g, or t
agcggggttggctggcgtgccgcgtgtgctgggattctgcgaggctggtcgccgagccgaggcgtctgctctaggccggccctctgcacgcatgttgcttatgcaagctacccgcgagtgcgtaccgccatgctgtgcgagcgcgantcgagcccgcttcgtccagactggttgaccctagtcgttgccgatgcccgcagaagtcgccagtggagtcaatacagaagatgcgaggagctagtagtcttgaacagtaggaatcgcagacgatgtgaggtcgggtgagatcgttgcggcatatcgctagcagcgcatggctgaagagtagcataagtgatactacgacatgaacgaatcgtcggggctctacgtagtctagtgcatgcggaacattgtgatcctatagcagaggtaccgaagtcactgaacgcgtgtgtgcccatggcggaatcgactggaggcggagcgcactggtctcggcggtagcatccgtgtgtgtaccccacgcttgtaaaaatgcatgagagcgacatgtcgagtccctagaggttcgctaccgacgatagtgcgatctagatgcgataggtggccacctatcttggcgttgatcgcgataaagattccttaggctatgagtacccgctgcttcgcgcacggtttgttggcgctaatcaaagagcgcgctaatggtgtggactcgcgagatacgctaggcatgaaggcacgcgcgggtagtctttgcaaggggctcgatatctctttttcaccacggtacgatcactcccacaggaatcgccgctttggcagcacgctcggactttgcagtgcccccctgtggcccgtgaagcgcagccgtgcgctgcattgttccgtccggcagcggaggcgttgtctcgaagtggcgcctttgttgtgtccacatcggcgcaggttgccggtgcgtggcgttaaccatcatcgggggtccgcagtttctccgtccctttggtgccccatatagcggggtgtgtgggccccggagctagggtccctcttggttcgcagcgaagtccatgtatagtctaagcgacctacgccaaaaaattacaggccccctagcgccaatttgcatcgtgaatttacgtgaactataaatccctactcagattgactctcaaaagtatacccgacaatcggtaggtacccccaatctggaccctcatggtcgccacttacacatccgcgttccacattagcaaattcccccaacttaagccctctatcttatatcaccactatcacattgagtcgcacatctctgtgaaaaattcccccaccgcaagtgtcgggttgaaagcacaccattttaagtatctcaactgaaagagaatcacctccctggtctccaagcatgtttgcccaaatcttggtgcaagcacaccccgtgggtaccacaacgtgaaggctggggtgcactctcgtgcagataactctcattggtactgaataaaagtgtagggagggccaacccagggatataacggaaacaatctgattgttagcggacagccgcagcaaccaattagcccgatcacacgcggtctttcacacaaacggagacgacgaccacgcagtagtgtaccagtgtcgttatagccacggtgtagtgc

SEQ ID NO: 418208 - DNA, 1395 bp, Homo Sapiens
agcggagcatcgtaccgtctgcggtctttctgcaagaatgctctcccgatgcgcgttgattaccgtggctggtgggtcctggggccccttcgctcggggagtactccgtggtgtgtgtctcctaggaacatggccttctgggagcttgcaatccttttcagtatgtcgtgcatacgggaatctatctcatgaccatccgttagctgagtccatcatacgaatcccacatggtgtaggttgactggaaggagtgtccgtacgtatcttccttagagaagaagcgtgtatgttctcagagaagcgtggagtaaccatactgttttgcaatctataggaaagcataatcgttggcgacgtaggtactttaaggctacttgggatagatgcgttcattcgctcctgtcgctatcactgggtctgtccgtaatgtacgatgcaggaactcaacagctgggcacgagacttggctgtcagtggctcagagtgacttttgtacccaatgtgattccagcaaacctagatccctatagtatgcgggctaaggccagtttatatgtagagccctatttgaatggaaaaccttcaggtatgatagaggcaatggacccatacttacgtttgagactactgcacccaagtggaaggcgcaatatcgtttggagaaccgttctccaagctgggtgatgctagacgagtggagccttgagctacgcgaggtgcgaacgactaaggtttttgccaattgagctctctgttatgcgaatccgattgtggcctcactgatgtagttgccgccaagaggtcgggtgcccttgcgatgtgtcgttcttcccaaccagcaacgctgcctctccatacgccgacaggctttgggcgctcgtgggacttcattggtcccccccgcgtgcttcagttccacctgtacccatccgggcaatgtctcagtgcaaagctggaacggggcgagaaaaagacgccccaaaatggcccactaaagccttggcgttccgatttatagaaccgcggatcatggtagtgtcccttagggcgcttaccgtgggtggggcccctaaaattcgggagagtccccggactggaagacgcaagacggaggaattgaataattccttcgggccttacaacatcttgccgccggtgctaccacggaactcgagggaacccttcgttctgcggaagccggaaaaccccctatccccataggtgcaggcgccttaacttttggtgaacccccccaacaccgctcctatttttcacaacccccacgtgctagaaatacttgtgcgtatactgcccacggaaattcggagaaggtcctttcattttttcaaccctacagcaccaaacacacccacccttgttttacaagtggggcct

SEQ ID NO: 418209 - DNA, 300 bp, Homo Sapiens
gagcggactgggccgtcggttctcacagtcgcgccacgcgcagcgccccgtccgctaacgctgtatcgtgtctcgcagcgtttcgtgcggcccgatcctggaggcgagagccattcgggcacgcgaggcttgtcttcgcgttgtctgcccgagagggttgcaaccgctggttgcagtcgccctgttgggctcgtcgtgggaggagggcgcaacggacgggtgcccatgtgtctggttaccggtcggggtggcgtagtcggctctcggccgttgttgtgaatcgatcgcctttgtcgacgt

SEQ ID NO: 418210 - DNA, 790 bp, Homo Sapiens
agcggaattacagtctgagtgtccagacgcaaacactgaggcaggactgccagtgcggccctgggacaaggtctgtgatctgccatcggacatgtgtaagatggggaaggcatgggaaacgagttgacatgcatgctgcaccagagaatgcaagccgagacgaaacgagaacgtgaccgtcaggcgatcgtgaccggcagtgcctcctgagcgcgggccgatcatcgcgcagcaagcaacacgaacctataaactaatcgaaacgggaagagggtagtcgaatcgctgagcaagagaaggccagaagggctatcaaagcccgctaaatgggctatcgaaactgaaagataatgccctgccctgtgacgctcaaaaggtagcgtcatcccctggttgccaaaagcaacgaagtcacgcacagaacagagagcatacaaagcaattcaggcaaggtgtgccacaaagaggtgaagcgacatagggacacacaccatgggctcacaaccaagaggcgtggacccgccacaagacccatagaacacccaagaaaggccctggagccgaaggcgcacacaccaaccgcctgtgacctacggaaggcacacctcaatagagaacaccgcacagcgagcatcacacaaacggtggacgtcccacgcaaccacaagcggcgaccgcataggaaagccaaaacgcccgccggatccccattccggatcaaacccgcagcgcaccggacaaagccaatagtccaacaacaggggcgacaacttaggactacgcttaggct

SEQ ID NO: 418211 - DNA, 888 bp, Homo Sapiens
  misc_feature (805)..(820): n is a, c, g, or t
agcggaacagcagcggtggctgctgaggggacaggaatcgcctccgcttgcaggcgttacctccaacttgcttctccgcccagctacaggcccccgccctcgcgccccagcgcggtgtccgagctgcatcggcatcgcctgagagccagcccgcaagagcgccggagcgggtgcgggctcctgcccgggttcagatccttggccatctccccccgcgcggaaagcgggagcaggcgggcgggagggacacgcgagcaccgagagcgcgggcgggacaaagcggccatagaataatcccggggtcgggggcactcagggtgtccgctgggggttccaaggatcaccaggttgaggagtacagcaagcatgaacatcccgggacccacaaggggaaaggcagggaaatcacgggcccgagaggaaggcagccacggagtcgccgcatcgtacaaggacaagtagtgcactaccgggataaggcaggaaaagagcacgcacgaatgggaggcgccagtgggagcggcctggaaacacctgtgtcagggggagaagatcaccacgcaagtttcgctcccagaagatgggggcaccacaggagggaacatgagggggcgaaagacggcggaactacgggcacaggccgcacttccgccggcccgtccaggggaccaagcggcgccaaacggacggagaaaagcccaacccaaggacctcatcggtgacggcccggaccgttacgagcgatcacagatgcgacaggcccgccatgcaaacagctaaagaggatggcgacaaggtagcacannnnnnnnnnnnnnnnaacgatggacggcggaaggaaccgaaagcaacacgaacggcaccgcccatgcggcgaccttcttccat

SEQ ID NO: 418212 - DNA, 484 bp, Homo Sapiens
gagcggactggccgtcgtgttacaaatgccggtacctgcggatgctcgtggccgtttcctctgtcctgtgtcgctcggcgcaagtcgcgagcatagcaccggagtggaaaggaggcagatatggatgcgtctgctgatctcgggtaaacgttgcagtgagatacagaagtgtctctcgtcagaattgaagtcagcccgctatagtgggacctctggagccattatatggaacatgcatggcgaggaacactatgcagccactaggcatcgatagcgtagcaggaacttatgtctctgggctgtcgtgcgaccatgtgatgctgcaagcgcaactgtactcatggactgagagaatcagattcgcccgaacataagagaaccatcagcacagacgcaagtaaccctggatgccatgaactcactgctatatatgcctgagaactctcacattgcatctgagaagtaggagtccaatatgcgtccg

SEQ ID NO: 418213 - DNA, 862 bp, Homo Sapiens
agcggactgtgcctcgggccggcgtggcgccgcgcaaggcactagtacctcgagaagctggttgatgtgctacggcggcgagtgagcgcccaaggggaagccgagaggcaaggaacgaaggactgagcgaccggggacgtgcatcgagctcggggactgcagaagagacgcacggagaacgcctgcggggacacgagggaccgctggctccggagagagagacggaataggaaggcacaggtcgagacaagagtggggactggccggggccacgaggatgcagcatcgcgcagctgtgccccgtgcgctgcgcgaagacgcggcgatggcagcatgccggccagcgcgagtgagacactgcgagagggagcgagtcgcaatccaaaggtgggggatcatccgcatcgtggagagaggaacgattgccaaggattcactcacaaagacggagcagtgaggaatcgtgggcaacgtgtagaaggtatggcgttgatacaatgtgaggtggctgaaggaaatggaaaaacattaagtaattgcgtgaaaaatttatatgagcagtggttgtgtgattagtgaatgtttggattggagtgatcaacgatagggagtttgatttgcgattagtcattgtacacgatgtggaacgtgttggtaaaattggtgtaggaagaggatgaggttcagtgaaattagaggcgatggcagacagtcgggggtgtagcggaagattttggttgtagtcatttgagagggagattgaagaaaatcttgaaatcgatgcaggaagagtttgagcaatgagatattgacagcattgaagttatggtgaggggaaattgctccatgcaggatatgacga

SEQ ID NO: 418214 - DNA, 686 bp, Homo Sapiens
agcggagtggacatcgagacggggtgctggcgtcacgagtagcgccgcgtatccttccgcttcactcccgagctctcgggggcagcacgacaggcgagtggcgatggcagggcagagatacgagcacggatgagccacgtgcactggacctccctgcgaaaccgtggcccggatcagtgagtcagtactaggggaaggtgcaccggaaagggctcagagccgcggccatagtggacgacccaggtccagcggacggataatgagcgtctggctcttgaccatacctcgagtgcagcattgtgggagggggccgctggtacgcagagtagacctgatgccttgcctatgagtcttggccagaactgagtgcatcgtgggacttaaagctaagattcgcacacgtgggagtagcagttgagcaggagtcgtgggggtgtcgtgaatagcctttggtcctacgaggacgatagggtgtctcgtacgggccaaggatataagacataaagtgacggaggagtctccgccaattggtggtcatagaccgccttgaacactcagatgaaggctgtccccgtggtaggagaacacgcggtcaggtagtgacacccctgatacgttgggctacacttcttttaactgtatgtcgtcgtgaggactgccggatgtacccgagaataattgcacat

SEQ ID NO: 418215 - DNA, 976 bp, Homo Sapiens
agcggtgtggttgttgacggtgagtggtttcgatctcctgtttcactgggtttggagaggaaactgtgcatacggtgatgagccgcggtgcttgcaggtcgttgccatgaccatcctcactaagggctaggaggcgctccaagcagtgaagatgccattcgcagatgctgtggatcagaccctgcacagcctgtcccccgttgtgccatgctgaagaaacttcaccactatcattgagtcactgagctatagtcctttgtctgtggcctaccagattttgtgagaaggctggtagcctcacagtcatggggatggccgcggtatctcctggagaagataacgatagtgggcctccagagactgggcagtaaccttgctgggtatattagctgagccatggcagacagttggtctcatgggggtctcacggcagggaaggaatgaagggtcttaaagatggcgtgaaggatgggaagcgcgtcgaggacttggtaaggagtagaagagtcgtccgaatcgtgaagatgtgacctcttaccttagaaagaaggaagagcaaaggaggaagtgctacggaaggctgctccgccaggatccagtgcatgaagagctgtgctgggggagcaggtgacgatgaaggagattggtcctgtgaacgcgagcaagtgatatgggtgaactaaccaccatagatccccgagaagcagccggcgggattcatggcctcctaccagggcctcagaggccgctcagagaggacagggccagatggccctagtcgtggcaatgggtcggggaaaacacccagaaagaatccgggcaccgcaaagggagcagtcatagatcagtgttcacacaagacaatggccggcaatgtcattcttggtagccacgcggcctccggtgagttccccgaaagaaaggggaataacttggcccaaggtggaggaaacagatacaccaaaagtggcaccct

SEQ ID NO: 418216 - DNA, 982 bp, Homo Sapiens
agcggagtggctggcgaggaggacgtgatggttacttggatgatcgtgggcacaccaacttctgctcaaagcgaagagataaggagctcctccgcactaagaccgattgatggccgcaaggtggttaccagacaccagctcagtggtacgcgccgggtgcctgcatgcttgcaggcgagtgccttcagggaaaatacagggacggggagcgatatgccagacagattaccgattactgggtccatgaacccgggtgttcgcaacgagacctcgaatcggcagactctgagcaagatcgtgtctaatactaacagtgcaaatcccgggatggttgtactttgaccgaatggaaatattgcgaagcatggagggagtcaatacggagggaaacttcgaatatttgcttttggagcaaagtggagatgtgagtggatcagaagcctagagtgcggttggacaatgtggtcgccgaagtagtgtgtgaatccagagcttgcttagaagtctgggtttgatgacaggtgctttgtggactcgttgcgatagggtagtaagtcgcagtaagtcaaagtgtcataggagggcgtgttggggcattaggggaacttgggtgtgcaaaatagggagggctgtgaagatagttgggggtgaatgctttgtgtggctatgtatccattggacgcagaaaggagacgtcactggcagggtgaaatagttccagtatagggttggcatggaatgtacctttagatggtgggtcgtcagtgaaaactttattttggacagcacgatggtggtggaaagtagtgagtgagtaccatatgggacggataggaaagtgtacggcggcacatttagtggacgattcactaataagatgggaagagaggagttaggaagtgtgtggatgttaagaatagggggataggacaaatatgtatgagtgtcccttgttatttgtctcgattaacagccagataag

SEQ ID NO: 418217 - DNA, 568 bp, Homo Sapiens
gagcggattggggcgtcgtgtacaggtgcgcgagtgagatgcctgtgctcgtaagtctggatcatattctaagagagaggatcggacgaatctgagagtgcctgatagcggtactcgtgtaatcatgatggtacgagtgtcttcagatcgcagttgttatgacgcttcaaagcgtgctgtagggcatgtaggctaccgttgtgaacgcgattggacgagaaggatcgttggatatgctaccatcatattcttagtacccaaagtggacagatggagtggtccagaaccgaaggttggctaattgtccttgggttccgaagtcgtgcaccactacgatgaaggaaacggcgacgaagtgaatgcgcatgccattgggtacgcaaggaggtactgagctgggtcatcgtgtggctgtgacgccgggtcgcgatgtgacattgtgaaggtgacagtcatggagcgaccaacggcattgtaggcatgcggcgtagttgtgagcaagtcagagatctgccagttgaagacacgtagaacggtgtgatgcaccgtgacgtgttcccatcagaat

SEQ ID NO: 418218 - DNA, 1114 bp, Homo Sapiens
agcggactggacagtcgaggtacagtgccgcgaatgaggtggttgtgccgttcgctgcctcgttcctccgggctggcgagcggggcgcaaaagcggagggcggaagagcgggggaggagaacgaggcagggggggccaggtagctcgtgagcttctgtgctcagcagagccgcgatgcgagacagccagctcgagaggaccgcgaggcaccatgggaggtcacagcagatgctggcgcgttgcgggtggccgcaggtacgaaacgggccacgggagacactgggaccatggtgcgaccatgagggaacctctgctgacggaccggccgcgacgggacgccgtggactgaggccgcgaatggcccgacgcccggagctcagaggggatgcactcagacacgtagggcaaggggatgccgtctgtaccgccgacgcctgtcgcatgcgtggcatggtgccggcggtgccagggcatgctggaaactggcagactacagcaaaggagatcgggcgccgtctagaagcccaaaggcggaatccaccgggttgcgtgagccatggggaaggaaaaggtagcgagagcgcggaatgtgagggtagattcacacacgcagaagaatgtggggtcgacacagtgttggccctgcatgaagcgcatgacggacgaagagggatggtgcgcctcccgggaggaaagagaacagcagcgactgcgagtccatagaggacccccgcttgacccgtgataacgctgagggcccaatcagtcatagtatacagagttcgctcggacatggtactcgggattccattaggcgtgtctgattctgcacttcggcatgatggagctctttcgcacgacgggaaagttcctgtgttgtcgtcgaatcacgcatacattcgactgtagtgaacatgcggaggactctactgggacagcaagtagccttgggtactagtttcgaccaccattttgccacagttattgtgtcaccatcggccatgtatcagttcctaccgtggcatagagaaacagtgtcatgctagaacaccttctgcatagacgtgcgtaattttgtgcacccctgcgcaagtgtatgtgttgcacttgactc

SEQ ID NO: 418219 - DNA, 1136 bp, Homo Sapiens
  misc_feature (781)..(781): n is a, c, g, or t
agcggattgtccggtcgtgtgacagagtcgcgctcaaagctgcccttgccccttctgacggtgacgctcgatctggagagattggcggcccagagaggatgcggcgttctatgaggtgagtagtagagaacagtgatgtggtgacaaatcatgatatcttcgttgatttgctgggtccattcgtggttggttcatgatgcagaccacgttgcgacatagctggccgcatgacgtgcccagaatagttgactccggataaggaggccgaggccccgaaggaagcgagtgcgatggatcagatgacacactgctcgtcgtacctttgatttcattgatcgttcatccctgcatcaacttcagttgttgaatgctcatggcacagaaatggatatggaatggcactttgcacagagaacgacattgctatgcccatggcggcagtaaagtagtggttcgagaccagggcagaggagctggataggggaacccccacctaagaaaaagtggcgcgcgccacgggatttcgtcaatagagcgagggaggaagttggatacgcaatggcaaacgttctatgccacgttagcgattcatgctatgagacattctgtttggtgagcacacttatgggtgcgagattgcggatattcggacaatttcccattggatatctgatccggtggttgctcccttgttgcattgtgccaactcgaaacgatagaaggcaggaacgtgctgacatcaatgcataacccggtcatcacttgagggacgtatataacnctctgtatgtatggcccttgcacctggaggtgttctggaagacagattgaatgttgtgggtagccacaatctctaaatggagcgtattggtgacgacagtgtacggttgtattttgatgaaaggtatgaacgtgctgtacactagtgaacgcgtgaagcgcatgtaggaagttttgtgaggaagcaggtactttacgttaattgtggtatctttagagtgaggttatttgtgatgagagaagtggatgggtgtcgatgaatggaacatatcatggtggatggagtactttttcttaggtgtgtgtggtgagaggaataatggtgtggggagaaatattgtaaatatatggtaaca

SEQ ID NO: 418220 - DNA, 428 bp, Homo Sapiens
agcgggcggcggcatttctcctcgcagctcgctgcctcctactatccctgcctccctctaccccctctgttatctcccttccttccctctccgaccctcttcctactccctcccgaaacatatatcccatccatcctctcaatctagtcccctatgtcatctccggattccagcacaatcagccccattatcgaagatgacaataataaaacaaaagtatcatcgcgaacgagggagcacgcgcgacgtgagcacggttcgcagcgtggggcccaaggtccatgctgacgtaccgcgcgaccacagagaggcgtggagaccccatgcaggggaacggacggaagggaaagcgcagagctcgagtagaacgagcagccgaaagagaccaagcgcaactaacagaggcggcggtagaaggaaagacagca

SEQ ID NO: 418221 - DNA, 840 bp, Homo Sapiens
agcgggtcggcttgtccagtgctgaggctggacgccgcagatggcccgctgtacgcgtcatggatccagttgaagccgactagcacgcacccgagtgcgtaacagtgtaccgcctgagcgagtccatcactgctgtgccgaatcatgagccgcatcgtctccacgggacatgtctctcgaaggctggcgtccatgatcgacgttcagcgaccctgtacctggggactgaggcgagactcttgcggtgactggcaagaacatatggtccaaggatgaaggaattcacccatgaccacatgaagccgcgccactacaagccctgataccaccacgttgagcgacttgtgctcattccctggggttacatgaagaacgctctctgagtgccgcatgaaggcgatccggagtctgtttgccacgaccacgcagtttcaaaagggtactgcagggtatggatttatatgcctccaagagtacgtccgatgaaaagcaggtgtgccgatattaaagcgagggtccggtgacttggtgcaggtagcacgccaacggaggggtacccctcaatttgctcgctcaaccttaggcaattggcaaggacttgtggggagaacggaaactatgtcacttgggcatatgacacatgacccttcgtggtaggatcgccaagcgtctccgatcccccatggggagagaataggagtttcacacagtttccaccgtgatggtaagacatcccgtccttatttagagtgggaccttgtctgcctatcgtggggggtactgcacttagtggagctgggacgcgttggtgctcacccaagcatgtcgcttccagtaaga

SEQ ID NO: 418222 - DNA, 942 bp, Homo Sapiens
agcggagtgccgggtgacgacgacgcgagctgtaagctgtgtgggttgtccgcctctcgtagaccggcgagcgcctgcgtgatgaagctgtgcaggtgtgtggtaatctcctggctgaattcagagagagcatagatcgcatgagtctgatggctcatggtgttagtcgtaagtattagcaacagagcgtgaaggtgcgtacaactgtacttgatgagtctccttgggtgcagatctctcgcatatgtcaagaagtcacgggacgtgactgaacccgaggtagctgcgtgatggcttattggcacatcttgaccttcccttgagattgctctgacagactgaattgtcacgagaatccaatggaaaccgatccaccaggatcaagcgcatagactaacacttttggtaacctcattgcctgggctgttatgggtaagtgatggttcaatatgggcttattcatgggagatttcttgccatgacacctggccagggctattgaatgattgcacggatagcctatggtgtacgacgtaggaggtgtggatccgcgccagatgaaggtttagaggatgctgaactggataattggtgtgactaccacggggaggcgcgcaattaggtcgaagagaggtggactgtgctcccaaggcttatacgcgacgttgtattggacaggtcatgatgtttacccagaggattcgatggggaacttcttgacgcaagtgttgcatacgtacccattgagttacctggaagaggagggagagctacttaccacgttgcccgtgcggatatcttcatgcttgtgctttgcagctatttggccaattccgtacactggtgcatcggggtacagccggcaaatccgtgggcaggcaaggggagtgtgttgcggagcaatagctgcgggtccacactggcacaattggccatggtccg

SEQ ID NO: 418223 - DNA, 1127 bp, Homo Sapiens
  misc_feature (667)..(667): n is a, c, g, or t
agcggggtctgcgggaggcctccgtacccgagatggcgcgtagtagcctgccgtccgtgtggtgccgacaggcagtatcatgaactcgtcggtttagccacgcgtcctgctgtagagatgccgtgaagcgcataactggcggttggctgctgcacatggtgcagctccatcgagctctcccggtctgtgctgtctgatggtcgtgcaggtgacatgcgtctatctgtcatgagtaggaaggtgaggactattgtccgctacatgtgtccccttcctcgacggtcgttgcaagtaggggcttcgcgcatagccacactcggaggttgaacctagttgaccccgagccttagcgttaacccatttcatacccatgtggacacattgttcaggtagtttccgctagtcttcgtcagagtggaggttgtatccgcatgtcccttctcaaggcatttaccacacgataacgtcatgcgctggaaactggtttctaaagtaatcaggtggacccgaaatgcgtgtagatcgagtgctagggctagttgggtgaatactgaagaaggtgcacacagaggcgtgagggagagcagctcgacagagcctcttgacgatctctgttggcatattagggcgttcactagagggttgggctaaaaccacgtctgatacnttgacacttggccgaggactacgtggtctcttgtgccgacggggactcccttactaatcaagggatcgattgctacctatggtgtgagacacgcataattactcctttgtgtggcgccgatagacagatagctataggcggtaggttcggaggtgcggaaaacacgaaaggagatattcagggacacgatagcaccagatgggccatgttctcaaattagagcgtctcgaaaagcagcagggatgtcagtagagcagagacacggaaatgaaattagggcgcttgacgacagacagattccaaatataagcgtagaatggctacacagtatatggtataagaacacattagcacatgtagatttttagcctatcggtgcaagctctctcgtaacacctatatcagtaatctaagagcgacagcgcaatagtcaacatcaacatacatggcaacccataag

SEQ ID NO: 418224 - DNA, 1283 bp, Homo Sapiens
  misc_feature (747)..(747): n is a, c, g, or t
agcggggctgtggctttatgcctcgagccccaggcacgtgtgacagctactttcgtcctgtgagatcgtttcctagcaaatcttatcactgatgtctcatgccttgtgccgggacagccatcctgagactgattactaataaacttcctataagtaccatctaagtacaccgagcgtgatatcgaacaacgacctgtcatggttcacatctttgatcgcctagaatgacgcttccactccacatggcgtacgcataccttaacgttgaggacgactatcttgatcgtgcggatctcaatcgtagagatcacgactcgtacgatgactcgagaagagccaagggggaattatacgccctgtatcccgtgaacacactgcgttccgcgtacaagacgatatgcttcgaaaaggacacctagtagtcacaaacggaaacagcttgcaagggcatgcgactccaagcgacaattgcctctagtagggacaacacacccccaagtataattgttacctccacacatacttcacagagtaagtggctcaatgcccaaattgatactgaattaattatcgttggcatcaagaacgcctcattcctttcagtgcgtgagcataatccccaatattaaggctactagaacacggtgtctaatagagcgcgcgaatagcgggtcgaaagacataaggatacccttacgacaatatagtacgaataccaggtgggctctggacctttctcgcctttantttgaggcacaattcgttactttggtagagtttggccgggtaaataaacaatcggtcccggaaagaaacacttcggttaatatagtcggagacaaccgaagttttatcgcaaagaacgcgtatatattcaattggaacatcctctggcggtggaacaaaggtaatcccaccatcaacgcgcattctaacaggaaatactacccctagaggggtctgacttggtcctaatcagaggactgtcaagtttcctaacgtttccccaagataacatctaccgcaataaattagggcctagcaacccttgttaatgaaaaccgcagtgagttagcgcattgtaccccgccaagagaacacttaaccattagggtgtgatcagcgcaaaacgagattccgctgtggggatgtatccaactgttggaattttgaccgtgacagactagtgtacccgcagagagggtacatactggccgcttcatgaataatttcttaaacccatggtgggaatgtttcattcggatagtggatattgggaacac

SEQ ID NO: 418225 - DNA, 1000 bp, Homo Sapiens
agcggggttactttccatcaacgctcggtgagacgcggagtgagcgcgtctatgtacgccctgcctgctgctcgagactcggccgtctccttcccgactccctcacatagcggactcgagagcacaggtacgcggcattaaacaggatcggtggacatagatgccaacttacgtaccgatatttctgcgtgggtcaaacccgacatgctactcaatgtaaggatattggataagaggctgatagcgatacttggcctttggatgtacccatcctgtatcaatgtaaccccaaatcgacagggagacaaaggtctatccctgtacttgctcaatgccctatcgaaagttctctctgcatgcagaagaaccagggacatttactactgacaataggcgatggcagaacatggtcaattacaaggcagtgggtggcatgcacggtgtgtcggcaaatgtgctttaccgccacgattgggacctgtacctcttgcatcactcgattgtgcaaagggacgtgagggacgagatacggactcgacaccgaagaagacaaggagacgcaccggttcagaatagattggtactaggtacgatcgaatcgttctccaagtaatcctcccgtaaggaaaagaactttactgatttagatgggtggccaacaaagaggaataaacttggtcatcttgcacaaagatgaggtgtttgaactgtgtaggtgcaccctggactgtgtgcacgtggttaaagaatgagaaccagatagatgaaagacgttgattggcagggtaatcaccattggcttgtttcccccaggattcgccggaaggatacccttggacacttgcattaacctaagggtaacttgcaatccaagtgttaagtaatccctgggaaactttgtgtattccacggcaagactttcccgaggtcctcggtgttggcatttggacgggggcccattgggccctattggtggcagcgtgagatccctgtccttacc

SEQ ID NO: 418226 - DNA, 844 bp, Homo Sapiens
  misc_feature (269)..(269): n is a, c, g, or t
agcggagtgagcaacgcggcgtgagcacgtgtccccaggctcgcggagcttcgcgctgggagaaaactatcagggcgtctctgtgcgccgcagtccttgtctgagctcctagactcccttctgttatcgtcctcggatgacaggtccacgaggctctgggtgtgcttctcttcgaggctggggtcggatgatatcgagtgtcgcgagttgcacccgcggtgctacccgtattcgccgactccaatcgtcgtcgccttactccgcggagnacacatctgattgccttgatgcgatgattccattttggggtcagagtgttgcttgtcaagtatatagtcgtctagttgtgttggcctgctggtttctgggcccttggtgcaattcacttgtggcgggaagcctgatcgtgcccgtaatgctttggcttgaaacttatgcaacgggatagagtacttgcgctcacgggtgaagccatttccatccggtggccactctgccgtcttggaagagcgtgtttgaaattgctaattgttcgagccgagacacgtagttcgttgcaagcgtttactattccccactgagtgctgttgggttagaccgttttgcgctgtgggccagtattgcgggctgtgtgggcacacctgcgtaggtgtgcctcccccgagttgccgaagcgcggaaccgattggttgccttttccgctggatgtgtacgagacacctgcgagctcgttcttggcaaatgccgagagggctagtagagcgagaccctttaccatgttctgcacctactccgcttgggatatgcgatcataccctgtgggggtacaggctcgcgaaaccga

SEQ ID NO: 418227 - DNA, 1026 bp, Homo Sapiens
  misc_feature (207)..(207): n is a, c, g, or t
agcgggtgggcgcgggccggtcccgcgcaccgtcaccgcgccttagcgccggtctcggtgccacgcgctacctccgacctgtcatggctctgtgctactctcaccgcccgtgcggtggtgtcccattcacctctgcacttaacaaagtagagtttagcacggctcatacctcagtacaggctgaccgcatggaaaactgtttacgtncagaaccaatcgtataacagcagtcgcgggcagtaattgctgcgcatgcgtggttgtgtgccctgtcagtgcatgtcactgctgtacgtatggccttcgtcaagaaacatcaacggtaatcaattgaatgacctagacatctagttggatggaaactgctatcctgcgattaaggcaccagcaaggcacaaggtaaggcgcaaagactaccaggatactcatctggatgctctcatatttgatccagatactcgatactgctgacattgagatatgagagctttgcacatatcagagaatccaaactggaacgtgcatcaaagtattccatgatcaatcaatctacagtgaaagaattctgcaaggtaacacgaaagtacgcgagcaagaggcatggtccagacatctctgaatgtgatggcaccgaggggcagcctgttcagacacatggattcccccgcgcaatccttgtgacctgaaggttttcaaacaactactcacgattacgttcaacagtgcatgaaaaaaccctagaaatcctagacagtccagtgatgcgatttcgactcataatttcgtcaacttatcgcggtgaacagcaatcgtatgatggattcccccgaataataatgcatctggaacatcttaaacaagaattgcgtctcaaggaaaagttgggcaaaaaacatgattttacacccaatctgattggccaacttgagtccttcgcgccaatgcaattaaacattctttaataaattaggttgcgccaaccgtgcttattaaagcccaaagaaattgaccaagcacgctgagata

SEQ ID NO: 418228 - DNA, 778 bp, Homo Sapiens
agcgggacgttcccttcggctctgggtgcacgtaacccgcacccttgtcgatcgtctattccgtgctgctcgacagcatggtatcttcacaccctttgtacggtctgtgctcgctcttcccgttcctgatctctcctcgtttttcgtgtgcaggacactgacacgatcctgtgtgtcagcgcagtggggccggccggcctctgctccgatttgttacctggtatttgtaaggacacaacgccgtaaccccaataagtctcgcctatatgcccgagaggtgtcccttgattgccgaaagactacgcgattgatgaggaccatgggggccgggaaacacaaggggcaaaaaggttggcattgacggttttcccggactaatatgatgggcgcaaccaattgggcttgtacaaggatggcacttaattgaagacaaggacgtggctcccttctggaaagaaccactgtgaagggccatgccacccggaaacgttattaggtagccaacaattaaagttaagcaattgcgtcaaaaaacagttatggtgggccaaacgcaatgggctttatcccaagtcattgcccggtaggtagacgggtacaattatctcaacccacacatttttccaagcgatacaatacgccggcaaagttcaaagcgaaggaactgtgttggataccactatgagttgacatgggcaggctaaggaaccacgaggtcctacccaatataacaagggtgacaatttgacagaaagtgaatgaccccgatatgtggggg

SEQ ID NO: 418229 - DNA, 845 bp, Homo Sapiens
agcgggctgcctctgccgacgcatggcagaaccgggggctacctggctccgcaatatgtcccgactctatctggtgcttgccgtgccgagtgtcaagtgcggcaattgacgggttgcgtgagtatcagaacacgcctcctttccgtcggggcacgtgtccaccgcggctacgtggccggtactgaactacgatgcctcagacgagccgtctgaccgcagtgcttgagatccttcgtatcgtgatcctgctcgcatcaagtgacccgggaggcatccaaattgatcgcgtagagtggagttgagcgtaagtatcaccatggtcgcgaggttcaagggcttaatagcagagcccgtgaagccacgtacatagttggcctgtgggggtattcaacaccgaagccagttctcgcagcttgcatggcagatgggccactcgcctttatttgtgtctgctccagttcaaacggatcaaaaggctacctgacggcgtcccttatccatcaaggccgctttcaatggatgggatacagtgctacaatttaacgtcaccagcgtgtgaacgcaccatgtgggccctttcgagagaatgccttgtgccaataggtagagaactataatggcgaagcatatggcctagggaaggtaagcgcgaacatcccgcgtatagtggcatagcctataggacgccccttcggtaagaggaaaacagagctcccaaagctcgttacgttaggcggaagaaggatcgcggttgacaaattcgagtgatggcttctatgggaacagatacgtcccctggcttcccgatgaaatacgtcttagaggccctttgttggacacacacc

SEQ ID NO: 418230 - DNA, 1115 bp, Homo Sapiens
catcgggattgtccgagtttaattccggcgtgcgcagggtaagctatctgttcgagcgttgactggcccaagtaagtcgctctggtgttgcaggatagttaggcgattgttggcgctgatatgagctgtggccgatattatccatggatggacgtagttgccataccaggcctgatgcacattgcgtacactatttgatgcaagtatgcgactcgagactgtccctgaagtagagatatgcacctgtgaactatcagcagctgtggatcaagcctctgacgccattgtctcagatataatcacctggttccattttggagcagggaattcaacaagtcattcgatcgtgggtgactggggtatcccgcagaaccgagggcgtgtacaacaggcaagcttgctgacgactacatcaccagtgctagtggaagtgtccatctagccatggggactgcgaccgacgttcattgaataggacccgcacttatgttggacatctttcgtaaggcagaagcgcattcgactgatccaatgccgtgttgggaaacactagctagccaatttccctttcttttacgacaattttagaaggttgcgggcatagagacttgagtagtggcaaccacaatatttgttctatgccttgacaacaattcccgcctgaatacatttagaccatgccaagttggttactatacctaatttttcatagcctcatggtgtcatgactaacattggaaagagaaagcgaatgctagagagtattcagagcgtgtaggcccctttggtagaggttgaactttgcctgtccgaagcgcacgctgcaaagcaataaaatgcgagcagtccatgtctgttttcgagttagtgtacacctaggtggaggcaagtacagaggagtgatataacactagaagctgtgtcttgcctagagattgtacacgctacgcaagtggtccaaggcgaaatgacagccgtgcgctttcgggagatatccagaacgagagaagtaccggcagtaaagtattgcccaaagcccaaggagtttggtggaagaccccttcggagactacggctgcataagctaccattcgccaggaatgtcttccccgtct

SEQ ID NO: 418231 - DNA, 823 bp, Homo Sapiens
agcggaggggccgagtgaaaggtctgactatccggaaatggagcgtgagtatacgagacttactgctaagtctccgtgatgtctcgagccatcccagccctagcgcaccacagacacattatcagaccggactattctgtggatcgttcgtcatcatcatgtcaaacagttccgaatggctgtatagagctgcaagaccatccagtgcagtaatgaatcccagctctaggcctgatcccagtgatgcccgcaggcatatccaaatgaaacgtactacgcatagtggaagcaagacaagcatgcgatgatatcaaggggcaccaaaaactcttcgtgtctctgcatgagcgtgcatccttaggtcctgttgcaccgcctaaacaacggaagaatccatgtggaagaactttaggttgggatttaccgtgctgcattgaagtctctggaatggggggggccaggacttgcgctcatacaagcgaaaggtgatatctccatgtggccttatacggagagatgaattcattccaagggggagacggacagacaccgtgggacgaagacagaaagagaatagatagaaaacaggaacacttaaccaattatggtttacataattgacccttgtttagacaagtgtttagaatccccctttgcgccaacctaggagtgaacacaagctatattaggaggggctacccctgaagatagatgagcaaggttagattaaattatgataattgtagcctatctggacaaaagacacttttggcgcataaggtatttgacattagggcaatctgaactaatttccagtactggg

SEQ ID NO: 418232 - DNA, 559 bp, Homo Sapiens
agcgggtctgtctgcctggtctccgtactgtcccagacggtgctgttgtgggcttgggatcctcctggtgaccatctcccgtctaaggtcactcagccactctagccgacaagatgtggccgtgcggctggccgtgatacccacctgcgccacgacggcaagaatggggagcgcgaatgaaccacatggaaggagaaggaactgcgatgagctgactgaagcgagtggtggctatggatggaccacagagctgtccttggatgagctgggcctggaatataccaagtggacctgtccagatgtcctcaccaagcagcgggtctcagtgacagtactgaggatcgagatgggcccaatgcccgtcagaagactagccatccccactaacactccatggagtgtgggtcagagttctgaccgagcaagtttgatccgggccggttcatccattccttgctgctggagttggtggtctactccttcttgcattgctggcactaacggtagttcattgactgccaatggcacggatgaaccaatctcaaggacaatctatatc

SEQ ID NO: 418233 - DNA, 650 bp, Homo Sapiens
  misc_feature (116)..(116): n is a, c, g, or t
  misc_feature (375)..(375): n is a, c, g, or t
agcggggtggcggaacgcgcgtccgtcggaccggtgcggggtggcccgtgcgagccaggtgcgggtctctactcaagcgaagcaggagccggctggtgcagccggataagagtgantgacaactatctgggcgatgtgggttggatagacatggtggaaccagaccacaggacagcacatcgtccgttccgtgtccaacactgtgtggtggtaagagcctcacgcactactatagacgtgggtgtacccacgagatcgcgcagtctcgtacacacgacgcagtccccttctagcaggcgagggtgaagacagcgctcatcgacgtacgtaggccgcggagacccggtggacgcattctgatgagccaatctccgntctgattcgtccaagaataaggtcggatctcagtacgctgcatcgatcctgtgcataggctgctccttcccatgaggaattggtgagcggacgatcgcggcaggcttttcaataacctgacgctgaggtttcacgagtcgctagcccagtcggagttgcgcatgcagcgaggctagacgagacgcagtaccctggtgggttctgttcggaaggatacacaacgcgtgctgtgcgcgatccgatgactagagagaggatcgacctattcatgccca

SEQ ID NO: 418234 - DNA, 1194 bp, Homo Sapiens
agcgggcctgtccacccttgggtgcctggaaccttcatccttcatccgtcggattagaccatagacgcctatgtcgagtttactgtgcagaaccgttgagctgactgtcatgccttggcttctcgttttcgtgggcacactggacgctcgacacgtgcgctcgatcgatgcgaaggtacagctagcccatggatagtcgcatggtagcgagatcgtggacgacttgtggagagctgctcgcggaatactcctagcgtcaggggaatagaccgtgagacgagacaacgagtggtacccaacctcagaggccgagtagagcttggcatggagtgggcaagtacctctagttagcttgggttgggacattggcggggcatgtcgctcaatggaatggttgcgctagggagagggcataggcgcctatctggagtcgagcttggcctccgtggaagaacacgccgtacattcgggttgaggtcgcgcgtagcgaggtaccccagcgaggggatggaagcgagcccacaagccacgctccctacggtggcgaacaccgaacgtcacctgaaagttgaggccggcaccattgataaaactccaatagggaatggagaaagtcaaccaatgggaccttgaggttggcttaggcaaaggcgcagacttggagtggggcccagatcgaggttgtgagcgcgggccccttgttcgggctgcggcttgagcgtggtgggccatcggggggcgaaaagggtctgccccattgcaatggccaagggtccaccctacctacgaaattagccacttttttgcggaaggccacaagcttgaagcctttaagtagcaacgaggaaaccgcggatctaaacggtgatttgcttgttggtagaataaaggcgaattgggccgaaccctccggtatttaccttcccccaaaaattcggaacattgttgggttttacggttacccaatggggcgaccgcggctggggacaatgttgaaccgattaacccccgaagcggagaaggcatcttatcggaaatatcccaaaagcgattttttggcggtttggcctaagccttgattcggttgagccacggatccataatatatattccaagcaaagaggttcgaaaaaacggacaaggggacaattctaaccccgaggggtttctattccgcaagaaaaaatttaccca

SEQ ID NO: 418235 - DNA, 1147 bp, Homo Sapiens
agcgggggggtggggtctgcgtggggcgtgcgtacaggaggccccgggattctctggactaggacggtctggggtacgacgccagtgtcccctcgagctagtcccattctgggattagacagaggacacgaaccggtgaggccggtcggccttacctggcgccagcgcacttcagggaggcgcaggcctggggacgaccatgctcgaggtaccgtaggaagatgctgtgcgagtgatgggcctacattcgcaggtaatcatactcaatcactcgagcccctctcgagaccagggccttagaattagacaccatctagtactccctaggaataggttcggcctgtctagtatgcgtccatggcatgtatgcaaaggcacactggatgggacgccgcgactggattggaggtcgtggtaatgcacaggagcttctagaggagaacgcgttgcagaaccccgtctcgtgcataccgggaagggaatccaccggggcacggggaagaggaaagggccacgccactacgtttgggtatgtgcctgacttgcgctttacaagttaactttgctcccccgaacccgaataccttcgccaggagtagcgcaccgcgtcccgcatacctactcgcaatgtcttttggaacgaaaactatattattcttatgcccagaagagaattacagtcagggtttttttcaccaaggttcccatttgtagcaggtgaacgccattcgagtacataactgaaatctcttggagttggagaaaatgtctttcaaaggaagtgattcactggcatttgtccggagaaacattatcatgacggcgctataagtgacccgaaagtaaaagacaataagttcgttctcccggctggaaaaagataaaccccagggatgtagacgcagaagaattccgcaaagattaagcgtggaaggtggacggcggaaggaacccccactttttccaaggatggcaaccggaacgaggaacgggttaacagggaaaaatggttccgttctaaaaaggtttagtgccccctgtcgattcggcagttgtgcctttctcacacggtgtgccgcgaacagaagggcctcctttggattagtgttacccgctttttggattactttccctgtatggcgaacca

SEQ ID NO: 418236 - DNA, 718 bp, Homo Sapiens
agcgggtattggaggcccctggaggagaagtagaggacaaaccacgcgaattgagctctgtcagaggcgctattcttgtccataggcgggtaggtgctgggcctatgaattacctgttatctattgaagactttggcagggaagttcttgcagcctttcgcactatgcgtggcccttcatggttgacgtagaacgatccagcactcctgcaggaaaatctccagctgaaagtgactacactgatagtaaaacagctgaggctgacgatctggagatagaggcaggcagtgcatgggactggacgtttctatgatccagccgagtggccttacatggctccaccaaaatagttcagacgtggggcaccgaaattggtaagcgagcaataacaaccaaaattggttcagtgcaagacacgtacaaacttcagttcaaccaggaggatcttgcggctcgatgatgtccagaagcacactcctgtggcaaggattctaacggtcaattgtacaggaaacactggccttgctagagaattgctcaggctacgctgacagattgattgagcacggttgtgtaccacgaactatcagggcttgaaatgttaggcgttgtcacttggcctggcacacttgagataatcagggaaaggaaactcccataagtgccgatgttccaagaaagtcatggctctgcactgcacggtcaatgaaaccacgcc

SEQ ID NO: 418237 - DNA, 978 bp, Homo Sapiens
  misc_feature (560)..(560): n is a, c, g, or t
  misc_feature (725)..(725): n is a, c, g, or t
agcgtggaggcgatgcgggttgagatgcgccgtcaatggcttgatcaggcgcccccgagggtatctcccaatgctcgacaggcttctcgtcacgcccctgttagtgagtcggatagaggtccggagaagaggccgtcccggcgcgtatcccgagtgtctcccggtctgcgcctccctgacgtgcgccctctcgggccccagggttgaggcggcttctggtgtagggctccctgtggttcggcgccgtggtgctccctatcgagtccacgtgccctacctagtgggcacgtgctggcgactgtgtgtgctggctcgtgtggggctgcaccatggttgatgtctcactgaggattgtcgggtggttctctatttgtccctaggatgactcctgccaagagttagacatgccggacttgacgtgggggggagttgtagcactccagctctaccaaggcacgcctaggcccatgggtggcgctcgccctggggaggctgggtgggtcgtctgttatgcttcaacggcacaagccaatccctcaggcactgcctgtgttgtccantgagggcgccgggccaccctgcagttctttagacttgtgcccatcatcccgtctatgtttgcaggctgtgtattgcaaagaagcattagctaaaaatacttattcatatacctggtgggggtgtcccttctgtttaaggttagctgtggcacctgaacgtgttgntttgagcaaaactgtgctctcgcaatacagtcgtaagtgtagactattgtgagtggtgggaagcataatgttccgtgtgccctactcatgtgttggtagggaccttggtagtatgattccgttgagccacagtcccttaaagttgataacttctatactgcggagaactgagcaacggccgcgggcttgccaaatccagtaattcgtctcttcgtcacctgcaatggatccggaagcttgcattcccaccccc

SEQ ID NO: 418238 - DNA, 1180 bp, Homo Sapiens
agcggaactatgacattgtcgcgcgatcgcgaagtctcgagcgtgcggccggtctcaggcgtggccagcttgggacttgagcctcccatggtacggctgtcctcgcacatctcacgactacacagtggacgactggccctgccctagtgagaaatcacttggagcgactggataccgtccctctatgaggagggttcctgcgacacagtcactacaaacattatgagtccgacctcactcgtcgtgccatctgatacatgatcactatcttgagattaatgccgtctctggtatatccccctgtggtggaatctcagcattccggacggcggaaacgggctcacgcagccattaggacaggtcattctatcttcgccaacggggtgcaataacgacatgcaacgttccttgaagtgcctgtcagtagaacgtctagggaacgttggcacggaacagcggcgattcaaggtgctccgtatgccttcgacggaaagtcgacaggtgcgcagtgcatcgcgcaacgactacatgggacgcctacccgaggtgaaagggcggtggatccgtaccaattccctgggaacgaacaggtcctcacgtggacaattcaaaggcaaactggcgcttgttgacatggcgtgtcgtattacaccccgtaaccagagactgacatctaattccgtgcacgagactagaagaagaaggggaccttgtgtgccaggctagcgacacagttgtgtaaagagccccaaccaaggccccacgatatcattgttgcgtagcatccgtaggatccaagtggaaccaagtaggcgttacaagcattaacaacataatcaagaggagagaacgccccaaagagtatcgttgttccattgccaagagcgcaccgttaccgccattggggagacacttacggttggaacgtttggcgcagaacgagaagttggtcgcagacatagacagagcgcataaaacgcgtaaagagcatgacaatgtttaaccgaccaagcaaagcagcaactaaatttcgccacacgtgtaccatagcagcgtgcccccattataggtaatcaatcataaacagttagaatgcgtattcatagtattcccccgtgcgacatcgggcaggacgcatagaataagaagtaaacaatagagggccattaaagccacatag

SEQ ID NO: 418239 - DNA, 1215 bp, Homo Sapiens
agcgggtttttggctacttgctgtgtctgagaagggcttgctcgccgtgaaagtacatggacagtgaattccggatcgtaccctaaatagcactcaaagacctcgctgtcctgaatcgcacacgtcgaaccgtggacactctgtggtccaatgaaaggccgcggtggacagagcgtcatccgcgccttgtacaggacagtgacaactacggcgatgtacatgaagtactgcctgacgtagtaccatagagcagagtccatggccatctgtgtcaatcgtctggactatgttcgtgacttgacgatgacgtcagcgtaaaatggcctgtgtctgttggtagggagcacaccatgaacaattggacatttgattcatactgtctagtaacgtagtatcgagatgcgtgaacggttatcgatttgcaaacctcggaaatccattgacgagttgagcacttaagaagtagagatctcgactgagagaaacttatcttctcggtatcgcatcgacttttccaagtgacagacttccacttgtttgtgactttgaaccccaagtattaagtgaaaatcatagaggtccaaggcgtgaggaacagtgggccaaggactagtgcagttttagacttggtcctcgacgtagactccgtgagtaatggatcaatgtcgtccgagaagcgagtattgcgactgtagcggtgctctgcaaatggagagggcaaaaagcgcgtagaaggcagttcagctgagtgttacagtctgtgtgaacgcctccctatggtccacaattttgaattcaacgctgagtagaccggaggggtagaaaacctgagaatagttttcgtagggcagagttagacaaggcaaagaaagtcatcgtcaagcctccgtaggagtcctagggccaagtgaaccagagggacaattattacgacttgacctttgtgcataggcgggcaccttgttagtactatagcccacaggaagtagttgcaacctaaagtttctcaacatggtgcagagtgtgattggtgaacacataagtttgcatcaaatcctgcatagctggagtgctacaccaaaggtcataaggacacatatccgtaacgaattggttatatagcggtgttgggcacttcagcgaacatgcgaggagaacctaatacataatgacaaaacacactatatagcgcatacagaggaaaaaagacatgta

SEQ ID NO: 418240 - DNA, 834 bp, Homo Sapiens
agcgggtttggtctgtttgtgtcgcgcgttgcatgtctttgatacaccgtcgaatagaagcatatttatcgacaggacgcaggggagtccgaatgcgcagtgaagcgacgaaagtaacttggtcttggaggctagaagcatatgctgaagagtagtccaaaacacgcatggcagaagctcattggtggactaagagcgcgtgtggccctgacagtgtggctgtggtgcgggaggaggatggaaggctcgtagcgtgtggtgcgtacgatggcaggaggtgaatggatgctccggatagacgtaccgaaaggtacacccttgttagcccggcggaatcgggagcacgtacgtgacaagagagtagaaggcaaattgaggaagtacgtgacgacgcacctagaggagaccgacggagctagagacatcaccggagcactccgcggcccgcagaggagagtcagccggaggcagcagtgactcgaaaggcccaagtggagaccggtcgtacagacacgtcaagagggcgtaaagagttgcgaaaaagcaatagaggactgggaagaccgacagttcgcgtcttgaggaagagagaggcaacgtgggggaggtaaaaggttaaaattagtaaggacaatgtggcgaagtggaaacgcgttacttggaggactcaaggacctctgcggactagaacaggcggtgaaactggtgcccattccttagagagtgtagatggaccaatcattatcgaagcagtcaaggtcgcgcacgtcgcactataatggtagtaatggtaggtgtatagtcgccttactggggcaatttgcgccgcatagg

SEQ ID NO: 418241 - DNA, 1287 bp, Homo Sapiens
  misc_feature (1053)..(1053): n is a, c, g, or t
agcggctcagctcgcggagagagcggtcccccgccgaggctgttgaagaccgcggcagaggccggcgtgcccgtgcggtgagcccgggaggacgccccgccgtgtcgcgcagcgatgaaaccagggtctggagcatcgcaggtctgtcacgtataagagtctcaggccagaagaaatgcaagttccgtcactcgttgactctgcacgtgtaagaacacgcaaaaccacgaatctagtgggaactcgtgctgactgggcgagcgcccgaaagcgcaccagtgtggctcatgacagtcctctgggctcagggcgtgggccccccagacgccgatgcttcgagcgagcgtgaccattctccctggtcgtgcgcacggcacggtgggttccaggatgggctggcatgggcatcgtatcagcgaggcctgtccagggcaggcgccggggtcgtccgtgcccccgtgcgcgacacccttccctctgtcttgctctgtgctcgttttgccgactttctggtgtacatcctttatcactggggcgattccatcaaaatacctttatgctaccctgagcactctgagtcgcgtgctacccagtgtgtcagcgttgcaatccacccagtgagaacagccataaccgggagtactgtcctaggactatcgggagccgatggcctttagaaagtcgcgttagaatttagaacatgagcatgttaaagcatcgccttagggcaatttggagagggggggtcatgttcctgtgtcttgtggcccacgtccctactactggctgaaggctttcgcgcgttgcctgaggaattggaatacctggtagtctgagaatggatgcagtggagaagacatgctttttagcgcaaagaatttgcaggaattataccgtgcggtaaggtgcacacgtggggaaggcacaggtgccgcggtgatgaaactggtgtgtgcacagccgctgtggaatcagagggggtctttggtacacaccctcgttgggcccattatgttgttatcaacaaaacagtggtcccagcgtagacagggngtggcctagagtaacaccttggtggcccagaaccgttgggtgtgtcaagaactgggtaggcccaaggtttcggtacttgaccgaagatgtatgggggggcattgtgtgtacacccaggggagatggaaccttgtagaactgacacaactgttacaatgaggggataacatatgcggcatttttcggtgcgtactaccatatacatgccccactcacaccgcacggtactaacta

SEQ ID NO: 418242 - DNA, 650 bp, Homo Sapiens
agcgggattttcgctctggttatcgcgcgcttatgatatgagcacaacacatgttgttgcctctaccaatatgatagtaatgcatatgtttcagcttgaattgtgaggaacgaaagtggaagcagaacaatagaaagacgatatacacaatcgtgcctgcacaacagcttcaatcacgagtgtgtgcgacggtggatagatagaagacaaagattgaactacgtggtcacataacagtgctctcatgtaataatgagctagatgaagaatacgtacaaagtacgatatgtacgtgacaatatgatcctgccccacgagtgcattcctttgatattgaatgcactctggttacatgagaacagtatctaaactacgggatcacacttacctcgtgggtcacgctgactgactactcatattgctgtaatagcttctccgtcgtaactaccatgtcaatagtatcagcataacatgatgtctgcttatgtacgtaacagtatgtgccaaggtagagtattcaagcctgacattgatacacgccattgatctaatagacatgaatctggtgggtataagacagtcacattgttgtataatcactaatgactcattacactatgataatacctagacagatagaaatactacca

SEQ ID NO: 418243 - DNA, 875 bp, Homo Sapiens
  misc_feature (147)..(147): n is a, c, g, or t
agcgggacgcggtgcgctcgccgccaatttgatctgcggtgctggtgattcatatcgcggcggttgacgggccggatcggacttccatcgccgtaggaccggcaaacatttcgggactggacgtgacacacgttgcttgcgactgcngaagcattagtgctgaaggagaatttgagacacgactgtgccgatgctcgtgtgatgaccactcatacacacgttttgtgacaccttatgttcctgtgatgctggtagtacaagaggacaacagtcagcgtgttcacgatacgtctccggaggtgcatgggatgctcgggatgacgtaagagtagtacgacttgaccacgaggtaatagcccatgtcagagatgtggggaagcccagtcggtgaccacgtcacagctggaaaagcacactgaccaattaaggaggactagaacgagctcctgggaacggaaccgtcgttggcagacaattacctggggacaagtccagggtacttgaacaagcaactacaagggggggacacaagtacgtgaacctaggtaaggggcccccagtgggggatacaaattggtcatgccaatacgcaagagtcataacctgggtggcaaaactcttgcctatacagtctggggaaagagagaacggtaccgggtctggtcaagaggacaaacagagggatggcgattacttctaattccgttggcgaattgaagtcccaagtcgtggtaacgtcaaccttcccttttcggaccgggcttgcctacgagagaaacacgcggtgaattctgcccccattgcagtgccagtttaaccttgcaaatagatataaagagcaggtacagtcagcacgtcacatcgggtgcgccgag

SEQ ID NO: 418244 - DNA, 1047 bp, Homo Sapiens
agcgggaggtagtggcagcggcgccgcgtcgggagccgccgccgtcccggtcctcccgctcgccgtgaattggtgcctccttgattactggcttgcttggtgagcaagtgacaccggactacgtaaccagttgctactggaatgtcacatagcatatcagtcatgcagtcaatacacgcacttgtgcctcctgttgtcatacggtataaccgaggcggtgagcataagttgcttatgcttgtggaaccagaatactacgcatttactgtactctccaaaagtattggtacttgtgcgggtcagcctaggttatatgctaggctggtagagcctgtcagacacccgtgagaccaggtggttaccatttattagatacgcaagataccgaataagaccgaatgaacgctctcggagtggaccttctttgaacccatactcggaaaactttcccagtgcgtgacagcaggtcagttggggtgcagtagatacatgtggatacggacccttggggtttcacctgttttgtgcagtcaacgtcttatagcgtctggcacaaggtatttcataaacatgtctggatacacgtaagcttacgggcatgtgtaaaacaattcactgaaggggtggccttttcatttaggtacgtgtgcgcctcgaaccacatgggctccgcatgtttaacgcatttcgcggtgggtatgcatatgaggcacgagggggataaattggtcgcccctccctagtaaattttggaaaccccctagttgaattcgtatggctcgggtggcacgtggatttgcttattgcataccaccattggcaggaggggtctgttatgagctgtcccagtgggcctgtatgactgtgcccaccttatgggtaaaccggcacacgtagatagaagccaccctgagggttccttttagcacacttttcagcagcgaggcatcgagggggcgttatctacctttcgcaagggacctgattgtcctcacattgctactggatgcgcctattgtgcaatagcccattcggcatcccaaatta

SEQ ID NO: 418245 - DNA, 1503 bp, Homo Sapiens
  misc_feature (642)..(642): n is a, c, g, or t
agcgggtttcccgctcgtctccctgcctagtgggtccgccgacgtaaagctggcgaaagcagagaactggccgctctgccatcagccgaacctgcataagccgaccaacagtagacgcggatcgctgccttaacaaggtgctgtcacctcgatgtgagggcattcagaggaaggcgtacacctccttggagcacctcatcaggagacttcgggaaagatgtagtgctaatgaaggagattgggaagcctcgagagctgtgatgccttgatggctcgagggctacaacgatacatgacttgctcaatgggctgaagaagggacactacacggaagtgtgcctagtactcgcaagtaccagggtggcagtttgctaccaagagatggctggtgctagatggactcataggagtatcaccatgagtacaagtctaccagtagcttatggtatacccctaatgttcctccttcgttcaatctcacgcatggcacacagagatttcttatcgagaacctactgtcagatcgtgtggccaccttatcgaaacttaaactcgggcgccgaattcccggtcccatgaatgcggcgagtatagagcgttgagttaacatatttgtgcgcttccattgcaagacccatttgngaaggttaggcgatgtccccatatgctgtaagtggagatgcttctcgggggctcctcaatatatcggcgcgagcatatgcaggtttcgctttcgcgcattagagtggagggcgaccgcttgcattagctcgcattttttggctgagtttgccccggctctggacgtgggaattagcgccgcaaagtcctttgagatttaactcgcgagcggaatttatgcgaggctaggggaaccccaaggcgcatggtttggcctccccgcccaggtaagatagcggtcgttagggacccctggccgttactacgagaggtgggtactcccccacgggtagtatgttgtttgtcagcaatcataatttttcttcgcattttttccacccttgtgtttctctcatgagggaggggggcgcatatatttgaaaaggggcccccccaacaataaagaaccaaacgccttttccagtggtttaagaaggcccctttgggagatttataggacacgggaaaacacccccttttgcccatgacataaaacaaacaacagaggcatggcaacaacaaattttcatcacaagaagagaatgtgtagacattcccccggcggccaaataaaagaggaggagctggaggaattgctgatcttcaaagagagggcgggtgggacccccccagggtatgaacccacgacacctttatctgtctctcccccattatttgtgactgagaggcgtggtataaccatatttacgcgaactcttgttgttgcggctgtgattcactagattgagttgaccatctataccgagtgggtgttcccacgtctgttgtgacacaaattggatatatctccggggtccagca

SEQ ID NO: 418246 - DNA, 1316 bp, Homo Sapiens
agcgggtggggcgtctctgctcaggatctgtctcggaggggcctggcgctccggtaggtgtctcggtagtcgtgtccggagcatgactctgccacgaactcctgttgagctctacagtgataggaaaatctgtctctggttggaagcgctgtcgcttttgacatcgcttatgcgcgcgagcttctaggagagagtcatgcattgcagcatgagagggagcattcctgaatataggtggaggtgtgaggactaggggtcgcctgagcaataatgagcgacggaggtcgtcggtcaggatcgtatcctgttgtgtttcagccccgtgtgcaacttacggcattaatgggatgcccggttgatatcgtgtcggttagaagttggttaccttgtctgagtattaatcgcctctgggtgatgagatggatagattgtggtgagcactgagtcaagtgggggcgtcacgcttgtgggagtacaatgcctgagttccccatcgaattagggggttacgcacggagtgcacttgtggcttagctgaggcacgttcgaggagcaccttcaacacggcatagcatgaggtgggagagatttaagcctcgagaaggtgcacgcggaggacaccccggtagcagtgcttgtcgcatagaggagacgtgaaagggaagtcgtgaaccaagatagtgacgcaatgaggggggtttgagatgccgtttgcttagggcgcgtaataaggcgtatggttcgatacggaagtattgccgatggcgcgctcctcaaagaggtgactgtcacatagctcgggcacaggtccggggcaagtgtccattagatgtagagccgaggggggcaattaaagccggcatagcacgcgtagaagtgtccggaattgtagtttgggctcccaggtatccaccgaagggaaacacatgcgtgttatacccgacaacaagagggtgtgtctagaccttaccacctaacgacaagtggggggagcaatatatgtgttaaccactcggaataggcctttgttcgttcccaattgttgttccagcttaattgtgccaccacaatggcggtgaaagtggaaaggtcgtgaggagagagctcttgtggtcgtggtggggacgacttggacgaggtgttgacacatgggtgcgatctgttggatcaggagaaagaacgagtttgagggctccacatgggagtgtgtaatgcaccatggagaatttgtgtaggccacaggttataggggatgagaagagggtgaccttctgttttcattgcgcggatagtgcgtcaggggaggacacgcgacc

SEQ ID NO: 418247 - DNA, 1338 bp, Homo Sapiens
  misc_feature (1278)..(1278): n is a, c, g, or t
agcgggtacgtcgatctcccatgttggggtcacgaggctgtgccgttagccggggcagtggtttcggtgagtcccttgcttgccgtgtcatcgcttagctgatgcaggcccgcttcaggttagttgcgcgcatcgtcttgaggtccgtaggcagtacgcccggtctccgtgccggggctctctgggggctaccgcgctcgatgaaccgagatgtgggcagtcagccctcgctcacaaagacgcggtgtgtcgtgtcctttcatatgcgtcgactccgtctacatggaggaggcgcaagatttgccgagtcatatgacgttaaatcgaaggaagccctttactgtcttccatggacatcggatggatgaccttactggagcccacctttctccgtcgaaaggattgatgtcagccacgggcgtgcgagttccccgtggactggcctgttggaatcgagtaaggtaatgtgagaggaggctgcaatgtcactttactcagtcgaataggtaattggatctcgagactagcatcgatggccaaattgcaaatcctgagtgtatacacgtcaagttggatagtcgacaatttggcccaagctcgtgtagctcatgcaattcgctatgtcctggttatggaggttgggaggaggtacaagcaaagaaaagattttgggtataagctgaccgttggggggtaaatgcgcgcgtatgtaattggtccataactttgcaatgcgcagaaaaggctagggaaaaagacatggaaaggggttttagaaattgcgagacaaaggcgctatatctagaaaaagaggagttggcgttataaaaggaaaacttgaggttaaattggcgaaaagaaccaaagggacccttaaatttagggcttttaactaaaaggcacccagaggcgaacattaaattggcggaatatcaatatgtaaagcggaggtagaggaaccagaaatttttagaacaggtttttgttctggatcgaggaaaactttaaccaccccattttctgatcttgcaacggatagtagtgtggagagacataactttagttgggggacatttgtggaggtataacaacggaaaaggaacacatttccttggtttaaaaaactcgaaccgaatgtttttggattccagacatgcttttgaatcgccccttcgagtttggcaacggattggaaagatcgtgggacacccacggggagattgttgtcgccagaaaggtgggttgggaaaggttacaaatcggtgttcaacacacacncctctttatacagttaaataccgtccataagttgacgtgtgcaaaggaggggaatttttg

SEQ ID NO: 418248 - DNA, 715 bp, Homo Sapiens
agcggtttgcttctcctgagctatgtgtagtgatgtgctgtctacatcagtgctttgtgccacgggttgagcctgtggctctgcagcttgacgtctactcatgatcagcgatgtctatgctgatggaagggagcggcgtaagtggaaaatcgctggatatgtttggtgaagagcccctatgtaaggtgtgaattgacgttgaaaattgtatgtgggtgggagtgataagagggaagatgtagctggcacgtattgacatgatgttaacaggagtccacggaagggttggatttgagtcacgagacattgaaattgtagtgggagtggtgcatgcaggtgaagacttcattatcttgacataagatgttttaaaggttgccagtatataagtagtgtgaaagaatgtcagtgtacaaagatggggaaggtaagagcgtgaattacgagatatggcgtacaaagattttgtgtagcgattactgggtggaacgagtgtaaagggttagtgagattcaaatctgatgggactgttagttctattggagaggtgttgttgcaggacatatgtaggatttaaatctaacgattatatgaggaaactgggagtagttcgagatgtgccgggagtctaggaaacggaggggtaattaggtctctatcgctgaattagttagtcattgtgggacctttctgtttgcctgttgaattagatgta

SEQ ID NO: 418249 - DNA, 469 bp, Homo Sapiens
agcgggtgtgctgcccggggacctgcctgtccgtggatttcttgtggtgccccctcgcgcattctcgtcctccggcgtctgtccccgggatttctgtcgtccgtggacagttcgggtgcgaagtcggattcagggttggccggttgaaccgtggtggtcccttagcttcgtgccagtaacgggccgtgcctcttggatcaacgctcatgttcatgcaggcgtccaaggttggatcccggctcttttctaatgcgcgaggtgtcaagtgtatgcgctagcagttgttgtcttagcgcttacttcaccaccggtgttaagccccatggtggttgatgaggtcttcgagcatctgtaggcagtattgcgaatacacttgtctgtcttgacctgagtcttcgagcttcatgtctgctgggcttgtctcgcgcggacgcctgtctgttaagtactttgagtagcgagcctcgtt

SEQ ID NO: 418250 - DNA, 414 bp, Homo Sapiens
agcgggataaaattagaaattactcaacatgcaaagagacaggactgtaagactaacatttaaaacaagaaaatcatccaaattatctaaattttggaatgagcagacaattacaatgaagcagctattataactatgctcagtgaggcaaaggaaaatatgctcataatatgcaaaaagttgataattctcagcagataagggcaaatgataaaacccaatgtaacttctaggactgattaatacactatttcaaaggaatatgtggctctctcctaaaaattaaacttcactacctaccaggtcactgttgatttcatttgagaaacttgagtttgggtttctctaaaggaacatgtcatagtagaaagaaacagtcctgaaacagcaattgaactaaagatttagaatagt

SEQ ID NO: 418251 - DNA, 1152 bp, Homo Sapiens
agcgggctggcctcttcggagtagagagaatggcgctcgctggccatgtatctgctgcagcatgctgtagccgagaatagctggggacgagatctccgactaacgtcagtgtagtgcaagagacgaactgggtttggtgggagtggcgagggtggtggagggaggaacgttcgatgaagcagctgtgctgcacagtgtgatcgagaatttgtggcagatgaatagcttgcgtagatgccataggatggagaggggcaaggagatgatacgtaaggacgtagtataggaccaacgcgacgtgtggattttagcaccccagtacgtttatgacacggtgggtacagctagtactatgtcaaggcaatgcaccctaggtcagtacccactcaccttaagaggcacatatacatagtaattgtcttgcatcgagtcgtggtagctacacaaggggtcctgccgtatccatcataccccagtcgcgacctaccttgggtcatgcaacatgagctacgatccttgacgttcggagagggcaacgccactccagacgttacggttaacgggatcgcctcccttgtggggagtatcccatacgggaatcggactcagatcggccaaccgtgggtgcccttcacagtacaggtatgtcgcaccgatctacattggacatatatatgaagcacagtttagtgtgcataacacacacctttattcgtgccgtccatcgggttccacacgtaagtggacacttcgcccatgcgactatgggttaagcagaccgctcataatagtcctggttaccagcgccagttcaaaatctcgcagatccaccgaagcaactgtttcaatcccaatgtcgcaatacccacggttggtgctgaacgacacccattggggatgaggccccaatataatatgtccgttgcgcaacttacgcggcgtaaagtgcatgtcgccagtgcccaagtgtcgccgcactctacggtcaccagtgtggaatgcactgaccccacacataatgctgtttgtgcattggccctatgtgtgactatgacgccgtcgtcgccccccatttataccgggcgtaaagatgcgcagcccccacggccgccgggtgacatgtccaaccacgtggctagtgtacaccacatc

SEQ ID NO: 418252 - DNA, 948 bp, Homo Sapiens
agcgggctgtgcctcttgggttggccgtatccgtggggtcttcgtcgtcccttgtcaatcctatgtcgggcctgctgcccgctggcggaatgtgctcgcatgtccccgtggtcaggatgcgtgtccgtggccctggacgtcgtctaggcaccctgatcatctggtccgggcgggggacctctagatgacggctcgggacgtcttgcatgtccggggcttgagttgcgtcgggcgtggattcctggtaggcgttgcacagtttttccggatgttgatcgctgacatgcgctcctctctgtgcaccggttggaagtgcgcagtccaagcgacctgatggttcgtgtgaccgatactttgaaaacctcgtaattggactcaggagtttggacgccgtggaaggaagggccttttccaaggtacaaattacttcagttttgatagcaaagtaccgtgggcttaccacgcggcatttggcaacccagataagttgcgacgagtttgactccatcgtgccccaattgcatagaacgaccggacactttgtgcgggctatgcgtagaagtttgcccgtagaagtaagttacacactgtcgttgcccaagaacgcttcaaattggtggtatcgcaatccaatggaaagcactgtggtaagcattttaccagttatgccacagaattaaaggtacacgggcacttcgtactttatttgaaccacttacacacgggtaagttcagggaccgccgctaattgggtctttttgccttggaccgcaacagacggtgacccttcgacgcattggaactgggttgaaccggaaaacttcgtccttggggccatgttagagggtgcgacgacactattttcgtatggggccagtattctttgcgcgttggagcattcgttggagcgcaagaaagcgttggcattccttcgagttgggaacctgg

SEQ ID NO: 418253 - DNA, 1472 bp, Homo Sapiens
agcgggttctgtgccactcgtcgtgatggctacctggccatgcctcgtcttccttctgcgggtcccgtcgctgcacttgtgggacatcgcgtcctacgccagtgtgcttcatgcttagttgagagccatccatagtaattagtcgaagatagcgactgaatcgttaagcagagtctacaggatgcttgttcatcgctcgtgtcaaagagtcgcagactagctacgaaacgcctaggtacgttcttcgaatgcgagacagctttgccatctcagtatacgtcggtgcgagggtgacatgagccttatgcgtagacggcgacattcatctataccatcctttctagctcgcgagggcctaccggtgctcaagctgcagtcgaataaggcgccagcccgttcaaggactcgcgatattgtgttgtgcacacacgactagccggctatgtacaaacaatactatatcgttcggtcacaccaccttggcaacagttaaccgccgattccaattgccagaagtgtcatggctcgattgactctggttgactgtgcgcactcccgttgcacatattgtgctttgcgagacaacacccattgttaggtcgctccattcaaaactttggaactctacaccgaggtctggaaatgggtaccaacactccttgagaacgttagtctcgttgggaattatatgaccgaaagtagacgagcgcgatttgggacaacttggggaagttgtccggttccccttattcgtttgaagaaatgtcacctctatacgttacggcgtaaaacttggccattttgcggagagcgagacaacgcaagttacacccgtttggaccagttattggttgcgcttaacacaagtttgcgcgagccacagacgccatgtcctgtttcgggacccacccttagagagaccactttcggggcacattagaccgagaccggttacaactttaaagcaagggcgacacagccaaacaagagggcaaggccaaagagcactttatttcgctttttattccttagtgtgttagcataccctaaatccctttaagttgcccccttggaaaggacccatttgtccatttcccacacgaggcatatcgacccgaggtacacgctcactaggcacatcgattagggcctttattccttatgggacgcaaaaatgtgccatagcgccgcggttttgcgaagcatgcccacccaattggctaggttcgacacagagtccctccccattatgggcgaagcgcgtatgaagacttgcgcgcgcgagttaacagagtcaacattggtgggaacaacgcgctgtacagattgcaaagactgcccggaatgttatagaactgctaacagggggcgccatatttttataaaagcgcgctaagatagtttgtgcctttttagacacacttagcagtgtgtaagcccccaacgtgagtacgacccaagttttcgacgaa

SEQ ID NO: 418254 - DNA, 861 bp, Homo Sapiens
agcggagctggttgacgttatccaggagaatcgcgttggactcagggaagacctgcacaggatccggttgttgctgggtccgagggctgtagggagtggagaaagggccgggaatcgttaagcggggtctgggagaacgacttgcagattcacatttcctccgcccgcggatgtcctccggggaattgaggcttccttcctcagctgcccttgtttctctctttgctcccgctgccccttgttctatttcgtttcttactatttatgtagtctcattgcttgcggttataatggccaccactttattgagcattcactgtacaagcatctcgcagcaggcgctcataagcgtctggcaattcttggccactgctggaagccccaatcattcttttaccatggaagggatttgagagcctacataatcctgtactctaatagccacatggtactcttggggctaggaagataaagtagaaacttgaaattgctgttgtacttagttttctgaagctgccataaccaagtacctcacactggatagcttaaaacaacagatatattttctcgctttctggagtctggaagtcagaaatcaagatgtcagtggggtcttgcttcttctgagactctggatagaatccttcctgcctcttcctagcttctagtgggagccagcatcatttggtgtactttcgcttgtagctgcattactccattctcttcctctgttatcacatggtatactccctgtgtgtcctctgctctgtgtgttataaaggacaccagtcctgtaggtaaaaggtccccttactcccatttgacccggtcttggctaatccctctgcatgccctctttca

SEQ ID NO: 418255 - DNA, 1131 bp, Homo Sapiens
agcggggacgtgattctccgtgccctgtgctactgttgccactggcatacttgtggcacgagtcagagctgtagtagtgagtgctccgcgtgggttgcatgctgtgtcgcagttggcatgtgcgctgtgactcgagactgcacgtctgagtgatctagtgagaggcgcacctagcgtgataggttcttgactaaggaatcatttcacgtctgacgaagcgcacggcagcgctcgtctgatccaaagatgcaccggcagttggacgtactgcctggttgcctggttgcggagcgaagtacaactgatcgacatccagtagaatgccatcggtgcgtagctcgaaggtagcatgcattgcaccgaacatggagtcgacaggcagtgacaccaccgggaattcacggtcttcataccttgtgaccgatggcggaaacgtatcgggcttccacgggaagtacgaagaaggcccttaaacgatactgtccgcgtggttggcttgcatgaccagaagtccccaggaacatagccagtgccacacggtaactttggcaagcagtgctcatattgaccaatgagcgcaatggaaggaaacagactggacctcggtggggcaattgggccaattcgttgcggaggcaatggtccctgtcgttgtgagcgggaccttgtgccgcgcactcgattccgggcaacattgcctcgtagtcccagagggttccgaagcattcccgttggaatttgcattcaccagcctgtggatgcccccacctgtggatgaacctgctcccacgcgagaggggccctaggtcccaatcgcttcgctttgttccttttctccttgtttctcccgcttgccccccccgggtctctaatctctactggtgggccattccaggcttaaattttcctgactccccccttggaagaattccgggtacctttcaagacccccattccatggtggcctttgggaattgacgttggttaacattaaatgcgggggtgctggtggggcttggggacaccgacaaaccaaaaaaacacacccaccaggggcctggaaatcacgcccaaaaggggcctagaacccacacaaagaggataaccccgggaaccgcttcttagtgcccc

SEQ ID NO: 418256 - DNA, 632 bp, Homo Sapiens
  misc_feature (123)..(171): n is a, c, g, or t
aggactcctccctcactcgccggcgcgctcgcctcctcgctagatggtgtgcgagccgcccgagaattagacacactccggacgcggcaaaagcaaccgagcaggaggtgtagtgtggtgccnnnnnnnnnnnnnnnnnnnnnnnnnnnnnnnnnnnnnnnnnnnnnnnnncaaaaacaccgaaaaacaaaaagagagaaacaacacccaacaactggggtgtgggggaagaaagacagaaaagaaacccacccacccaccaaaagataatggaaacacgtgcaaatgtatcataggagcaatggacgacgaacttagccgctcgaaatttgccgtgcatataaatgcgtgacagagtcaactgtgtccacgagaggatcgtagaattacatcgcaaataagacggatggtcaatattgcacagtagacacgtaatcagaccgccttgtgggataagaatgagagagagactcatatggataccagacaaatgtccagaccaaatgagagacaccaattccgggagtcttgctgaactctgaacagagtgattctggatggagtgtcattgaaacatgtaatgtgtcaactctctagacaaaatacatcaatagacacccaacagaaaaaaa

SEQ ID NO: 418257 - DNA, 1566 bp, Homo Sapiens
  misc_feature (513)..(573): n is a, c, g, or t
agcggacttccagtcacgtgactacgcaggagctggctggcctgctggctcaaactggatcctgctgcctgctccagaagataaatgcctggcaaacgtaagcaacggggcaggatacatataaagcctgtgacaatgtccgacctatcctgcgatcccgatgtgagcttggaagacaataatggtaggagcagaagagcacgggcagagacgaagcgaccgagagaagaggagccaggcagaaccccatccacacaatccaaatcgacgcccaaaacccggaccgggacggagtgaaccgagtaagatcgccaccggaagaccacgcggaagacccgaaggacacccccacagacaaaggaaaaacgtaaggaaggactcatcaccgggcccaatacaaagaacaaacgagcgagcccataagggagccaagtaggaggaagctatccagtccaaccggcaaagaagcaaccaaccagtagaaagacgcaatgggcggaccaaccgagccgnnnnnnnnnnnnnnnnnnnnnnnnnnnnnnnnnnnnnnnnnnnnnnnnnnnnnnnnnnnnncgcaggaaagagagcacacacagcacccaaaacgccgggccccaaaatacaggcacgcactaccacccaaaaaccataccccggcacagggaacacccccaaggacgaaacagagaacacagaaaggcgaacgcgactccgaaaacagaggagacaacccacgggcaaaggcccgcataaaaaagaacacacaaagaaaacacccaaaacggaggacaccacaagaaaaccaaagacacagaatcccaagagagcggcatacgagaacacaagaaggaaagcaagagcaacagcgcccaaaccagagaaaaaaacaatccacaaggacacacaaaaccgggaaaagcaccgcgcggacagacgaacagggcaacgggaagagaaacaacaaagagaacaataccgcaccccgatggcagcccggaaagagcgaaaagaacacaggagacaaaagagcagacgacacacacaaacagaatcgacgcgccaaaacacagccacgagatgaggcacacgagaccaccaagaggcacaaagaaaacgaaaggaacacaaaccagaaaaacacacagaaacaagcagagggcaaacaaggaaaaaagtcgaagcaggcacagcatagaacagaaacaccccaggacacacaagaaacgcagaagaggagcacccgccgagtggcgagaataccaacgcacaaataagacacaccccggggaaacgcaaacaaaccaagggggccccagacaggaagaccaccgcgcgcgacacaagtacacacggaggagaccgaacaaccaagcaacacgcgccacacacaagacgaacaagagacaccatagtaaacaaagaccacacaagggacaccccccaccaacaagtggagacacccaaccagacaaaagaggaaacaagcgagccaaacaacgacacggcaccacatgggagacacagacccaatgggcgagcgcgcaaccacaaccgacaaacacgccc

SEQ ID NO: 418258 - DNA, 772 bp, Homo Sapiens
  misc_feature (88)..(264): n is a, c, g, or t
  misc_feature (367)..(400): n is a, c, g, or t
  misc_feature (403)..(413): n is a, c, g, or t
gaggcggggtctcgctctgccacccaggctggagtgcgggtggtgtgatcttggctcacggtaacttccacttcctgggtttaagcannnnnnnnnnnnnnnnnnnnnnnnnnnnnnnnnnnnnnnnnnnnnnnnnnnnnnnnnnnnnnnnnnnnnnnnnnnnnnnnnnnnnnnnnnnnnnnnnnnnnnnnnnnnnnnnnnnnnnnnnnnnnnnnnnnnnnnnnnnnnnnnnnnnnnnnnnnnnnnnnnnnnnnnnnnnnnnnntgagccacagtgccggccctttcttttatcttttcatttaatcccttcatttagttcagtgggtctcagccctgttgatacattagaatttcctaaatgcttnnnnnnnnnnnnnnnnnnnnnnnnnnnnnnnnnngcnnnnnnnnnnngtgttgggaaatggggtctgtctctatggcttaggcgggagtgcaggggcacaaccagggcatacggaaaccccaaactcccaggctcaagacagacctcgtggccctaagcctccatgagtgacgggaaccacaggtgcaaatggccatgccgggcaaaataggggactagacatgtaaatgggctcacaaaacattgccccaggggtggcctatgaacgccgggggctacaaggagatcccaccgggcctggggcccccagaacgggtggaggatacacaaagcaggacgccaaaccacggggccacgcatttgaaactcaaaacgcgtcgtggtccccaggggacgacacaggacc

SEQ ID NO: 418259 - DNA, 1094 bp, Homo Sapiens
agcggatggatctgcgcgcggaccaagcgcggacgcgtcgagtctaccgccgattggactgatagacgcccggagctttgtgtcctcacgaaatgactctgagagcggagaaagcgagtcgacccagacgagggcgatgaaagagcgctgagaacgtgtgccagacatcataggtgtgaagatagggatgccgaccggaatggattggtgcaaagtattcgatgtgaccatttgcgccatgtcatggatacatcttaagctcgatggaaagagtataagtgatgcacacaaataccttggccctcgatgaaacgtcacgggagagctattgactcagaccagaaagagtcgttcagcttgccaatataagacattcagcttgcctccgcagactagatagtactagccgcccatacaacgtgaactccttcgcgggtgaagtgggcttggcacactggtagcaggcacttcaaaaacgaggggcatcgacaggaactttcgcttgagcatggatggcctgcaatcaggttctactggcagttgactctcctttgacagcatgtccagataaacgagggccggatagcaatcacagcgaagagaccgagaattaaaaccccgttcgatcggcaagggcgatccgattgggaacgatatcacgacggagtgcggtctcgcaagtcaatgctaggtgcgattcgcacccgacgggattgggaacggtacgcaaattggagcgcagaatattgaaggcgcggcacacgagcatcgagacgaacgtgtgttcggaacgactatacccatttgcgcgcttgtggcggttagcgggataggtgaacagcgatggatttgtacagactggaagtgcgtgaaaaacccatatgggaagacagaacaataatgaaatgatgacgggtgacaaacttagtggacaccacacgcagagtaattaggcatgggcctgtgcacgctaggcacaagcgaattgagagtgaacatgattctaagctaggagggctgtcccaatggggggacaacactaaaagggcaacagaatcctaagtgagaaagtgggccccagtgcgcaggtatcc

SEQ ID NO: 418260 - DNA, 1670 bp, Homo Sapiens
agcggaggcgcagtgatctcgtgggtgcgtagcgcatggttgcttggaaatcgtttgttgccttgcgagacgggcgcgtgtgtgtgtgcgctacaccaaagatgccgaaggccgactcagaagtgcagaatcgaggtgcaatgttgtctcgtgtcccgaccgagattagtgctggtacattgcggagcataattggacatcaggcaagtatagagagtcgaagcgagagaggcttacttgaagtggcaaatcagttgccatacgtgaacattgctcatggcatccgtgcatcgtcaccattaatgcagggtgatattattggcatgtggcctgagcgtggtcaagcaattgccattcacagatggtcggcacaatgctggatagaactgtcacttgaggcaacagagactcgctgtagcaacagaaaggtaaccctagcccaaaaattcgactaagtcagtaaatcttagcgatcaatcggcgccaatagattggagaccccagactaatgcatagtgtacaccttaacggacagaagggaagggaagtacaccgcgacagttagattcgtaacactctggaacattgtacagagttcaagaaggtgctgacgaaagttggcatagaaacccagtgtggcgccaaaataaccttaggctgtcgccacatttcaggtgttagcattgtttaggcagaaaatagccgaaccaggggacgagagcaacgggtgaggtccgactgtgacaacaaggttcacctgcctattcggtaggagaatgttcgcatgagactataactctggacattgcagacaagagggcagattcgcgccgacacaaatggtctatatttgacacgggccctgttaaggagctgaagggttcagcaaatcatcgtgcttgcatctgtcggaaagaaaagatttgtctagagaaaactccccgtatgggagaggataacccacgtacacgaggagatgttgtcggagacatttccgatcgaatctatgcacctgacacgtctcccctggtgggcatggtgctacacatttccccctcctgtggtaattggagcgtgtgacataagtagtcggactacatacagcccactggacaagtccgatgaaacggtgtgtgcttttacacgacgtaccaattgcgaaccaaagatcgtaggcccaatattgtcatccacctgggagagcataacgaagaaatcacattctgcaattcggttcagagacaagattgcaaacgcaaacagtatctagtaggacccagtgaacagcatcacagacaaaagcgtcgttagaaacaagaccagatataggtagaacctgagcgtggacaaagtggtacccaacaacatgcagagaagcaagaacatttggcgagatctaaccccccggagcacgacaccaagtgaacatggcctcgaggcgaacagcgatgaataagagcagagacaagagcaacacataaaaggcatacagcaagagaatgcaccaggggtgaaaagcgaacaagacaagatgacagagagagacaacaccacccaccagataagcaaacgacgagcaagtgaaaacaaagaacaggaggaagcaatgtaggaccccagagcaacgccaagaaagcggacacgccggtcggagcaacacaacgtagcag

SEQ ID NO: 418261 - DNA, 964 bp, Homo Sapiens
  misc_feature (363)..(363): n is a, c, g, or t
agcgggttggcccggggtgggctccaagtggttctgggctggagggtcacgaaggagggacctcgggcgaagctgctgtccagtgggacggaggcccgcggtgaagtgcacgtctctggacgccagcgagagagtgagcgtgacgtggtcacaacctgtgacaggaggacacgagagtggaagggaccaggcaggccgtgccgtacgcatagattcccatcgtaaggatggcgtgtctgcgtgattctaggtagcgagggatgctggtcagaactcagagtggttgactgccaactaccttcgcgaacgatgtgtcacccaggaatgtcggatgctgtttgattctattggcgctacctactnctcgagtggtaaaggatccttcttagatgagaacgtggattcgtggtagaccgatggagggaatggaaggcgtctctgaatagagtcgcgcgcacttgcgtatcgcaccgaaatgtgacaatcatgccacacagtgaacattgtaccccatggtgttggttagacttgcggtgcgaaggaattcggtcctatccaagcaatgccgtttacgcaaatcggtggattataagggggtgggaggactacgcgggtaaggctataagaaattaataggcggtcttaccattcgtgtggggaattggggaggctgcgaccaggcactatttgattacaggcattctggctttttgtaggaaacagataagttttctaatgtaaaaatggttaaacgcgttgtgagaagtctggggggatccgttaagccaactgcaatcaagaaagacgccgtaggtacccatagaggagcacctggcgccatcatgcgtagaattgaccatccgtcagggctcgtttggctgcacatccggggatttggttggcctattccatgctgctttggcttgagggatggtggggtcctggcataacagtcttttccccg

SEQ ID NO: 418262 - DNA, 825 bp, Homo Sapiens
  misc_feature (318)..(318): n is a, c, g, or t
agcgggggtttattttggttgttgttgtccttcagggtttttttaagattttacatcacagtgaacatggccagaaataatttaaaatgaagaaattaaacaaaataatacctgttagaaggaagacactaaagtgaaagaccagtgttgtagtcatgtttctacaaatagaagttatacaaaaaagtagtcaatacattagaattgaggaaaaaaatggtcttctgagctagctggtttacaagaaatgattgtgacattacagttttatctaatcacacgtgtagaatttagaccgtcatcaagcctctgcacagntcgaattcccaaatgtgccctaacaaagtgagctatacgtgtcaatttatgtggccccatttggcctataagtggtgaagcctacgtcaagcccccaatttatatctcaatggccccttagcccaacagtattcatacctgccttgggcctaaaccccctttgtctatggggaacttccctcccagaaactggtccttcccatgttgggtcagttttcgtgttagagaagaacttggtaacctcaaacaatttaagtgccaaagtcaagtacctactcgttaactattcaaaacgcccagtctcgtggccgtggtggctaatctgtggaaccaataattcctaatccccagtcctttaaaagtcccctttgggccccccgatccaaggacatactacgaaatttcgtcacccatttgtccataaaagttgtattccagtgttaaccgggcctccataggggcgtttcaccacaatcttacacaaagttggctggactcccataacaa

SEQ ID NO: 418263 - DNA, 1099 bp, Homo Sapiens
  misc_feature (274)..(274): n is a, c, g, or t
agcgggataagtctaccggtactgcgtcatggtggagcatgtgagaatgcctgagcgagtgaggacggacctccttcatcagagatgaggggccggactggatgaggtgatgattgccctaacttcagaggctcatctttcaaaagctgtaatgcttcaatgcctaggtgtactatattgatacgattcctgctactaaccctcgtggaaaacttatgctttagtactgtgtcagtccgacattggccgaggagatattatgggcggaggaccntgttctctccagggagcttactctggttaccgatgcgacttatctggtgccctgtagataactctctagccgggacatacgggcttgcacctactcatccagttggtcccacgatggggcaagaaattggcgattcgtctcttagaaataggaagatggcatcgccatgacctatgtagcttgtggcccccaagacattgtactctaccaagaggaagggttcttaagcttgtaggcttctgtgcatcatgataccggcccataaggcgaattctacttgtgcggttcgattgattcgatacttaaagtcaacctcgggactgaagggaaccaatagcatacagggcttccgtggcgcatgggacctagtaccccattaatgccgatggcacacatcctaggggcatgtaatgattactttcgggaagtagtgcacccctagatggttttgggagtgcgcacggatacttttgggtctggccaggcgatggaaaatcccccccgagtaccaaggaggctcttttgccttggagaacacgtatgacgcatggggtcgtaaactggagaagtagcctctagagagtggaaccgcgaattattaggcgtggattccctcgcaagttggaattggcattaggtccttggggagcttgtggtcgcaccccttttgctgagaggtgttgccgccttgacatgccgaaaccggttaatcccgttctgcgaagttgtctttcacaccatattacaagggttgaggaataccaaggtgacggacacgggcccatctcgatcccgttggtagctaggattcctccttctgcaagg

SEQ ID NO: 418264 - DNA, 759 bp, Homo Sapiens
agcggagtgggatcaggcagaggctgcggagtgagtgtcatgaacgtcatggcggaattcagcgacatgcgcttgagcattgggggactagttgaacgagtcgtggtagacgatgcgcctgttgatccggagatcatcatggaggtgagctgcgatgtgaccctggtgcatcggcggcaattgcgtctttatccgcgctgggagcaggcaaagtcagctggagagacggcgttcagggaccatgtcttgcgccgcagtcagtcataaggtattatggtacaatgatggatcattccgatctgctggtgcgttcgttgtttatgctgactgtgtggaggaggtgtgctgatccctggaagctccttgttggcgtatgaaggattgaagcatgacagcataggtgatgatccagagagtttatcagtagaacagtgtaattcgtgacagtgaacactggggcagacaatgggttatactggagtggatgtatgggagacatggtgttcctgctgagggacagcgcgatgacggaagtaggacaataggaatatgtacttcctagaagttccgacatccgggcttggacttggtaagctgacggtctggagtaaagaagaaaggcctaagtcgaggggaatcgaagcagaccgaagtgagtaaccacccttgttccttggatgcaagtgggatcggtcattgactgcaccaggccagtactgcttccagaaggccccatgtggacattatatgtcgtagtca

SEQ ID NO: 418265 - DNA, 1069 bp, Homo Sapiens
  misc_feature (363)..(363): n is a, c, g, or t
agcggattggggcgcaatacccggcgctcactgggtggccatgctagaagatgtgctcgtgcatccggcggaccggtgggacccgctccgactgcgagactgtcgagcaaccggcctatgcaagcggcccgggtgacccgcagggtccgaagacctggacggccgggcggagcacgacgaagcgcagggacaacaaggagccgccggaggcaggaggccgtcactcaaaggcttaggcgtcagtggaggttcggaggagtcggtggttgtagccgtccgaggcgccctacacacgaccggactccccggagcccgtccggcagccgtggatgacgtagtgtgcacctgaagtctggcatgtgntggcatactcatgtcggcgtgtacggaatgtcggggggcaccgtgaaccgtaagccgcaaggacttggtgcccgagggtctctatagcacggaacgtctatcctggacggcagtaacatcctagcatgcagaacagccatgtctgagagggaccaggcgtggccactgcatggacgggtacgtgcgtgcgcttattgaaccgtagatacccatatgccacggctaacgcgcatgtgtgagaaattcacggcagcgccacgttgcttctcgttatcgggggcaaacggcatttctagatgtaacagagaagtcctgtccatgtgcatactgggcataaatacgctacaaccagtataggagtgcaagtctgatgacgcataccctggagtgaattaattcgctgtgcacaagtgaacgtggcagagtaaggtcgccatgaagaaccgcttgggccgcgttgcgtagcgagactccagagtaacaattaaaatccgcgggtcggaattggctagcccatgggccgtacccccagtgatacctccgcattggctcgaactgaatgcggctaattgaagactttcaagggcgcctactggtttccacgggaatttccatggcataggagtttcacgtaccgggaaagggagtgctcaattcagttgggaaggctggaaatgcttgcggggacaccgaattggtgtcccac

SEQ ID NO: 418266 - DNA, 948 bp, Homo Sapiens
agcggggtgtgcagtgcgttagcagggactagggtgggtgtggagctgcagcgtatcctgtggcgcctaggatgcagggcctggtgctagtcctctgtgattggagccctactcgggcacagcggatggacagaagacatagcctagtccccgcgagaggagggagctctcgcgaagatggcggacacggatgatgggtgctgcgtggtgagacggagagagagatccgtatgagtctcgagaatgtcaccgagtgaatcaaagctggcagcgggtggtatcctaagcgtattcggcatatgatcatgtactcgggagtgctgaattctacaggtatgatgctctcaatgagtcagagctgtgactcgttgatttcctactcaaggtgtgggcactgggttcgtcatcggtcccatctacgactgggagacgaatggagagaagaatgaattccagtacatacgagcgcggtctaatctacctagtgacttaggaatgtgcatgaacagttccccgaggaatagttgacactagcgcgtatcgcctatattaaaggtgcacgcatttccatatgtaccaacggggtggagaataagacacgctccactatgaagaggaaagggccatactcaagatgcaatgggttgacgtctgtgccctctgggagtaagtcgaggattaggttcacttgaaaagaaatagcaatatagctcttagcgggccgaccttaagtacaaaagttcgccgatgagcagcttgttaggaagaagcatacttcgttcaattgggagtagaaaatataggttctagctaacttagagaggaatctcgcgagaggggactcccctaatgagaaggttgcgcattatgtaacggggtgtgcagaattacgcgccggtcgggtgacgattgtggagaattatcgtatggacaacgcgaaatgaaatc

SEQ ID NO: 418267 - DNA, 1139 bp, Homo Sapiens
agcggaggacgggagtggaccagttcaggtccctagggggaatccgtcgcctccctctgagccgtgctatgtcttcgcctccctattatcgcagattagtcccgaggattacgtccccagcttccaaatcaggaggatcagaatatgtctcagtgattaagtgatcacactatgactgcaagagaacagtcctggagtgcattgacgcctcgctgcctaggtgagagctgacacgcaagtctggaaccagtgatgccggctggaatggtttgacatagagacaggcatgagtaccggagagtcgcccaggaggctccctcagttgggtctcatgggccccacactcccctcggaacgcctattgccccgtggtcgtctctgagcccgcttcttgtagtttcgtggccggcggatgggtagcggacctcgtaattgccatgggttggatccacgagtgcctcgtttgggtggaaaccgcatttttgcgctcccctgtgtactggagtgggtgtccatggagggcctcggtctggccctctgggtccactcccgacaggttgtcccctgggcagcccgattgcagcatggtgtgttcgtgaatcaaccggaagaggacggggtcgtacgtctgcctgagtgcgttctcctggaccaacccggcagtggaccggaaagacttggtcgatgaccaaggcgcatatccttccgggtgcttcgcacgttgctcccaccttctttcttgtcatgctcgtgtgccatccacgctaggcaccagaacttttcacgtattggacatggacactttcgtgcaaggcgcaattgctacgtgcctgatcgccggaaggaaaatggggtttgcccagatcttatcttcggcctccgcattaccttctattttaagtaccatgttactacacttgaaataatattcctcgggaacgcgcaaagtggggttggcgtcaggcatgactctcgcctcaaagcagagcctcttggcgagcacccccccagtgccgtatggggagggctaggaagaaaggtaggaacttcgcccagtgcgaattacttggcgaaagacttggcaacaagcgtaagcgtcccactccccaagtatttgtggggaccccataaactccctg

SEQ ID NO: 418268 - DNA, 1182 bp, Homo Sapiens
agcgggggagcagacgtgtggctctagtgccccgtggaggtggcggagcacgagctggcggcacaggcagtgatgtgattgacggcgcgaaatgtagaagctagcctcgctatggacgtcgcccgggcatggagaggacgtcggggccgttaggggccctggtgcaggcggtcgtccccgtatgtggctcgctgacagcgtgcagcggcatgaggcgtgacgatgcgagacggcgttggtcgtgtgagacattgcgggactccgaagacccatcgtccctgcttgtcgcaacctggtgtcgcggttctgccgtgtgcgagctgcgccgggggcgcccgtgagcccgtgctctccgggaacgcgactcgagcctgtcgcgaggccttgcggtacccggcgggtgcgcgtcggctggccggatcgctcgagtgttggtgtgtacggctaggctgagccccggaggtctggtagacggggaaccgatggcagcagatggacatgcggaaggcgcatcctggcgctgatgcactcgcctgtcatcttacgatcacacgaattccttgaggtgcgtccagacgagggtcgtggactttcaaagcaagcacaagaacgcggtgggatcggtagtcataaccagcggattgacggcaatgtaaggctctcactcttcatggtgctgctccaccttatcctatgaatgagagatctcggctactaatttgaccccacgaacttgtcagatgccagggcgggtactgggtactccggtgcgtccagctggtaaacctctcatggccgttcgtgtgggtttgccccgtgcaaggcacgtccctttgcgcgttcgagccgcatcccgtgggcacttaggcttcggggacatccgcaggggacacgcgcctgtcaaacgcctgtgggttgttacgcgttggggtgattgcctaggggaaggggggactgcgggtggttagcctgcccgaacgcattgggggcgcgaaggggcactcgggtttcttcccacttcattcccttgttcccccttggtggagtcccgggcccgaaccgtctggcctcctcccggaataaggctgcctgcggggattggctatgggcgattgtcattcgctagccattgccctggtgccttccgaagggtgcccaccttcttttgtcggttggccccgg

SEQ ID NO: 418269 - DNA, 1138 bp, Homo Sapiens
agcggacggggtcacagggtacggtaatatagcaaactggacttacgtcgaccatgctgtaccgggtgggacttgccgacgccgcacggaggccccctctctaaagaatgcagtctctccgtagggtccagggggtagtagcgcagggcaagtgatggatctctatcctacagggtcaggcgagagcgtgggtatcctgtaacacaggccgtcggttcactgagatagcgggcgggaaagagttcgcgatggatcttgataccgtgaggaatgcttccagattcttcatgcctacgaactggtgtagcacggaatccgctattgttggcttcgggacgacatgggctggagtcttggttaccgtctcccactccggaggaccagtgactatgtgcatgagacgtccagaggatcgctcttctgcgtgggcgcataatccagggtagcatgacgggtgatcaaatggggtacgtaatgggagaattattggccaactggtgggtcccagtttggtctatgcaaggagctattggtcgtgtgatgtgagacatccaaggtgagggcagtagacaacgtatagctctcgacacgctaaggacaatgcagggcggaaaggcagagagcgttgtgcccacttcgaagggaaagcgagttcccaagagagttgcaaagtcttggagtagccgtgacgaaaacgtcaagttgcccgttgggccgacctctaggtttacacggaaatggcggccattgtcgacgcactgttttggggcactggttgcgtcggacaagggacagttaaaaacccctcacgagcgccattcgggtcctatttcgtggcacaggtgattaggtgcaaaaccgggggaaaacagagacgggtgaataagccacgtgatactacagtgcggaccccgtccacaggacactccagccgtggggccctgaatccagtaatgaaactcggtgaccggaccaccagtgcacttgtggtcccgcatacagtgcaaccaaggaaaacgggggtttgacacagaatttggtgggctggggggatagcggcgcatttgtggtagcagaaaggcttgcttgcccaacgaatcgcgagggaaaatgggcaagatcgcacttgggccctgaa

SEQ ID NO: 418270 - DNA, 1466 bp, Homo Sapiens
  misc_feature (687)..(687): n is a, c, g, or t
agcgggctggtccgcgcgggacagcgatcgggtgcgggcgtgtgaggggtcgcgtttcgactgactgcaagtaccaggcacacgggcctgggtgtggggcgccgggagtcgcgcctcggcgtgtcatcgcgggagtggcaagggttgcagggctcgcgatgtgacagtgcgttagcctggcttacgcctgaagtgacataccttgcaccgcggttgaccggatgggtcctcgagagggcggtcctcggagcgtgcattgcaccagtcgtacagcactcgactcggcaggggtaactagtgactaggacgaatggctctgtgttacagagggtgcgcagaatttgcaaggcttatgttctatcgcgtttgtatccccttgtatacagatgcagtttttcggctgactcgcgaatatccccagcttgtctattgtttgattgcatccttaaacaacgtagaggcgcgcacgaatgaaggaaggggggttgaacatatcctaggagggttggcatagaattcaatcaagctatgatcagcgttgagatccttgcgcggaatcgccgttacctcaccatgtggctagtcgtcccacatcattgtgaaatgtgctcgtgacctagacagaagtcgtgagacagacccgacagccagtcaacacccaggacccagggagatgagtagtggtcntggacgatttgacgttgacgacgagagccagtacaagtgctgagtgtgcagccgtggcgtgggacactccgccagaagacgagacgaatttaaaagggggacatggttcgtattggagtgcgagaattctaggcaactcctttttggtattgtgacctggagtggaactttccccgggaaaatacccacggtggtagtgtaccttatcatgtcaaaacccgtttcattgccccacggacttgcacttgaacaagggggcgggacctgacctgtggacggagcgttctcatgtggggaacctgggtgcattcaacctgccctgtttggtcctcccataaaccacatgaccacgggcgaagcacacgacgggttaaggcccccctcggtcgtgcccgttctcttgtacaacgtgttgtccccatcttgaaagccccccattggcacttttgcccaccgaaataccgtgggtgacgcgcaatgattgttgcctgcaagggaaagggaaccagttcacttcatggacctgtggtcccaatagtgtgggaatagggcgtacaacatttcacccagttgataatatacatgcgatagatacacaatgatgtgtttgtgggccctgtcgtcaaaataaagcatatagatcctgtgtggtgagacgcatatttatgagcaagtatttatccattatcttcatgaaaccaggagttagcgtggatacaggcgcctgagtgggcgggacaaaaactctctacgaaaggagattgttcactgcaaagccg

SEQ ID NO: 418271 - DNA, 1456 bp, Homo Sapiens
  misc_feature (1312)..(1322): n is a, c, g, or t
agcgcctcttctcctcccggacgtgcaccgtatgccgagaggaacagcaaggcgcgcggggaaaggagggtgggtccggccccagttgtcggggaagaagcacggaggctatcagagtggtgaatcctccgtggtatgagaaaaggtgctagagcaagtttaggctatttggtagctaggcacagtccagtcaccattaataggagctcacccgcctattgtgaaatggacgccgttatatcaggttgcaacgtgccaacagccatcctctatgagcggctgaaactgcctccgtgcgtattccccagttcaacccaggtcgccctggtacccgcgctgagcagactaccgtgcagccatgactttacgacatgaggcgccagcaagttgagcaagacacatggagagcgaaagcaagtagtaaagaaaagcagagtacctagtggggacccgagggccgagaaggacaggactggctgcgtgacaagggggatccgttgccagaccgtaagtagatcccattcctggtccctgtcgacgcgggtagttagacgactcggcggcctactctgtggtggggctagatcaatgaagaggcttcaagcttgtggttgcgtggagtattgcgacatcgcactgtcgcgactctccttttcggtgccttgggtctgtgcttctatgccgtggcccctgtgctcgtgatctgtgcggggggtcccctttacgtgcaatttagttcttggtgggtaccatggcaacgtactgtgggatccgatcatagttcctaagagggtaaacaacccttgcatccctagatgcttcggcgcttcacactgaggttgaaacgtcgggaagtaactgaagggcgcattcttggtcctcacagcatgggtgcgaaaagcctctaatcgggcacacccaagttacccattggaccggtattagcgaaatcgaagtaatccggtccgttaccacgtggggcgtgtggcaaagtggtcctctggcgggttcacgaaaaagctctttgggaggcagtccgatattcgggcccaaagcttcggacatagcgggcaggaaaggcttagaagaaacatttgcccacttaaaggctgtgcggtttacacttgggttccccctgggttgacagttctccccctgttaccaattaacgctactttcgtttcggacaagttatattccaccacacttttgttcccattttgtcagaacatgacgagaaacaagaagtcttcgcaagcgcacctgatagtacccgcgcccaatttaggggcgcttgtactacatcttacannnnnnnnnnncacgggcagcaacccgttttttggtccccccgtttacataggagggaggtacagaatcagagcctggccgagcaaacatactagggccataggtgtgtacaccagtgagtaaaagtatcaccggccaccatcca

SEQ ID NO: 418272 - DNA, 1310 bp, Homo Sapiens
  misc_feature (324)..(324): n is a, c, g, or t
  misc_feature (613)..(613): n is a, c, g, or t
  misc_feature (840)..(840): n is a, c, g, or t
agcggagatccccgcgcccatgccgctcggacagagacctgcaccaacccggggccgctaggcttcgaacagagggatgtaggagacgatgtccgactctagtttccgaggagcgagcatgcagcccacataactcccgggtgatgattaagaagggatactaacggcgtcgtaccaagcgtcgttccttgttctgggatgaaggctagaagtatccatgtgtagccctagacgctatgtcaaccctatgcatgctgaggcatccattcgacaccgatagagtatatggcaaaggcagctttcactaacgtgtcgagatagtcntaagtaccacgggtccttactattgcctggtattgggtttgcagaacgtgaccaagcaagacaatggaggtacgaaggcggatgcctaccagctacgcaaagtactgcgaggcaaaggttgtatggtacgaaggggaagcaaaaagataggaaggcatcggcattccttagtagcagtggagatgctatgaacctctcgcaggggacgaaccagtttcggtgagactagaaacatttgtccaaagttggtataagacgcatgagagaattagttgcgagtcgtcgttcntaggaaactagtctacacatcctctggtaccaatcgggaagataataccaacgggcgttgtttgcctaaacgttgcccgagtcagaatccaccgctgtacacatcccatacagtcgaacgaagcaactcattttggaaataccaatgtgaaggtggttgctcccaggcgctattagggggaggttggttaacggtgacacatgtctcgtcgcttggtggtagatttntcaaccaggccagggcatacataaacgggggagggcctcccacaacggtggagggccaagcgaagtttcaatgacctatatagggataggagcctgaatttatttcccatttttaaggggggttaagcggcatgaagtacattagggtctttgggtcccaccataggtggttcattaaaaaggagggtgtttaactacacagcggtgcaaaacaggactaagcggcttcttggggccacatttccacttaacacggctgtgggcgcctgatttttaaggacacttaagggaacccttttgcgaccatggggttcaacattgtgctacacttgggtcattccttttttttccttgccacatcgttcaaagttggagggccaaaccctttggcgctaacattctccccagcgggcacaactaagatttttgagaaaagaggccttattcctcaggagaacgaagaaaacacc

SEQ ID NO: 418273 - DNA, 780 bp, Homo Sapiens
agcgggaggctttcttcacagctagctgatcggatccttgcagctgtttcttctgtaggtctcggagctcactgagaacgtccagcacgccttcccggcggggcccggcccaggtgcgcactagatgaggcagtcaaccaagtcaactggttcccgatcaactaaatctctcctaaaaataaacactgccgcgagcttcgagagttcagcgtgtcagagcctctatgatggcagagcacctgccgcgatgcctgattggtagggagaaggatttcccgggagggggccaataccaaattttagggctgttaggctctgagcagtcccttcgtgaccggataagtcagagacccggggtttgagccttgcccggcgctgagcggagggcccagtttcgggaccacagccttgctccctgggagctccgggcggccaatgccgggcaagcccagcccggcacaggaggaggcagggcccgtctccggcaaagagggccagaggcagaactgagggcctggtttgtgtaattcgatgtggatacaaacaggccagacccaaagctggaaacggcgaagggctggattagcaccgaagggattcgaggaggcagaacgggaagtaaaaatgctgtgtggagctgcagagggcaaggggacaggggttgcaaaggacaagagcttcgtgagactttctccttcacggcgtagggaccagcagagtgcgggcaggtcagccctgtcaccggtcgtaagggaaaaaggcgaatggggcttgggagac

SEQ ID NO: 418274 - DNA, 1022 bp, Homo Sapiens
  misc_feature (423)..(423): n is a, c, g, or t
agcggtgccgcgtgctgggcaacgatgaataagtgtcgtccgccatgtccttctctgggtgtcgcttcgtgctacagctgagtggcttccgccgagccctgcggaaggataatgtcatggagacttcttgcgataccgatgatgctactagcggagatagtaggagtctagtgacgggagcttgactgtctggttgcaacgtgaacgtattactatcctagtagataggtaactccttgtatacgtctcaatatgcgatatgctagcacgctatgtacacttactacgtaacgacgctgaataggcagggaccagaatattgatacatagtagacgacgtaagtcgcaagaacaggagcgctagtaatacaagcgcgagggtactagactttggttagcgttactcatcgttgcacttgggtngatgtctaaggcctcaatcgtgtggccacatactgataggtgggctagcaccaaaactcagtgccttactgcaagacaagtgtgtctgttgaggaaaacgttattgactaaccggttaccttctcccaaaatgatagtagcctaagtagtgtgaaagagtgaggcaaagttctgtctctcgtgagcgaacctgggtcattaaaatcgtgagaagcgtccgtgagggtatgcgtaaagacgatccgtcacactatttttaccagggcttctatgacccctatatcgtgacgagctctcgatgttcgataaaattatactggagacaccgtacctttagacaaatggccccttagcttggtggaagttgccctagtatctatggacacacagaggacgttgggcggtgcaatttccatggaggtttgtcgcgtcgaacggacctaacgatatgcctggatacatccgaacctgtgtatcaaacgctcttgtaatttcgttgaaagtggtgggaaccgtctgtcccaagcggtggctccctgtggagctgaaagcgttccattccccattgtgggcctctcacgaaaggtttaccttgccca

SEQ ID NO: 418275 - DNA, 1028 bp, Homo Sapiens
agcggacctagagcctcgaagccaggtattgacaaatgatgctagcagctcaccgaagccatgagatgcccgctgcagccgataccatgtcccaacagctctcaggcctatgtcgtccatacattagtgcgtcgtgccgcgagttcggcctgccgcgcagtatgcgaggcaccaaactggaacacatggatggcttctggttcccagtggtcggtcctagtctgctctgagctgcaaggagccaagcaacgttacggcatcactgtaggcctcacgtgagatgcatggagacctgaaccgtgtggaccaggacatttgcgccgactttcgaaagtagtgcatgcggcaatgaatgtggcatctcttgtgcagttgacagacttgaatcgaacacatctctagtcgggtctcacgagacgcacggggcacatcatcggctgccatctcaattcgatacaaagctgccaaactgtggatctcctttacggggctttcgacacaccctgtacgaggcccttcgccccaaaggtagaggttgacaggtcgccctatgccgagagaccctttgaacgctcaatgatgaagttcataagggtgcgtacgaccccaggaaggaagtggtccccttctcgcaggaatccacagctcgctagccgtggggcaacccgtcgggaaggattgcaaagcagtaccagtggatttacagaaggtcttgcgcagaccaatgtgttgcagtaggatcagttttccagacaggagagctttctgtgcgcgcaagaaaccaatcccttcccttgagcaggtgccctccatcccagttccctccgttggagggttggaactattcactaacccatggatggaacgtcattctggagcagagaaaattcgtttcacctttggaacgaaagtgcggccacattatttttaacgcctttgccaaatgttgtccgacgtatgacgtttggtggccccaggataaaacgcaccgtctgttcaccaacgttacatttccctttttagaacca

SEQ ID NO: 418276 - DNA, 1110 bp, Homo Sapiens
agcggagcagggttatgggagggctctggtgttctggatggaggatgcgtcccttgtctgtggcgtggggcgtggatccaccctggtgttctccaatcaggcctgcagagagggtagagccgggtcataagaccagaggtgcaaggtgggagcagagagggagccagagaaagagactggaggtggcattgcgcgacgagtggaacgcagcctagcgagggcatacgcagaccctggcagtccgagcactggctgcacggtagtgcgtaggaactaaggaagctccgaacgcgctaatgcacagctgcgccgcgggacggaaggacgctggcgtctggcagacacgaagaccgatgccatcacctgtagcggtggtccgggtgctcgtatcggtgggacaatgcttgcggggcgtactacgttcctgccgtagcccccatgtaatcgggtgctcgtagatatgccagcagtaacctggaagcgtgtgggatgttgattcaggacagggttgcaagaggtcagtggcgctacagtaacgaaagcatggaatagatcgatggagtgacaccttgattgacatgaattccggctagtctaatctaggacctttaggcgttttaaactgacagaattatgtgccatgtcaccgtgtcttcccgagggtggaacctggttatgcacgcttcaaggcgaataacacgataatactattgatgggaagccacgggaggaagaagcttgtcccctagggcagtatttgtaatccaggagacataaacggataataccgttagctgggtcgacacaatcgcaggtcacaattgggagatttatcataacaattaccggatgaattgctccccactatttgaacacacctgcgaactacgagaatctacccatcataccattaacaaagaggcctatctggtggataggacacgaacctcgaaagtgttaaatccccacaaagaagtgaaggtacaaatatgtgcccaaggaatccttataacgatttggactccttggacattctgctgggtagatcccgagccagcttgacggttgctaccatcacatgtggaatacacctttcttgggactccacag

SEQ ID NO: 418277 - DNA, 994 bp, Homo Sapiens
agcgggcggcgcagaggtgggcgcctaccagccgggcagctccggagctgcccgacgccaggttcgcgcccaagcgtgggcggaccgagtctcgcacgcttacctaggtatctccaaaaatagcaacgagaaatcatcgcaggccgaagcctctgaaggtcgctgcaggaaacaacattccacggggtctggcaagagaccggtgaagaaggagggtagtgtgctacgggctgggcttgcgtgtccttgacaacgtcctgtttgaccctatgtcatagactcgtatacctactcactgtgccgtgtgggatgatcacagtcttccgcaacttctcttcaggtctctgtttagtaaagtcatacatatcccaattccggggtaagcatctcattaaatagagtctttagaatacttgcactgaatataagggcatatactatcgacgcctcagtccgagaaggtgcttataatccccggacccggtgttgtggtgagtgtcctgtaaagaaggcatcttccaaggagtctgcaatgtgccagctcattagtcacccttttggcaagtcatgctggcgcgcgagggatatccgatgcatggaaccaagacttctattaggaacgacactgaattagtaagagatctaggagttggtctgctggaatgcactggagcgtgcagaatatcgacgatagtgagagtataacaagaagctaaggcagacgaagactgaggcactattgggaaagcccgtgtgactgactggagattcgtcagtctaccgcgagggcctgtgtgggagggcctctagcgttaaaaaatgtattatatagctgaccgggagagacttagggaaactcttgactaatggtctaataaggcccagcaatgaaagcgatggatggccgggaccagaatctatttaagaaacccctactgtgaaaagaagggagtcactgcccaccttaccggtagcaattgtctgctgggggcca

SEQ ID NO: 418278 - DNA, 1115 bp, Homo Sapiens
agcgggtgggactgggcatggaagtgaagtgggtactccagcgtgtgataagctggctcacaagcgtcctgatcatctacgtctgttggtctactggatcagtggggtgactcggcgtgcgtgctctgttggcgtctggctggcgggctgtgtctgggcacctctatcttccggctttattcgtcgcgaggaaccgtccgactaagagaaggcgtccgctatgtgcctcagtcggtgactgtgcaccattagttagtggctcgttgtggcctgtgtgggctgcttcgcgtccgtgtcgatggctggcgccagtggagtagctgagaactggtatagctcatggttattgcttgtgcctggatgtgcgctgggcctgaagacatcgttaggcatggagactatattggaaggaagtagagatgttgtagctgtcatgaagatacaagggaacataccctttcctagaggagtttagcaccggagcgctagtgcatgaacatgtacaataggtgtacagacgtgatttgaagaacgggaggcccagtggcataatactgagaagtcgattgttgcaggagcaccccacgtagaaggcattgtcgtggtagggctagtaccagggaaacttatcatgcgagggaatgggaaggcaacccaaggggccgctaactatcccttgggaaagcaaatgggtggattcacctggccactccagcgttggcttgcgccgtgcaacttcggaagacctcgtggaattgggaaatattcgccccctaagagggattcgttacccaacacaagtgcgtggaacctgggtgggactccggaccaagcggaaatattgtgtacacccccatcgacacgcgcgttgggtcgtattggatactggggtgaaccggatacgattgacaatagcgaccgaacctataccattgggggacaattcacgttcgagactgaggaggttgtacggaataggggacatccggacaacttatccgtccaccagtgttaagaactttgggaactatgcagtagctttggggccattgagaagtcttctgtacccggtgatttcaaacccattgtgggccgaatctaggtaatgaagactg

SEQ ID NO: 418279 - DNA, 762 bp, Homo Sapiens
agcgggtacccccggcgattgcgcgcttgtccagggtactccagtcccgcgcgcccgcggtagcccgatggagctgcgtgagtctgccattcgttataccgtgtttctgctgctgtccgcgcgtcgggccgaggccacggctgggcgctgcgaaacgcgtaaccgacgccagaaggctggctccgctcgcgctcgactttccgaaggataacctctggagcgtaccaggcttgcagagctatccggtccccgttcaccccagtcgcgtatcgactcgtgccaggcagagcagatggtcacaactttgaaccaagggcctgtggatgcgaggttacttggatattgcttgacaatgcgtgcctgacgccgcgaagcgtctcgggtaaccctgctggtggcagttcccctgcgacggcgtcgccgagaggagatgcgcggcactcggatccgccaaggtgacagtggccaagatgagtggctgtgcaaacacgacggaaggagggaagagccagggaccctggcgaagagaggtcgccgccggcaccgaaacggcatgccgccagcggaataagccttgtcgttgcgactgggcggcgatgcggccggctaacccgtcagtgtccaagacaccccatgggatcggaaccgcggttgacgaggagaaagcgcaccagagcaggagggcaagcgtgggaaaagcgaaggcggtgatacctacaaaagccggggggggaagccatagacgttcgaggcagggacacg

SEQ ID NO: 418280 - DNA, 1153 bp, Homo Sapiens
agcgggctgcgcccctacctattctccaaacaaggttgccacagcgccggacagcctggagattgctgggtgctttgcaccggaatcgtggagcgaggcgggaggaaggtcggcggaccgacgggcacgacgcaataacgtatgctgcgtgacgtaccactgaatccgtgtgggagtgcggcaagtgcatgcacaggatgaggctagcagcgcgacgataccggaggaacctttctcggagaaacttcaagtgtggcgtgcagcagagcgaagcaagctggacgagtccacggaggacgactgattggagctctgtgtccagtcaggaacccaggcatcaaaagaaactatcgttgcttctcgagtccgtgatggtccgtccatgacgtaagtgtgatggtcacggcatacttcgtgctggagtatctttgtgctctcatcctgacctttcataggtaagtgatagcatgacgagaccctcggcggctcacagggattatcggtcaatgggtgaactgatggtctgactgtttgctagataattcacatggggcaccgccggaggaactcattgccacagaatattgggtcgggaagcgcttaagagacttgtcaaaccgaggaagaagaagactccgggagctgtggggatgtaatgaccaggaactggcggttcgtatggtttcacctagatcctcccttctttaggcataagatgtggcctcgtggcacaggaaacatcgacccaatttggatatttccccatggaattcgaatggagggctctaaacgcctgtttggcgaagccatgggaggacagaagttgaagcaacgccgtggggattgcaatagcgcaggctctaaggttcctgaaacggagattccggttgttatccaacgtgtggttaccagccaatggaagaccacagccaggtggtttgccaccccaaagaagaaatggcctagtatggaagtcggctttatggcattgggaaacccccatcttagattgacattcgggggtagaaaataatgtcttgacttgggaaattgtttggccaatagggaattttctgggaatatgggggccctgggtgcggcatcgaggcatttctcctctgaagacactttaggtcaattgttgaggtcccaa

SEQ ID NO: 418281 - DNA, 1032 bp, Homo Sapiens
  misc_feature (45)..(73): n is a, c, g, or t
agcggctctggttggaagaaggctatggagatccatatggaggannnnnnnnnnnnnnnnnnnnnnnnnnnnnaggaggtggatatagaagatactatagatctataaacagattaggatagcgaggtggcttgcgttctgtatagtaggactagcagttagacagataggtgcttccaaaataagccgagtagcttgagatagtcaggtcgtgtgtgcaagctaacacgagcccgatggttaggacgtcccatggtgataccacgttctggcaaatgggcttaagtatgtaagaacattgttggtagattaccgagttgatcgtctcgaaatgaagtggatgacgttttgtccgagtattcgtgtgctaccctgtggagctatgtaagtgtcggtttttaaaaaacgagaagaaagaagaacgaaaattattctcggaaagatgtaaatatttattacctatcagaactatggagaatggaaagtagttatactggatcagtgaatggagatttagacttgtaaccttgtgatctggtatcagggtgtagacgagcagtatacagaaggaccccgagccgtgtagagtacgcacaagggaactagtagtacacgcgtggcctcaacgcgggtacttcgccatgatgcgcatggttgtaatgccggggaattcggccattacgattgagagcaaaacctacggggaacagggcacatgtcccaggattgctaaatttaggaaaggccaggtaggtccgcctggaagatccattgttgtgggtactccttgatagtgcacgggaagacttaccgtcttcgtaggcccattgggtcccttggttgagaagcttatcgacttgaggtttggaatgaccccaaaggatttaacgtcattacctggtacaataccttatatttctaaatgcgcattgggcaatacagcccatgcattaggggtggaaaaacgccacagttgtaaggaccgagagcacagaaatatgcttacatcgtgaccaaggaaccattaacaca

SEQ ID NO: 418282 - DNA, 1162 bp, Homo Sapiens
agcggactgtctgcgaccgggtgcgcgtgctactggttgtgcttggttggttgtcgcgcgcgtggtgcagtggttctcggtccgtcgtgtgactgaaggaggccgcagtgcgcggcctgtcagtcacgcgattcacgcggcaggttcgcggcgatgccgggcgccacgctgatcctgggcagcgaggggcgtccgggggccacccgtagcgcgcggtgtggagggcctcaggctcttgcggacgcgttagcagagttggaaagcttgctcaggccagtatgccgtgggagagggattaatgggcttgtgtctggaggacaacatgcaacccttcacgtaacactcccacctgcaaggatcctcctgaggcgaaaagcgttgtataggatagtgtaccttgttctacttttggaagcaaccatcaaaagtgattagacaggcaaggacacgtacataaacggacgtaaatgggaactagagctcggagacgcgcgggacaacggacggcgctgcacagcaggagacggaaagaaggagaaggcgaaccacggcgagatggaatgcgagaggaccagaacgccagcgacttggttacctcatgtaaagaacgtccgagggctggcgacagaaagctttggacatgagctacaaatacagacggagaaggtccacttagaagcgccttcacttggaagtggcgtactgcaggacaaccctagactgtgaaagatggctaggcaaatattacgactagatgaaagacagaacattatggtcaacaagcgaaggcattgccgttggtcgacaaagtgggcctaatatgattcacagacgccagatcccgaagggtggggtcgtccctttaaagaaggcccaacaggtggggttcgcgcaaaagaatacgataacccattgacaacaccaccttgagaagagcacagaactgggatggtatagagcaggaccagagacatacaggagcataaacccgtatgaattggtaacccgaaaactggcaagggaggtaagcaaacaataaatttggacacaaaagtcactagaaacgaagaactgctttcacagaaagatataagcattgcacagaaatgagatgcactgaaattattatcaagaaaggagcaaaaggaacacgggagtacac

SEQ ID NO: 418283 - DNA, 1031 bp, Homo Sapiens
  misc_feature (193)..(193): n is a, c, g, or t
  misc_feature (233)..(233): n is a, c, g, or t
  misc_feature (757)..(757): n is a, c, g, or t
  misc_feature (770)..(770): n is a, c, g, or t
  misc_feature (784)..(784): n is a, c, g, or t
  misc_feature (857)..(857): n is a, c, g, or t
agcggacgatgctgaatgactagcatgtctgagattatgtgcgcctacgacagattcgccaggcctcttgttgcatagcgccgtatgttgctcgcagctgtagaatcctcagctaccagtcgtagtcgacctgaagtggctacacatggtatgcttgacgtgcgagcgccatctcctggcagcgctacgtatncacagagcacagcatcgccatctatttagagatctcgtantagtatacatacgcggcggcggtgatctgcacacagccgaacttgtaggacaggtcgggaccttatcatcacaccagagaccagctaatccagatcaccagacggcgatagcacattcacaaggtaagcaagcaaacaagtttggtcagtagtcaagagtcgtcgacaatcgttcaacaagactacacatcgtcactgaacgcacgacaagagcagtagacaacacgagaaactctaacgcacgtatattccgtgagaacacgactgttgggacgaagcatgctatgatcgacagacaccaatacaggcaaatactgcacaacgatcacatgtcatctgataagacagacagagccacgaacgaaggaaagctcctctagatatagtataacagtcgcaagatacatagcgaacaagcgcactagtccgcaagaagacacacagcacgtatactttaccaatcgactaacgaatcagcgatacgtatcgcgtacatgagcgatacagccgcaagtatatcaagnactaacacaaccnaggtcgtacaacangaccgagagcaagcagatcgaagagatagcacacctgacgacagttgataccattacagttgagaccagactntcaggaacacgacagaggtgcgagaatactacttgagacaggtggcatcaacagacagacaagagactgcgacaccacagtcgaagacaacggcaacaatcaacacgcgtcagaaaacaccgcagagagcagagcacaagctacgacctagattcatgaatacagcatacccac

SEQ ID NO: 418284 - DNA, 1120 bp, Homo Sapiens
  misc_feature (581)..(581): n is a, c, g, or t
agcgcaggggccggggtctgcacgtgactggtcgcactcccctggtaggtggggagctgacgtaatgtgcccgagcccgagaccgtggcgtcgcgcgaccggtccacgatgatcttgctaccgcggacttcttgcttgtgcagctgttgtctcgctggcgaggccgtgctgggcggtgagtcgcgtgcgcggagcactctggggtgcggtgaggctcgccgtccgacgcggcgccctgggctgggcgtgtgaaccggctgtgctggtctggcgagcgcctcttgtgtgtgatcgggggcgacgcacgcccggtagactgagtcgggccttgtggtgcaacgctcagtcaggcgggtccggctgtgctttttcctccgccgccgtcgccccggtggtcgggtggcggtgtgttgggtcctagaaagagccaaccgcacgggtcatcgcacgtttgtcggaggccaggtcagggcagggctgatccgcttgaacggacgggaaggcttcatccgaggagagcagagtaccctttgacacgacgatgactaggcttgggcgtaggaagaagcgtcattgtcagnttcaccagttggggaacgtctcgtatggaaagctgaccaatcaatcacttcgacatccgaacacagagtggttaggaaagccgagtcagtctgagtagcagtaggatttttaaccgggacattggacgtggggcacttgtgagcggcctcgcgctctgtagaagtaagggacgcaaaggaggagtaagatcctgtgactcgaaatcagaacctgtgtgcacgcccttggggcgcatcgaatagccttttgtcacctagagcaatggagagtgagaggctgcaatcgcgcgactagaatgccttgcttgtgccactgacagaaagttacattgtgctttctgggacactagcgatcttttgaacggagcacgagggctccatattatagagcggggggtaggaaaccgccgtgggattcgcagcgaaaactggggtcgattggcacaaggctccagtttataattgtgcgcttgggacttcgcgaatgcgagttatatacggggcagttttaccaattttttcccagacaagccatttaa

SEQ ID NO: 418285 - DNA, 1028 bp, Homo Sapiens
agcgggtcggtccgctgcggccccttcaggtgctgctgtcttcgattgctagttggtgcgatcggagactgccgctggcccctgagcgcccagaggactagctgctatcccaaagctcacggattgatgatgagccatggctgcgcaacgcgtgatgctgagacgtcctcagttgattgtgtcctctacgtgaaggcatcacgcaggtacctccgcagacgcgtgggatcatagctaatcatcgtagaactacccgtaggcccgtcgttaggttagacgcctcccgcgtgaaagtacacatcggtggttggccctcgtgcaggtgcgtggagtaaccctctgttcggagtcaccccttggtcctcgaggtcaaggagaagttcatgctcgccacgacaaggggctgatcctcacctcgtcgctcacatcgtcggattgccggaatggctacgttaccctcaattgtgcgtcaaaggcaagtcgtccatatcaggtggccgacaatttcggtgtaatgcaccaagctctgcgaatctgaactatgcccgaggtgaacaaggatttcccccaccgaagcctaaaatcgctaggccgtgattccaccccatgtcggatccgcgcgaagaaggatatgtggagacagcacctactgggccctggatcagttcgcttgcgaagggagaagccatacgaggaatttctttacccgattcgaatcaagttatggggacatccgtaaagcactgttgacgaattcgcgccgaaactaccaaagagtagttacgagtcgcacatgaggcgtcaatcggcgctccaaattgtcccctgacatacctgtcttagcccagggagtcctacgccctgagtgcaggtgacatccccgagagacccaaagttggagtggaccccaaagcccgtacgtttgcacagtttgccactttccgtgcttggcattaggccgcagggcgagaacaaaccgtttgatccctcgaaccgacgaacatgggctttaatggtgtccacaggac

SEQ ID NO: 418286 - DNA, 1024 bp, Homo Sapiens
agcggagtcggagcctgggcacgcgcgctcaacagtgacctcaccccacaatgccacagtccgaggatgtgaatagcccgatacactgtgtcccgcctacgtgccatgcgcacaagctgtccccaacggttgcactgctcagagaacactcagatgcggcctcgagttggacgggaatgcggcgcgagaggacgtagatccgagttcgtgtgctcaatccttgagtattgtcgaccgctctcgttattgcctgtcacatgagaagaaggagacgtaacagtgtgcatggtcatcacggtactctatgctgtcatgtcgaggatgagcgctgggagaaactcacatggtagacgacaattgaaggaacaggcgatgggtaccgagacagtcgaggataacgggaccatgaagagggaagctagtacacacagacattgggacgggaccttaggcaccaattctttgcgggtgcctcttgttgatggtgtcgcctttgatatatcaaagactttaagaatcgaaaacgtgaatggcgtttaactaaacatagatgccctgggggtgccagacttaattccagagaaccgcgacggtaggtagagtccacgcccaagaccatgtttccggattgctaaggttggggaccgaaaaccgggggacgccaaggattgggcccagtccaggttggccgggccttcaattcccagcagggggttacacacaaattggattgcccccggaggaaaaacattgacaacattgcgactttgaaagacacgcgtcaggaacggcaacgtgtgtgaatgctgggctatttcaattcaggggagaaaaacccttcccgggtacaccaattgggccccgttggaatttatttggggccacaatgacgaattccggataccaccaagaaaattcgcgcccagcactccggaccgaggggattcctttggcacgcaacaggggctgaagttccccaaaacggaaaaagcccgaggaacttgacatgaaggggcccaaaaca

SEQ ID NO: 418287 - DNA, 1170 bp, Homo Sapiens
agcggcgtgggtctctgctggggcgtctgagagcatagcatggacgatcgccaggaggagatcgttgtgtgatcccggcggtaagagatgtgtgatgagacagtcacgacctatctgtcatcatggtccaggcagaagtggtcgatatgtctgtcacttcaggctgcggtgaggggaagcagatgtacgtatcgagaggaaatggcgggaaagaggtgagaccgatgagattgttcgaggaccgtcagcggtagtgtgcagtctatgtgcgttggggagttgcatgaaatggcagtattgtgtggtaggtgggggtgtgagcgatgttgggatcttagaaggagggatggagataattggaagatttagacatatgggaggaattaatgctgatatggggaatgggttgtaatgctctgtatatctgaatgactgaattctgtaagagatatttctaatactatagatacgtgcgatatgataacctggcaggacacgcgttcaaatgtgggtattggtatatcttgcgagcggaattcggagagttggttggagaggatcaaccgaatgaaatggttaattttgagactgaaaaggatttgtgtaactattaagaagcatgaagcatagtgttcgagaattattttaacagggcgtgctgtgggaacatttttggagtggaaaacgatgcaattgaacgtcgacttggttggaatgtaaaacatggttgtaccacgtacgagtttatttagttttttagaaattcctgaatttgtgctacagcggtaggtataggatgtgtctatttgctggatcgataggtggagggctgtgcataagtggataagtttcgaaatagattaaatgttgcacatggagaatagcgtggattgaactcagtactttgcgtctcaatatactttttgtttaattgaggtatatgattattcttgagagctgagttatattttttgtagtgggtgtctgtaatcgtgggtacgttgtttgtttgctaaccaactttgcttcctcgattgcgagaacaataaaaggtcacttgtgtatggtagtccatttggggcgtagatttgtttgctttcagttgctcgttagtggtttgtggggatatttggtcattttgtttaacgacttcgtaagaatatgcggttc

SEQ ID NO: 418288 - DNA, 1327 bp, Homo Sapiens
  misc_feature (577)..(661): n is a, c, g, or t
  misc_feature (676)..(761): n is a, c, g, or t
  misc_feature (833)..(927): n is a, c, g, or t
  misc_feature (966)..(974): n is a, c, g, or t
  misc_feature (993)..(1088): n is a, c, g, or t
agcggagactatccgctcttcagccggtgcgccacgagtaccatcgtgcgatggtcgcacagggaccatgcgccagctgatccgcgcgtgacgggatagcccccgagtagactcgatccgcagggtaacggtcgccgcacgcgaagagagacggcgtgggtgcctcggactgggccatcgactgccgtcgagaggggcaacgatggccgtagaaaatgaagaaagctacgcaactgcgagccgtgtgtgtgccgacagcactagcaaaaagacgccacaagaagtaaaaaagagacggcgagaagacgaaactgagaagaggagaggagaacgagaagacgaaagcaggcacagaaagaagaccgaagaaggagaaacgcgcacgagacgacgaagagagcaccggagcgacagagcacgagaaagaaagacctccgagcggggagaagaagagaactggaagaaccgaaagaacctcacgaagacgaagagaggacaagaagaggcagactgaaattgagagcggcttggagctgaacggagagcgagaccggactgggaaggacgcctctgaggnnnnnnnnnnnnnnnnnnnnnnnnnnnnnnnnnnnnnnnnnnnnnnnnnnnnnnnnnnnnnnnnnnnnnnnnnnnnnnnnnnnnngctcgggaccatctnnnnnnnnnnnnnnnnnnnnnnnnnnnnnnnnnnnnnnnnnnnnnnnnnnnnnnnnnnnnnnnnnnnnnnnnnnnnnnnnnnnnnntgcgccggcgctgaggaagggagaggacgcaacggagaccagggagcgccccgggagcgcacgaggccgacnnnnnnnnnnnnnnnnnnnnnnnnnnnnnnnnnnnnnnnnnnnnnnnnnnnnnnnnnnnnnnnnnnnnnnnnnnnnnnnnnnnnnnnnnnnnnnntgagaggggagaccgggagagaaggactgcagggaggtnnnnnnnnnacgctgcgtctcctggggnnnnnnnnnnnnnnnnnnnnnnnnnnnnnnnnnnnnnnnnnnnnnnnnnnnnnnnnnnnnnnnnnnnnnnnnnnnnnnnnnnnnnnnnnnnnnnnngaggaggtagagaagtcgccgcgaggagggggtgagggagagctgagagatggccagggacgatcggaagacgcggagagacgaggtagaggtgagagagaggcctaagaagggagtgagagcgagggttcctcgcctgaggttcgcagtagaagaggagctctggaccggacggtgagaggacgccgagtcggtaggggtcgcgagggaggcgatgagcagagcgtcgtaaaggagag

SEQ ID NO: 418289 - DNA, 834 bp, Homo Sapiens
agcgggctcgggctcgcgaggccggggggacacggggggcgcggcaggagccgcgcgggaacccgaggctagcgcgcgcgcagcgcgactctccttgggctgctgagggctggagcgatatgccgtggaggcgccatgtaggggcctacgctagtcgctgtaggtcgggccgacgctggcccgatgcccagaggtctatggagctattgcgcgaccggagcccaagtatgtgtagtgattgtctgctagtgcaccgggatagcctcggtgccctgcgctgggcttggaagggcccttggtgagcgtacgcggggggcgtcggtgcgcgggcggtatggcatgggcgtgctgctttgtgcggtgtggtctcgggcagtcgtgtacaactagttcgagtggctcacttggcgaagaggatcggaactaagatgcaatccgtcgagcctagtggagatggcaacccccgaataccgcctgcgtgcctggccatcgaaagctgcgacatgcccgacattggcgacaacgcagcgaacggacgtacaaggctgatcgtgcgctggtatggtccgcagacggagcctagatggtggtgggctccccatagacctgcaagcataccagtcgcaataaatcaacatcccgcataaagcctctgacagcgagggtggatgcgacgggagggagctatgccggaattaaggcgggggggttaatatctagtacgcgggctggcataggtttcggaggaagtctgagcgactttaatgatggttaatgatacggagactgggctaaaagcgcctcgcgaaaatgctgttaagatgtgcggctatt

SEQ ID NO: 418290 - DNA, 859 bp, Homo Sapiens
  misc_feature (250)..(269): n is a, c, g, or t
  misc_feature (358)..(358): n is a, c, g, or t
  misc_feature (368)..(413): n is a, c, g, or t
agcgggcctgtgacatcaggggcaggacagagtggagcgaaacctcaactatagccaggcgtcgacccagtaaaaaggcaggtaacacagaaaactgcaccctcgacaacaacaacaaactaagtctggtaatcaggatctagaaaacacaaagacggatagatcagaaaataaaagaacagacaataaacagtaacctaccaggaaagcattatcaagaccaaaaaccccgaacaacacaaaacaatgnnnnnnnnnnnnnnnnnnnncaccgccaaatcaaacgaaatccataattgatcaacgaaaagaggatgaataaacaagacattaagcagaggctcaaacctctaaggangcgggtaagnnnnnnnnnnnnnnnnnnnnnnnnnnnnnnnnnnnnnnnnnnnnnntagcccaaagaccgaacgtagataatagccgataatataaagcacaaaccgcgagaaggacttaatctcaaacagctcataagtatcattaatactttaatcctatcttatctatttacaaactaaaatacatccaactattaattcaaaacaaccaagtaataatcagatcaacagatgactcgatacaaccaagggaatacctaccaatggcctaaccaactcataattatgaacaaacttctatgcgaccaactatgcaactaataaacctgaaatacgttacttaaaaatcccctaggcttatggtatatcacataagccgaaccgaccctattaatgaagaaactaagaaatataagaataaaaattaattattaaaaattttaatttaattactcttacgactgctaccaaacctgggtcactcactataaagaaaataa

SEQ ID NO: 418291 - DNA, 953 bp, Homo Sapiens
  misc_feature (253)..(343): n is a, c, g, or t
gaagacagagaaaagcaaagtcatagtgactagttactcagaagagatagcgagtagagagctacagtagagcacagtaagacacctgagagtagagagagtcagagagtagtacagatatagctaggctaaggtagtacaagtagttaagagtgactaagagatatctggattcagaagtctatagagtgagatcaagtagacaaacttatagtcaagttagtagaaattaagcatatagagagttagagtnnnnnnnnnnnnnnnnnnnnnnnnnnnnnnnnnnnnnnnnnnnnnnnnnnnnnnnnnnnnnnnnnnnnnnnnnnnnnnnnnnnnnnnnnnnagctagagaagataaggtagatagatagagtttgggagtacttaaagcaggtcagagtcagtaagagaaggttaaaaagagggctcacgaaggtaagttcaaagagagtttagacagagtaccaagtagcaaacagaagaggagagtacaaattagatatccagacagatgataatagagaaagttactgaagagttgtaattgacgagaagagagagttagacagtatgaggttaagagttaacaatatgctagtttgtttagtcaagagatagttactcagagtttacgtctcaaggaagtgataatttctaagggtagtatttgagagatagactctaagcagagagtagagtagcgcagaattagtttatcatatatgattttgaaactcatataaagttacatctcaattagtacgatttaagattcttaacttagattttttcttaagagagaccttattttaagattctcaagatattattagtatctatcttatactatgagtcttagtttattattatcgttattacgttcaataacatcggtattagatcctttttttagaattattccttgtagatttttatcttctttagttgtttag

SEQ ID NO: 418292 - DNA, 1169 bp, Homo Sapiens
gcaagaaagacaccaccgcaacagacgcgaacccgaacgacacgtagccacaggaggcaacggacaacgaacggcggacgacgagcgaaccagtaggcgcgacgcggtcggtcgagtgtgagagcggctgagggagagctaagcacaaagacagctgagcggccgacccagcggcctgcagcggtaggactgagtagatagatagatctgccctaaaggatgaatatacagatccatggctacatccgatgcgcactaccacaggagcccccatgtgataacgacaatggtacatcctaggcagacgatgagatatgaccgaagtccaataccatctaatagcacatctaatgagccaagtaagggaaggtagaagatctaaggaaatggcccaaagccagtaaccatgagaagagaaaagaggagaaaagacgatgagagaatagatatgaataagaagatggaagaataatactatacgaaatcgcgatagacaaatctcagcgaagataaaggaagccagagaaagcgagaggatatcgaagatatactggtcccgccaaggacgaatcctgctaacagtcgataagcactcccgcggcgaagccgacccctcccagaaggaggacactgtcaaagagagttcccacgtgtatagtaactgtccgggtggagataggccctaggattgaggtcgagcgcctagctggcttaatgccaagaaacctaggaaaagcgcgtgagggctaatccaagtgagagtgggaccccaagcgaggtgtaggaccctatggccccaaaggccatagtttagatgaagagatgtccaggacacgtgcggagctcctgaggagaagtaggcgcgcccccaagacccgcaacgaagcccgactagttggagagccgttagagaagagatcttagactcaaatcggtgagcagaattcgagaagtatagccgatgcgtagtctcgaatcgtctcctgagctgaccgagagatgaggtccgagacccctgtatgagtgcggagtgtatcgacgcccctagacgtggaaatggccccctgagcgagagtcatctgcccgatgtcgagtgacgggaccgatgccgccctcgacgaaggaggaaacccgagggaacccccctgagaccccgggcctggacccga

SEQ ID NO: 418293 - DNA, 837 bp, Homo Sapiens
agcgggagttgtatgtgcttgagtgaatgcgggcatgatccaacacgacgaaggcccacgataaccgccgatgggagcgggaccaatgaccaaatccagatggctggacgccttatggcagccaacgatacatcggcgccgacagcatcgaatggatttaatcgcgtaccaggatggatgaaaaatagcaaacaaacaattgcgagagcactaaacgcccaataatataaatccagaaaacaatagcccagatgcgctaacaagcaagacagctcaatacgaaatggaacacactacgggcaaagtcacaatgacaggcatgcagggactgataccatgaaaagccaagacactgcacaagctgggagaacataaggaaccacctaatgattacctatcccgggctaaaatgcaggggcaaacactaatacacactggcgatgacacgagtaattaattaacccgcaagtaagagcgcgggaaaacctctcttaaatactaacatgacatccttcactcaattaacgaagatgccaacttcacctaatatgcgcaacaaacctatgacactatatccgatcaaggatagagcaccttccaaagatggatcgcaacatccgaacttgaactcatgataacatcccattaccccctacactaacaccaggcacatgactggcgccaggtcggccctaatcccgatgaacacaacgacctcataacacctgggaaaaatatggcatttttgcacgacaaccccctaatctaaaaataaccatggaaaaactaactatatggggcggactttaggcccgaagtgagaattcgggactactt

SEQ ID NO: 418294 - DNA, 1064 bp, Homo Sapiens
  misc_feature (560)..(560): n is a, c, g, or t
agcgggacgaacaggagcagcctccgccgagcatggagagcgagccgccgcgtgcggcgcgagctaccgaggcagacaagcgggcttgggatggaaagaagaactagtcgtgaaggaagattatagaagcagagacatacggactatagctgctcgaccatggctcagccctgctgattacgcctgtgcgcacgacgtacttttcgtaagagaatgggcaatggatgcagcgggaggcatggactgtggttgagcgagcataaatcatcagccagaatcggcaggcagtaaaagtgcatatctgagcatgatggaatgggctagggtgagccatggggtagtacatctaccaaagtatcgcagcaccggccgagagggcccgcggcgcgggtagatgcggttgcctaatgtacccagttgactactggtcatgatgtgactataacgatagggacaatagatagcttgccatgttgtagtcggctggttattagaaccagctcagggagagcgaaggaaagtacgagtgcgagtgatatagaaattgtcgtaagagatcngaggggccagggacggccgcgaattgagacaatcctgtcgcggagtagttgtcccgcggaatggtatcgcaacatcataggttgtgaagaatcacgaatcattgaagtcgggctgagcgccgagttatgacagaacaggcctggaggctgttcattgcaggcccaaagcttatagtacagttagattaattcagggcagggatcggttgacaagaagacgtcttgcagggattagcccggatcaggaggattaatgctctagcgaacacgtatcacctttgattgtgccctaaggccaacttaaggaacaagccgagaaagttgcggttgttggtatgtgaacactgtggatattgggttcgctggcgtggaagcgcttgggaccctggtttgtttattgtacggaatggtgtcggcaaggacttactgctgttattttgggaggatttgattttgacctgggttcgaatggattaaattggaggtgatgtgggcaccttgggg

SEQ ID NO: 418295 - DNA, 982 bp, Homo Sapiens
agcggagatccagagagcgcgctgggcggtgctgggcacccgcagagtgggaacggggcgagttagaagagcgcagagttcgcaacgtgaaggtcgcattcggacgtgacggagataagtcagcgagatacgcgggcggagggcgggacggaatcgtcctcgtagcggatactaagaaacgcggtggcaatggcgaagcctcaatcagcctgatggacatttagagaagacacttcaaacggaaagcatgattatgaaccgatggattgcacgattataaagataaactcgcgaaatggaagtacgctactgagtgaagagcgcgcagaatgaacgatgactatattgatgcgcagtatgttgtaatccctagtcatgactatgagtcatactaacctggagattatcagggcatcgccaggcgacagatactctcgagaatgggatgggaatgtacatatctcgatgaatggctaatgaggggagagtgtgaatacacctaacagagtctgtgtcatgaatggcattagtaatggcgtgacatgcttcaggtgagtaaagcagcaaatgcattcttagtatccaaaggcagattggacagaaaggattcagtagtatgaatagaaggcaatatctatgccataccgagacctggagagacaagcaccgaacttatgactgagactcagaatgacaggatgaccgaaaatctgatgactatgatttcaagctctacagtcctaatgatagcagcgcaacggcctgatatgatggacaattttgaaaaaatactctcggatatacgggatgagagattaaacggggaaaatccttgaaaagactaaaaatattcgagagctgtggaaatgggctttaaaaggggtagaagaatatggcattaaggggctgaagatagaaagttgcgaataattttaggagaaacatcgagtttaaggttatatctggaagatgtggtatcgag

SEQ ID NO: 418296 - DNA, 1226 bp, Homo Sapiens
  misc_feature (381)..(381): n is a, c, g, or t
  misc_feature (754)..(754): n is a, c, g, or t
agcggcttgccttgcggtgttcgatgtggtgttgctgtcactagatagtactcgcgtccctgacatgcggtcgccgtcgtagtatcgtgagctcgccaagcgactccttggaatgcttgtctctgcagcacgctgaaacgattcaccgtgcggaatgtacccgtccagagccctggtcccgagcctcacaagccttcgctgcgcgtatacggagcgcttggtcgtgtaactcaacactcgtgccggagaacgctcgacatcgctcgtgagcatcccaagggtgcacacgatggaaagcgcagtgatgcgtcgagagtgcctgttgaactattttgatatacgattacctaccacatggtaggtatgtaggagtccttcgtngagagcttacccatggtaagaacccgcatcagagaggtcacttctcgagaaccttgtgcagacgaactgttccttttagcttgtaccagcaatctatggtagatgtgtagcgtgcccggatgatgcgcggctagtccgttatatccatgccaaagttctgtgcccctccaatttcttgtcccgaaattgacacgcgccgtcctatgccccaaaggttatcgttgctaccgcacatacaacggtgagctacgggacaaatgaacgtcgaattgcgcccagtacgacgagggtcatatgcgtggcgctaagaccttgtggcacactttcccgatttcaagcgcacactttgataggccatccgcatacctgggcncaaagggttcgattccaggtacttccatgtgtggtcccgcacacatccgccaataaaatttcccgtccgtgggcttctcccttccttgacttcccaagggagtgggaatgcggccctcctatccgatgcaattgggaaggcattgcgcagtggtttaacgccgtgtgctggaatacctggttgcgccccggaagtagacacgctttgcccctgtggaggttcctccggcgaagtatctggcgactgattggcacagctcatggagataccccctggtgtaagttcccaaaaggaaggtctctggaggcccgaaggaactgcattacttggagttcgaacggttcgcccttcgggaacgtttaacccaattgtcagcgaccgtgggtacccatgagtgtcattacacccgtgtgccgaaccgggttccaacacttatgtaaaagctttgtcccccgggagagtaaacccgatt

SEQ ID NO: 418297 - DNA, 851 bp, Homo Sapiens
agcggactccggagtccgtcgtgtgtctcgccgtcacagcgccatggccgcgcaggtgcctggagcgagaagtttgacctgggctatctgactgcgtgctctaccagtggatccaggtgtacccatgtccttgcgggcctctgtttctgtcgagggcactgcgatctgggcactggggtggagcagcgctggcttggcgcgaacagtgcgctggcccgcgtagatgcccgtggagcactctttccctcggaacggtcggccgcagctagcgcacgccaacgttggccctcatgctgggctgttgcctcggaggtgttgtgttgctgctgctctggtgccctgctcctgtggatcttcctgtgccccctgattccctgggcctcctgtgcctcctgaccctttgcctgcttgctgcttgctccctcctgctcaactgtgtgctgtgcctggcctgtgagcctcgtttctgcctgtgacccgacggggcccgctgttgttgtggcacgcgttgttgcacccgttgtcgcgaagttgtcggtccctccacgaaggcgtgggccgcctgcttggaatggcctgatggctgcccttcatatggcctgcggaggtgccccacgcctcgagaaggccatgccctagtgatggttaacccaatgtctagacatgtggccaccccatggggcccgaaatggtcccatgccttactaggaagccttgcggccataggccaaacgccgagccaggaattcccaagaaacttccgggccctgcaattctttgggcccttccttgtggtcttcctggccaacgtttcacggcaagccttgctacatgggcccctggataatacc

SEQ ID NO: 418298 - DNA, 1318 bp, Homo Sapiens
agcgggttggccccgtgtgccggccgtccctccctgtgtaagtgaagattaccgaccaggacaaagctcaggaccctcggggctatggcagtgggctgggccgtgggggactaggcgttgcgtggggtgcctgaggccctggtacgctggtgtgcaggaatgctggcgggccgacgtgggtacgcagtgaggcgtctggagagccgatggccgttgtaggacgctgtcattcggtgcttgtgccgctgctgccgttccttccctctgtgctgcgtcgcttgttctcgtgcactgactcggtctgcggcacttagcgcacgccgtgggagcagtatcgactattagtcgcaaccttgacttgctagcgctatcttagtcatctaggtaccgcgctggcgcggtagggcaaacttttgctcgttgcgtacagggactaatagcgaggcggtactgcggcggtagtagcccctctgtgggttgagcttgggcttggggaaccgatcgcgtgggcacctttctttgacattgcgctcgggctgtgtgcttgttcgggcgctttcgagtttgccctgcgcatttgcagacggattgtataacgctttgtgattccaagtagggtatccgttggggcctccgtggtgcgacgctgggggtttggccctgttgtgtggacgcgtctggcacgaggatgtggcgctttcgagtgtgggcgcacagttggttcgagcaggttcgcttattggcgcaggagttctcagcccggcaaagttctggggccgtctttttccgattaccggcgttgagctttccccgttggggctccgatttgtgtgtgggaccgtagaatttgcgaagcaggtcataacttgatgaataagccgacgaggaagtatcgtatattatctgcacacgttctgcaaatggtgggtcctgttgccgaaatgcccttgttggacagttccataagctaccgaggtgggagtgttgcggtaaggccatgggcgatttgtgacctgcagggaaagctcgcttctaacgcggcaaccgtttgtctgtgtgccccccggtgtgagaacgcatcatcgagtgaatttccgaacgcttgagtgctagaagcacctaggcagtggagttggcccttgatatcgattggtggtagtctgccgagattgggctccttcatcgtagttgtaccccaagatggacactagtgttaaatttagctttatgcagttgctcccacaatgctgatgttcccctatgtgcgcctttgagagagtgatgtacccctcggggagatatcacattgaaaatgtgc

SEQ ID NO: 418299 - DNA, 931 bp, Homo Sapiens
cggattggccgccgtcaggatagcggtcccagacttcagggggcagacgttcctgatgcccgacgagttgctgcccagctttgagaggctctccagagtatatcgcacctgtgctacctgctctcttaccagatgatgaaccgagacttctgcacggactggctgacaacacgacgtcgatagcagcacgacctgagaatcacatggtcctgcaggtcgtcgccatgtgtgatactgtagtgcggtcccagtggcaggtagtccgcccgggcgaaacattatctatgtacttggcggagccgtagcgacgaaagatctgctagctcgtcgccatccagctgtgcaaacgcattgcatatcgagcatacgctaagaccaatctggcggttagtaccactagcagagacttcaataggtacacgtggttccaaacacaggattcgtcttaagaaagtcctagcacgctcttgccacacttgtacataccacactcagtaaagatgttcttgtccaacctcgcaaggctctttagcacatcgtctgctataatggacgcacggaatcctcggaatacgccttgtgatggccacagtgaccattgcgcccggcgtcaggtgtaaccacccaattgatatgcgcagtccgaccatgtcattggggatcaaaatcgtgttcgactatgcacttcaaacaaaggctgtcgtaaatccgtcccgaggggtggcaacacttgttccggaaagggataagttggcaaccgacatttactaacgtccccttggtatgggtaccctgtggggacttaccaccgaggaaggaatctccccggtgaaaccaagggtagctcatgacgcgacagcagcgagctttagtgtccaccttggttgaagggtttaaaagagccccacgttataatccgtatgtggctcgt

SEQ ID NO: 418300 - DNA, 1321 bp, Homo Sapiens
agcggattgctcccggtgctggcctgaccctcacccaggcccttaccggcccgtacggctcctcgtggctgcgcctcgtgctgacgcattaggtcgtattaggcataggtcgtcctaccgagtgcgtatcgtggatctgaccgtttgtaggcttgggcaatctagtgattgagctcgcagacgtatcgtgcgataacaaagactgcctggcacctccttggaccagtcgtctccagcaatgcgaacatcgttcgggcgagtggctcgctatcgctaggtcgtatagttgacgagacatagttagagggcattaggcccatggacgacccgtagggtgctactagtagtcgacagaacttcgaccctttgtctcctttggaagctctacgatggggcgactcccttgcaggcaatgtcgatcccgctgggaagacctccaaaggaaaccggaacttatccaccgcgattgcaccggctggtcgcatgttagccggcggacaactcatttggcatcccacataagcatattcgcttagcctcagagaaggtttcttgaaccctttggaacggaaccgataggcgcctttgctccgaaatacggctgactctcaccttatggtatggcacagctgcagtttcagcacccctttggttaagaccccaactatttagtaaaccccgtatctgtgatgaggatttccccactttgtcagactccatcaggattagggcgcgataaactaggacagtgctgtgaactggggccgtgtcttccttaggtgactgcacagctaagcgacccgtcgatagggaacctctccttgtcccgcggtaaggctttgtgtcccctcgatccgcgagcgaaagccttgctcacgtagggatacgtggcctccctagggtgtgggcacctttcgctacggtcttatagggacgtctcccgtgtggaagaacgccaattggtagtccctaatatgcccccatcccgtagcgcgtaatgcagtacggccaatacgttgttttgccccacaccacgcttggaattggtcgtaccccgatttgtaaacggacgggcacacggacttttgcagactcgcggcgcatgtgcaagcgtagaagttttgatttccgaacatgcatcccctgtaatcgtgcaacgttatgattcctccagaatgcgtcccccttatgggacgtttaaccatcctatgggtcagttccgttccaagagtcagcacttgactccgtagtccccggctatagcgagcttacgactacgattggagccttctttgtagctttcgcgcgcgcatagttattc

SEQ ID NO: 418301 - DNA, 1026 bp, Homo Sapiens
agcggactgggcagaagtctgcagagccttagcccgccatggtcttcgctctccggctccctgcagttactccgtgcggtgatttgcacgagatcgccacgcgcgccggggtcgtgacgaggccgacggagtattccggtccgcgcgcgcattggggtccttgtgcctgcagtccgctgaaaggtgtggctacgtgattggtgctgcgtatagttggcgtccggagcatccctatgagcgtctggcgcgagagggtaacgaccttttgcgtctccccttgggtcccgttggccaactagggaaagcattgatatcttgctgtcgcacgttgtcgcacctcgattggtaggtggaatggaaagcgcttgacctgcggctagtcacggtagggcttcagcccaaagcgttaccgtggactctctagccatgccccgatgccagctctagaatagaccgaaagcatgccccactcaggacacagatgcaattcatcagcaaatcgttcgtagccctcgagcgacccctatacgtatgttcactacttagttcgtgcacccgctactgcgtgctacagcggcacatttcgacgacggatccgggttgcaatgtcccgggcctcctcggtgcattgcccatccttatccaaaattaacttgtggcacccaatgaatagtagccgctgaggacataacccatgattggcacggctgaggactttcgagcaaaacagtagagcgcaccaccgttgtgggggagtacgtaggaagagtcgccatgttcgaacggcggatttggagcacgcaaccacagcgtgatttaattcacgcccctgggataatcacaaagtcgtgaccctatgagcttatcgcctaaagggtcagcgttaaaataccctatattataagccggtagaacgcatgggatccccggtatctttgatacacagtgtcgtcacgtttgcaaccaagttttatacttagtccgatagggttcgtagttccacccagcaccttagtgtgtgccagt

SEQ ID NO: 418302 - DNA, 1485 bp, Homo Sapiens
agcgggttggcccgtgtgccggccgtcctgcctgtacctggtaatgccacccagaacatgtgctcgggaggcccgggcgctatggcaatgggctgcccctcggagatctggtgttgcctcgttgcgggagcctggcgccatgtgtctcgcgcggtcacgcccttggtgctgatgcctctggtacccccggaatcgcttggagatgctctaccttgtgttggagcactgtactcagtgctagggtgccttcgttgactggttccgtctagtgcattgcgcctggtcgctgcttgccgttgattatagggacgtgaccgcttcgtggagcatatacttagtatgaggcgcatacgcgaaatgtcgcgacctgacgaaaggaacggacattgccttgaggccgtagaagcactatcgaggattccgccaggagttaacggctcgtgtcggcggttggatcccgtgtgggtttactagagttggatagatccgctgacgcctctatggatagctagaataggcctagtagcgataaggcgatttggaagcgcaaagttcgggcgctgtctttagcctagcattccgtaaattttacttgggggctctcgtgagtgaacccacgttaacccccttttgtttggactcgtccgaggagtgcgctcatcgtatgggatgtccctcaacttggttagagccctacaccgattgtggtactctcaggagaagcattgtggcctttctgcaagtagattaatcccaacgagtatggattcgttttatagtgggagtccaccgttcgagtgtttatgtattacggagccaagaggaaacttcgatccagcatttccgtgcttcgatttggttcttgcgatatggcgccttttcggattggacatgcagccgatggttatgagcgcggtaacctcatcggatggtcgggattatccgaaccattgtgcgaccgataaagggcgcatttcggatacgcaggagacgagcggtttagtataaagcgcaacccaggttatcatagggacatggcacatgaattgcgcgttgtctttcatcgatgtaagactggccaaattttccgcaatcaaaggggcgttctgcatggtgaccttccaaatataacctagttgtccgtggctccgcttggagtgtggccctcatgggtgctgtgtgggaggttcggttgccccttgtgggtacatccttctcaaaggtgacagccttgtatatttggttgcaccctgaggatgtggagataccgttttgcttgtgtgaactgtaccggtgcgcctcttgtgtgattggccgctatcgtagtcacgtctcatcacgagtagcgcagtcaggcgtcttgttcactagcttagttcgcacatttgtgagtttgggacgctgccgtccacgtgtgttggagagcgtgaggaatcgtgcagccggcgagccttcattctccagagtgcatgggagacctactcc

SEQ ID NO: 418303 - DNA, 849 bp, Homo Sapiens
agcggattggccctcgtgccgccgtgcccccaacccgtggtgcttgtcccctcctcccgtctcgtttgcctcccgcttgtcagcggggctgtcgtgcctcggacgtcgtaccgttggcgtgctcggatgcttcttgtcgcgttgtaggccttcgcgacgtcttggcatctcgtgctccaggctgtctcctctccaagtcacctggcgcttctggtggtggtctagttggtccccgtgtgccctatgcgcccttcatgggcgtacggccgccgtctggtgcttgtgccctagtgagttccgattgcttgagtctcgagtgctacgtatggctcggttaggtgctcgtcggtggtcgccattcgtgcgtttgagtgcctttcgagagtttgttggtctcccttgggctttctgcgtgctgggatcggccgtgacagctcttggacagctcatctggggtcagtccgcgcacgtgcctcgcagatggtagttggcgcgtctttatccctggcgggctgtcagacgcgctcgcgatgtgtccgccgtcaatgtacgccctatttcgctcgctttcgaagtgtctcccccgtccggaggtagggccggtattcgtcttcccagttggagcccgggcctgtgatttgcgcgagtttcctcccgagttacccttgagcgtaggcttgcggttgggacatcggccagctcaggcgccgctcgggttgagcttgctcgtgcgagctgagcggagttttggggtggtttgccccccatgtgttttcgccttgagcgggaagctggtgttaccaccgagtgtctgtggcctgtgtggcgggctcccgtggagatgcgtag

SEQ ID NO: 418304 - DNA, 1431 bp, Homo Sapiens
agcggattggtcctagacctggcgtgtcgcgaattcaggctgctcgtgccccttcctttctgtcgctgtggctcttagccagtcatactgggcgagaaacagctggtgctcgtgaccagtgtgtccacgagtatccgagtagtcgagggactccgtaatcgtggcttgtcgacatactagccagtgcgactcctgacagtaaaacgtagccatctactgggactagtggtcccctgatatcgaacgtcaaggacacggccctctgtgctgactgattgcttcgatccgtcgaggagccaatgttcgctccaggggtttctcctaggtacgactcgtcgtgcgtggccctgcgcccagttgagcccttcggctcgcatgattcgggcttcagccccgactttaagtggagccattcgcgcacggctccgcgttggagaccgcgtatggcacccgcagctttcgcgtcgcagctcgtgcacggtagtacttccatccctgcgactctccatgccctctacgagatggtttccctagtcgctcccgataccgggtctcccgagtggcgggccccctgcggttggacttcccgtctgcgtcctccttaagtcgtcagtcttcgcgcgcttcgggcttaccttcatgttgtcctgcttagcgatattccgagatggacttgcgcggcctccaaagcctaggcgcgcctccttgcgttcccgtggggcccctgttccatatcatgtgccccctcaacattatcaaaactactactccccacttccttcctactttagccctcgtcccctaaagattcttcctacgaaccccttgtacccaattcacctcttgcgttgctccagttcttttttccaacgccctttaatgtcacacctcttcccacctttctatcaacgaaaaaacctcctacccacaaatatcttctccaaacctctctcaactcacaatatcaccgtcaacaccttagtatgcccatcccagctcgtcgctcctataacctcgattatacccatgccaccttcactcttccctcactcttctcttaccacacaccacatatcctcgaacccatctcgaaatccttcctctttatcccatgaaccacttcctatacgcaatctaatatgctaacaccttatctgccccctcctgaaataccctacacctctaaaccgacatctctatcgccctaatcctctgtcccatagtcaccccaatccaatgaacagttctgacaaccatattccacatgctcctctcatgcaaacaatcataacagtatactcataatcaacacaaaccaacacaccacatcttcaacctatcaccatccactcatacacacactctccaacagcacacaccacaccaattcatccacagctgactaaagcaccaaatcacaacaactacaat

SEQ ID NO: 418305 - DNA, 1132 bp, Homo Sapiens
agcggatctgtcccgctgctggcctgacgcccgtccaggctctctgtgacctcgtgctctcggcgttgtcatcttgagggttgatgatcgggacgtcctcgccatcggtcgtcctagccagtgatctactcggtgtagtgactcgatgaagtgctggcctcgtgtgcattgatcctttctagcattttgcttaacgaagactcgtcggaaacctcttggaactgtgggttctcccagagagtcgtacattctcacgaacgacggaggcgtgagcgtctggtctgtagagtggcgcagcactagttctgagtgcactttggccgttctcgccgcagttggtgcgccctgtagttcattgcctcgccccatgtggctttggattacttctcggaagggtggccgcctgggactgcactgggtgtgatgtaccagtccgatgcgtcggttgtagctgcggaactatccgcggctaccgtgtggtcgcgttgtgaggcgccgctatcgttttcgccacgctcctgtagttcggtcgccgctggggctcttttgttgtgcgcgtatcgagcttggtcgccggttggcgcgtttctccgtccgaaataaagccggatcgccagtctatgcgttggtagtccggacttcgggtcctcgaggtagtttgatctgctcacgtatgagtcgcggcattctccaatgcggtgtcgcggaattggattcgccttgcgcgttgaagttgttcctgctttcgtatgttaactcgcgattcgtgcctttgtgtcgagtttttgccccccaccggtatggattccacgtaggagccgacagtttgcccctgtgaacgttagcgccgagccagagtagaaacgctcaccgtgatgggattgggtgcctcagtagccggttttccaaccggctgactgagatgtgcgtattggcgatacgccttcgggggcggattcccctctcgttagtgtctcgcggtccagagctttttctcgcgcaacagctggttgaagcgagctgcccccttttgttacccggatcgcgctcaccgactgtggtctgcgtcgcgctttgcgactgacctgcttttgttcagaacccccccgcgcggctgtacgtcagtccaggg

SEQ ID NO: 418306 - DNA, 1405 bp, Homo Sapiens
gagctggagtgtgctccccgccccctgccgctgcgcctcgcctcccggctcacctccccaccccatctgccctgctgcggctctcctgcgtagacattctcagccgctactagttgagacgatgggactcgctcggctcgtcacgtgtaatcgctgagtagaggtacaccgggctgtccgtgcggaccgttattgaacaaatgccgcatgcatggtataaagggcactgagtggtaacaggcctcggaacgtaaaggcaacttaaccattcacacggagcggctctcctaactattgctatgcgattcctttgtcgcggcttgcaattcgccttctctctgtctcgtagaggcgtgaggtctcgatccgcatttgcgctcattccattgtgtgccttgttgcagcatgtgggtgtgcttgcctaagttgatcgccctccgtgacggactcgctgcgcagattctcgtgcgcctgtgtgaccactgtcttccttcaacttgggagacatagcgttccccttcgtgtggctctttgtaccactttccacttcgaatagcacgtttcggtcgcctttgcgttgcaaaaccttacgcgatattagcagactgtccttaaccagaaagtactctcccccccattcgtgtggacccccccattctcccctattgtaaccacctgatctggccccacatgttgtgcgagtgcgccttggatagcgaaggtgtcgaggtgagcctgcttggtgacatatcatagcctatgcggccccgctttttaagacctactggcccaccctccgcaaatgtgtgccctttcgttctttaagagcgcgcctgccgtgcctactggagtctcaaggcccccgcttcttttcgcgtgtgcccctctgctatcgtgcgcgcactcagcatgtgtcttcgccggcttgtgcttgcgtacccgggccgtgaatggcccgcccctggacttggcgtggcgcgttgtgaactttataggggcacgcccattctgtgccgtgggccggcggtagtcctggaaccgccgtgcaacgtggccttcgtttcgtttcaggctcgggtggtgcactgccttttgttcggactcgcccttaatacgtcctcctgtgccgtcccgtcctaacccatcccccccctttcttagccgttcgcttgtgccgcctcccgtggcgatggcgcacgcgtcttgccgccccgtgtaacggcgccatttttgtgcgaagggatccagggtgtcccccatatgtccgggcacgtgctcgcgagtcggcttgcaccacctcccgcgaaggtcggcggcccttttgtgcagcatcgcccgcttgtaagtgctcccgtgttgtggcgacctggccgctcccccttccttccagtgtctcgacggtacc

SEQ ID NO: 418307 - DNA, 840 bp, Homo Sapiens
gagcggaatggaccgatcgatccttacagctgaacaaagtcagccacaaatgcagactaccagccggttacaattggagtcagagtcccgaatgacatgggcttgttaagtgctgtgctcggcatgtctggtacggggcccgctttgctttccctggtggccacttggattgtagtcctcttgcgggtggcactgttctgtggctgcgtggacattgataggccctcagcgtggcacacgatacatacgcttccttgacgaccctagtttctcgcaaaactagcccaagactattgagtactccgtcattcaactgtgatccagtgtccttcgaagtatgtcatctagtggaactggcctctttcttctgtccctttactggggccctcgctgctgggctagagaggcgttctagcagacaaccggcgccaggtctagcgggccatgcactctttgcgtcgcactttacagatgatctcacgcaatccttgccggggccaaatgggggccctgagcctgtcaagtgagttatacaggggctggcccagaaaagccggcgaacggcgcggttcccaagaaagcccatatattgataacgctcaatttcctattgggaagccgcggttgctgctcgacttgcttgatgggcgaaaacttggcttaggaacattccgggatcaaagttccgtaggggcatcgcgctagtgtgccctgacgccgttgttcgtggcctccttgggtgtttggcctgcctctggatgtgcccttgtgtacgttttagcttccgaggcacccttggagcaccttgccagtctatttggctttccccagtcaagaccg

SEQ ID NO: 418308 - DNA, 1212 bp, Homo Sapiens
gagcggactggccgtcgtgtcacacagccgctgtggcgagcggcatcgcccctgaggacaagtccgacgcgctggaacccgtgcgtccgagcgcatgacggtcactcccagagagacggctggccgccacgcgtgcagtctcgtgttcagtccatgctaggtcttgcgtcgaccagtgaggccattgactaaaggggtaatcagtacaggcgtacgtccagatgcgcgaggtaagtactctctggctgcagcgtggcacagagggcctgccaggcactggtctcttggtgcaatcgtgactcttctgtgcccgatgtgggattggctccgtcacctgggcctcgagttgtgttgcagcacctggcgacgtccttgtagcctgtgcctaatgtgggttgcatctggagccggtttgctctaggagtgcgtgttccagaggctctttgcatgtcgtggcagtgagactctcctggggccactgatctctaacctgtgacttttcgtgagtgtcttattcgaggtggcccgatttagtgcggcactccatcaacttgacccactctcaggagcggcgggcgagagtcttccccagaagagggtagcggcacggaaaggtatgtagctagtgtttctatgcgagccttggggttggagcctatagcctctcgtgcgagttcagcgctctccttccgtttgggtaaaactgtccgctcgcttggcctaattcgacaccgtcgatcctgtccctttatgcgacgtaaaaccaatagccgatcatagcagttggcgtttgtcgggtaacccggttgaaccgcaagacggtctgctcggcctttggcccccaactatatgcttttctaccgagcagacgagctcccctaggagaatgggcgtggctcttcgccaagtgggttcgacaggcgccaggataagataattcccgtacgagccattgtgccctgttgtaccccatgggcggaccaaacgcgtcgggggaccagacccacaaattgccttttgcgaattaccaccggtcaacgtttgtggaggtgtttacagcgtcgggccctcatcgttgtgggcggccccctcatgtgcgatatttaggctctgcgactatatcccgggagcgggtggttgtggcgaccaccgccgaaagttttgtgacagcacttcctcatgtgatacggcgtttgtgaccgcacactttga

SEQ ID NO: 418309 - DNA, 1186 bp, Homo Sapiens
  misc_feature (581)..(581): n is a, c, g, or t
agcggctttggacatggatggcgccgaatgcgaggaagggtgctcctgctcctctcctaaccgcgttaacgccaagacgcgaagtgcttgaacggccgagtaaggcagtgtttatgacggtgtccacagcacagcgaataatcacgaatgatccgcacgattagccatcgttccgagtggcgcgcagacagcatgcgagaccgtgataactagaggactacatactattccgtctgaaatgagccgctccacacgggaggaaacaaggcattgagacactattgctatcgatcgcttctattcgctgcgttggaccacctgtatgtcttgcccactggaacgtaacccatgagcaacgacggatctgcacacgacttctagtgttccggtactgccggcactcgttcgaaacgcacggaacgagtggcacacgaatgatttaaacaccggtggtctttgtggaatgaagccttggtgtcgaccgatccgatcagtcggcctaggctggttcggaacagatctcgttcgcatttcatgggactttgcatttggcacgtatggatgccggcacacggcccatnatagatttccgcgatcgtatgggcatcgctctcgtattttgaccggcagggccccgttgggggcagttcgtttgggcaccatacggaaaagagatttcgcagggatcccatcctttagaacctagaatggtccccgaacgtttgcgctagaattactttcgatacgtactaagtatttctcgtgcgtatgtacttcttttgtggccaacgccaagattggttcgctctacacacgatttgaactgtcttggtgtacccgagcgcgtgttttgtggatatcacccgcggcggcccattatatgtgcagcttcccgatggtatgctactcccctgggaagttcgcgtggggagcgccacccgtagggttcgcttcccgtccgcccttgtatcggttggttcccccctatttatcgaattacgtaggccggtttgcataccttactggcgcagcactttgcctgtgcgcgctcgttgtcacccctcccgcgcttgccccaccttgttggccgttctcgttttccccgctgtttgaagtcctcacaaatcgtttgttctactcttgggcctgccttaacaccagctctgttcccttcgggtcggcggcg

SEQ ID NO: 418310 - DNA, 814 bp, Homo Sapiens
agcggatctggctgctccgcaatccgagcacagcgacggatggccatccttaagtagagcgagctctatccgcctttcgattccatgagctgcctcatcctgagaaggacgatagtcggtcaatgtgactgagcgtgaggtaccgtgagagtaccaaccgcgactaatgatgcgaagcatgggtgatgcgcactaggacgaaaatgttcgagatccctggacaggagtgtcaccgtcgagtacttttgggtacgacaactgcctagagaaagcgtggtgaacagcaactgggcttatggtacatgacatgtgtgttatatggtagcaccgttaatatgatgccgttacatgggtgaatggaactcgaaggatgggagtagctagcacgatccatcatgtgtgccctatgatcgtggcggagcaggagccgatagaaggctcatagaaatttgactttaccacaggttatacagggcacacataacggtcacgatggaagctgtccgacgtacgaacgaatataatcacgggcttacgcgagaccgaatcagcttggcgactgccctggctcggtaagccgcaaggtggaagaactcttcggtatggcagtggtgtgagagtccctacacagggccagtgagaagggaagagcactgccaaggttgtgcgtgcccaaagtttggaattgcatctatggcccttggaggggggccgcctcgcttggcccccagaaatttgcaaggtgcgttgtgacccaaaacagttgttgggatacaccaggcgacacaagcagatccccgatagatggcatcgt

SEQ ID NO: 418311 - DNA, 848 bp, Homo Sapiens
agcggaaagagcgaacctgtgtcgcaggttctgcgtggtgagaagacataatgtatgctgagcgtaagttggtcagtactcactacgaaacagtctcccatgaatcctgaacacttctgttagactgaatcctatactctgtcggagatcttcccagggaaatttagccctgagtccgaggaggacgcacctatgcaccagtacggagctctgcgctcaacccagtatctgtaggcccaaggtcgcctgatctctgctgaagtgcccactgcccgacgttcgatcagcccgtgccatatccctttctatgtagttctgttgtatatctctagagactgtgagtgctgtgcatcatgtcgggcgccagggctggacgtgctagtggcgaccagtcgtttggcgtcaacttcaatcatccgggctccaagggttcaaggtgatttcctcctgccgtccttgtcctcccggatgtttagctggggattacatgtgcgacccgttcagcgttaccgtggcgtaggtgtgtgttgatacgtttcgtcagtagaggcaccggggattcgaccgatgttcggcctagggccttggtgtcgccagcgtcctgaacctcaggttgaatctcatacttcgggccattcaggccggtccccaaaacgttgcgttgggcagtttaacagacgttgttgaagccctgcacggctgcaccctggagcgcccgttaatgtcgttagtcataacagtgcgagacaggtaagcaatcggaatggagaaaaaatttaccaagaaaaagcacatcggccatttttagcttaaagcaaccagcgggcaaggaggcatggttctcccgg

SEQ ID NO: 418312 - DNA, 1131 bp, Homo Sapiens
agcgggcggtggctgggccgtgacgcgcattgcagatggcgctgagctcgaggagctgccgctctgccggagcatgatccaagggggtccagctatcgctatcccgtgacgcgccccctgtccctcctgtctccgggtgatcgccagactacggtctcgggtgtagcgtgtcttcactccccttccgagcgcgtgacaggctggcgcgcgtcacgggcgcgcggagtccgcccgcaccggtcgtcgcacgcgaagaacacttggagcagaggtgactgttccttgtctcccagcttgaccggtaaagagccatcgcatggtatgtgaggagtgcgctgccgagccatccgcggtgtccaactatacagaggcgcgtgtactatcaaatgcagtcatgaaatggccaaatgagacacagagaccttgaaggcgccgagcgtccaatcgatttctcccgatgcttgcctttgtgataggagaaatcgatgggatcggttggtcggcggccccagacggcaaggaaatgaaacgtcgcaatcccatgggatggacagtgccctcgacttgaacacagtctttaacccaattgcagatgaatggcatccattcgctatccctcataacaaattgtaagtaaactcgtgccaagacaagattcagcatgggtcggtggccgcacataagcatgatctcagcatttccgcaccaaagggcccctccccactcggtggcgcacatcctcggtccattggcaacactcgcctgagaccctaaagcaattgtcacgtcggggaggttccccaatgaatctgttgggggtgggctgcccttcctttccatgtttcaacaataagatgacaccctttttcgagcacgcgttgatgcgtgttcaaggacccatcgccggtaagggcgaaccggtgccccaaataacagggggatccaactccatgttactctagggacggttttctaaccaaagtgctgcagcacgtgggcaatttccctaacgtggacccatggggcgttgaaagattttctccttcatgacaccgggcacgcggttgacttgacaccgagcccttggagagggactatacctgtgtttaccccccttagatgggaacgccc

SEQ ID NO: 418313 - DNA, 1110 bp, Homo Sapiens
agcggaacgggtcttggtagctctgggagcttaccggtcgagagttgatggaacccatgatagaatgcgctcctgacatggcccttcgccaatggactcgacgctgagaaccggcgatgtactcgggtcaattcgcgagggaagcggggacgagcaatggggggcgagctggacgggccaccagaggtacagcagagcatgcgaaggcctgccagctcagacaaggaccacagagcgcgggctgagtcggccgacgcaaggccatctggcgagatcgccaggggactacgagcggggaagcgtgaccgattgaacggagcccgcagagggaggtccgtggggcgatggtggcacgtaaaggcccagacgacctgtctgagacggtagtccctaggaagtcacctgctcgaccgcgacacgtatcctctgtcacccgtaatgattggaggggaacgagacaatgcgaaggaccctaaggttgggttgtcaggtgtactcgtttcgaaccaggacgcttggcggtagaatccgtgacggcagaacgcctggaaagcatgccgtgagagacacaaaacccaccaggaagacagggagaaggaacgaggcagcgccgccgcacggatcttttacgttgaacacgtgacagtggcacaagaagccgtgccgagacggacaggggcgaataaaatggaataccagcccggaacggagggaggcacaagacagggtggggggggcctgacgtgggccggggccctcagttgcggcactgtgggtcctgaggccttgggccctgggtaacgagtccgtcacttatcatcctcctgtatatgaggcctgtggcatctccatgggactcgccagtgtcctcttggagagccggttcggctggagggtcccccagcgttgctgtttctggttccccatgttgtggtgcgacgtcccaggactgtgcctgggcctctttctccttggtaaccgctgtgggtgcacgctaatgtttccaaagagggtatgtcgcgtttcccatggtcggcgtctcgccttccctgggatcgcagatggtgttttacccttggtcccccttctgctgccacttgtgggttcaag

SEQ ID NO: 418314 - DNA, 1680 bp, Homo Sapiens
  misc_feature (382)..(382): n is a, c, g, or t
agcggggtgggagggcgtggactggcatggcggaatctgtgtcgtgatccggagctgctgtggacctcgatgcttgtgactcgcagtaattatgccctgcaagacctgccgaggtggacgtgagtagctcaagctacgggtgatcaacccatgacctatgcctccatacgaaatataacagggaacattccgccattggtaagatcataagaattgatagggcatcccaggtttcatgttcgtgagtcgcagctgtcgtacatacattaattgaagttgcctatataaaccatacatatgacttctgtgcgaacaacatgagttttaacgaccttatggtaacgcaatctgtcgtcgaccttgagttatcgctttttagctnttcaatcttataaaaagcagggaacttgcatctagtattgctcggcgaggcaatacgagtatataggcttgcacttcgatagtaatacaagatgtgtcaccaattttgaacctggattttggcacgcgagttttacatggatagtcattgctaagtcgtaacacccgattgtctaatctatcatcaacatatgagatatatgaagcccagagatatataacatttggccataggttaagtttgcatctttactatttgattgcccactttttccttgtaggtcgctttagaattttgcgtaaagaacaggcctatgttaccccttgcgtttgtgaacgtctatttgttccataggtatgtcgacacatgataactccactggcaaggtgtgggatgttggatacctggaaaggcacccgcccaggaaaatagcgtgaacccccgagggtctaggactgtgcactagaacgttgctttagaaagtctttggaaggggtcccttttccaaccttgctaaccgaaaatccccgggaaagggcccaacttgggaatttaggggtcccacggaaaaagctgggttcaacaggcaggcacaacacacacgagacagtgcggtttacccccaataaaatgggtatagcccggcctgggtgttttcccgcacaccacggaaccaaaacgtggtattacctcgacgcgagggcaggtaaaaggggcctcacatggaaaagaggcccgcgggggtgctccccggactgtgatgataaggggcggggagcgagcagaccccccttgtgggaaaatgttgcccgtgggaggttatagaacacatggcctgccgccgaacggattttccaacacacgagcgtgcggtgcctcatgggagtggtcttccccacaagcggtgttgtgcgccttgacaataacaccgctgttgatgcgcacggtgtctcttgattagacaacgatgtgattatcgcgggggggagcacatactcttttaacaacgacgcggctaatctacggtgcctcgcaccaagggccgcctcaagacggttttttacaacaaggttagtctccaacagtaagtcgcgcttgccttgttcttcaacgaagctatttagcaccgtccgggctccaatccccaacttgcgtggctgaaccactgacagtgtatagtctatagagacactactcatctcagctctcgcggcggctcgacacacctacgtgatcgatcgctacgcaactccagtcgctccctaccgacaacttctgctctgtcacgcgatacgcga

SEQ ID NO: 418315 - DNA, 1600 bp, Homo Sapiens
  misc_feature (802)..(802): n is a, c, g, or t
agcggattgccgcattccggacgttagtgaggctgcaggttgcgtaatacgcacggacgaaagctaaggactaaacgtcccagttcgtgtgcacgttccggaacggcattgcagtacgtgattggatcctttgctactcaggtcctgaagcgagcgcgtcaaccggagtgcgccgaaggtacctgcacgtctgaggcctccgtggcgcatccttaccctggacacatcacgcgactgacctaaaccccgcaggcctgaagcatagtcctaacattacgtcgcacaccagaccatcgttgcgccccaggcgtctccggcccgtgcaggcaagcaagcgcatcccgccccctccgcaccctccgccgcaacgagcgccgcgcctcccaacgcccgcagctgtcacgcccacacgtgccctcagcgacgcccgaactcctctcccacaccacacacgcctcctagacagtcccactcaccgccgcaggtcatcacaagaaaccacgggttgcgtccgctccacaggggagcgtccagcacaccgcagcccaaggcatccacacagctcaccagggtttcacccagccacagcgcggcccacccggaccacccgagcaaaagggttcaccagggcccacccacaatacgccccaggccaccaacacacttccgcaccagaaccacaccgcacccgatggcaatcaccacgaggcaccaaccccacgaccccggaccattaaggcccgcgagcgaccaacggaaagcaggtcacgatgctacaaccggcggggtcatcccacaaccnaccatcgccaaggctagttcacatctagaccacctgaggtgcatccaactcattccccacctgggtcaaaccaagggctccgccccaggtcacccaccgcacaccacaaggcggttcaggccagcagtccacttccggccgcgaacactggtcagcgtcacgtctagaccagggcaaacagcggatgagtcaagtccggacacccccggacgacgactggggaacctcaaggtcggctcaaacttaccaccgagactttcaatagaggtcgcacgcaagacaagcgtagtctacacccccgggaagggaagggcacacacgctgaagaatacgggaagcgaggacccaaccatatactactaggagacacaatacgcggaccccgcggggacgaccacacacagcccccccatgattagccgcgttgaaagttcggaacacacattgattcccgacattggaccagagctaggatttaacagatagatgatgggcaacgaaagaatcgctatgtctggaacggcgagacagaggggctcccctatgagcggccaccaggtctacgacgtcgtgtagaacattatcggacaaagcgactagtggttgtttcgacgcacgaaatctggtagcgttcgtaaggtgcaatcgtgacaagtacttctcccgagcggcgacaccacaccgtgagacacttaccaacggacaactacgactggggacatagccgtcagtacaacgtccgacacgggatctaacacacaacgaccacggacacaaccgacagccacacacaacacc

SEQ ID NO: 418316 - DNA, 935 bp, Homo Sapiens
  misc_feature (460)..(460): n is a, c, g, or t
agcggaactggttgacgatgacgagtgcgaagcccctggacgctgaccaactagagtaacgacgtctgttcgcactccctgggatccgacagcgaggtgcgcatcctgaagcagtcaccctgagagaggccacttgttgacagaatgactagacaatcgtttgatagaaggcggaagactggggcgtagaaagttattcttctgagtacctagaccttagcatatacatacgctcttggtccatctatcaagtaccctcctacgtacgtcgagacgcagcagtgctatacagctggcaacatcgccacgctctcatagacatcctatcgcgtcttgcgaggaccaggttgcggcgaacctttacctcttgcgccacacggtcatgtcttgactacgattgccccttcatgcgttggcgtcacgcgtaccccggctctcgccaattactccgactgcactntcgtcgcacgcggggacctgcgcggcccttcggcaccccacccaccatctgattgcattcgccccgcacgcgcttgccttgcgacgcttcgccatgccacggcaatacaaacagtcctgaactcgggtgagttccgtgagaccacccacaggcgggttggacaaggcaccatgccacagcaagtctagcaatagccctacactgctttgtccatttgcagcgcacaacccggggccgaccgttctcgagcacggctcccccggcacgtaactccagtttgcaacctacccaggaaagaaaaaatttgcaaccggacattgcagtaaatcgtggtagtaccatttctcgaaaagcccaactgcggcgtaagagacagggcgatcgagacgaccgcagggacgcttacgacaattggtaaatcacaccggaggccattgaaccgggggcctggagcacgctctcccgaaggagcgag

SEQ ID NO: 418317 - DNA, 1529 bp, Homo Sapiens
  misc_feature (1316)..(1368): n is a, c, g, or t
agcggagttgcgcgcgtgactctggctgttgctggagctcctggttcctccgaagggccgtcggctacgcgcgcgcgcctggcgcgcctggggggccgcgtcgcggacgagcggctgccggggaggcagtcgccgcgtcctctgccgtcttcggcccactccggatctatcgtgccgcggcgaccttgccggacgcgtccgccagccgcccaatgggccacgatcgtgcgccctggcgaccatctcttccacagaacctgcgctggagcactcactcggatctcctcatcctcagctgcacgagcgtgactcatcgcatccttcaatgatccactagccccataatgatcttccaatcccaccttaatgccatcaaaccaaatcaacccatcctaatcggtacattgacaactatttcacaacctccccatcatcattgccacaccacacaactgcacacaatacccacacatcaaagagcccccactccccctgttccccatccactaagtgcgacctagaattcagcccattcgctggctgaccccgcaacaacatgcaacacacctatcatttccgcacagcatgggcactacaccctcaacactatttccgcctcaattacaacacaccatggcctcccttgacataaatcaaaaacgccttcgaaatcccaaccgtccaccaatgcccgacacgaccattgcaaccacccacacactacagatccaacccaaaaagcccacaacagcgttccggccctaacctaagagggacacccacattcgctgaaaccacactgtttcaacagaacgtccgtatattcttggaaaccccactacacaaatcctcgtgaccttcacatacggccttgcaactgcgcgcttgcaacttaagtcacaagagtgatacgatcccctacccatacctcacctaacacggacgccatcctggcactcgacacactcctcgctttcgaaacgacaaaccacatggccataggttaggctgtgaacactcagtccgttggaaacacactcattgacggcacaccatctgccggtgtgaacaaacccgaacaactctcctaaaagctccccgcacaaacaaccggctaccacatcgaacaattagcaaccggcgcgacagcgaacggagagcaagcgttcgatcaacccaccaaatgcaggactaatcggaacacgacctccgtcgggtaccaccagaccacgttaggcatcgaggcccagacacatcggggaccaacaaacacagcagaccgcaacaggcggcaatcaaaaacgcaaacgcgtgannnnnnnnnnnnnnnnnnnnnnnnnnnnnnnnnnnnnnnnnnnnnnnnnnnnngtctaaccaacagcggggagccagcgctcaggatactcccgaagaacataatcctaccccgcacacggagcgagcagagacacacaaacccaaccccgagaaaccgaagacaccatccggaggaaaaacacgaaacccatcaccaaccgagagcaaacacc

SEQ ID NO: 418318 - DNA, 1640 bp, Homo Sapiens
  misc_feature (1075)..(1075): n is a, c, g, or t
agcggacagggtgcccggaatgtccgccatggtagtctcacaaagaggcacgtacccactcctccgagtccctgtttccgtcggccttcgtgtgtgcccctcgaagactcatcgatgactggccgaactggattaggtggagtgcgtcgggcagcgcgccggcggcatttgcgcggcgctgcggggcatggcccgtgtggcgccacgccagtgcgtgcactgggctgcaactgttgctgtgacgggcactgtggggatgctgcgcttggatcgtgcagccgtcgctgtgcgggagcgcctccagtgcgacgcccgctgcatctcggcctcggggtcgggtggtgtagagtggtcctcgattttttcttccccgagaacgtctacctcacttcctgggcatctagtgcctcttatgctcgaccttcttggtcaactactgaaagtgtgcaaggcaattctcgaggtccagcaagcgacaagagcattaacgttgatttcgcggttaccatgggtgttcctcttcttaaccttaagccagacaagttgtcccattgcctcccgaagggagcgaacgtgtttgtttccgaccgctggcgtaggcacttcagtgtcgctggtgcgccgttgtctgtgtctcgcagaggacatcgcaggaatcccgtggttccccttgtctccggagaccgtgcgttctggcgccgcgggacagggtcccttgggttacgctgtttcaagtcattcgcgatttctctccccgcggctggccgtttgtgacgcctttgttcgtggcgctcttacgggggggcgccaccttgtgttatcacttccgcgctcgtttgctacgcctggtcgggcgcattctcctttaccttaagccatctgtcttctgcgcttcactttggccctgcgcttgccacttgcttagtggcgccagcgctcttaagtggtgggcacgcaattctgtggcgcttcacttagggcgaatcgcgcttctcttttgtctttgctcgtgttgccaagttgcgcgccatgttctgccgagggattgctcgggggtctgcgcgcgcgagacttntgtcacttgatcctaggttctcgctatttgttaatttttccgcacaatcaccgggcgcccgtctccttccctgtatcgatttgatgcgctttttggtgttccaaacctcgtgaactggtccgttgcgcgccgcccttgtcggaagcgttccttgtttcgcagtacgatcggtgtggcacactgaagcgcgtgcctattgcccccttatttcttgcccgttctctattggtgtgctgagacccggtccggttcgacaggcgattttctcgtcttgcccccgctattttgatgcgtttccctgtgaccttgtttcggcctggaggatttctagccttttgcgtgactgaagcgacctgctgcgttgtgatgagacggcgcattgtgctgtggtgatctttctctctgtcttcgcgccacgctttgtcgtttgagtgtactactaatggctggggctcctctgacgatgcactgtggcactggtctgttctgacagctggcgaacggtgccttgacaattaccttcctcgtctgtgtcggctttcttgtgggctgttatcccgctgct

SEQ ID NO: 418319 - DNA, 1260 bp, Homo Sapiens
  misc_feature (136)..(136): n is a, c, g, or t
agcggggtgttgcggaagttgacgccccaatgcggccggagatcgggcccgcgctgctccacgggtcagccgtctccgtccgcgcctcgggagcccatgcagtccagagctgctcgtccttggtgacgtgacaacnacagtgtgacttactgtgagtacatgtggacgcggcatgacgagcgatctatgatgccgtggtcgcgaggcgcatccccaaccgaaggtccgaacgccccgtccgtcgaacacaagggtgtcggagatatactgcgtcgactggctggaacgcgatcaactccgtggacctggcgcaaactggaccgctggtaaactcagaacctcacacgtcgacctgcagtcctgctacctcgtgccaccggaaacacagctacctgcggtgccttggaaggtaacatggcaatcactaggcatgtatcgccgggaagacttcgcataatcgatagcgaaaggggcacgactaggacagaagacaggggcccgaggcacggccatgaaggaggctcgacgcaatgggctgcggagcaccacccgaggagacgggggggcgtagcacacccgcacaaccaaagaacacgcaacggggctgaggaaccccctcgcacggcgcccaaagcactagtggagaactagtcagagggtccagtgaagccgagcccaatattcaccgaaggcaccggaaaaaaggtgtgcgccctgcgaacccctgtagccagaacaccgacgtacggcagcgaactgggcacagccgcatgctcaactagaggatgtccaatgcatacagtaccagctccatcaacccaggttcacacgcggaagcgcgcctccggagcccaactcgcagagtccccgaaactcctgatggcacagagtccgccaggcaatgcaaccgaggactcccacgcagcgcgtaccacgaaaacggcgtggggccgtaaaagagggcacagcacacgaccaatctgcaagatgaccctcggcaccccgcaacacgacattgcgcaagcgcaacacacagcacaacagcgccccaatacatccccgcacgaagcggacaggaatgcgcgaaggcaccatcaccttggcgcaacacccgcgacagatgcaatcggtccaaccccacacatgatggggcacagcaaacgtgtgagtgtcacacacaccgcggacgctgccagacagcaggcacaagccggcacgactctacaggcgccatcagcaagagcggcacgttcacagcca

SEQ ID NO: 418320 - DNA, 1176 bp, Homo Sapiens
agcggagtatggcttccaagagattggatacctagactgtaataatcctgtctccaaagcctcctcatcgatcgtaacttccttcgaatctatctaggaattcgactgtgaggtgattgctcgtgcttggttgctggaggttcttgtggcctactttccctctgggtgctactcgtagtctctcccttgattgcccgtagcacactgcctgctatatgctccctgtgtgctcgtcgtatctggcgccattatggtaggcgtgatgccctgtgcggaggccttgctacttgctcgtgggtagccgcactagactgctggacatctgtatgctcactgttatctagtcccctggatgcttcctcgtgctcgaaactctctcccgtggccatttcccgtgggtgctagctgttcgctgatccgcagtacgctctcaggaatcctcctttccttggcgaacctttgcacgcgtcagcgcctccatctcttagacaaagtaaactacatggtcctacagcatggcaagaggcagcctgcgcgcaagatgagcagctcatcgtgcccagcgggccagcccctagaagcttggcctgttccctcgtgcgcaatcaattacggggcacactggggagcaacctagccccttcacctgcggtgcgaaccatgagccatcctttgccctaaagagtagcttcgccatcgataacggaaacagtagaatacgtgcaattgcccccaagcggaatcttacaccaagtcctagcacttggtgcgccttgccaccgcacaggtctacacacaggagaccgagcaaggtccatgactcctgggtaaaactcagataaccattccgtggacctcaacaagttgcggaaacccacacgcccgcaaatgcccaggccaagagacacgcaataactacagccgactaacaccgcgcatgccccgccacaaccacgtgcactgctcccagcgcacaatcaacgcacccacctacggacggaataccgggcaaaaggcagaagcaccgccaagatatcgcgcacaaccgcaaaccggcaatacccacaacgaaacacacacaattcagcggagcatccacaaaaatcgcacacacggagcacagactgacctggcgtcgccgccacacccaacccaagaaccggccacggaccccaa

SEQ ID NO: 418321 - DNA, 1162 bp, Homo Sapiens
  misc_feature (320)..(320): n is a, c, g, or t
agcgggctgcagcgttgacccgtgctgaggctagccgagtgtccactctgcgctgctgtgggtccgctgtctcccctcgatgtggatgtcgggctggatgcacgagcgcggtatggagagcgctgacgagacgactatctacatgagaactccttctccgatcgaacgatgctccgagaaagggacatccgagagttatctgatacatacggtggtccgcgcccgcaatcctgtgcaccagtcgcatcatcacgagaacctgtgacaccgaccttcggtgcccagtatcggactcgcggagccgcttacgcatcgagctncctgcagaagaaatgcctgcactggtacttgcctgagtgcctcattgcgacgagcaacacagggtatactgcactctactcgtgtcacttcgtgttgctgggtccttccatgactgcgcagctaccctcgcagtggacttgccttagtcacgcgtccgcctcctctgcgtgtcgaccccccgatgtgtagcggaccgaccgtgcggccctcctttaacacaggaccgcaatcttgcgagtaaaccgcagacacttacagtccgatgctccgagggaactttgcctgccccgctcccatggccaacggtgggctcccctgcaacccttgcaagagccgtactcatcccattgcgcgcaaggcaagccttggcgcgcaccgcatcttcgccaccactcgcttgcgcgtgttcgccaaccacaccgcacccgcgccgttcccccggcgacttaacgtgcccaatacctaagttccttccaggacacccctcgtagaacggactcctcctgcacatctcttcgtcgcgccttactggacaactacctgacgacacgtaacacgactcccgcacatttaccccgtgctccattctatccactggcggctggatccctcgtctcccccttatccagttcctgcacggtatctcgtcccttagatgaacgcacccgctactcatgccccaccttttcgctttacctccactcggggccctccgggttcgtcgaggctccatcaggggtactcccttgtgcacttcgtccagttttagccagacttgcccggtggcgttcccccccaacatcctcacacctgttcatcctccccttttctaggcgccccg

SEQ ID NO: 418322 - DNA, 1231 bp, Homo Sapiens
  misc_feature (577)..(585): n is a, c, g, or t
  misc_feature (769)..(832): n is a, c, g, or t
  misc_feature (865)..(960): n is a, c, g, or t
  misc_feature (1057)..(1105): n is a, c, g, or t
agcggctggaactcctggattggtgttaacggtggtaatttcccccatataagcatgtagcaatcactgagctctgagctagatgaaatctcttaaaattctctggttgtcttcattacggactgactgaggctgacgtctacttctctcactatgaacagctagatcaataacagcagagttctcactcagaatgctcagctacttaactttcccactgcaccaaactgtctctacactaaactgtgctgtactcctcctccaacaagcttaacagctcctactcctgcgctgatccccaccgacaactactaccgtgaaacagaccactgccactgtccccggtaacatacccacccagcagcttcctcgtcacaggccgtgcacccaacgctgccactcctcacactcccgtgcgacacactcatcctctcactcacccccctccctaaacacctaccacctcaccctactcacaccacatcactccccacctaaggcgtgctgctgcacgcccaaaacacctcgccactacttacctcccacacaacttggccacgacgccaccaggacaagnnnnnnnnntcacccgcgcaacaacacaggcccctcactcaaccacgcctgatctacaacctggcaagcgacccttggatcgcccatcacatctaccccattataaaccgttacaccctttttggtgcccttgaaccctttctggtgtccctggctacttggaggaacctccctccctactacactcccattnnnnnnnnnnnnnnnnnnnnnnnnnnnnnnnnnnnnnnnnnnnnnnnnnnnnnnnnnnnnnnnncccgctgctacttacaacacggacaccccctannnnnnnnnnnnnnnnnnnnnnnnnnnnnnnnnnnnnnnnnnnnnnnnnnnnnnnnnnnnnnnnnnnnnnnnnnnnnnnnnnnnnnnnnnnnnnnnttcacccaccgcccaccccctccccgaccgccccgccctaaacgaacacccacactcgaacccacacgccgcctccacccacaacaccccggaccgnnnnnnnnnnnnnnnnnnnnnnnnnnnnnnnnnnnnnnnnnnnnnnnnnagcctcgccccgagcccagccacatcggccgcacagttgaaccaaccccacacgcacaccggacgcggcacaaccccaccaaccccgcaagccacacccgggcaacccgccgcgcgcgacccccag

SEQ ID NO: 418323 - DNA, 1359 bp, Homo Sapiens
  misc_feature (848)..(848): n is a, c, g, or t
agcggggggcacgggggtgccaggggaggaggaggcggtgggcacgcttgggcgtgaaactattcctctccccccataagagcggagcgagcacggtgagcgtccttgaccagcctggaacagtaggttcaatcctagcaagagacgctgacgatgaagtagtagatcggctaagacaaacctctcgatgatcgcgcgaaaccatggcgactcaatccatcttcgttgacgcctatcttcgtgcggccatagcgcggcaaccggcacgcgcctgatcagtgcctgcgtgcgcgcgactcgctcaatggctgctagaggcggcagctgccttgtcagagcgcagcccgaagatccctgacccaacagagtacgacagctaccgagcgccggagcgatgatcccagctaggcgcgcggcccgcaggggcctggggacgagctctggcagacaagccctagacggtcgcccgcgagcccgggggaccgaaggcgggccccgacccccctggagcactgctattccttgcccgacagctcgtgcacagggccctcatccaacacgatgagatcgttacattttgcatgctccagtatggggcggctcccagggggtagcctccctgggagccattccgggttaggctgaccaccccataggtgccacgctcgcccttcgggcgctcggctcctcccttgaacatccggacgacaacatgaaactgtgtggaccgcgtcacgcaggaatggggccatcggttccccttccggccagtccttatgttagtcacgcagaaagaattctcctgggtacccaactcagaatgatcatcggagctgcacatacctgcncagacgcaacgtccatggcagaggagttttcagaaatcccccttgggcagcctccattgtctcttggctaacccgagagagacttcaataacagcaattgggcgagctctgcccaggtgccataactcctgtggaccacaccaaaagccttagaaacccttggggtcacacaagttccaactcccaggggcgccaaggaaaaggcaccacccgtgctggaccaaactcaggagaacagccactgcgctagcggggcgatagagacgtgcttgcccacggccaacctgcctcgaggggtgccctttacaccagcccgtaatcttgacgatgacccccctcgccgagaagagcttttagcgggaaccaatgcccaacgggaactgccgcccagccaccgacgaggcgcctgcaagatacgcgcacccgtcccacaagaggcacacaggcgcaaccccaggaccacgtggactccacccaacaaacgcagacacatcccaccaaacagacaacc

SEQ ID NO: 418324 - DNA, 1055 bp, Homo Sapiens
  misc_feature (590)..(590): n is a, c, g, or t
agcggagtgggaaatcccggctgctgctgacggagaggagcgtcctgagcagactcgcatggcatcgacagaaagagccttgaagggccatgtggagatatcgacaataatctcgcacaatgagaggtagtgcgcgactatcgtgtgacagtagaggtctttcgaagtgcgcgcgtgatgcgtggtggtgtgaaatctgagattcgaggagaagctcgagcgacttatatcatacttcaattatatccttcagcaagacttggtagtatctgcgcaggagttatccatggtcccttgtcagtacgacatttctcagagaacgtgtgcatggtgggatctgatccgtgaggttggaagtcgatacgaacggtgcgtggttcagcgttgccgtgcgtcactatatatgcttcgagtagccctcctattggattttgggacgatgcccatgtgggactaccttagcgtgcgacttgcctgagcaggccctgttcatcgaccttacagttgtgcactaggtaaacactggtgagggaccttacccctaaagagttgtcaagaacactctatccgatggttgtaaagcgaggaanccgtttcgagaatggccgtgtactacaagccaggcgggcttgtcgaagatgggtgggggtgatcactacttaaacattgtccaaatgtgtcatcccctgtttcaaggcaagcacttgagaaccttttaaaaaagcgcaatttcgcggagctaagtttgggaaaggtccgctcacgttggaacgcccggcccggttcgtggcccagttgagagcacatacacacggtggcacagtttgttccaatgcgcggcgaacgctttgtagatttggggtcccgagagaaatgagaccaacggataaacgatgcgacgccgttcctatacaatctcccaatcgaaacgggggacagatgtggccctcataacacagggggtgtgacgtaacaatcaacaacccaccccaaaggtaagttacactctcgcaccgagggtacggaaactactatacccaaaaagtataacatag

SEQ ID NO: 418325 - DNA, 1321 bp, Homo Sapiens
agcggatctgcgatgagggcatagctcacgatcgcatggaagacttgacacctcgcgggaagtgtctaggccgctgatcttttgcttctcctccgtgcgtcgcacgactcgacctgcaagctggctatacgttgcagatggcacactggaagaacacatacgctcgtctcgcggagaagcgctcgagagtgccacttactagcgcaatgaccacgatcctcatgatcccacgcaagttccacagcagcctcatgcttctccgccagcgatcaccaatgttctagattaggcaccacaattgacacctgacgtctagcgcgagtatggcatgctggacacggagccttgcactctagtgggtgcgtcgcacctacgtgcggacttgttaccaaagcaaggcctgcttcattgtttgcttcgccatctctcgcggtaattcacaccagctagatcagaccgaactagccatcgcgccagccgctcgtcccctttggagtgtcactcgcttggacccattcaagccacaccgacccagacatatccttgttggcacccccatcttatgtaactgcatacccgggagaacagccgtatacgccgcaaccatcaaaactgtaaggcgtagcgacttgcatgcaccgaccatgcctgcaactccgtgcgacctattcccggacacacgcggatcacgccccacgtgtacccacctgtacccgtgtccgggtgcgcaccccgctgcgactgcatgcaagccccctgtgtctcgcacttggacgaccctcctcgtacgtcccccacagttggttctggaccttgctatgcacacaaaaaccggggccccatagcgaacggcccgccccctaaactaccaacgccgatgggcctcgaccccctggggcttcgagaccaacgcgccccaggacaccgcatagacatacagcgtcgccaccgctcagcccccgaaccgcctgcgacgcacgctccacgacactggcggccccatgctcaacggtagcgcccacaggcgaaccacagaacgccgccaaggcggcccctaaatcaacgggctacaatcgctccgacagcgcgcacacaacctccggaaaacttcgggaacccacaacacgcatcagggcaccacactaacagcacacggcgctgacccacccgccgcccatccacgacgtacagaagcaacaatacccctaacccaacatacaccgatccggcacgaccactggcgactaactcgccggggccaaccgcgaagcaccccgaccttacctacccgacgaacacgcgacccaggaacaccagacac

SEQ ID NO: 418326 - DNA, 879 bp, Homo Sapiens
agcggattcgctcaaaacgggggagccgggcacctgctcctctccttgggagcgaaggctaaaccagtcattatggtaacaactatgtgctagctggagtccccggttactcttatgctgggcttccgtgctagattagactcgagctctactgtcgaaaaatgagcaccgatgaccgaggagccgttcgaggccctgtgagcgctgctcgatgactccagggagtctggaggctagctcactcgagaggcagactcgtgtaacccaacctcggagacgtacctgagtaggacatagtggagcgacaccacactgtattgacggaagagtagtagtaagactcctaccatgagacagggtgagactagtgccgcgcatggccttctattggtttcccgtgggcatgactggtaccattaccttccattggttggcctcgcctacgcagccttgccacaactacgcacgggcacacccaaccagaaacctgctgtcccctgaacgttgcgaaagcataacggccagcaatatcggatccctgatgggcccctcgtcgtctggctgtcctagcaaccactctcaggtaaggcagatgacggcgcgtggagggcccattggtcggactaatatctgtgactgcgagaatgtccggcgacgtgatgccatcgcgcttccctgaacactgaccgtggcactctgcgactaatgtacgcaccacgcatcctctcatccagtgccataccacagtgccaatcaggtcgaacgccgacacccaacgccgctaccctacacgggccccaggagcctgcagacatcaggcacacccagcaaccacacataggcggcacggcacctgccgccaccccggaacccgctaca

SEQ ID NO: 418327 - DNA, 342 bp, Homo Sapiens
agcgggctgggccgggaggctgggcggtccagtgctgggaccagccaactgcccacgaatagcgcgcgcaggcttcggcacatgacatcctcgtgttacccctacgataaactagtctatcgtgcacctaaactcctcttatgtattcctggagtagagaatttaggcccatgataacgtagtgcacagtagccacgagaagcgacgaatatgatacagactaagtcaaggagatggagctcacacctagaggagttacattaatagactcgtaggggcaacaaattagtctacgtaacgtccaatagatcgtgcatatgtatatattgcttaatgaataga

SEQ ID NO: 418328 - DNA, 1330 bp, Homo Sapiens
agcgggcgtttcctccgagggctgtcgatcgtgccgcgagctcccacctccgtttatcccgttcgttgccgccgtccttgcccatgcgccccagtggaagaacctggcaccagacccaactgtactgtggtcatagacgtctgggcatcgatgcatctgtcgtctcgcagctggatgtgcagtgctcgacctctgtgtgtctctcagcgaccggaagtgtgagagacaccttgaaaggtccagtctatatccgaaaaggattctgtgtcccacctgatggtctaaggtggcgacgaccggcccgggcaatgtgccatcctcatcaggacacaatggtgaatccccacctgctacttctgctcgattgcaggcagtgatcactgacctgcagcaacgcagagcctgatgatgatgcgtcagtaactgagcatgcactctaacctgcaagcgcattgatggtagctgcactcgtagcagtgaccgtgtaccttcacatggcactcccagaaggacgtaccagcgggttgaggtgaaaacgcatctggaacagcatggcaattaaggagacatcaacacgtccccgttagaggtatccgggtccttggcgaacgcacccatgctgtgttcattggcatactctgggtctctgaactcgttgcacgtgattctctcccgacacggcttcagtaggttgaaattaccaaggattagggacctaggtccaacgccttgacctacgtgcattttaccccaggagttgggcctggtgcttccatttctatagaccgggggcaaggggcacatttcgtgacagggcttgataggaaattccccttaaatgaagccgaccggttaattttttcaaagaagatatctcttttttgaacctgaagctggggtagaagtggtgcctgacccgacccattgagagagcttcccccaaagttggtaccattttcgccgttggagaacgttattaggtaagcggcataaccagggaacacgttgaaaaccgtcgttcgctccaatcctatacttggttttggaccaagcgctgtagtttgcccttggcaccccatgggggaagcaaacccaatcaaagggttggggcttgtaaggggggggaaactacctggaggcttttggcaattgaccttcctctccgacttttggaacacgctgggttccttggaattgtcaacaacaatttgtgcctggaattttcgtggggacaacacgtctctggtgaggtgtttactgagagagcagtgttgtttcctccacaaggtttgtgccgttcacaacccgcccaattggtttgttcacaccc

SEQ ID NO: 418329 - DNA, 1329 bp, Homo Sapiens
agcgtacactgctttctcgaccgctttccatcgactacttctgatttccctggtcatagagtcggacacgtagctgatggctaagatctgtagcgataccctctctgtcactacgtgcatcgtatgcatctggctgatctacagtgggagatagtggactatgacacatcgtaccatctctgttcctgcatgattcagtcagtgaatgctctgcaattaccagccatatcatctccgaccagtctgataattagatcttgtaagaaaacaagatattaacattgatcatgggatccatacttgtaatgcctacagaattcttaggagctcgtcatgtctgtgcgctacatgtggaaacagtatatacccagatagtaaattcatcaggaactatgcaggtagaccaggttgcaagtgatgcccaatcgtgagacttgacctttgccattgtgcttcaattatgaactttccacgtcactgcgttagccatccactatgttagaaaggccaaagtgataatatacgtggatacttggtgcattatccttgaacacacacgcaattggcacaggaaagacggacttgtactcttaccgtgtttcccttaacttgttgctgtaccaaattggaaactttggacttcccactgtgcaggtataccctaaattgacctcgctgtatctatattgcaaagtgaggaaccacgcaattgggaacccaacccttgattctatctaaaacagcaggttgacagccggttgtgtaaagatataattcggccattgttccacaaattttaggttaccaataccctcggagaaggtattttggcaccaggtttaacctatgggtgttgaagcctaaagggcggcctagatggtttcccaaccgcttgtcacaaacaattgtgtaaccgccaatgaggcgggcccacttttggttggttatccagcctttacggtctaactgtaatggatttaatttaacttcggcatccagagccccgtgtttctgaaccgtgttaacactagctattgcaactgtgccattcgcatggccgactatgttgtgccaaccgtccatgtgggaggcccttggggctgcgtaagccccccgttatgcagatatgactcgcacctgcgttaagcgaaccacgcggaaaatccgaatattatgtgaagagcaacacccctaagggtgtgtacgatttgtcccggatataggccttccgactttaacctgtaatgaggtaaatcccaatagccaattccttaattgcttgtgaacgcaagacaccggtgtcattgtgcgtatatcaacgccattgac

SEQ ID NO: 418330 - DNA, 829 bp, Homo Sapiens
agcgggctgtacccgacccgggacgccctgctctcgcgccgaggggttcggcgcgggatacgtgcagaatccggactagctgagaacatgtagaatttccggacttggagcatacctactgtcgtcatctgcttcccgtgcgtgtgtagatgtggacaatatttctgcctacaaaggctgggactgacagatgactggtgaaatgtattggtttggaaaacttggttgcacataatcacagctatatatgaatagccaagtgcctaccttcctggagctactctatgggaatatgggcgtcacgaccacgcatggacaagtccaaagaccgacactttggcttctcctctgggtattgtggcgtcgcagacttcagcatccattgaatgccccaatggcgaaggaccgaacatagcgtaggtcgagtgtcggcgagtcaatcgcttgatatgtggccaaccggctctcaatcctcgctgcacgtgggcgccaagtacaaagggtggatcggttctagctgggcttgggcgtgggttctatacttggttagagtagacctgttcctttcatttgatcaatccagttgtgcgagaatcctacgacagaagtaacccggatatatatagataccaagtgcggatcttggcgcgaggcctttaatctcttcaagtccccatgggtaacgctaggagatttctgtggctttgcattcggaagggtggatccagagctgtctactaggaagatcattgtagagcaccagccgatggatacatagcgcatgcttgcttgaccgagaacttagaataggtaaagggccacagaccaa

SEQ ID NO: 418331 - DNA, 1305 bp, Homo Sapiens
  misc_feature (103)..(103): n is a, c, g, or t
  misc_feature (139)..(139): n is a, c, g, or t
agcggggcgtgtcggtccccgcgggtctcaactgagctacgcacgtgctctcagacgagagagtgctgtacccgagctgatatcgaattcttgctgcctgagngaggaagattgccgtgctgggatggactgattcgtncctagaaacttcggtggcctcgcttggactaacgaccgcccatagcgcgcagggagagacccgacgacaggtctggccgcgcttcgcgggccgataggaagtccccaggattcgaacggtctatacacgctgcgctcagtttcggcgtcgctgaagggcagacgcaccacagcgaccctctgcttggagaaacgtacctcactctgttcgattcgagggaagccacaacaactcacgctcaaaaccaggaacgctaggcctgggtccgactctctatagacatttgaacactctctgtggggcggaaggcgcacacgcttgtcagccgttggaaagacatatttccctcttacgcttgttcagtccaacggctcgggtaggtagctctcctactgcataggcaagcctgtggcgcttggtatacccctttatgaaacaattgcgcgggtttgtcccttcctgtgcttgtttctccagggcgtggtaataagcgcagcaacgatcgaggagccccttttagtacgaaccttaatttcgcaaggggaaactttgttgcaattgccccatccataatgtaaatccggtgggggaccattactttctttgtaagtgtgaccccattcaccctttggttctgaagaaacgcaacccaaccctcggtgtactttcacggtcaacggtaaccttccctcgaggttaggcaacgtttggcggcttgttccttaggtgcctaatattggggggcttttccgaagtacgcccttcgtttaacttgtaacggtgtggcaatggtggcaattgagttttcttatatctctgtgtggaaatttcggggctataggtcttattagaaccccgttagctaatagtttgggaaaattttacccaccagcaataacttaaagtggggggaaggtagtttatagaaaaaccctttgtgttttaacaacttatccgaaccgcggcacagaaagaatatcccatgttgtaaattcgagggcgcaccgttctccacatcgagaatcttaggaaagagagctaatattctctatacgcagcgaagaaaggttttaggccttcctaataggagtaaccgccaggtgtggctctagatctcccctctctcatttatacactttaggagcacaccttctaccgcacattcc

SEQ ID NO: 418332 - DNA, 1159 bp, Homo Sapiens
  misc_feature (851)..(851): n is a, c, g, or t
agcggacggccctcaatgacacaccatggtgccccagagtgcaggtttgctacacagcagcgacgacgcaggcggcggccccagcggacgtcgcaacgtgccgtccctgaccgagcagcggccaccgaccaatgacccccgatgaagcctatcgccaccagccgcggcaggagaaccttagggtccaataacatgccatcttcgcgattcgactaaagctacagtcaagcaactatcggcgggtgcgactggcggctggctgggacagacggctggtgcgcggaagcgatgggcgttgttgtacagtcaaccgcaccgagggaccccgctatcctgacgcacgggacaggggggcctgcgctcagaccccccttcaaagagattgggcgtgctatgcaagtccggatgcggctcgtgctgtatcaagaacctccatcactgtcagctgccaagtggcctctggcagagggaaggtgacggtttctccggtacgaggccgctcgaggaaaggtgttacggaagcagacgttcagaagcgcccaatgagttggggcccgataaaggacacatgggtccccccgagttgagcgcatataacccgtaaaccactgagacattaggaaacggaagtatctccgagttccccagaattccttgctggataaaggaaagagaataggttcgatggacgcatagagctgcacgttcacataaccttttcccgggttccttacggggccgacggctggttaaacgccagatggcccttgccaggatcgccaccatgggcaagatacccaccgatacgggaaccaatttgaaaaggaacgggtccgagaaaacgggagcanttcaccccctgagccgattgtcaagtttcgaagcgcaaggacatacggtccaagggacggcgaagggcctccttccccggagggttataccaaagcgccagattcccttcacctgtgaattaaaccgggatacagcaaagagggaaacgcagagcggggtcccatttgtcgtagtgtggaaaccattacctttcgaaggtttcgcgcatccctgggaagagaacgcggaattggaaaagggccgattcttttccacccgaagaatgcttggcagttgtatatgaggcccgagaaccggaaattccgtc

SEQ ID NO: 418333 - DNA, 933 bp, Homo Sapiens
agcggaagagctgccaacatggcggcgagagaggtcgggcgcggtgcagggactgctcgcaccgtatgatgtatgcgatggttgcatctgccgtgcgtcgcagtctcgtagaggatatctcgtcgatcacagaagggaacagaaaataagccagtgtgattgtgagtgcaccagatcgcttcaggatgaactaggatgccgtgataggcatggggcgtgtccgtaggcaggacgtgggagtgagaggatgcacggaacgaaaagaaccatcgcatcgtgcctgatgggacaatcggatgatccaatctatacgcatgtggaacgcgaagtaatagcacgcagtgcatgttgcacttgttggattcgatctaatcacttcaagggtcacgcattgaagagcattcgtcagtactgattgactatggcgaaaatctcgtgctgcctccgtctccatgatttcaagtatatactgacgatgtgaccaaatcttcggaaccgaagcctgaccaatgaaggtgctgttcgcatgatgccctgcgagtcttctgacctaccaacatgccacgaatctagacggaccgggactggcggaggaaactccttcggtacgcgaccgcgtcatctggaggcattcacatgcggagtactttctttaccactaatatactgtctttaataaatcttgtcgcaatgttagggaaaccactgagtcagcgacagtgggttgaatgtgtgaggctcagttactggggaccatcggtgagcttgtcataaaagacaccatcttctccctttccggtctgagacggattattgggaaagactccagagactcacggaatttccgtagcccaatgggtggcaccgacgaagagtctgagcgaatcagagccctttaccagggcattggcctttactagccatgcggtgact

SEQ ID NO: 418334 - DNA, 1024 bp, Homo Sapiens
agcggttcttgctttcttcaacaggtgcgcgattgatctattcctacctgtgtcggatctctggttacatgaagcgcatgttgaacaggtctgcacagacgacttgggatgcgccagaagtgctcagccaacacctgtcctcagcaactgggcctttgtgcgtgttggacggatgttgcaatacgattctctcactcggccggtctcttcatcctaatacgcatctcaggtggaatacatcgcttgcgacagcgctccgcctcctggatgcgagaacactacacaaccctgtggcattcgccaggacccaggccaggtatcttgagaccgactaggtgcaagtggatagtgacgcaacaaggtgctgctgtcaaagtagacttcgagctcaaatgatactcaccagtgacaggagaacactcgtaagatcgaaacttccccaagtggaaaggaatactggctttgggcaggcatagggtcaacgaagcgacttctcttacaccccatgttctacatgggaaacactataattgcctcaatgagtcgtgcatggaaacgagcaagcacaccagtgtgatacctccaataggtcaattattcccgctgtgcaagtgatgtgccgcaaagagaaggcccacgtcgactgagggggtccaacttccagtgctaattttctgaccagaatggagaacgtggtgcacattgggtcaagaggttaattagtcgtgaaagtttgcactcgtgcatacccttagtttggtgagacaaccctggagtacccattgcaagacccatataatttacccgttcacttgattttacaaacgaactcaccgtcgcaacgtcgccacgttggggaccggaaaatctataagcaatggcgtaatatctggccaatttcctttggttcgaatgtcatccccggtaaaggtcggtggggttatcaaagggccacaccgcctctttaggggacctatattccaggacaggtggataattgcccagcgccccggtcgatccacag

SEQ ID NO: 418335 - DNA, 908 bp, Homo Sapiens
agcggggtccacatgcagtgaacacgtgctacggcgtacaggtaccttctgtcgtccttgactgccatgcgtaggcacatgatgcatacaggaaccggaacggtggactgtgtatggctttgtaggagcctggatccggggcactattcgctcgcatggatggttgcaagaccgtatatgcagtgatgtcttcatatacctagagcccttctggagcattatctctatgtagatcacggaactggaacgtgacctctctagaaatccacctggagaagatctacgagcaaaatcccagggtcaccagacacatcacattgcgtacttagagggatggacgtttgaagaagttacacatcaatcaggatccagaatgactgacgatgcggatctggaagaccttactcgagacacacatgacagacagtaaccgatgttttaccagagtctattcgcatatgaactctcagcagtagtgatcattccagtataagccggcgcgccgaacataggaatacgggacttactgtgaaacgcgatcgcttctattgatggcgtaccgcgcgagaacggactcctagtatcgaccagccagggtcgcctctttctccatcacaaattgtaggaccttctggcgaattgatctgggagctggaaactcctgctctatcgctgatgcataagcagaacctggaggagagaggccatgagaaagttgtgtccaggtaccttgagcacatcttgactgggacctggatgtcctaataggatccatatttactacgtggaaacttgaacgaaaggacgggagggactttgttgaggaggctagcaagggatgagaggaactccctggggtcaacccacacaatgcaacgtagaccctatcgatcccggcaagattcccg

SEQ ID NO: 418336 - DNA, 808 bp, Homo Sapiens
  misc_feature (462)..(462): n is a, c, g, or t
agcgggggtgccatccgccgtgtccgagggtcgggcagtggcgcggtgatctggtcgttccagggccctgggggcgcgacctagtactgagcgacgaattggatgagactagtgtttcgatatctgcggctgagacgcttgttgagagtgcacatctggaccgaagggtccagtcatagagtcgatagcagacgaaggtcaagtgtcacatgcgcagaggaggcacgctcttcgatgattgtccgtggcttctaggcgaaaactccgaacggtcactcatgccctagataagatactgaatcactccctgatcgtcttgcgcaacggactgtgcgtcccccggaacggtacgtgtacaggagtacatttgcgtatcacggaaagaatggtattacaccaacgcgctgcccatgatggctagttagaacgggcgtcaccatgtcctcgatgtggcaaatacanttccgaggacaactggcattattcagcgaagagaggacgaccacgtctaacggagtactggtcactttatgccggctattcatggcacgctggtcatcgacgcgtcaagtagtaacaacgtttagccataaagaagactcggatcacttgagcagggctttcagcttgaacctttcaagtgacggaaacacttcacgatcacgcacactactctatgcctgcgcataaacatgaggcgacgtgggataagcccattgtgggataccacaattgatttttggtacacttttgtctgtggcccattttacgtctattacatgcaaaagcgtcgctttcaagatattca

SEQ ID NO: 418337 - DNA, 1033 bp, Homo Sapiens
  misc_feature (823)..(823): n is a, c, g, or t
agcggagtcgtggattgcgcatctccagattggcgcctgatgtccgctccatctgcccttctgttaacgagttccagggacgcggggtctatccggcccgtcccgtatgagcacctgaaaagagatagctctgactggggcctcagagatactgttgtggagcagataaattgatgtagccacaagcgacgcttttgaactgctcgagcgaagagctgccccttgcggtgccatgcggacacgggacggaatggatcccaatagctgcaagatcgcgcgtataccactggaagcctcatgacaccgagagtgtggtcatcgccgctacttgcgctggaatgagtgtctgagacgtgagcgacagtcgctctgcatggtaacggagagtacctggtccgctatgtggagacatcatctggttcactgtggttgccgcatgggcgaatcacgtggtactcttgtaccctgacaatggcaagatccgatggatcgtcctatccctcccgctgcacatacgcatgagaccaagttcacttaccacagagaacaagactgatagtccgatgcgcgtggggagaaaagatagttgggttcatgggatctgcattgacttacgtggtcgaaatcttgttccacaaaaagtaccgacttcagtacacttgtatatcaacctgagacgacgaaacttagcatttactcaataatgatactccctgatgcatgtgagcctggacctggcaggtggggttcgacgcccttgtcagtggcccaaacaactttctgtccgaaagggcctacttaacggcgctcgagagaacagcgnacgcggcgacaagacgaatgctccacccaagcccctaacaagggatcaatggggggaaccgttttgcccaaggatcttggctttccaagacactagggtaaacttggcacattcggaggaacttgctgttacggaacccaaatccacccttttggttccagggcctttgggttgggaaacattggttccaaggcaggaatttgttgaacc

SEQ ID NO: 418338 - DNA, 975 bp, Homo Sapiens
  misc_feature (136)..(137): n is a, c, g, or t
  misc_feature (652)..(652): n is a, c, g, or t
  misc_feature (688)..(688): n is a, c, g, or t
agcgggggggtgcttaatacagattgcggggagcgttgtcacctctgacatagcgacatgttgcggtcaagtggatccaactctgataacagacgccaccgcataacgcagagtaccatcattggtcgtcgactcnnagcggccacacatgacacacgggcctctcgcatgcctcccttggaggcagaaccacgcctgtccacttgtcctcgtcataaccgcgaagttcacgagcgtagatcgatctctgaagttcaacgagcctagtcttctcacgagcgttgtatgtcagttgatgcttgcatgcaagatgcggtcccaagatcgaaaggtccattgggttggcactctcttgattcatccttatcaaacgacatttgtagtcggtcgtgttggtcgtgacattgattagagcgttgagctatctcgcacttatggtgtcccgctcattcttcacgtctatcagcccattctgcactagtggtttatacgcgttctcgtagtcccttatctccacaatcgtcactagttaaatctatacatctctcatatgctcaggacggtaggggaccattggttgcgtgagcgctgcaattgcgtatctactgggcgcgtcagacctatcccacgcttgtccctttctcgtcttcgntcttcatgcagtttccaagtggagatccctgggtgngatcttggaccatgctcgtcgcttacgctctccttcctcccttgtgcatcgtgcttgattgcctgtcttgtgcacgcatggtgcaacgacctgtttgcccttgtcgtttctcgccttgtctgtccctcttccagcgtctaatgtagattagtacaccgtattctcataaacgggccctcttaccaacgaaaatagccacgaagggcctatgttatgttgacaccaatacgaaggggtgctgaagtccaagtgtagaactgctcgtgagcgtcgacttagatttactg

SEQ ID NO: 418339 - DNA, 1118 bp, Homo Sapiens
  misc_feature (177)..(177): n is a, c, g, or t
  misc_feature (362)..(362): n is a, c, g, or t
  misc_feature (615)..(615): n is a, c, g, or t
  misc_feature (626)..(626): n is a, c, g, or t
agcgggaggtgttgctcgctgtcgtctctggtcctgaggagaccgattccttctgtgatcagcttgaccatcctggtgttcgggggcaggccggtgctccaaggccccgctgaggagcaactccatcatcgcgatcaattagatcgcttcgcatgggaggccgtggttggcttcttnatcgcgcgtgcagcgtacgctcgaccgtgaggtgcctagtagctcttcgtggcaggccggtggctcgtactcatgttgagcatattgggttctgctcattgctacttgaacgctggaaatacccccaggagaactccgtgcatacattcaaatgagcgtttcccatattccttttccgctcgttnaacacatcttgatacggataactacccttcagttagtacaatcgtcgcgtacaagagacaccaatgcatggggagataactgtcacttattgaaccggaaaagaagtctccactggagaaagttattcgtggaacaaggaatgggtactacctattacatcaaatagcaggtgttgatatcacttatatctcgcgaagcagtttacaagaattgtgtgagaaggttgcgagcgaggtgtgggtgtctccaagnggcccaagatngctaaattccggggagttcttgggcatctatcgacacggagttgcggcgctagtgccctctcatatacatatgagcttcgtcttgacaattcttgctgcatttggtcaatagcctgttaaaaacagccactgaagaagaaaacaatcgcttaagaaccgtgtaagggggcgttcataaggagtggttaagaaggtgccttcttgggttcaaatatttgagcgcagttactccctaaatggttggaaaactccaaatggcgatcccgtgaattcaattgccggtacggcttcgggaatgcggtaacagacaaagccttccaatggcgctcagggaatttagagctctccaggttacgatattgaaggccttcggtactcacgtgggccaccgattcggaaggaattggattcccttttaactgcggagacaaggggagccatgcacttgggttccccattataaggcatcaaatgaagggaaggaattggccc

SEQ ID NO: 418340 - DNA, 725 bp, Homo Sapiens
  misc_feature (261)..(374): n is a, c, g, or t
agcggccctcgcgaccggaagtgcgcgctcgggggtaggcgggaaggccgcggcgggattaattaaagacccgatcaagcggcccgcagaggggcgtgaccttgtttcctcaggagtgtggcggtggtcttactactatgttcgttatagcgcggcagaaagaagaaatgttatgacaacagagcagcaagtcccatggtcctagctaaaaggcggtacggctgtgactgctgagatggagagtcctcaaagagggagtcnnnnnnnnnnnnnnnnnnnnnnnnnnnnnnnnnnnnnnnnnnnnnnnnnnnnnnnnnnnnnnnnnnnnnnnnnnnnnnnnnnnnnnnnnnnnnnnnnnnnnnnnnnnnnnnnnngaattaaacttatggtctctcacctgagcatggagtggaaatgggcatataaggtaatcacagaagttatcacacctacacccttcccagtatatggatgtactagggaggaagattccatggaagaggtaaaatctccccgcatgcttcattatagaaagaaaaagagaacactctcttcctaacagaacggaccactgtctcagcatgtgggatggtgataatgacgggaatgattacctaccatcagatcaacaattagtatacactgagattacaatgactgtgagactgacctaagtgtgaatatacaacttctgagcttccactgcctttggaggggatcaccac

SEQ ID NO: 418341 - DNA, 840 bp, Homo Sapiens
agcggagggccgcaacatgagtcaggctcctgagttctacactggctccgtagttagtcaagttctatccgtacctctagtaatttaataaagtgagcaacatccgccttctccgtgaatgcattcatagggataagcttttcgaaggacagcgttccttgcatcttctgacccatggtttgtgcggactcatgggcatctatggacatccttcatgcttccttcagaggcaagcaagatgcaccttgccatcaagtcatgactccttgtagctcagtataccgcactaagctcctgacaacacgctaccagtcaaacggtcattaatacgttgagagccgaagtctttatactcaaatataaagaacttgggagagtcatgaacgccaaagctaagtgcgcagacgacgatgcctcatatgcatatctgcgcttgacacagttcctacacgtgatatccgatacgcatactcgtgtgtcctgctccggagcgttcgataagttgaatgtagccaaacgctgttagacacacaccatttgatcactcacccaagggcagcaattgcgacaacgtgtaatatctttccaagattgacagatacctgtgcgcatgccgtggccaaatctacatgtggtagtgctctgccatcttgtagtagggtctacaatccttgaactacctctcaccaattctgtgtacaccacaaaggctacttatgggacccaataattgtggcaaatatggcgttagcgcttcgtagcatagccaatatactgtggtgcacaaccaggagcgaatacaactttaggcatcggaatgggtaccccgcaatttcaccc

SEQ ID NO: 418342 - DNA, 1055 bp, Homo Sapiens
  misc_feature (598)..(598): n is a, c, g, or t
agcgcatggaggagctacggagcccactctctaggcgcgggcctgagccgtatcgcggaacgtccgcgataagcgagggctatactagacaatcgcctgtatccactcggctggctgcgttgcagttggcgaggagtcacagctgcaggtgtccggcgttggtgcgacgcgtcaatcggaccagggaggaactcagcagtctgtgactctcggccgctgaacatgtgttgccagtatcaagatgcactgcctctgtggaagacttatcttccggaagggatgttctgtgcagtcacattctgggagcctagccgccagtgcgaaggaatgccgctggggatgtcagctcttcgcatctggtcgctacagagcccgcaaaaagcgggcgtacatagtagcgatggtcggggagcataggaagggcaggtctcgaaccacgtgaagaatagcctaggtcaacaaccgatagtgggttgcgtttgcctgacgcggtctgatgaggaacttaacgaatgcaacaccttggaaggaccgaccccgagtgggacgtttccctattcgaatggcccctggtggcgtggtgctgtggacttactgngcagcagtacaaactgttccctagtacgaggggtaactctaccgtgtttgggctaagcgtagagggttagagcaattatgaacccctgggcgctcgaacctccttgtggggatgcgcttgctgtttggagcacgaccgattatggaccgacgtttgtgtcgcattggcccaggaaagagggcaccccacgaattgttcccgagggcaaaaccaaacttcaagaaccgtttttcctccccgggaaacataaacacgggttactttcgtaaccccaagagaagatattcaggatacacgcacggaagttcggcctgcccttacgcgacggaaaggtggctgcaaacaacacactgcgtcgctatcggtgtgtgtataccggatttgcgggcagaagacaccacgtgtcacactgtgcggtggaccccatgcaatgtccgtcacttggcggttccagatt

SEQ ID NO: 418343 - DNA, 1002 bp, Homo Sapiens
  misc_feature (758)..(758): n is a, c, g, or t
agcgggctggctggttcgctttcgacgtggcggcttcccctgccttctcttgctgtgcggccgccgttccgcgccgccggtccctcgcctggtgggctcacgccgcagcccggcgcgaggtgcgacggggccatgtcgcctactggacacgagggcatgcccgggaaccccgatatgtcacgaacctggggagcccggaagcgaatcgggcagcatgaaggaagggctggagagggtaccgggctttctccccggggcccgtcatcctcttgatgacaaggcgcactcgagccccgcgtggacgtgcacgcgactgggcaccactctctgagtgccgggatgtcacgttgcacaggtagcattagcagcaagacggagggcacgttgggtaatcatatacttcacccgagtaaatgaaggacgcagcgaatcgaaacaaggatagtaccgaggcgtcacgcgcagtggaagcaacatgggtgtccctctccattgttagggtgcaccagttagtatatcttgtcaactcgaggtcttgaagtacgagttccggtctctgcatgtccgcgtgcgaaggccctgagtacctacggggtagtgtcggctttgacgtcgagggcttgctaaccgcgtagggctacgctcctatgagctcgggcgcagcctagtggacctcgcggtctggcccttgtgcggaaatcggtacgcagaactcggacgcggactttggggcgtgctcccaagtgaactatataggncgctggagggaggcctccgattgaaccccaattcccaacttacctaggctatcgcatcggcaatggggttttcctggaccatcaagagttcttcttaatgctacctcaagtactcgctgcagttgcggagactatgacaagcggacctcaaatcccgaatccccaggaaaaactcctccgggaagggctaaaattgaagaggggcgccccttgggtgggcgcaccgaaccctagggactcgctg

SEQ ID NO: 418344 - DNA, 642 bp, Homo Sapiens
agcgggcgctcgcgcacggaccctgcactggggtacagctcggaagtcatcaggttccatggtcgagatgctgcctggtgccgagatgtctgctgctagtccgacggtctctcctcgctgctggtatgcctcgtggacgtgcgcgctgctggtattctagtcataggatgggatactgccccactactggaggcatcgctcacaacaccaataacccgttaagaccgttaacacagtcagtatcaaccacacgatatgtagtcacgaaggatcagcatacctcacgatcggcccaaatgtaaagcgctatatgacaggcagatcagacacacatgcatatcaacacataccgtcaactccctacatcgcaaacccgcacaactccctaagcctcacctcccatacctacacataaccacccacagcaattacatgccacacaactgacacagctcctcgaccatacctacaactcattctactatctcacatcactcgcccacagtacgcccttcactctatcctcctaacaacccactcatccacacgcaaactacatcaattatatactcagacacataccccacacctctactacgacattacacgccaccaaaacacattaactaactacaacaccta

SEQ ID NO: 418345 - DNA, 1064 bp, Homo Sapiens
  misc_feature (503)..(503): n is a, c, g, or t
agcggggtcccgtggaaacacagcgcatgtgatcgcaggttcaggtggtcgcgcgcagctctggaataaactcgcctggcgttatgcgcttccattgggtgctcaggctcgccgaacgcggcgagacatactgtgcgtccgtcgctcggttaccaaccaagggcacgagtactctcgcgagcgcagagaggaagaagcgcgcctgggaccctatagggctttcggagcgatccagcaactccaggcaacaaagacaagaacgcgtatgctgctagctgccaaaaagcgcttaagagattggaccggcggacgtcatgtacccgcatggctggcgttgatggttcccttgattgagtgtgccgatatgcaccgatcctcgaatgctgatctgaagcttctatcccctatgtgttgtcacctcaccgcgcagagatgattgactgtgacattgttcacatgaatcgacttaaataggaggcacaaggcatctccgaagcatgctnaaggagttcaaaacaagactccaacacattactggcaatgatcgagatacaaaatactgaggccggtattagatatggaaggaatcgcaacgggaaaggatatttggtaccccctagcgaatcattgcaatgtaacaccattacgatgtcttcgtaactgtatgcgtacggtgtgcactgtagcgcaagggaagttattcttgaaggtacttacccctttatgcggccttaaaaatcccaaccccgctaaggcgaaagagaaagtgatacggtgcccatgggtgaattggggttccggtaatgtcgcgatataattccttacacgtaacccggaaatcaagcgcatctgtccatgaggctcttgtactatatgaagcgaaagtttattcccggagattgtaaggggcatcaattttgtatggcttgcatctggtttgccacaattatcgataaatgcctttgaataccgaaatggatatttggcaacccaagggttcacaattttgggggacattcgttgcccaatggggtgaaacgaacggtctttgccttggctgccca

SEQ ID NO: 418346 - DNA, 1322 bp, Homo Sapiens
  misc_feature (147)..(147): n is a, c, g, or t
agcggggtccgtctcttgactaacggcagccatggggtcgggtgcgcttgccctgagacaagcactcgtagtcggcgcgatgtagaacatgcccaacgcagtctgagcatgcgtagagcattagactcgaccactgagctgatgctntgcatgccatctctacacacctacacacgagccttactctagacatgatcgcacgagacgctcctctaccgccttcattacatgtgttccgtgagcgaatcaccagcgttaccaccgtactgcccgtgaaccggtagaagtgacagtacccggaaaagtatgccactggacgtgcgtgtcattcatttacgatctgactgcggagagggttcccgagaacttggactgtaaccacgtacccgcctgccgtgagaagtttgtggcattgatcaaatccagccaaatctgaaccaatggatcgtcgtagaagtgaagtcgtcctgttcactgtaatcttatgtgcatgaccgaagcgagatcgaggctctgtgacgtgctaggatgtcggtaattcgcgagctttcagggagggccccaagactaacaaggcttaggctttcagacacaaagttgacccaaagaagatcttatgtagatgagtgcggacccacaagaacggagaaatcgcgcatccatattcatagacgctcgtattgcgtactcggaagttgcccacgcgcatactccaaatcactggttaaagccccacggagattttcacttgccatccagcgcgtggggaagatagaagacgctaatcttcttcgcaatgggcgatcctgtggagtaaggagcctcggggaaccacacgaaattttggagcggtggccacctttgtcgactcccaagaggttttaccggcaaaacatcctgggattaggaacccgatgggggtctatattgccctggatcaatggttcccaagggattggcattggcttctggttaccggaagaagaggaatgtgaagcttgtactgaatttcgaggggcgaaccgatttagcgcaagcacggagcaaacccccctgtagcatttcattgtgtggcagcgggaaggtggttcaaccctcctcggaaagagggtcctatagcccaacacgtgtggctccccgaagcggttttgtgacccgaagtcccgaaaagttcttcccccccgaaattttgggggggtttaaatagagaggcaaggggtgggggttgcttacaaagacccagttcgggatgttacggtgctcctctgaccgagaagaaggagagagggcgcgttattgcgcggggagcttgtgaacgccaa

SEQ ID NO: 418347 - DNA, 1148 bp, Homo Sapiens
  misc_feature (163)..(163): n is a, c, g, or t
  misc_feature (242)..(242): n is a, c, g, or t
  misc_feature (559)..(559): n is a, c, g, or t
agcgggggtccggcattccgactcagcttccccggtgcgcgacgaaactctaaacgctccgtgaaactttaccatatacgtgtgttctacggttgctgtacgcacgctgaccggactcgcagcatggtagcgtgcgatcgctacctgggttgtggaatggtcnggatgattgggtcatccaggtgcaccgcgacgaaggctattagctgaccgagaaaggatgcgctaggacgtctctgatngtggaaacgccctcaacgatcttgaaggcaaatacttgaggcttcccaaatcaacgtcacgtactgggtagcgaccttcgttgcgctctttcgagtccgttcttccggatgctggctgggtgtatgtcgtctatatggtgatacttctctattgcccagtagacttgatctctgcctgaatagtcgtagaatttgacctgacacgttctgtggcttccttagcatggcctgatacttcttgagacaaaggtcgcgctacctatattaagcgtctcctgtgtagaatacaaggatagcacacgagactcatctcacantaggcacagaaaattatcgaccatccgtccataggtgcaccccatttccctctctctccagttggtgtacaccttatatggtttccacattaattgtattggcaagatacgtacgtgaatataaatctagcggataggcgaagttttccgagcacccaatatccctagggcgtaaacgatatcttacaaaaattttacacaccgcctttttgggattatcggcttgttgtcacaaaaagacattttcacacatccatttcatgtaatgcgcttttaacagcgtgtgcctgggaaatcatcgaatagagcagttttgagttaccccggacaaacaagaatttccggaaaaacttcttgcccggggaacgtgagaggaaccgaagagacacaaatacggggcccgggaaggccggattacagcggggggggcgggccacccgcgagccaccccagacatttgggaaccgctgtgagtcgatagcgggacaaagaggcctgaaaggccccagtggggcaccacgttggagtcgatgagccttggtccccggccggcgaagaacccgttccacaggcctaaaatgccctgaac

SEQ ID NO: 418348 - DNA, 1038 bp, Homo Sapiens
  misc_feature (207)..(207): n is a, c, g, or t
  misc_feature (617)..(617): n is a, c, g, or t
  misc_feature (834)..(834): n is a, c, g, or t
  misc_feature (932)..(932): n is a, c, g, or t
agcggactgggttattcttacgctcgaactcttatgttgtgcgcgcacagtgtgcgtgacccgattgtgtgctcctgactgcttcggcgtcttatctcgcctagtgcaatagtgcgtgagtgcgaatctgcatcccactctcagtgtcacgagctgggtttgtccgagacttcgagtcaactggccacgtggctgtgggagcctccntatgttgaccctgggaaaacatcgcgcgattctcgatgctcctgattgagcgcgaaggagttgcaccaagatgggaacgacacgtatcccattccgaggagagagggaagcatgcagactcttcacactaccttctggcgacgttcgacatcaggagtcagcatagagacaccgacaacaagatgcacacgcgtggacatagctagatatgtaagaacttgtgtacataccattctacgatcaatgtagaatagcacacgattacagcaacttgtgtcatccgtgacacgctctggacgtgcatgtgcaccatctccatgaaacgcagagttctatgaagctagcgtcgagattgacacagaaattggcattagcggcaagaaataaagacatacattagacactcaganagtgggccggacactcaaccacgctggttctgtgccattgagagacaagatagccgcatatacggattctctctgttgtggttttggggaactcccgccaaagtttccgggcagcagacattgcggcaatcgaaccacaagttgacatatcgccgtgggtgccttatcttacccgtgccttgttcatttggtgcatatttttcatcggaccatgtcntggtaagagttgggcgccgttagaagcttaggtgttatacataaggagatctctaatcacccttggcaatcggtagtcttcctagtggaacgtaaacngtgcggtacatacttagagtgttggcaatttgtttgcgcggcccttatgtacaagtccattcattcgttttgaggaagatctccatacccacatttggtacaccta

SEQ ID NO: 418349 - DNA, 1251 bp, Homo Sapiens
  misc_feature (220)..(220): n is a, c, g, or t
  misc_feature (393)..(393): n is a, c, g, or t
  misc_feature (483)..(483): n is a, c, g, or t
  misc_feature (515)..(515): n is a, c, g, or t
  misc_feature (570)..(570): n is a, c, g, or t
  misc_feature (643)..(643): n is a, c, g, or t
agcgggcctgctccctcctgacgcttgacgacgacgcgcgtatccgcctgctcggtgctgctcgtctgcgtcgtgcctgcctcctccgccgctggcgcgctgccacgtcgtcggaccgtgcgctcacggagatcatagccctgggtctcgcgtgacgtagctcatcgctggcacctgacgcttcgtactcgctcggcgaatatgcggtcggtcggccatngcacggcccggcgatcttggtcgcggtcagttgggcatcgtgccaataccgttctcgtcgctaggctgcggagactagtggttgcaagatcatggtcgaccagtccaattactcgccaaattcagtgagagaatagtcaatcatgaaatgtgctatgtgtaagaaagagcagnagcaaaagtatgtccaataaacgcaatacaggtctttggggacagtcttgtgatgcgcgtacacggagagaaatgcgactaagactgagnacaaagcacgaataacgcgtctgtcaattacncgtcagcaagtgtcgctgcacaattgcgcaaagaaagtgcgccaccaagtcactntggcaccgacaaaaagaaagatcataggcgtagcgagagggaaggaacaataaacccattgacccacaatttntgggggggttggacctgtgggccattgaaagactttgtgcttgacgaaaggtgccttattgcgttgcctatgtagattcataatggcggcgcatagagagggtagaaagggagagctacccaattaagggatccgtccggcgaaatttaaggatgttgaaccgaagatttggccgattaacctttccgatgtcgaggcaaacaccaaattttaccctttttgagagaagaacggaaagggcacatacgccgatgttacacagtaagaaactctgtgagattaacaccgacaagtgaaacccttcgttttggcaaacaggcattagaattttacagcgggggagaacaccgaatattcccaaggacctcccgtaattgaaataagatttcttttactccttaggacccttcaaataaaaaaggcccatatttacacattggtcctggtgttaaaaaaatctccaatggaggcaaaacacctccaattttcattcttcaaagacgaagaaattgtgccatgggggcctaggtaagtccgaaggggggtttaactagaagaggaccaaagtaaagagtcaataaactctaatttggacaaccttcccaaaa

SEQ ID NO: 418350 - DNA, 1145 bp, Homo Sapiens
  misc_feature (219)..(219): n is a, c, g, or t
  misc_feature (256)..(256): n is a, c, g, or t
  misc_feature (322)..(322): n is a, c, g, or t
  misc_feature (437)..(437): n is a, c, g, or t
  misc_feature (467)..(467): n is a, c, g, or t
  misc_feature (520)..(520): n is a, c, g, or t
agcggctgctctctaagagatcatgtgtggtagccaggatgcccgcatccagtagacaagtgggcccgtgtggagattggcatccctagggcggtttatctagcagattgctggcacactgcagagttcgtgtcgtagcagtgttgtgaatgaaccagtagacatccgtactacgagtatgtctacgttgcttcccggtgtgtcatcgtacagaccttnatgagttttgttgcagacagccaccgctctggctcantggccacactggcacggacgtggccatggttctaccccatggcatatgttcaaggcgcgtaattantgagatgtgtgaattcaggctcagatgtggctcaagtgcgtgggaagttggcggagaaaaccgtgacgccaccatttatgtgcaccacctattacggaggtgtgcatagacatantagtgagttggacaatttagcacttcctanatacccgtctcgggacccagggcaccccttgtggtcgcctagtcccctcacangcatcaatgagattggcgtcttcaggctgaacatacaggataaaggtgggagttcattcaggccgaactgatggaggcatcggtagcaaatggtggcctgccctcgctgttcagctgggccttgttcacctcagcgtgtggcgacccaattctgtggcccggtgggcattgaagaggtagcaaacgcaaaggatagacgagaattgggtaggcttttcgcgcgacaatccatttacgtggtgttacaccccccttggggctcaggttagtgtaatcgattatggcctatatttccgcggaaagttacctactgggctcgctcgccatagattacgatacgagattgacttggtgttcggtttgccctagggtaattggaaaggcttcgtactgtacaaattaggttgtgaagccccgcttgggtagtgtcggtcggtacccaagcgcatctttgtagacgatttatatcgcaatcattcgcctacgattgcggcccgacaaaccccgaggggttaggattaatcgccttgctgccagtgcggacggaatgggcccttttctcgcaatggttggctttggaaagggtgcacccggaggaaaagtttcccttggacgcgggagcccc

SEQ ID NO: 418351 - DNA, 864 bp, Homo Sapiens
agcgggtcactggcgctatcggcggacccggctggcgcagttgcttccccagaaaggagagattcctctgccatggagtcctacgatgtgatcgccaagccagcctgtcgctgatcgagcaagcggatccggtgtgattgaaacgtcctggttctttcgctggtgatcagatccccaaatactgcttggctcgaaaactatgtgggccgacccaacgcaccgttcgttgtccatggcagagagccctctgaagagcgacgatcgttcatctgagtcccacacgtctgacggagcaccagacgggctcgcttctcaactccgcctatcccactggagcatggcatcggtcaaggcattgggaacagacatggaaccgcatttggcaataatggttctacattcctgaattggcactcacggcctcgacgagacatttcttctaagcagggggagtccacttccttggtgtcgtcccgtggagcctggaaggggcgccctttgtgagcagcgccaacagacaaagaaaagcccggagtagagcggacggcttgccccgtaacagttttctcctttcagacgcagcccttcacactgtggccccagcctcctttttcagtctccactgcgcaagcttgtaactcaacgctcctttacgcctaccaaggcagggcaccagcctggggttgcggtgcttggagtttctgggcgcgagtggcgagtcgccccattgcttgtgccccactgcgtattgagggtctttgccgatggccccgactccattcatgcgccatcggagatcgcgggggcgggaggtctctccggttccctgcgcctctaactgcgtagaggaggggtatgatgcca

SEQ ID NO: 418352 - DNA, 1449 bp, Homo Sapiens
agcgtggtctcgatgcgtgagaaagatggcgtaacgtgccagtactgcgtacttaggcaagtagaactgaacaggagtaaacgtaggagagggactagttggctgtgaagagtacggtgaactagtgattagcatacgtgataagcgacgtggagggggggcacagggattagatacgtgtgaaaagggatcatgacaggactgctagtcgttaagtgcacaatatacctgggaaacagttcccacgcagtcattctgtatgctgtggatatctagctgtgatgatcacagaaacgtgcggtaccattatttggatttcgttacctgtacataccgtatatgatctctaagtcggtctacgaatgtcactacacgctatgtacggacctctgtaagttaccgacatacccagcgccttacaaaggttctactgaagatgagcgtaaagaactgcgcgttatgatcgggtgacgtacacgtctacgactctctcgttgcatgctatatgtatcctctgctgaagcctacaactgtgatcactcgaacaatgagactcctttccgtaatctccgagagaaggttatgcacccttgaggagtcaaaagttacctcttattctatctctcattctagtgcaattccgtagtgactcgaggtcgttggacttagccttaaacactgaatctatgtagcaagggctacatctacacagcgtaacggtggcgcgtagagccatcgatgcttaacaaggacacccccggaagcttcaaacccagaaaatgaggcgggcaatccttaaagctccgtgtggctgaatgtgaattaagtcttgctattgttctatcactcgttttcgctagggggctcaaggaggtatctctcaccatgtgggcggcccaacggtgggagtgcggtcaagtcgtccctcgttgaagtgccctctagaactcgcattttgctggacgggaccgagcttggggttgggacaaacgagcgcgtggctgtgaccccgtgctccataacagttccagtgggagggttgcgaaaaagggcccaaggacgcggggaggcgaaaaaaagcggagtatacggccaacggcaactccttttggtcacagagacatggcgagacgggttaccagatggcaggcttccaagacgcgggcccagttgttctcccatgtccaccgagggctagcaatttgggagcagaatgcggcccaacgtgccctgaggcgggaaacttgcaccattgatagaggtcacaaagcatggtcatcgaacggatgactttggtccttgagagaccaaacgagtcgtggtagcaaagagggtggccggtctcatttcgtacactacaaacagagttcacaaattgcacaagtaaaacgacgtgggtcctccgtttacccggagtttgcgtacttagcacagggtaaagttggcccg

SEQ ID NO: 418353 - DNA, 1047 bp, Homo Sapiens
agcgggggccgggcgtgaggggagagggtgcgcgtggccctgagaacgaccgaggcgaaatgctggcgtgtgacctggttaaaggatgcgttagatgacagaggacagatcccgtgagatatcgacacaactcgaggtggcatccaattccatgatcttcctataccttgtcatgttctagtacgcctgtgcgtgtaagagcattcagcctggcactcgaataacgagcatgaaatatggatggtacctcgtggtggacccacatgtttacaagccaattctgcgaacagataacccggcatggtcgatgtgtcttgcaccgacagtaagttggagcatgcgtaccggtcagaccttacctgaacgacaagtgcgagaggtttcatggcccctcatggaatgacggcttggcagtgcagggatcctgggaaagaaatccgaatatcaatcatgatagctagcaggacagccaaagggctgtctgagaggatgatagactatctatgcgggctcttgatgctcgaaaactgacttcgatactgccgatgtcattacgcacaatctatgtgggagtcatccctccaaggaaggctgatcatggaggtggatgcttgatatgttctagtcatgggtcctgaggagcaggtagagcgtggccccgagtgaattaggatagtgtgtaacgtaggggcacttaagaaaccccggagtgaacccaaacggatttaatggccctttgtgttcggaaatgtgagagccttgtgttgggacgcgtccaggcgcggggaatagaaaattgcgctctggctttgcatggatagcgcagttatatgagaggcatggggtagctggtactcaatggtagaatgggggtggggcaacttccgtagtaagtgttccacgagtcctaatgtacttcgacaaacttttcccgtctcataattgggacattggaggttcaattaattcaccgacttaattggaagcggtaggccaataggagtatgagagcataaacacagtcacctttgaaggctctatttttac

SEQ ID NO: 418354 - DNA, 1355 bp, Homo Sapiens
  misc_feature (388)..(388): n is a, c, g, or t
  misc_feature (472)..(472): n is a, c, g, or t
  misc_feature (514)..(514): n is a, c, g, or t
  misc_feature (526)..(526): n is a, c, g, or t
  misc_feature (560)..(560): n is a, c, g, or t
  misc_feature (875)..(875): n is a, c, g, or t
  misc_feature (1005)..(1005): n is a, c, g, or t
  misc_feature (1048)..(1048): n is a, c, g, or t
  misc_feature (1128)..(1128): n is a, c, g, or t
  misc_feature (1153)..(1153): n is a, c, g, or t
agcggattcgcgtctctcttcaggcgaccaggcgcgcgtcaccgtccaccgtcactcgcgcaacgtacactccgaggttgagttactagcgaagtacctgcagaatctccagacgcggtacactggtcgcatgagagtatagatcgttggtggcccaggcggagaaatcctgggcgtcgccgacagagtgacaccaccgtacatggatggacgtgtgagaatccttcgtgaataaacatggcacaaaaaccggtcatctcctcacggagcatggcaattcattgcccaaactcgagcagaccccttcgtcaacggggggcaattcctaactcgagggcgacgccattggcgaaggccatgaaggcggagtgcagacgacacaggacanagctagctcatcgtctaagtcgaggagacgagtaggtcgccttagagaaggccaaggatagagatgacaacgagctctaagacntctacattcggcaatctcccgttgcaagacccaaagctctcnttacgaatacanaggcctacgaggagggtacgtaccatgccatgcntgtggcatgcgcaacagcacaaggacacggacaccagccttcgtgtatctaagcctcggtggaaaatgtcttcgttgtacgcttcggcgaattgcaggtaacctgtagagaaggacaaaggaataccctgaaggcggtatatgagcggtaggctccatagaatgacacacctaccctgtggagggattggtcgatgcgtgcgttagaggtgcctcgttgcttgtttttccagtggcacaggggagttgccaacgccggtagttatgtgcggcggttatacaattccgcccgccctttgtgttgattacacgcccnagcaaaatctgtctttacaccgggtaaggacttcttggcccgaaacaatgcttaagggacggccttctgaggtacccatatttgtcaccgtgcgtctagccctccgcccgcgcctggtgtccaacagcgngattgcattccgacaggttgtgtgtgcgggccttcttcggaancttgcgttcggaagcttaaaagcttggcacaagcttctcgggcgctctaactagcgcattgccgagaaagattttcccantttgacctttccatcgctcaaatgngtgggatcgccatttgcaggaaaacgttggcctggggaaagagtaagcaccgcactttgctttgaacttgagtggggtttgcaggggacacgggtggtttacgcaaggatggacggcctcgataagggcgatgtccaagtgtccatggagatcccgacagtttaacgggccccgtggaagtggcccaacccgagacatgttg

SEQ ID NO: 418355 - DNA, 1131 bp, Homo Sapiens
agcggagtttcggtccggaggctgcggctggcgtaagtacctgcctgcggcagtgaactggaacggatgctgtacgtgccgcgtggtgtgcaagagcgttgctcctgccgccacgtctccgttcggggggtgccggcatcgtggttctcgagaacacgtgcatcggcgtgtcagtctgttcagtatgctgccaaggaacagctatccagtggcctctaagcacgtcatctgtgcagacacgactgtgggactgttgacgactagtccgtcctagtatctttgcagaggagcagttactgggctatgggacgcttgagtaccgcttctgttcgagtcttgagagaaacgtgggccgtgatcctctaaggtataagagtcggaatagggaattcgccacagccgctagcatttggcggctgagggaaatcgtatcatatggcaataatgaaatattgggtacgaaagtaataacttgttcaaggcattgataatgggtattagtacctttgagagcgtttgagaagaccgtgagagtagacctagtcaggggagtaggtgctacgtcgttttgggaagggatgactaagaggcttaaatttagaggggagacgcgaagattgtgaagttgggacaggtaaggaacccagggatagccccatgtgagtgcgatactgttgtgcgcaatttgtcgcagtggaagttgagattctgtgcgggggtacggaagtatacgttagcgatcggggccgcttggagtataaatatgccgtcgtttgcgatggggggcaaacatgggtgtcccctagaatgatgcggttacccgaaaggcaaacgtcggcttaacgtgcccgaaaaagcttttggcagtagcctttggaggggaagcccccacctcatggttggtgaattcagaggtctgcggcgcttcctgaacatttattgcaattggttggccgggggcgatatggcaccaaagtgttggccgaaggcatcctctggggccagttaacgaacgggcttttggttgtcgacataatcgccttttgagagtgggccccagattggttgggcatacaagggggctcgatagacgtgtagacagggttggagttaattttggagttgacaccc

SEQ ID NO: 418356 - DNA, 683 bp, Homo Sapiens
agcgtgagggattgaggtgccaacatggaggctgaccaggacgctggaaccgagacgatgaaaaagctcggagacacatatccggttacatcaccgccgcacagcctgtcggaaccgctgctgctatagatcgtactccgaaagcgcatcatgcctgtggcacaggacgaaacagctggactgcactcgggtctggagccgcactggacgaaccaaaaacggctggagctgcgaaacgaggaaagcatgaggcggggcagtggaatgtgagtacgcctgagcacggggcaaggaatggcaaacctccgctactagggtgtgcgtactcataggaaatgatggacgcgctagcctaagaaaaccagaactcccaggaagaactagaacacggacggaaatttgcaaagcatgtacgacgcacaggtacagaacccaaggcgcacgagaaggcaagggaacaaagggctacatacacaatggaattgctgcccgaagtatcgagccacacaatggtattgacgaaactgtatgcactacagaggttcaaggtctgttcgatggaccgatgtcctggaatgcgtagctgggacatacctacgccgtcaatgtccacgtagcacgtaaagcatactggtcgaagtatccccaggtatcaaggtagtgtgatgagaaatgaaactggg

SEQ ID NO: 418357 - DNA, 176 bp, Homo Sapiens
agcgggtgcgggatgtctgcaggcggtgacaggcggaggaaacgtactcgatcggagcgaggccgggagactgatgcctctgggccgtctgtcgtcgtccgcgtactccctgatgtatcgctaggtgaccgctggctctgaagggatggacaacttcgttgcgcgccggtcggtgc

SEQ ID NO: 418358 - DNA, 764 bp, Homo Sapiens
agcgggggtgtacctgctacagtcgcgggtccgtgacgggtgttgatcaggtaggctcgtgctccatgccagctgctgagtcttctgacatagcgctgatccgcccggttctgccatctagcgcaggagtcgtctgtcccgtcgcgacgcccgtgcgcatggaagcacgaccaggactggaccccaggaggagcgggcctgagagtaacaggcacgcaagagcgatggatgggcgccagggtcgccggtcgtacgtggcacataggacgaaccaagaaagggtcagggaatgctccctgacaccgcgtcctggtctgacgccaatgggcccgacgagtgcgctgttagaccgtagtgatcgcacatgcggtaccagtgacccttgggaggtaccatacggtcaggtcgctacgtgaagatttcccctatggacgagagtggtcactagtcgccagagattgaaaactcaacctggtgccccaacggaaaaagtgccttcgagcactgtgggactaacctggctgggtccatcactacccgaggtcctggaggaaccctgcgcacccaaactggcggttgtaaataccctgtatgaccgggaccaattgttggtccgcaacaaatgcacctgatggcaatggatcgctcttcgcacacttggaggggttccctcgccttggcataatgttttcgtcccgcggtttcgtagcgatggtgctgttctcgtggccgaacgacatctgactcaccattgtacacccgcc

SEQ ID NO: 418359 - DNA, 1019 bp, Homo Sapiens
agcgattagccttactgtatatgcatatgcttgtatgcgtcttatctccctgatgatctatccatctgtaagcatggtcctgtgcatacggtgcgtactgaccaggacggatctctgaccggccattttcgccgtggattcgtctggtcaaagtacatatagacccagttgagatatatgtaagtgtagtgtacatagatggtgatgtcgatacttctacaattggtaagggtgtaccggattaggatcgtgatattatagatcgttggcatcgtgagggcatctatccttttagtatggagtaattgctaattcagttcgattggcatgcacgttctctatgaatcgcatctatgcataggagtgtcattctctagatagtgtctacgttagtagtactggtagcatatctacgtcccattgcttggtctcattgtcggtgggtctcttatgtcaccataggctcggcgctccatgttcaccccaggcgtatagtacggatggtcaggtgcgacatgcagttaataaggatactgaaggaggcaagcttgagttccctgcagccggaaggttcctaaagattaaccaccaatgcgttacttcactaggaatccgtgtagccacagaaatagtccatgttgtcctcgggtccaaagacggacttccattatgacaatccttcccttacaccatacgccataggctctctacatgatcgtatacaattatcctatcgttccctttgggagaacttcgtacaatttgacgcacctgcaattctttccaaacattaccgttccgtaactcccattgctcactttttcaggaaactctagatcttgacactcgtttgatgaggagccacgcgccacgtcgagtattatcgaatgacaattcgttctttttgggcaacttactaggtgtggcggttgagagcacggcgcactttgcgcgtgggtctgctgtcctcgtatgaccatctgcggacgcagagctaccacggctgccctgttccttac

SEQ ID NO: 418360 - DNA, 991 bp, Homo Sapiens
agcggaatgcgggcgggatgtgggaacgggagccgtgcgcagggccggagtaatgtagtgcgtgcgttttcctgtacagcagaaatttacagtgcatacgtaaagacgaaaaggaactccgcttagagcactccactgtgtctcttatgaagtggctgatagtccaagatgcagatctgaatctagccaaagggggcaagcgaagacaccctttggaaaacagtattcatgaagtaggactcagtgcactctccgtctcactgcattgagtgccattgacagttgccttcttactacccgtggtaagacacggagcccgatgtagcacatgaacttttattatcatcggatacgacatgcgtgatcgataaatctgcactctgtcatctgacatggagcagacatcgtgttgggccaccagcattgcttttggacatggtctggggaagggcagggggacacgttaaagttgaggatctaaaaacgatcactactggtgtccagcagactctctattagtaattgcagcaccaaattctgaaaccagttgagagaacgtcgcgcacgatttatcgtgtccccgttcgccttccccccttatttgtgactaaaaggacttgatgatcctgtcttcaggagtccgttacgggtactttgttacgcgcatttaagagagtcgtggcaaccctttgaggtctattagacatcatcgaactaggtcaatgtaccacgtgtaaagttgctgctggactaattgatgcgcctcaggtggttaaaccggaatgtggttctaataaccttgattccctggctcaatactctttggcaagaaacccaggaactatagggtagcccttccaagtacaaaaggcataattcgggtatgttttgaccgctatcagtttgctggggtctatggccacgaatcattgatgctctttaagatagcatctgcacttgtcattgcctaacacgtccaggattactcact

SEQ ID NO: 418361 - DNA, 730 bp, Homo Sapiens
agcgggatcgtatgaactgagacattgatagagaagaactgggcggaggatccatagacgatgaggtcttatcgaccacaatgtgtatcccagtatgcccgtctgggacgtccattgctgacctacatgagagttgacatcacagaggaatgttccagcctgcatcaatatctgtattcttgtagcggtcatgacttacacacgaggctgtactcatccccacctaaagacgtgtagtgaatgctaccgttaataaatctcacgatcttgcctttgtcgacttaggtatctgcaatatatgattacaaacatccacagtcccacttggataatctacaacaggaacattagttgaggcaacatgcagagcttattattatgcgccgtagtggtggctcgccaaccactgttgaggtgtctgggatgccatagcgtaagccattcctttattctgatagttagcgtaagtctcccagcaggttttaccccacgccattttccctaaacgagcattagattaccgttgatcgagacgcactttctgacgcatactttagttgagaacatggacttccttctcgttagccccttcgttttcctagcgagagtatactcgtttttacactaaaccaagcctatgaagacggttacagtacgtttggtcaacgcaacaagactttcgggagttgatatgatgctccacttcaagtccgcatggatttcttcgccg

SEQ ID NO: 418362 - DNA, 693 bp, Homo Sapiens
agcggtgtgatcagtggcctgaaactgtttgcagttactttaaaaatgtataaatgtgtgtaaataaaaagattacttaataggatgaatgaatacatgcccacagaagccaattcagcaagattaaatgtcaaggagtaaacatagattgctttgtgtttagagagttatttgttaattagagttcatagacttgattcatgccttttgggatctttattagagcacgtctgacatgttttacccatgtatttggtaaatacacagcttgctcatgtgttcttatggaaatttcttttagtgatcacttgtaatagctgccacttagtaggcactcagtaagtgcataataagtggatgtgttcccacatacttcagacttgtagtcagtcttttgtattgtcgatcagcatgactttctcaatctcaggtagtctcgtatttagcctacattttttggaaattatgctcataaaggtaattttaccatccatcccaggtagtttcctcacttctaatccttccaacctctccatagcatgggagactttagaactaaattatttgtccatgcatttattcattcaataaattaataaagacattgtatcattttcagggccattttatctgtagtctgctttcgtttttctgctttctcttccttttgtgtctgatatgtctctcaccctg

SEQ ID NO: 418363 - DNA, 721 bp, Homo Sapiens
  misc_feature (389)..(478): n is a, c, g, or t
  misc_feature (487)..(627): n is a, c, g, or t
agcgggcggtgccgcggggccttagcggacggaggggagcgcgggggtcaccgggccgggccggcagccctagagctcggcctggcggggaccctgggccagccccgcgcctccgtggcccgggcgtctcgtgcgtgtccgcgaactcgcgtgcgcgcgtcacctcggaccgcagcatggctcggagggcggccctactcgcgccgccctagtgctgcgaagggcctcggagcccaaacccggaaccgccatctgggactgggaagacgacatggccagaagccgactggacagccggcaccaccccatgattcaaggatggccatagcccagtgcaggagcagatttgcttccagtttgcccttcctcctagagttttgctcttgtcnnnnnnnnnnnnnnnnnnnnnnnnnnnnnnnnnnnnnnnnnnnnnnnnnnnnnnnnnnnnnnnnnnnnnnnnnnnnnnnnnnnnnnnnnnccaccacannnnnnnnnnnnnnnnnnnnnnnnnnnnnnnnnnnnnnnnnnnnnnnnnnnnnnnnnnnnnnnnnnnnnnnnnnnnnnnnnnnnnnnnnnnnnnnnnnnnnnnnnnnnnnnnnnnnnnnnnnnnnnnnnnnnnnnnnnnnnaaaatatttcatggttatcattggattctcacagcaccatttgaggtatacgagcgaggttagtccaaatttaacacacgtgctcaactcgtgg

SEQ ID NO: 418364 - DNA, 1349 bp, Homo Sapiens
  misc_feature (292)..(292): n is a, c, g, or t
agcggattggtaccgatcagcatcaggatcaagggagccaacggcagctgaggctcgtgagggggggcggacggagcggacaggctgcaacagaacgcgcgagcggtgcgcgcagtcccggcctgggtccgtgccatggcagggtgcactctctatcggtgtggcggggcacgtcggcgagggcgccagcactcatgaggtacgctccaggtaggcagtcgttgcgtcggacgcggcgtgcacctctacggagcgccgtgactgcaagcggctcagcggctctctggagggntgttcgtgcgctagtgccgacgcggtgcgtgtccagtggggcccaccactcccggtacgaaatctggaggcgcgtcgtgatcagttcgtagagcaatcgcggaaccaaggcctgggcccgcgcaggaggccctaggccgacctcgtccgtagatatcctagacctgggaggacagctggcggggaggcgggcgcatgggccccgtgcttttacgttgacggattcggccaggcatagggggcccttctcgggcatgcgctttacctttgcggccattcgcggcgccgcccatgtcccttgggcgtttgcctacaggtagggttcgtcgctgtcacgaggaaccacacatacgaagagtaagcgggtcgcatgcgaagacctggacggcggccttgctgcgtgcggtatgctccttgcataggtggttacgttaggtgtcctttcgttcccaggggaagctatcttgggctcccactgtttcccgtggttggcgcctatacgtttaggcggagcgtattacatgctttctaacgcgttcccccccagaggattcctagcatcggggggcatgtgggtccccacgggggttgttgccccaggcgtgtgggcctctgtgcggtttgaacgcaaacgcccccagggccggggtggggcgacatcggttcgcgacgctcggggggatccccggcaccatagcgaactccgtgtgcccacccacttgttgctatctcgtgtccctaattgccactccctagcttcgtgaggcgtattgcggcgcggggcgtttcccactcggggtattggaccaggcggccacgcaatggggttaacgcccgccggtgtgtgccccttgccccattcggtgagggcccccacccggacaagggaattggcttcaggaccctttcctttacgcggtttcccacgcccggaggaaccacctgagggccttggcaaagccgcaaacccggatgcggtgcccgagaaatgcggcgctatgggggccccatatacacccacctctgggtgagcctgttttattgcccatagggattga

SEQ ID NO: 418365 - DNA, 722 bp, Homo Sapiens
agcgagtggcagctcccacagcccctccctctcctcccactacagtgattccagatctcccagcaggctgagccccaagcaccgagacgaagggcgaaagacgggcagccagcggtccagcggaagccggtcgccttccccgtcgggcggcagcggatgggggtagccccagcggaacggcggcagcgggcagcggagcggagcgcacgggggccgccccggctcggcgcacagcccgcccgatgtacgtacgcttcgctttgcggagggttcccgcgccgcgggctgcgccgtgcgtggtcgggcgggtcgccagcggggcagggggcgataagtgtggcatgggggctgggggcgggggcgtgcgcttcctcccctcctcggcatccccggggacgtacctggctcaggagagccgccgggagtgcttaggccagttgctgcccacactgggccccttggtgtcaggggtgaaggggcgcctgcgggtcttgtggaccaccctttgcggctcgggcaagactgaaaggccagaggagggggtagaacagacggaggcacatgaagtaggggtaacaggggactgggggaagcgaatccagggtccttccgtgccactcacccaagggcatatcacgggtaggagagcgggcatggcacattggataaggagtacacaggacaggagccagggatacgagagaccaggacgcacaaatgag

SEQ ID NO: 418366 - DNA, 1593 bp, Homo Sapiens
  misc_feature (97)..(192): n is a, c, g, or t
  misc_feature (794)..(802): n is a, c, g, or t
  misc_feature (1473)..(1534): n is a, c, g, or t
agcggggcggcggcacgtcctcaacatgacctataactacaacacaatacaaatacctccataacaatctcctccatatacactactaaaccataannnnnnnnnnnnnnnnnnnnnnnnnnnnnnnnnnnnnnnnnnnnnnnnnnnnnnnnnnnnnnnnnnnnnnnnnnnnnnnnnnnnnnnnnnnnnnnntactccatacacacaacaacatacaaactacacacataccacagacaactatgcactaaaaataaacccccataagcaaataccatttcttaccccacacccaccacacacacttactcacagtaataatcctacccatctacatacacctaccaccaaaaactaccccaccactccacacgcaacaacaaacaacaagtagtcgctccaacacgtcaggcgactctccacctatcacgaccagttaccatctaacacaaatccatcactcacgaccacaaaagagaccacagcagcagcgaaatgaaagagccgcacgccctccgacagcggagggaagggcagagaaacgagcgcgcacgcccaataggccgcacgagccccacacgctaacagacacatgcaacacgcaccgacgcgacgggaacgtcacgcgactaccacaacacatgtagtaccacctaacaacatccacagaccataaacacaacaccatcgacgaacccaactcttccactctcctatcacaccaacagcaccctcgatcaccaacgtcccgtcactatcaacccactagcatacgcccacctaatactaactcnnnnnnnnnagacagcagacagggcacccgggccgacgaactcgacgccccggcgcagccagggtacgcgacccggctggaggacaagcagcaagagaaaaagagaggacaagcaagatgcaagccagaaagcgggcagagagcagagacataaccatgtacccattccactcagccaccctgttaacgcaacaaaaattcaattcactactctaccacattctgctaatgctctggcctcaccaccccacctatacaccacttcaactactagctaacaaaacttacacataacatcattcctacataccctaactgccaatcaatattatatacccacaccaacttccacaacagtagatcaatccacccggacctgctggagtcaccactcggacatcaaaccctttacttaaataccaacgtctccacactaacaccacgcacacaactcaacctaaactggaaccacttacccactcacctcatcaaaccctaacaaacacagacccacacctaaacacataaaagaaacaacacagacatatacacacctacattacacagacacctataccacatcaaataagaacagaactccacgtagaaatacatacactgacaacccaaaccacataacctcctacactactaaaaatccacagagacataattcacannnnnnnnnnnnnnnnnnnnnnnnnnnnnnnnnnnnnnnnnnnnnnnnnnnnnnnnnnnnnnccacataccaatcttcaacttaaatacatctaccacattcactagccaatacatcacca

SEQ ID NO: 418367 - DNA, 767 bp, Homo Sapiens
agcggacctgtgatttgacggaatctggctggtcccctgtgtacgccccttcagttcctctgtcaccgtccctgtttccctcgaaagatatccgacttccagattggcctcacactcctataatagaacgtcctggttgcctggtagttcttgcgtcgagagtagtggcgtatatcgccttctaatcgtgttccttcgccacctcgttgttaggcttccatagaggagcttcaacctccgacactgccatcgtagagattcgtcgcttcccatgctgattaccttgataatattcatcatcgaaactacgctgatcctcatcgagggaatacattgcccatcgttgaagactcgcagaactccatgccaaactcgagcctccatggtgttcaatcctctattattgagagaagggaatgccgtggcgcacagataatcacgatcatcatccgagtaccgagccataatgctccctcgtttcgtatctttaccgtcacaagcagtccaatctgcttaatactagctgcgaaggcccctctcgtgtgaatgccctgtgtatctgtgtcaaataaggcctagctccactcttctctgtgcctttcactgctttgaaccccttaccaacagtcacgtctgtgtgtcaatccttaggtacttacccttgccgggtaaacactatatctccattagtgcacttaaggcaacgtccacgttgggggctaacactgcgtatgcttccgtcactactctctttaactgggctggag

SEQ ID NO: 418368 - DNA, 1234 bp, Homo Sapiens
  misc_feature (329)..(329): n is a, c, g, or t
  misc_feature (358)..(358): n is a, c, g, or t
  misc_feature (395)..(395): n is a, c, g, or t
agcggagggcgcgtggcgaccagcccccgtgcggtgcgaatatgctcgcagtgtgcgcgaccagctgggtgtgggcttctcctggttgatagagcgtcctgcatctcgatggcagtcacgagttcgggaagacctggccctcgacgtagccgacctatatgaacgaaggaatcgctgcgtgatccctgacttggctggcgagaagcctatgagtagcgtgatagatcgatcatctcattgagtgctcgtcattcgctcacgatgaaaggccaatttccacgagggaacggtttactcttacctcgcaggggtcaagaataggcatagantcgagctcaatttgcgccaagccttgtantgatctttccccctaggaagtatgacgttgtaccaantcgactgcatttggtacggacttatgcatcaggaacagcaggaccacgatgaagtggacatgaaactaaactaatcaaatcccattacccccgtatgtgtcgcccatcgtgcctacacgtggatttcaggtctcttggttggtacgtattgtgttttaggccccgtcttggacccggatacccatgtgcagttctcactgagttgtgggcatttaccccggggtacccctcctggcgattccagagatagggattttaccattgcatttcggataggaccttgataaggggtatgaaccaaaggtagcaataccaaggaacggaaagacagcgagcgttttggcctcttttgaaaacagatgcacatgtactgaggtgtgccgagagcggattcccaaaacatttctttgaaattccataggtgtttgggtaaaacttaattaattggtaatgctgaactttgggcaaggaaccttaatgacactttatcccccctttaagttttacccttggaaaacctcggttggttaattaccattgttatacgatatcggttaaccaaaccccttagttttgggtttggggaacgtgttttggtggtcgctcattggtgccttggaaccattcatcataggcgtccctgtgggcatacgggacaatcttaatttatcttgtcgattgtaaagcgccctttcccggtttttcttcaattcatcaccttcgagcgcattccggttgcaaacaaaaaggcccttaggttttaccttggccccatttgcgtcctttacgacattggggggttccccccccgtgtagtttatcctttgggcccccctatg

SEQ ID NO: 418369 - DNA, 1412 bp, Homo Sapiens
  misc_feature (558)..(558): n is a, c, g, or t
  misc_feature (1310)..(1310): n is a, c, g, or t
  misc_feature (1312)..(1312): n is a, c, g, or t
  misc_feature (1357)..(1357): n is a, c, g, or t
agcggacttccaagcatcgcgcgaccgcgaaggcagctgagcaggaggtcccgggacgctacttggaacccgaggctgtcaccagtgcccgcgccctgatcactcgctttccaccagggcgtcataggtctgagattcggtgagccctcctgccaaggcatgctgcaggccccaagcgtccctcgcttgaacgactctagaagagccgctcagcgtccgactgcatgggtcggacgctccactcctgaccctgaggtgcgcgagggtcccctcgcgtgagacagtggttcggtgcgtattcatgcctgtcgcatggcggacgacgtgccagccagaccgagagccgtggggagcgacataggagccagccgtcgtccactagcagtgtggaacgagcatcgtgtctgcaggcagtctatccctgtcatgaatcctgtccaaccattgcatctgagcatgagtagcctgtgtccgaaccttatgaaatagacccccgtttgattggcaatcgaacatccaatgcctacttcgcaacgcgactggcgtactggcatcccnttgggtaccgagccctccattgcatgaccccttcgcgggtcccttcccaccccacgttgtggcacttggacggaagaagctcaaactatgacaccgccccccattttgacttcgcccgaggcctatgccttctcttgctttgggactgggaattgggaaggactccctttgcgcccttcttatagaggcatttcggccgcccttggccccgcacgcttctacacacgcagaccccgtacggacgtgtcctacaacgctgctgggggcccgcagaccaacggctacgaggaacttcgacactaccccgctttctgggggcctccccccttttccctcgtcccacgaggacccttgcgggtcttttcgcacctatatacacccctgctccggttcccccatgccacaacaggcgccaagctcccgccggcgaacgtgacttaaagacgcggagaccccttatcggctccggtgtccccacggtacagttaatttccccttttacgccgtgtttgaaaccactttattacgccccttggagacgcattccgcgccttatggactcgccgcgcgcacactggatacggccgtccgccctggacaccgagccctagctctggcgtacgggctttcgcttacgtcccgctttctggcttggcaccccgtctccaaccttgtcgcctctacgtagagcgccgcattcgagcccctgctctggcgctgcgcttgagcttattctaggtttccgtcttganangacagtggcatcggttcgctttaacgctttatgtgccacccctcnaccactgttttacactatccgacaaatgcgcagtcgcgcgtataacttacgcgcg

SEQ ID NO: 418370 - DNA, 1077 bp, Homo Sapiens
agcggtggtcgggtgacgggagattgaactttgccgacgagctccatgggtagcgttcgtgacccgtgaagatggcgtgctggagtcgatggctggctgtcttacgcgatggcgcgcatgccggtagctgatccccgagtgtctcgggagctagtgcggcggctggagtgcgtcgccggctcggcgcttctgcgatctaagtctggcctgcgcatcgtggtcaatcctcgcgcatgctcgaagtcttgcgtgttcagacctcggacccgcgaggaatgggtggcgtgtcaggaggtccatgggggaacttgagcggacgaattgtccgtcagtatcgactttgaggcatcatttgtacggtaggcaccattgagttgccggtgcgagtgaacgggcggcctcaagccgaatcctccgttgcgtcgtacgatgtacaaatatggtacattacgaatctgtggttcaatgcagacccgtagtgccagcctcctatgcaccttgggcgaaccccaggatggtagtcttgacgcggaggcggaaacgtattacgtcttaattgtagcccgaagcgatttcggtatcaaaacgttacgggaatatacgttaccattctggtcgtaaaatcttgagcacttggttagcgaattatggagcgtgatattccaggaagtggtctcctgaaacattcaccccgtgggttggaaatggttctctgagccgacttctctaacggtcatgtagattggtggtaccatcggagggtggatcggtggatttgcaatgcaagtcggatatattgcccccaatcccgacggaattggaagggactcctgaagaccgcggcgcgtctatgcggagcgcggcgatgtaacacttggagtttttgtggaacgtaaacatattcgccacgttgatacgttacacgttggactaggattggcagcaggcgtagagtaaacacccttgtaccttataaccgagattgcgacctgtgaatttgcaattggtcacacggtagggattggtgtggtgtccctctcggccctatttggcttatgggaagccccagaacgcact

SEQ ID NO: 418371 - DNA, 1006 bp, Homo Sapiens
agcggagtgtccagagctgctccctttacggaagggaagacttggttcctcagcgaaaataaggggcggggaacccctgtcaacatccatccagagagctgcatcctgctggccctataacactcttctccaaaacggacctgccatgcagactgaggagtgttgactgctgctgaggacctagaggtggctatagtagacatcattctatgagtggaagaatggccttccttactcgaaagatggaatgcatggtacaatgcgatattagctttcgcgagttgcgaagtacacgacgttagacatcggcgactggcgctacgcgttgcataacgattgcctgaatttcaccggaataacagaagggcccaactcgctaacagaagggttaccagcttgtgggagccttacggatacagtttaccacggggattagcgagaggacgacagtcggagaaactatcgcgcatcgagaactcgaatctccggaacaccctgttggccccaagtaatacattgcgttagcattgcttgaaggcagccccgggcgaggagcacactgagaatcgctacagagaacgtggcagcccctaccaactggccactccagcgcattcggagcaacaacactaatccccagggggcaatcccttacaaaaactcggcccgacgtgccgcagtaaaccccctggctgggcaagccgagattaaccgaaggcagacgtgaacacgcctcacagttatgtcggctcgccatggtggtcacccggagcgagcggcacgcaaccaacttggtagtatacgacggcactcgcagacgtacaggcgataggtcacagctgagggcaacgaatcagtcaagatgtgaccccagtagacgaccgtgtattgattatttccggcatgtacgaagcgcaactgacactcaacgttgtaaaggcagtcgccacaacctgacctgtggaaatgggaccaaccccgccaatgaatgtgtgtgaaacaagtg

SEQ ID NO: 418372 - DNA, 1310 bp, Homo Sapiens
  misc_feature (1137)..(1137): n is a, c, g, or t
  misc_feature (1197)..(1197): n is a, c, g, or t
  misc_feature (1254)..(1254): n is a, c, g, or t
agcgggtggggggccgaaggcggagatcagaaagatgtggcggacgtcgcgtcgccggcctgcggagatcgtgaccgcgtcgtcgcaggcgtccgtccgcgaggtgacgggtcgagaccctcggtcccgtcgcatgctcacgtcgacccatccgagcacggggccacccggaaccctgcggccgaagagcaaggtgagagaggagggaacgctgcatcgcaagacagagagcaaatcctgagacggaagcaaagaaggaaggcataggaaccaaacgaggggtacgatgcgatggctggtgccaaaggggcaacagacgcggcgagtcaagggggcacagcccagagactcgggtgcgcaaagctggcagtgtgagaccgacatagtccgggggtgcaaccgcggaggcgtggcaatagcaaaagaaggcagtcgagagcctgtggacgggacctgcaaagggggccaagcccttgagtgggggcgctactaatcctgtcatttggtgctattgcctgtaagagcctaggagagataaacagctcggtggaggctagtcgccatttcacggaaaccgaaagggcaacacaggcttaggacgacggggtgatacctctgcacggtgtaacatgacgtcggcgcagcaaggacacaccattgctcgaggccatattcggcggatagtgacgtggatcgagaattaacccgttggtgccattgacggaggtcacaaccaggcggcaatgaggacgccggcgaagcagatgtggggctcgaggggcgacttatggcagagggtaaagatatggtagcaaagctaagaaggacaactagaaggagatagggccacaagggactttaacggttggcggcgaaaggaaaggaaaggggttaagaaggggggacgcacgtggccggatgagaatttcggttgacaaaagcaacaagtatggtcagatagagagggggacaggaaaagatcgcaaccagtgttggtaccacgaatggcgatagacacacacctttataggtggcgccatttggagcagtagaggagttcattgacccggttttctaagcctatggaactacttgtgtagagtttgacacagcgtcccgcgcagcgaatataagacnccacaagaagttggccaagcgaactgacaagtaggagatacagcgacagtatcgccacanggtcacataattcaggagcatacgcctttttaaaagctaggaattgagatcggaagnggacgagacaaatacaatcgtgtgagagcaagtgtaaggtaatactagggacgcac

SEQ ID NO: 418373 - DNA, 994 bp, Homo Sapiens
taccatgagcggcggaaacgcaggttcaccgttcgggggctacgggggggtgggacgacgtccttcacttctcggccggaggtgtgtggcacggagcgcagtgggccagaaccaggcatcttgagctctgaggcactgagcagcctgtcgacgagtgaacatttagctctcccgtccctagtactcccttctcctctagccgcgtagaggaaaccccaggactctatgtgagagtgagtggaggaagtatgctcgggaaaggcatggactgagtagttgagagcagaacggcatggctccatgtagccgacgcagacgcgctctacacataccaacgcagtgaagggatcataacaacttccgaatgacaccggagatggtgtcacgcaaggtcgtttgaggggacgatgagaggaacacactttgccccactcaatcctgtctgcccacagattctggggggctatggctcgcgctaagagagggcgcccccaaagctcgacggaatagatcaccgcaggcactcccccctgaagaacacaagaagcgggacatgccaagatcggcgcacaaaaataggacgaacaggaaagaaagcgtccagagagtagcaatgtccacaacaagcaccagcactctgaaaacggggaaaggccactttctacggtgcgggcagcacgtggatggccactttgttcaacagttaatcttagaggtccaagctgggcaaccgtcgttggcacttcttcgggactcgagaccttcggctgccgtttgcaatctaggtgcatcaagttaccaagaatggttgtatgttccggcgagggcaatcaccagaaggaagggcgatacttggcacgcggtcctggccctgacattgcacgtgtaaccctataattggtgtccctggaaccaatgtgcgcagttggactgggtgaaattcctcgggacaagttggttcctatgccccttacatgcgcgaagattttccaca

SEQ ID NO: 418374 - DNA, 1488 bp, Homo Sapiens
  misc_feature (485)..(485): n is a, c, g, or t
  misc_feature (738)..(738): n is a, c, g, or t
agcggaaggggaccgactggagtgggatggccggcggacgtgccgagactgcgacgatcagtagccctaagtcttcgtcgtagagatgcctcaactcgagggcacacacgatctacccttctggagagtcacagctcggaagtgtaggacgcgacttggaggaattgtcgcataggccgacatagtgcgacagacgacgggagggatgatctccaacccatgaacgctagcgagccgtcatagagtaactgttgactcggcaaacgaggacgttggaaacggcactggtggcgtcacgtctgctcatggatctcatacaggaagtcctcacgtagagacgcaagctcacgatctctcgtcggcgtcgccataggattgttatggcagacacgttgggagcaaggggtttgggacgattgtgatttggaaggtccctttgcatgctacgccgtgcaaagaggctatggcttggacggaggaattgnccaaaccattggcggcaagcaagaaggaattgcactacttatgtctcccgtcttacagggctccgacgtgagttgggcctccgggcgcctttatccacccccccattcggttcgacttcgatccccccatccctagtcccgggactatacgcgataaagaaaaagtttgctggtgctttcaagccatctccaaatcgatatcccctttgggcggttgctctgtagaaggcaccattggaaaatgggctcgcanacactgcgcggcgaggctatgcggtttgctttttttgccacctttttagtccatacgggggcagaggacgccaataccgccggttggcggcccccatgttgcgttctccctccgggattaggagaacgcgcaattaggagccaagacgcgtttccccaaatttcacaataatgggttggtgctcccctttttttgccctgttgtgggccaggccaatacggtggaaagcctttattactatccctttttggcccaaaagagcgatataggagatttggcgggcgacttccaggtaaggagtgcgcttcgaataagggcctccccttgtatcgcaaaaggtggttggcggtgcccccttagggatatgcacacaaacacttattttgcgagtggcacctcccctggaaaacttttgcacagggaggtttaaccgtgtggctttacctccccttgggggcgcagactatatggcgaatagggcgttgagctcggaggaaagagggccatccccgggaggggaagggtaacagctagttggggggaaccctccgaagggccgctaattcttccgccggccaagaattttgctgcgctacacaaaaagtggtcgtcccccaatggggtgattgtgcagaatcccccaaaccccaggggggttaatgggcggccaaagggcgcgggtctggaaccccccctgggggccccatcgatgggagggtggacacccctggtgttccgccgaccacccct

SEQ ID NO: 418375 - DNA, 714 bp, Homo Sapiens
agcgggagggggccgagctggaatggatgttgcaggcgtgtcgtgctgggaccgacaatacctgctgatctttgctggagaccctcattggccataatcaattcactccgttggagtgatcgatgcgcctgtgaccccaattgaagaatgtcagaaggtcccaatgagatctcagagaaccacagtgtacgggggggtagtgccacccacttcagtcaaccgaggttccagtttgcattcctgggatatatctctatggcgcgcgacatacgaccagccctgtgggaaagcgtagtgggacccgaactatccttcttctgtcgagcaatgtagccatatcaagttcccgagtcaatgagtagtctccaaaccacatgacaagcacgtgcgatgggtttcgccgccattgctgcaagagggggcgatgttatttaggaaggccctgtacgtactttctcggcgcctacgtcttgtcaacaacgcacaattagcacatcctgcgagacaaacgtagtggaaatttctgcccggcacaagctgggcttgagtcgtcgtcggacccctgtttcagccacacgtccgatgccttggatccacatcgtggccccggctacatgcaaacgcaatatgctgatggggtaccaacaagcgctagatccaccattgcgtgaccgtacgcgaaaaggtaaaccaatatgggttccaacgataaac

SEQ ID NO: 418376 - DNA, 979 bp, Homo Sapiens
agcggattgcggcgcctatggcggagcgaataaagcctgcctcgcggctctcctggcctctcagcagagaagaatgggccggcgacagtagacaggagatacttagtgagtggccgaggacggatgccgtctcctagcggacagaggtactgttcacgcgggaggaccactgcgcaatgtagtatggcataacgcatcatgctgctctatgtctctctccgttcagtggcatctgatccgacgcatacgctacgacggaatgtccagtgctggttctgaagacgccttgagtacatatcctaccactatgatgggagttggaaatctactggagaatcggacatccgcatatggggacgaatggatggtccgagcaagacggattcactcgagtagaatagcgttgcgtaaggcgtgttgatgatcctgacgtgctcacggacctggtagtgtcgtgtctaagtcggctagcctactcggttccgatggaacccttgtctctgggagtcaccacggtgatgatcggaagagatactcatgaactggacgaggactagcacagtcgattgcagactgaatgcaagtgctgtgtcgtattagccccgcgtacatgtgagggaaacactcttaggttcgacgctagacgtcgaagcgttcgcaggagccaagggtgatttcctacttgaaagaggcaaggtcttggttcttccttggtaggtccacactatgcgccagcggaacggcgcttgcatggtgtgattgaggaagagccatgtttgggcggcctcctttgcaccttgggatgggatgatccgtgcggaagcacttttgatgcggcaaccctctggcggagtggtagcttcgaggcgcaacctggtttggggttggcccttcgtaaggtggcactacacctgcggggtttacaacacatggcaggcggcttctcaccatgcggtggggaatgttttctggtgccccg

SEQ ID NO: 418377 - DNA, 1208 bp, Homo Sapiens
  misc_feature (605)..(605): n is a, c, g, or t
  misc_feature (743)..(743): n is a, c, g, or t
agcgggtgagatgcgatccggccctatagcttgcaatcattctccgctggaccctgaccctggatgctcctcgcgttggagggacgtcggacccccaacggccgcctcgacttcccgaggcgtgcctggtctgctacccgacgccagtctgccagcggtcggcctgcaggcggcgcgccgacgctcgcacgtgcccgcttccgtctttcctcacagcgcttctggaccgtggtgaggcgatccctcccggtcgcgtcggtcttgttttgcactggtgtctctgtcggtcagtaactaactatagcttttcaagctactcatacagttctaagaatactttaggacccatagtcagtaccaggctcagtcttccggttgcttgaacgtggagtgagtgcatcgttgagcccaacgggtgaacagacctccctgctgcccattgtacacttgagcctactaccatcagttcaagcccagggaaaccttgcttagagaccttttcattcgcccccaggtctctaggcgcctgggctggctcccatgcagatcatgtcccgtttgagcccagctatgcttatcgggtcaagggagatacgaccaagccnatattgcttgctgtggcccctctcacacgctcgccccaaggcacgctgtggctgagaacggctcttatccattttgcgatgttccgacctcattccattgtccttgggtgagaggaggttaggatgcgttgtgctccncggcgtttgttgcaaagcggctgctgttggctacgctcatcgagtggtcccattctcatcgactcagctcgtattgaggacctcgcaccccctgtcatccccggtgtcctcgtaaaaaccctgggccggatttgaaccttgcctcaggtgaccttgtcctgtaccccgggtaacagtgggtccagttgccgcgtgagacgcccttgcatcatcttatactcttgggtaggaatgggttcgcaacgggtgtcgccttccggtggttgtgaccgcgggtggataccttttggaatttgtccctgtgcgcctggccgttcttaggaacgcgtgatgcctgggggctttttctcccgctggatgggcacagggaagtccctttccttctggggcccagttcctacatttcgcccttggggttggacaactttctcagtttccgttgccttgtcgcgtgctcctaccccg

SEQ ID NO: 418378 - DNA, 1286 bp, Homo Sapiens
agcggaatagaactgtacgtgtgacagcagagcgcacaacgttctattccgggggcgcaccgatgcggccgcagcgcctcgtctatcgcagaggtagcgggccaggcccgacagagctgcgtaagcctccgcagcacctgtcagagatcgtgccgcgtgcagcagccttagactcggattccaggtcggcaggctgcagagggtggaatcgacgcgattgtccagttcgtccactgacaaaaggctgaacatcaatagtctaggcgatgagttgaaatgcttgaccaacaggaggcgaacgatgacacctgtatacaaggatagtccagttaggcactgaagagtccaccaccagacgatccatatcgcatttgacgtggcattgtcggggccacctgtacagggaggctagatgtcgaacgaaagcttgactgggtactatctagagtgtcgctatgggtatgcacgggcatgcattgctaagtcactgaggaaaagggattagattagccactgggacaacattgaggcaagcgctgagatagaaatgcaacgctgagaatcgggagcgttgtaagcatagccatagactcaggtcagtccgttactatcccatcaatatgttcggacaaactgaaaaattgtgaatctttcaccaggggaatcacgtagtctccataattggcaattccaatcgtacgaggacagaggtttcccttgccaatgaattcggttgtggccgctcagataaattccagactgaaatcaatcatttggaaagctgagacaaagtgccagtcagattcacgttagagccccccaattgtaaaggtcgcaatatggttactccccaatatatatcgcacgtgtcccatagttcatagctctctaaaggacttcgtgacatgtgcgcaacaaacaacaatttctagggaagaaagcgagagggctttctatagctcaaccaccactttggtttaacgcaagacggaccaagtaagttccttgcggacaaatttttacgcaggaaaaggttgtcggtacacaatgccattaagtgttgctacccctagtggaactagctctagaaagtccatttgacgtgggcgtcagaggagaaagcatgcccccttgtggagcaccgacacatatacattatcttttcgcccaagggaaatagaggccagaaagacaatctaagcggctctacaatagttccaagtttccctacatggagataccgccatggtttcaccctcgatgtgaaagaagaccccaacaacgca

SEQ ID NO: 418379 - DNA, 1031 bp, Homo Sapiens
agcgggaggtggagcccgtcccggagcaagaactgcgtgatcaggctgggacctccaggcccagatttgagcttgatggcacggtccgggctcgagcttccaggtcgctggttgtgctcggttgtgcgtgcctgctcagcgtggcagctccagctcctgctgcccctggtgccttcgcggggtgacctagtgtgcgggatgcgccgtcgggcacggccctttcccagttggtgtatacgtgaggctcggtctttactctcttgcagtcctatccaagtctagtccgcaacatgggactggatagattgcctcgaggtgccaagtgatgaggcccagtgggagttaacatggaagatgctttggacttgtagtctaaacctgtgccttcttcaggacaccaaggtttctgggccagcggatgagggccacttcgtcccctataggataatcccatatgttctgcgaggacgtcctgactggcgcgacctagggcttgacgcgcaagctagtctttcgtgtgatggcgaccggggggccttgggctggaagggacccgcgcactcttgggacttcttagcgttccccgtgagtagggggttccccgcggcgtttcgtcgccaagcggtttccgtggccgcgcggcacgtatttgggccatagtacctgagggccccgtgcgtttgttgtgcccttcccggtgtagcgccgccattggcccgtgattggtcttcatcccaggtgtgggggaaggaacttccgcaaagttcttccctcgtggacgctacgtacgtggatcgccccggtatacttcttcattcacggcccatgaagcctattggcaatgttggttgcacagcgccttcggttttcggccccccattggttgccattgacatccgtcttcatatttctctgcccggggccacgtcgggcctgcagcgcctgattacaggcgcccttctgcgattcgctgcgcgtcggcggagggagccctcccggtgccaacggcgctctttgttgggcgccgctta

SEQ ID NO: 418380 - DNA, 1238 bp, Homo Sapiens
  misc_feature (88)..(118): n is a, c, g, or t
agcggagtcggtcccttcctggtcgccgttgcccccgatgtgccccgctttcgcgtgcggtctcgctctgttcctgctaccggtgcgnnnnnnnnnnnnnnnnnnnnnnnnnnnnnnnggtaccgtgaagcggcgagcttcgctgccttgtccccgttggcacggcgggacgctccgcgcatgtcctcatggtttctgcacggggacgcctgtatgtgaccctacgatcctcgtgcgcttgcccttggagtgcaccatgtgttcctcagttgacgtgactgactcagatgcctcatgcacgtgatgtaggtaccccgtgggagacacccgaaagggtccttccagggtagcgcaaattgcggcgcaatcgtagcgggctagtgcgccacgagaggttcgaagaggctggttactcatgtcgcgtctgcgcttcgcagagcgtgacgtcttactggctacatacaaaaggggggtacaccttagcaccgtaggaagaatgacgaagggcttgagaagcaaactggagcccacttaacagggcgcggtgagtaaggaaatcgggtgctccgaagtcgttcttaggtggcagaaccgatatagttatacgaagcgcctcgaacgttgagttttgcccacaacggggacgtaactaggttaccaaataggccgagtttaagccacagggaaggttgtcacttcgaattacttaggtttggcatccatggaggagtcccgattccccctgggagttcatttccacaggcccgtacaagttagagcttcaccctccccgtcggggctcttttacgcgcggtgtttgagagactcttaggtccccagttatctttgacgccccttagttgcctggtcgttatggcggtatgtttcttagtgaacccacgaccggagctaattgcagcattccaaaggggttggtggcccctaacaccggttattgacggcaaactgcattctttgccatcctagacgtatgcgaaactcggcccttgccctgacacttgggacccattcgaactagttgcaacgacatagatctgagcccccggtcccgcgcttgttgcacaatagcgaagagtccccaaagggtcgggcaacaaagagttaccccgagagatggttatgggtccagaagaagcgtcgtgcagaacggccaattgagaggcataaaaggaagttgctactgtaaagtaggacaaaagagggcccaagatctagcc

SEQ ID NO: 418381 - DNA, 1096 bp, Homo Sapiens
  misc_feature (712)..(712): n is a, c, g, or t
agcggagctgttttctgtgtatacgtcctcccagtgaatgtgctgctacctccatcgtgtgtccctagcattccctagatgaatgcgtactgatgcaatttaaagcctccccataactttcagctactatgctgtatattcagattggctcctggccggatgcaagccagttttgcagccctgtgtctggtgccccgtcacccctttgtcatcctcgtggatcgtcttcttgtaggacgtactcgcgggtccgtaccggcatcgtctctgtcctatggtggagctctgtctattggaccgtctctgttgcgcactggttctcggtgcttgggtgtgaatgagttgcggagccggcgtcatgcgcaggctgcggtgcgtctccgttgccgccgtctccctcactcgcttgagcttgcctgcgggtacgggcgttgctccattgtgcccgacacacagcctcctaggcccgccgggcatggtgcccccgaggtagttccgccgtatcccggatatcaggaggacccggcgatgctgcttcgttatgtgccgcgggcagccaacttctcgcggggaaaatagctcgatccacgaactttgcaacgcctaccgtccccgtcctgtggcggagttacgcatccgtggaattgtccccggggcaaccccgttccctgcggtgtcccccagcgcgccctcgaaggggtacaggaaggancttgtcggggcagttgccgtccgggcgattttgcccgggaccaggagtgccttggcgggcgattcccgaaaaaatgggaagaagcacgcccgttaggccttgcttatgcttgggaaagaaggacgcggcccccgggtccggcggcgcagctgggcgtacgcaaaaggcggtggtagcgcttggaccgcggagggggtccgaacccttgtgaagttacaccttccggatatcctcgaccacttcctgcgcaagttgctttctagtattgccattctcagaaggcgttcgcgttgcttgccttgttggacacctctttccgaagtaagggcccacgtccttttccctggagatttctttctggccagcctcccctgggtccttccc

SEQ ID NO: 418382 - DNA, 1475 bp, Homo Sapiens
  misc_feature (807)..(807): n is a, c, g, or t
  misc_feature (1235)..(1235): n is a, c, g, or t
agcgcagtgcacgcgcacgtcccagaggccggagccgcaattgccgggcggtccgactgagcgcttatggacactcgcttgacgcgttgctcccgcgacagcggccactgcctggcccgacccggcactggtccggcggactcctaccgcgcctgcggctgcctctcgggggcgcccgctggcctggcggcgtgctgctgacctgtgccttgctgctcggacagcggagcaacgacgcagcggagccccgagccgaccgccgaggcgtcgtacgacgtccgtcaggcagcccgatttcccagaggtgaccgtcccggcgccggctgacggtcccgtccccgcctcgagatcaccgctgtcccgtgccgcctagaagaggaccctcggtgcagagttgtcggcgaaagcatgacgtagctctgtgttcttgtgtatgtacattagtcttgttggccgtttcgtttcattgaccttacccttggcattgtggtgagagtcgagcctctgttaaagcttgatgggcttagttgtgatgtgccccttgaggccgtcgggggccggtaccagatgtccttgattccccggatgcgcgtgtaaaactacaggaccccggaccgtgtaccttgatgtggcccccgttttggcccttcagtggcctacctttgccgtaggattggccctaggacccaccggacgaaactcgggcggtaatcgacggtttgaaatcccacacgaccccattgggtttgccacggaacccctcccccgcctgttcatgaacaagagcctttgtgccaaaatggaacnaaccgctgtacgctaatcttcattctacagtgctatccaagacccccgaaatttcaatacgaacgtgggctcgaagcggtccccattagacgttgcaacccattaggccattgccttggccccagaaaatcggttcataaccgcggtattggtaggtcgctcaccgggacaaagtgttttccaaattttcgcgcagaggcagttacatttcgttccccatggggcacccctgtgtgcagactgttagcccagggggcgttggtcagaccttctattcgtggtggcctttactgggttgccgggctttgcctttgccaaaaacctccttgtgttcgagaggcccgaatgacttttatgagaccagccctccgtggtttgggttccccggagctcccaccttggcccccctttttctgtgacgtgaaacnatcggttcgaaatgtccaaattttgggtgggtccagctcttacctgtcttcggtcctaagcgcgtttcttcccgcatcgtggtaagggcgagtgttctcccccctctgtgatatgggacacgtcctttgattcccccagagagaagctcccgcgggccatctcttgggggcccgcccatctgcggagggcgcctgggggcgtccttgtttgtccgcgcacgcacatggggttcttccccg

SEQ ID NO: 418383 - DNA, 900 bp, Homo Sapiens
  misc_feature (216)..(216): n is a, c, g, or t
agcggaacaacttaccaaaatggcagtagcgcgcctggtagttgtgagctacctgagtacctgtgtcggatctgtggctggatagccgtcccctctcggtaccccagcgtggactcatgcgtgcatgacattgcacggattacctcagacggaggcgaccgacgatgtgtggtcccaaatgttgttcgatctagaaagacggtgatcttctcattntacctataaatcgattcagaagctatctcctagaaggctgagcttactacacgaacgtctaaaacagcggcagacatagggtctatggaatgttattcttctagtttgccctgggcattaagtacttcttttcttgtcaactcattgacactcgtgtactcgatagacaacgcggcttgcgcagagtccggaaggacgttggtatggctgagactctccctaggggtcagcaggcgcgtgcactaaaggattttgactttacctccaggtgccgtcttgagcaacgttcatactggtaagactcagaacggaaaacgccaactccttggttgcacacatgagtggacacggcggaatggtgcgtagtttcgtagtgaattttgctgaaccttaagtcgtgacctgggtgccctaaccgggagttccccttggcaatggtggatttccttagcgccaaccgtttcgccatggagatggagcctctctatttgccggtttcatttgccatggtacacacttgtggacaacgtacccccaggacgaaagagctcgcatgtggggctccattgagtatgcagaagatagtgcttacaggacttgggcagagataacctctatgaaagtggatcagcaaggtatgtaaatccaagccgtttcctgttgtgtacacctgacaaaccaaag

SEQ ID NO: 418384 - DNA, 785 bp, Homo Sapiens
agcgggcggtgcggtaggggactgccgcagggcgctgtgctctggcgccgaagtcacgcgcggagcggcgcccgaggccggggaggcagtgcgcgggagtgggggtcgtgaaggcatggagggggtgaggacgagagtggacgaactatgtcacggggctggcgagccgtcggttaggttgtgtttatggataatatggaatctctgatccttacgtagtgagttgcagcaaggaatgagtggatgtgcaataagggatgcaattggaatcatccaggatgggagtagagtgaaaatgagagtactattcaggtggtagcgatagaggaatggtattgattgcattccttggagggaggcattattttcttaacatgaaggtggagaatgttgtatgtaacagacggaaggatggactaggattcggctctggtggagactgcgagagatgcatggttttggagcttgggtaccataggctagttaacgggagtaaccttatgtaactttgaattgaacagcagttgaaagtttgcgtgaaaacacgatttaattgggttcttgattacacatgtacggggattagttagttggttgaggcctacttgtgattggctagggacgttggttgctagtatcgaagtaccagggaaattctgggttacatgtcactagagtgatgaaataattgttgtatcattcctaaggttgcaggaagaatagcattggaatggaggggcctttctatttactggttttaagtggaaagcgttgttaagaacata

SEQ ID NO: 418385 - DNA, 1098 bp, Homo Sapiens
agcggggattggtggcggcctgggtcctgtgcctgcggcttctgtgtagacgagctcgcgtggactgccttacgccggggccgcgagatgcctcgcagaggcgaaatgcaagggcgactcgtgggagagatcccgctggacatgccggataggtcggccggcagatgcaggcgagagtgagcgggctgtagtggagcgacacagcgagtgccatcgagatgcgagacagggatgagtctcgggaggccgcatcgaacactcgcatggggcgaatgggccgcaaaggcggcgagagtctggcccgggcatggaaggttgctaggctgcagacggaagagccacgaacgagtgggctgacagagaggcagtgagttcgggagggtacgctagggcacgctgtggcactgtcaagagacgtccacaagcacgggggcctctcggtgccgtacaattacgtaagcggcagggccgtcgttggccgaccgaacacgggcaaagggagggtcgagtcagcaagcacaggagggacagccgaaggaacgtctcattctaccccgtgtgggccccttgaatttagggcgcatatgcctcgggccatgacaggatcatgccctacgcaaaagtgcgaggtgcgaagaccgatgatagcgggcgtacgcggtgaaccccatgtgggagcatctgggggcaagggttccgggtaaatgaaatagagcagaggtggtgaggaattggcaagcgttagaaacggggacattagggggggatgttttgatcgcaagagaggcagagttggcgtggttgtcctacgagggaaagtggaggtgcaagtagccgtaatgttatggaaggttgtggcaatgatatggcttggttgaaggaaatggttctcttgacacaagtggggggcgatggtaaatcgtcgtggatgccccttctttgttggaaagcacatttatgggaagtaagggggtctagtgtgttccgaatcgaatatatttgttcaattggaggttcgcattgggaatgcaaagaattttcttttgcccatgccaagttgggaggaagtatgaatgccgggaggggtttgaaaataga

SEQ ID NO: 418386 - DNA, 1093 bp, Homo Sapiens
  misc_feature (184)..(184): n is a, c, g, or t
  misc_feature (221)..(221): n is a, c, g, or t
  misc_feature (237)..(237): n is a, c, g, or t
agcggagtaactggcaagctcacacaacactgtgcagcaagtagtcaagcgtaacatggctgctgacgcgcgctgcggatagacgggtccgcttgtgagctgactagggcacagtgtcatcgtcggtttacgtgctctggaatcagtcgtgtccgcaaccccgttcacgaagaactcgaagaanagagctctgtcgatgtctctcaattgaccgagaacgnaggcagcgtatgtggncttgactcgatgggatgtatgcacacagcatgagtgcaaagatgcaaagtaaatgaggacgcctccggagaggaggtaagaacatatgacttaatacacgcgattcgagagaacgagcccatagcatggcggcgagcacggaatggcaagagagttccatgcaggagaaggtgcgcagagaagaccgtcatcaacctattgggggaccctagcaaagaaacgtgcagaaaacaattacctgacggacggaatgtggtatacaggttaggctgtttacgggaagtggcttcctgtggtctgttcactagtcacctgcatgctcattgtggtcggggtgacaatgctcttgcgaactttatccacgtctcgaacccagtaacagtaattgaaggctagccgtgagaaggtcaaaggttaattcttacctttaacctgagttggaaacgtgtcttggattgcacgtgaatgtctatccagatggtgtggctcatgtacgcaatgtgtaatgcagtcctcactaggtatttgtggatgtactagcgaaatgagccgtggagtgtaatgattaagtgaaaaggggagttgaaggggaaaaagtatgtggggcagatttgccggaagcggtggtccaggtgcgtgaattactcacatgaagcgtgaaccaacgcgagtgaaatttgacgtcgctgagttgggacccggggcacctaaaggcacactcttgcaccacaccagtcccagtactcacttgccctggggcagaggggggcagcatacgggaagaacattcttgacaccacagaggcaaaagtggcgaagcattgccacgacatttggcccaatttgtccccaatgc

SEQ ID NO: 418387 - DNA, 1274 bp, Homo Sapiens
  misc_feature (421)..(421): n is a, c, g, or t
agcggacgggggtcctggtgggagcctcgtggtggcgtgctaccatgtgccgtcatgccttgtttgctcctggtagtcggtgggattagtccacgaggcttgctggatcagtggcctcgggcgtgtgtgctggagggatcagtggaagcgtagtgacgcgtcggacatagggacgaatcagtggaaagatgagaaagagggattgcgcttatgttgactagggagttgaaggtactaccgagtaggatataggtagagtaaagaggtggatggctacgaccgagacgaaagaagacagtgtccgtgtgttcactgaagaaaacaagaatagtggtagattaaagtgagtttcaatcgtactattgaaacatttctgggattcttattggttaaagttggataggctaggactattacaagnggtaacataatggaaagtttgacgtgagagagtgagatattatttcttatgtacgtgcgccatgagaaatgctgggaatagtgtgataattcaaaatcgaaggactctctatgaggggtgggtcataaatgcactatatcactgtattactgaatgatgaatcatttcagggttccaagccatgcttaaatcgacaagttggtcaatgggagagtctgagtgcgggatggcaaagaacgttttactaaggagaacatctgaaatggttagtgaatgatgtgggggttccgtttaattgaggttggcggacttcattggctgaagaaagttggggttcaaagaaaagtggatccgagagattgaagattggggaaatggccgttctacggattggattactcgttttaggtatacaacgtaattgattttggaacgtgaatgatttgcaggaagatcctattgtgcgtaggtaagtaaaatcaactttcaaccaaaggcattgttgctttaaatcttaaacccgagggagttgtagttaacaagtggactgaaaaaggggagggtttgccatagaaggaaagatatgttagagggtacattaggtgtgtgttttgggccagagcaacggtaaaacgcgtgggcctggagtgttcccagggcttgagaagataccggggttaaaggggaacatatttaagcccgggagggtaccttcgagccgaccaacaggttacgaagtggcccggggacccatcctgcaccaggggacgtggtcggataccagaacacaccccggttaggaaagctggcagaggcgaaacagacgttaggaatactaaagggcagtcaaggc

SEQ ID NO: 418388 - DNA, 534 bp, Homo Sapiens
  misc_feature (42)..(56): n is a, c, g, or t
agaaggtccttgtgacacaagcatgggaaatctctattctgnnnnnnnnnnnnnnnttcacatatgtcataggttttggccccctgatctataagaaagaaggttctcgaacacaaatcacgtgtagtgcttctgaaagcaaagagttcagggcccaagaaatgtgtgtttctaagaagttctcaggtgctgatggccggtccccacaccgcatcacgctgcctcgtatccgcttctgagaccctcaccactgcacacttctcttatggtatggattaataatttaggaatgtagaatgtcttaggcctactgtcatactttccacatgggacattcaaaatgtaaataactctgttcataactaaaatatattcctagaggcattctcatagctagattcagtcttctaaactttctcaactgtaacaatgggcaatgaagcttacagggttatccctgtaattatctaaccttaggtttatagaaacatgagggataaagcaaatcattgtaaaataaatcctgttatctcc

SEQ ID NO: 418389 - DNA, 883 bp, Homo Sapiens
agcggagtaccggtagctcagctccagatggaggaagatgcgaccgtgcagacgtgcattcgctgcggaacgagggatacactggtggcgctgcggcctagcaggtccggcgtcttgagatattcgcctcaggacgcgtgtgtgcatcccgccgggcagtctgcaccaaggtcgtctcaggacatccattgggatggatcataaacagacacaccgatcgcaggagtcactctgcatgttgcggcaaacaacccttgcgaagcaaaagaacgatacggtttctatcgctggtcttggcggtcgtagcgtcgagaatcgagcacattcgcacttgacttcctggtgttccagtggtcctaaccccttcttccagccccctgcagtgcctgtcacgccgagtctagcaatgcttcatgagatgggggacaggaggcgcctcctagccactggggtatcctgtcgaatggccgtatcgatcgaagcactccgtgcgaggcaagactgggtagtcgactggctccatcctacccgaggggttccatggtctcgaaaatacccttcagcccgtctatctactgggccagtggtttattgtacacctagtttaaattcgacgcgtcgagcccctgggaatcgttgttgtacgcatgaactatcgctgcgcgaaggattaacaccaccggcaaaacatcgacctggcgcttgggcttaaggtggcgcgtcaccctcgtcctcgttgcttgtgcccgaagaccccagtcgccaggatgctccccattaaagtgtacgtcatccccatggcttccctgacttgagtgcaaccgcaggcgggctgatgaggaactgggcctgcgtcccgggggtgcgggggcgaaccccagga

SEQ ID NO: 418390 - DNA, 1482 bp, Homo Sapiens
agcgggtgtggtacctcggcagtctaatggttactagcatttgtatgagccatccgctcgcggacccgactcgtagggctgcgcgggattcggcgtctcgagcctgaccaacggaccgtcggcgccatcccgacctagcaacaggtgtgtcgctccggggtccctgcgcctgggctcgctgccctgtcatggtctcgtcggtgctctgatcgtgtcccttgtggtgccccgtctggcgctcggctctcggagtgcttcgtgaggtgtccctgcgtgtgtccgtcgctgtgtccctagtcgtgctgcccatggtgtaggggctggtagtcgctcccatcacttagtcgcaatgctatccctagatggagccgctgtgggttgagagacttcgcatacctgtgggaaccttgttcccgtgagcatgctgcgtactgcttgtccaatgccaggcatacccgatcctgcgcatcctaaacatcgcttgcgtgatgtgacatttcgctgccaacgcgagattgagtggttagacatcctccagtgcctatgctagtgcggagcgcaacacccatgagagtgcttgaactgagccgtggtacttgaagttgccataacttgagtgccgcgctttaacactggcgttgaagtactcccatcttccagcgaaaacctccactcctaagggatgaactccacactgctgctgcagacaacttgattgtgaaccaatgtccggggtggtcgcatcgacaagcgccaatggctgaggcttaaaccatagcgccagtgtcgaacacgcacccttattggagtgcacgaattcggccctttgaaccgagagtggggctgttgatggattatagaagctacgaactctgttggggcttaggtaaggttaacgctaggccccccattcaattatgccggggtagcattatttggttctccaatgttggccgcaccacatcgtcctatattagagccgagcccaatggggaaggcacattgagacgcctagcgtcacttggtttgattgcggaagagagtgcccatactattggcgttgcaactttttcgttggacttggtaaacgcttaggttcgcgaggcgaaccacaatgagagaaagcggctaggcgagggaacgctatcgcaaggaacgcaagctaactccgcaaggggggttggcggagctcttggaaaggatattaccaccgcccgtgtttggttttgggccgtcccgccgtcgcttagagcgtggcgaaatagtcccggggaccagtggcgggttgtcgcacccagaagcgcgggccgctcaatggaactggtcggagagaggccgtttggatgtttggcccactcggggcgctgagccggttgccagcgccatcaggtgttgggaaccgtttgtaacccggggcttccccttgtgccatgaattggtccgccgtggagggggaactgggaaccctgggcgagccccccg

SEQ ID NO: 418391 - DNA, 1215 bp, Homo Sapiens
agcgggacattctgtgctcgtgcaggaggagggctgctaccatcagggacgtgcactgatttccccgcacgtgggaggtgcgataagatgaatgggtcgcagagaagagaagtctagtttagaacaaaagagtggtacacataatagattgttctccgtatgcgcatagtaggcgttcaaaacggaggccatcagaggaagcgggtaagtcaaggttcacccagttctaataagataagcagtaacaaaagcaacgaggagaacgtggaccatgcttgtcgagacaaccagcgacaggtagagaccacaggtctcgccaggcggcgccaacgaaaaatgtagccatggtacgacagggttaggaagctggacagacggcgtgtgtagcccccaaggtgagcttacgagaagttactgagacaaacgcagggtgagccgacatttggccaggtcccgagaagcacaatccatgtggggcgccgtaacagcaggtaggctccccggggtgagcacacaggatcacggagagtgaccgttttacgcgccgattgagagaagatccacgcgggcgtggttgcaagtacgcccgaccaacgcactacttgaagaggtcggaaagctgcacgctgaaacacctgcggtctgacacgcgaggaaacaactccttcagacgagttggtgattcatgtggaagcttgtgcacacaaactgtgcaccgtgttcggcacagcagactgccatgagcagtgtcctgcaagagcacatccgacttgaacggacattaacgtctgtgtgaaacagagagacagaccggttcagccgacgacaattgcatgagggaacgttttcgacgagcagtagttcgccggtaaaagcaagtgggtattaaagagtgcacacccagtatgcggtcagtcagccaaaagagtcgtggggcgttagcagagtttgactacagttgaccgaaatcatccgtggctgttgtgcctcacgccgtggcaacgacgcagcctctgcctacgttaacaaacaacgtggtaaaccccaggtggaagtgccaagagtaattctctgcgcgaaacgcctacaggcacattgtgggggctgggacaacattcttaagaagatatgttagggtctaaaacaaagacgcagattctgtgagatgtttctgttggacacgtaatgtggcgaacaggtatccagttggttaga

SEQ ID NO: 418392 - DNA, 805 bp, Homo Sapiens
agcggtagaatagtatataccaggttcagtttgagcaggtccttccggcacaagtaagtttcaagagcaagtggctgtgacttccatagcatctattcttgctgcaattttaattcaacatcagtccacatctgtgacctcttaggattgactgttgacagactaagaaaacatttgggcctggttcgcagatggtcccttgcagtttgcagtgcaccaggtagcatgtggactgctgaagcattgcagcccaaatcaggaacgtggtaagaggagctctctcaggaccaaacactgagcatgttatctgtagggagagatggccagaagtcgagatatataccaattgatgggtcattaatggttttattagcatactggtgacaacgaagtctaggaaaaaggtttgcacgatggacctttccctatgggcactatcacatatgaattctcattagagggcatccactgatgaggccctcaggcagtccactgacaggatagcctgttctgtggatgtcagtcagtccatttccagcaagccccgagtgcttgcttaataggctcatgaagagcatggcaattgtggcagggagagaagccagacatgatgttcaacaatgtggacttcccctcatcaaactggtctggctcctgtcactgataaatgactaacttgctgacaggggcctctaccatctctgagtctctgatgtggaccgttattccccagaggggaccaggcacagccatcagattattgcatggaacttctatttatgacggacttgatttgtcctctaaa

SEQ ID NO: 418393 - DNA, 952 bp, Homo Sapiens
agcggataaagcccaggcgtccacgtgaggtgctgtgctctggtacctgcgtctgtggcttgaccgtgtcacggctatggccagaagtccgtacgtgtgactgggcgcagctccatatcgtggacttcagataccaagagtatcgagcacaggatgacagtaaagcgtgtcctctgaggttggttaaagctggttcctgcaccttactcacaagaaaatgcgaaacgatttacacagcgcaaggtgtaaagcacctgatcaactgatactagcgtctatcaatcgcaaaagtccgttgttggcccaatctatagggtcgatcttctcctctctatgagaacatgggctctattatgaacacgctaccgttggcctggagagcaccaaaggttgcactagattgcaactcgttttagacaatatacgaaaaagttgctcatagccaaaggtctcaggatccaaggcgattaagaacatgggagaagtgacgcctaagaaattggtgtagctaaaagcagataaagtgatccctgttagaggccaaggcagtcttaagtgggattaggagattggacttgtgattcttaacgactggttccactactcaagaaattttcgtgcgcattctcgggacaaaaacctcctcacgaagaggctaatttgcacctcttaagttcgaggaatctgcacagcacgaaaagtagcgccggatataatagactaagagatctgccctttttgcccattccctaatgtatggttcgcaatggcgctatgtgccaatcggaggcgagagacaaacaacttgtggaagggtacacacaaaacacatggctgaagatatcccctaataaggaatggtaacacccccccttttagagggggtttcgcttaccgaggcctgtagggcatagtggacccctataggccaagtttagattggcccctaggg

SEQ ID NO: 418394 - DNA, 1012 bp, Homo Sapiens
  misc_feature (80)..(101): n is a, c, g, or t
agcgggaaaacctgtccatgcctgaagcagcttgaccccagcaaacaccctgcctccatggagtgaactgcaaatctccnnnnnnnnnnnnnnnnnnnnnnttcttatttccttaccccttcctgtgctcccctggtggggcagggacagcagggttccctaaaacttgacagtttcgcctccagtgatctttaaaagagcagaagctggcttgtgaggcttgcagtgcttgcctcgatgggggtagtgtggccctctgtgcgcaggctggggcctccaagggaagacgccacaattgggcctcttagatgagagaagggacgccttaaaattttgaaaaagatttcggcaaaagagggcgcttctcttgtaccgccatgtggcttgacacacttggtgctcggttccctttcgcaagggtgaacactttgcgccagttctcatcccctttggccaagttataaaacccttagaattttactttttgtgtgaaacacacgacacttttacggtctcaggaaaaccaagggctcttctcggaaaacaccgtggtgacgtgttgtttaggagcattaaaccgtggattttcgggaagtggactcttttaaggcgtgaccaccagggcggtggacagttgtcccccacttccgagaaaacaccgtgtgttctttgatcaattaaagtggagcctttgcgacatattcccccgccaacgtggcgtgtttgcccaacaatgctgttggtttgtattgcacgccgcccgccgtttgaccatattgtttggccggttggtgtgacataactggggggcataacgcggcgtgtgcagagacgtttttgtggccctctacaactcctcgaagtgttgtcctattataagcccaattgtgccctttctccttattcttgggcgagcctcctttctctccgggggggcccccgcggtctcctatatttgggaaatcccccctttttatagtctacagcttcttaatcaggggtcccatctgcc

SEQ ID NO: 418395 - DNA, 1229 bp, Homo Sapiens
  misc_feature (324)..(324): n is a, c, g, or t
  misc_feature (402)..(402): n is a, c, g, or t
agcgggtgtcccgcctgcccgcttccgtgtctccccgtatttgctgcgttcgccgcgtaaccctggttgtgtttgtcctgctcctgtcgttggtcgagtcgtgcgtgttcccgccgagtgaaacgagttctagtactagttcataacatcaccaggcctctgttcgttcttccgaactggactttggcctataccaagagagtcgtatcccctacaatgtctgtattgtcccatggtgcttctcctggtgacacgtaggactcctttcttgtgccatggaactcgacagttggcgctaatcctgtgtgtcaatcgtccatacgngagctagcctgttcattgcgttgactgtgtagatagtggacgttgatactagaaactgtgcctcttactcgcgcacangtgccatggtaggttcactctattcggctggcacgcatttcagtgcaagcacaattgtcgatggtctgcctttatgcacgatccgtgtagaacgacgttgttgtcgtcactagttccccactttcaccttctcatttagttctctccgttgagggagatagcgtctcgtggttagcttctttgagcagagtttcgcgtgcttccactacgcgtgaaagcgtgagaggagcagcatgtctaatagagtgggcttacgcggggcacaagcgggcccaagaaccgttgccagggtgatgttcttggagaggggaaccgccgtgttattccagcgattctacccctttgttacggctcccaagggcccttcgccgcgcattataaattcgggccccttgacttttttccgaaaaagggaaaaagagtagctctgcaacttggtattgccatccaaggttttccctaggttgccgccccttcggcgtatcccattaatttatccctccatttagcaagggtcttaatggcgggaacagcccgaatggtggaaaacgcggatattagggaatcgcacgtgggccccgttccttattgtcacttcttctccccttggatagaagcgcgttgggcaagatgggcgtgggcgtttaaccacatttggcaattcacttccttccggagaggggcccattattggcccagtggattacctttccgcgttcccacccttgaaaaggtcccacacttcctttagatgcgcccacacaggggcgaaacttccatagttgtaccactccccccttgggaaattttggcgacattcacgtttt

SEQ ID NO: 418396 - DNA, 540 bp, Homo Sapiens
agcggtgtcttagagaaagagcaagcactttctgaatcagtggggaaatatcaatatttgatcaaattaacactacctccttcccagtgatggtgttcactcagctatatgtctttaagaaaattaaaactatggaaaatatgtctagcatatcagaagttgtaaatgctatatctggtatccagaggctggctgtagaaaagttccttggggtcactctatctcacatttgacaggtctagcattattaaaaatgcaaagccacataattggcaaatactatgattccaaatattgagctcccattaccctcttggcacagtattctttaccgtcgcccttattgaagtcagactctaaccccaaattctagtatccaaaagatatcccaaatttcgtactaatgctatctgaacaatgtgtgtaatctgagtattctcagagcctgcgaagccgttatacgaccatttcaatacctagagatccgagagtcttgctatttgaagccagcacaccactgggtgtaatatgcttagtact

SEQ ID NO: 418397 - DNA, 890 bp, Homo Sapiens
  misc_feature (433)..(433): n is a, c, g, or t
agcgggtgggcccctgccgctgcggtccgcggcgtgctgttcgctgcctcgcctccgttggttctcagcccgccgcctctgagaccgtgcacttctgcacgctcccgcggggcatccagtacgcggcggcggggtcctcagacgggtggagccctccatgtcgtcgcgccacgcgggggacggagaaagtggcctccttctctgtcggccatctggatgctgcgatctgagtcgacttttagcggatttgcttcctggagagcacacggagagccgtatgaggtgccggaactgagcaaagcacccattgtgttacacaatgtcttggtaaaatacaggacctgtcgcgagctcgtgaatggtagcaccgctctcaaaacagaaaagtcgcataactgctggtaggcgagcaactttgtccggtgtctcacgntagagacgttgataacttgcaggggctcatcacgctattcttaaatacgcctatttagtagcacccggtgtagtttttcctgatatgtgaaacccacgtgaaggtacagacttgcaagacagcatccaatcaagagaatgcaaatcaaggtatgtgacagaggtgatgccaaggggatggcaattatccgtttgccttcccaactgggctgcattgaagactgggagaaaaaattgatgtcgcaaactattaccgttcacgggaccaattgggcacaatagtagcatggaaaagcgcttgtttaggtccaagacgaccaatgagggggtcgccaagaacaaaaggtcattagatggtaggtgagccaggcataaccgccgtgactcttgggcagcacattgcattcttactcaaagggagttcgccataagcctagggtgttcgataagtgcacagg

SEQ ID NO: 418398 - DNA, 1542 bp, Homo Sapiens
  misc_feature (1354)..(1354): n is a, c, g, or t
agcggtgtttcctcgcgcgccttttccggcagtcggcgcgcggcacaactgggccagcgatggagtttgtaggcctcgaggagcagcccggttcgccttcagttgtgcggcgcgtcgtggagagctcgtcgctagccgagttcccgactacggatccatgagccttggacgtggcgccccggagtccagcgctgacgctcatcgggtgtccttggtgtcccgtggggagctccaggatgctcggtcatgtgccgtcgggttgtggttcggagggcgtgcatgtctcccctcgtctgggagtagaacggatatgtgcgtgtagggagaccgggcaaaccgacgggcgcgtggctccgcgtcttgctgccctcggcggggtgcgggcatggggtgccatcctttccctgtggcccgaggacccgcagcccgttctagtcatggcaccgggtggtttcttccccaaggccggcttggatcctcagttggcacctggggattgcgtagtacggtgcccaaatctttggaagaataatatcacaggtttcgttgcaggagattctgcggtgcaataggccccgggagggttcgaacgaccagcgcgggtgtgaccttagtgtgaccctgcattgtcgccactttataagcgaacgcgacgatagaattccacacagctgccatgaggccctgttaaaaggcgacttcccttcgtccaccagggcaccccgcatggagtgacttatcccgtttgcccgtgttctttgcctgacttgggctgagaccgagccttgcaattattttgcttttcgggctttgagggggtgaacgcctcgtgtggagccccgcttggaaattgcgccaccctgtggccctatcgggcttccctttctcggaactagctgcactccgggcgagaaacgggttggccttatttccctagtaattccttatagggggtacctctaatcgtgtaggcctttggcggggaattcccttgccagtgtgtctagggggccctcatttgtgtgacagcgctcgagcacaggggccatagaatcaagttacctacattccctttgtgtaccacataggttcggataggtccctttgagggcccaaaagtccgtggtgttgaaacccacctctagtttcccccaaactttggtgcgggtatttcaaaacccgggtggggacagaacggtggcgaaccttttcatctctgaacacaacttgtttccagaagtgtttcccacacgcggttatatttgggcacattgttgtttgggcccgcgcgtccgatgtggaaaacgacgagagattgacatcagggacacgcgcattctcgtgcggccgcagncaatataatatgtttgatacgacctggtggaggaaccaccaccaacgggcacttctcagatccattctccgagaggatgattggagacggtgcgccccgcagccgcgcgggaaaacacgacgaatgtggatggaacaggagagtgtgccacgagacaccctgacggccggattttatacacagtgacg

SEQ ID NO: 418399 - DNA, 805 bp, Homo Sapiens
agcgggtcgggggcaagggtaggcggggatgaacgtctgaggagtgtccacccaggaacggctacacagatgaatggaatgacgagaccgggactatccatcatcactggcggcttagagcacgtaccacagcatgaagcacaagagagtggccaaggctgatgtccaacacagcgacgagaccagcaactgcgcctgggtcgtgtctccgtagagaggccaaatctgcagcgcgtgggatgctcatcacgtgtgctctccaggcattacccggtcagcaccccaggcccctagaacgacatacccccacactcatgagaacgcatgcgaatcgcatagaaattagcgatcgaggatcccggtcatgtccaatgcagtgtcggcgctaagtccctagaaactaaaaaatgcgggacagggctaagcctttcgctcacgaaacttagttcctatacgaagcgtaaattgaacaccaacaggcgccagtgggaaagggaagagatcgctaaattacaccacacgaggtggcggccacccctacgttcagcttgccacctggaattccgatcgcactagtcggacctggaaacacggccgtgacttacgccctgctggccgtcacataccaacacaggacgtcacgggtccagactacaccaacaagacacttgcgtaaccaatagcagtcaagctacccgctgcagggcccgctcccaacccaaacttctacacgcgtagggcaaaaaaggcccacctagaaccagctatctacacagcgcaaatgacacatacacgtcctcaccac

SEQ ID NO: 418400 - DNA, 842 bp, Homo Sapiens
  misc_feature (140)..(429): n is a, c, g, or t
  misc_feature (435)..(454): n is a, c, g, or t
  misc_feature (515)..(535): n is a, c, g, or t
agcggagagatcatttggacttctacctagagaatgaattgcaaaagaggaagtgggaaggaccaattcaaaggccatgtaacagttcaggtgggagtttatggtggcttggaaagagagagagaaagtagacaaagtgnnnnnnnnnnnnnnnnnnnnnnnnnnnnnnnnnnnnnnnnnnnnnnnnnnnnnnnnnnnnnnnnnnnnnnnnnnnnnnnnnnnnnnnnnnnnnnnnnnnnnnnnnnnnnnnnnnnnnnnnnnnnnnnnnnnnnnnnnnnnnnnnnnnnnnnnnnnnnnnnnnnnnnnnnnnnnnnnnnnnnnnnnnnnnnnnnnnnnnnnnnnnnnnnnnnnnnnnnnnnnnnnnnnnnnnnnnnnnnnnnnnnnnnnnnnnnnnnnnnnnnnnnnnnnnnnnnnnnnnnnnnnnnnnnnatttcnnnnnnnnnnnnnnnnnnnngatacattttggaggttgagccaacaagttatctgctaagtctgagaacagaaaaaggtgnnnnnnnnnnnnnnnnnnnnnataaggtcactagggttcctccttggaggtgtggggaaatactgagtgacataagggtgggctgaggtagggtttcaagaagttctttttgtgggccaatttaagttttaagttttagtggttccactattggagagctccctttagccagcggggatattcagcgtgggacagctcaggggacacaagtccaggggtcgggagatcttttgactggaaaccctcggcataaagatcgatctctttacaactcttgtgagctggagtgcaaatctccttcccattctttcccccacggggtaattgc

SEQ ID NO: 418401 - DNA, 441 bp, Homo Sapiens
agcgggaactgtcccgtgacaggcggtgcgaggaggccaggcccgcgcccgccgagacctagggctgtgttgcggatagccatggcggacgagctgcctgcagcagcctggcgggctgggcgccggttcgggagggcctcgtttcggcgagccctgagaggcaccggacgtgcgtgttgcactggtggcgtgaaacggcgctggatggcaacgttcgcatgtggacattgctgagagacacgtgacctgccgcagcaacgttggagaggtgccgcaaaaaggtgaccacggtaacacagacatttttgtctacctcttagatgacggggtccaatttcgaacgctgtgcaggtaaatccagtgggccatagcctgctccccctgtgttgcaccactttgttactccagggttccaccaattcacacatcagcatactagca

SEQ ID NO: 418402 - DNA, 298 bp, Homo Sapiens
tgcgccgggtctagagacttcttcaaagctgggaaggtacagggtgtgccctctgaacagcagcagagcttgttgcaaacctgaactttctggtcctctgctgcccctttgtggactacctggaaacaacagcccaatatatcgctgtaggagcatgaaattggacttgggagaatagcaccagaagaactggtggaggtttgaaggctggtggaggatacgagggagtcacgactgttcttttctccagcaaggttggggttcccaggagagaggcctaaaactctttcaaactgtc

SEQ ID NO: 418403 - DNA, 426 bp, Homo Sapiens
ggatttttaaagtacagttttattcaatatatcacatgtgaaaatccctagaagtccctcagagaggaaattctgaggtcagcttgaaaagcttacacacattcatactccccatcttataagcatgtgcaacaggacaatcagaaaagggaatctctgacaatataattttgaaacaaaaccattgaaataaaaactaaagcatttccattccagagaagacacaaaatttcatgaaataaaagttgggacctcaagaagtctacttcttcggtcatgccattcacacagaaggtatagctgatgactgttatctatgtatggctacaaagaatgaaatatgatttgtaggtgttttttatggatgtttctatacctggaagcaggcagatactcaaagaccaatagtcatagtcactaaattag

SEQ ID NO: 418404 - DNA, 477 bp, Homo Sapiens
  misc_feature (203)..(290): n is a, c, g, or t
  misc_feature (293)..(330): n is a, c, g, or t
gtgcataaccatcctgaagttatcatcttttttttcttgcaaatcacagcacttgcttgcacagtaaattgcaaccagtaaaaatctacaaatgtttcttgctctattaagaaagaggaggaaagtgagtctgatgtttttgagatattcttggatttgaaggacacaaaaggagcctagaaacacaataagcaaaactttannnnnnnnnnnnnnnnnnnnnnnnnnnnnnnnnnnnnnnnnnnnnnnnnnnnnnnnnnnnnnnnnnnnnnnnnnnnnnnnnnnnnnnngtnnnnnnnnnnnnnnnnnnnnnnnnnnnnnnnnnnnnnngaatgcaaatactttaagggtctgagacatgaggagccatggaaaataaagggaagtgtccaagagatcaaatacagtgctcatccacttctcagatttgtgtgacgactagagggggcataataattatttaatataattcatatg

SEQ ID NO: 418405 - DNA, 1018 bp, Homo Sapiens
  misc_feature (137)..(434): n is a, c, g, or t
  misc_feature (438)..(454): n is a, c, g, or t
tttaatcctcccgtcccttgggcctatgtttaaccagaaggccagagtgtgtattgctttaaatggaatagatacgttcatgtgtatatgacctcatgggctgttaagccttaatctcacaatgaaaactttccttnnnnnnnnnnnnnnnnnnnnnnnnnnnnnnnnnnnnnnnnnnnnnnnnnnnnnnnnnnnnnnnnnnnnnnnnnnnnnnnnnnnnnnnnnnnnnnnnnnnnnnnnnnnnnnnnnnnnnnnnnnnnnnnnnnnnnnnnnnnnnnnnnnnnnnnnnnnnnnnnnnnnnnnnnnnnnnnnnnnnnnnnnnnnnnnnnnnnnnnnnnnnnnnnnnnnnnnnnnnnnnnnnnnnnnnnnnnnnnnnnnnnnnnnnnnnnnnnnnnnnnnnnnnnnnnnnnnnnnnnnnnnnnnnnnnnnnnnnntttnnnnnnnnnnnnnnnnnttcaatttaatcccaaaaactatttagcaaataaccaccacctactaccaccacactgatgtgtatccatacaaaacagttcaggtggaaaggatcacattaaataccttaatttctgcaatacttcccctctcaaggagtcccagatttacaggcctttaatgaaaacaaaagtaggcgctaaataaaatttaaacgttaacataagtttaaaaaactcttgatattaaaattcctctttaagatcataatccttttgaaatacaactgttaaagggcaagagtgggtcccattctgaccattaacctttagcactagtctggagttgatccccaaatcacgtaaaggtgggccgcagaagattacccgtgggtaacacattatagctgaaaatcattccctaacctatgtgtcaatgccctctagaatcatccagaggcaagattcccagatccaaaaactaccagagccaggtactagtttgcccagccaaatagatagaataccaaaccattaggaattgtccacgacaaagtaagatgcgggcaagcacaaatatataa

SEQ ID NO: 418406 - DNA, 716 bp, Homo Sapiens
  misc_feature (160)..(352): n is a, c, g, or t
  misc_feature (357)..(622): n is a, c, g, or t
ggggagcagcgggggaacagattatattagcctcaacgtgtaagaattctctttaccaaaaacaatcattaatagagtgaaaaagcaaaccacaactgtgagaatatatttgcaaaacagctatcagttaaatacaaaatacatacaggagagctatgcnnnnnnnnnnnnnnnnnnnnnnnnnnnnnnnnnnnnnnnnnnnnnnnnnnnnnnnnnnnnnnnnnnnnnnnnnnnnnnnnnnnnnnnnnnnnnnnnnnnnnnnnnnnnnnnnnnnnnnnnnnnnnnnnnnnnnnnnnnnnnnnnnnnnnnnnnnnnnnnnnnnnnnnnnnnnnnnnnnnnnnnnnnnnnnnnnatgtnnnnnnnnnnnnnnnnnnnnnnnnnnnnnnnnnnnnnnnnnnnnnnnnnnnnnnnnnnnnnnnnnnnnnnnnnnnnnnnnnnnnnnnnnnnnnnnnnnnnnnnnnnnnnnnnnnnnnnnnnnnnnnnnnnnnnnnnnnnnnnnnnnnnnnnnnnnnnnnnnnnnnnnnnnnnnnnnnnnnnnnnnnnnnnnnnnnnnnnnnnnnnnnnnnnnnnnnnnnnnnnnnnnnnnnnnnnnnnnnnnnnnnnnnnnnnnnnnnnnnnnnnntgtgcccatgacccaaagagacacttgtatcacaagtgctttaataacattatttgtaatataacaaaaaaatcaaatataaccaaatgtcaag

SEQ ID NO: 418407 - DNA, 771 bp, Homo Sapiens
  misc_feature (68)..(165): n is a, c, g, or t
  misc_feature (234)..(267): n is a, c, g, or t
  misc_feature (518)..(533): n is a, c, g, or t
  misc_feature (559)..(661): n is a, c, g, or t
tgcggcgattactcgtatacatatattatacgaagttatggatcaggccaaatccggcgagctcgaannnnnnnnnnnnnnnnnnnnnnnnnnnnnnnnnnnnnnnnnnnnnnnnnnnnnnnnnnnnnnnnnnnnnnnnnnnnnnnnnnnnnnnnnnnnnnnnnnaggcgtgaagccactgcacctggcctgtcatcttgtgttaattcctctgatgttatgtctgttagctcnnnnnnnnnnnnnnnnnnnnnnnnnnnnnnnnnntcaccaccgctatgccagtttttttagccacatccacagtctctttcatgatttccttgattggctctgtcataaatcctacgaagtcatgtacaacatctggacacagtttgctcctgcagaaatctatgttttgggcttgatggctttcataagctttatctataacaactgtggcatcttcagtaatgtaatcctttcatattttcatcatgttctctttgttggggttctctttcataatgttgacnnnnnnnnnnnnnnnngggagacagagctctcgctctgtcgnnnnnnnnnnnnnnnnnnnnnnnnnnnnnnnnnnnnnnnnnnnnnnnnnnnnnnnnnnnnnnnnnnnnnnnnnnnnnnnnnnnnnnnnnnnnnnnnnnnnnnngtgcgcaccaccatgcccagtaaattttgtatttaggaaagaggggttctcaccatgttggccaggatggctcaacctcatgacactcgagatacgcccgccttggctca

SEQ ID NO: 418408 - DNA, 839 bp, Homo Sapiens
  misc_feature (44)..(80): n is a, c, g, or t
  misc_feature (115)..(251): n is a, c, g, or t
  misc_feature (253)..(285): n is a, c, g, or t
  misc_feature (378)..(549): n is a, c, g, or t
atgatcgatcactataggggaaccgcgctcatcgcggtggcggnnnnnnnnnnnnnnnnnnnnnnnnnnnnnnnnnnnnnggatcaggccaaatcggccgagctcgaattcgtcnnnnnnnnnnnnnnnnnnnnnnnnnnnnnnnnnnnnnnnnnnnnnnnnnnnnnnnnnnnnnnnnnnnnnnnnnnnnnnnnnnnnnnnnnnnnnnnnnnnnnnnnnnnnnnnnnnnnnnnnnnnnnnnnnnnnnnnnngnnnnnnnnnnnnnnnnnnnnnnnnnnnnnnnnntatctacaacattgtattttgactggcagaatggattagaaaatatgaactgcgtatatgctttctacaagaaactcacttcaagtataatannnnnnnnnnnnnnnnnnnnnnnnnnnnnnnnnnnnnnnnnnnnnnnnnnnnnnnnnnnnnnnnnnnnnnnnnnnnnnnnnnnnnnnnnnnnnnnnnnnnnnnnnnnnnnnnnnnnnnnnnnnnnnnnnnnnnnnnnnnnnnnnnnnnnnnnnnnnnnnnnnnnnnnnnnnncacagcaattgtaaatgtgtctgcaccaaataacagctgcaaactagtgaaacaggaaaagttccgttgtccccctctcaggtcatgcaatgtgggtgtggcttgcttcttcattccctgctgatcaaacctctagaggagcatacaaatgggcaagctgtgggcctccgaccccatggcagtgtctaggggtgaatgtttatagctgaacccacagtgggcatgtgttacagggtgctttttaagtttagccgtccataggtgggttgtattagctcaattaggctcat

SEQ ID NO: 418409 - DNA, 1067 bp, Homo Sapiens
  misc_feature (70)..(106): n is a, c, g, or t
  misc_feature (141)..(212): n is a, c, g, or t
  misc_feature (214)..(231): n is a, c, g, or t
  misc_feature (267)..(368): n is a, c, g, or t
  misc_feature (817)..(825): n is a, c, g, or t
cacccgagagaccccccgcggggaatgtatagactcatataggcccctggattcaccgcggtggcggcgnnnnnnnnnnnnnnnnnnnnnnnnnnnnnnnnnnnnnatcaggccaaatcggccgagctcgaattcgtcgannnnnnnnnnnnnnnnnnnnnnnnnnnnnnnnnnnnnnnnnnnnnnnnnnnnnnnnnnnnnnnnnnnnnnnntnnnnnnnnnnnnnnnnnngaaagagcaaatgaatgctgggcataatatctagannnnnnnnnnnnnnnnnnnnnnnnnnnnnnnnnnnnnnnnnnnnnnnnnnnnnnnnnnnnnnnnnnnnnnnnnnnnnnnnnnnnnnnnnnnnnnnnnnnnnngttgtggaaactcaacaacagaaaacagggtatttaacctcaaaattaaaaaccaggtggtgttactaattttctctaattcagccaaagtgttcattttaattttctcacctattaatttttagaagtcgataatcttgtggcctcgtgttccgcacagctcgtggcagttgccagggtggcattgaattagccttgtgaatttccgtgtttcaagttgattccttcccggcctcagtctccagaagtgtggctggggcctacgggcagtgtgctgccacaccgtggatacttcttcacacacttttttactacgaagtgggggatctggcctatgtttgcccaggcttgctctcggactccgtggccttaggtgatcctcctggcctctgtcttctgagtcgctggattgcgggtatgagccaccatgctcagcagaaaattaaacnnnnnnnnnaacaagtcattagtcccggggaattctatttcacttccaaatccacctcatttcgcagtgccctgttcttagtagtccgtggttcacggaacgacgtcgctgtttcaccttgattcagggctagccaacacaatgaaccgttgaagttcccaggagctacttcacttcatctccgggtcccctccgagagtatctactaaccctcggggcccctcacaggagtaatggccattctcggtccc

SEQ ID NO: 418410 - DNA, 728 bp, Homo Sapiens
  misc_feature (360)..(440): n is a, c, g, or t
atcaggccaaatcggccgagctcgaattcgtcgagagcggtgagaaaatatagggaggccacatgaccaagaaagagctgatcaactgacctgtgcacctaagtgccacctactggatcacaccccaaagcttcaacaccaaaaatacctcactaacatactgccctgtgaagcagaagacaagaagtcagctacaaataaagactatgaacaaagcttcaccctgtgaaaacatccagaacagaagtctactgactatactcaatctatactgcagttgaaaggaacgacacccacattctgagatgagaaagcaccaatacaagaactcaggcaactcagatggccagagtctacatnnnnnnnnnnnnnnnnnnnnnnnnnnnnnnnnnnnnnnnnnnnnnnnnnnnnnnnnnnnnnnnnnnnnnnnnnnnnnnnnnctacggataggaacaaagatcactgagattcagtagaatggcaaaacccattctaaggaaactaataatcacagtaaaatgatacaggccctgacagacaaaatagccagtataaacacagaacctaactgacatggcagagctgaaaaagacactacaataatttcacaatgcaattgcaagtattaacagcagaatagaccaagccgaggaaagaatcttggaacttgaagactggttccctgaaacaaaacagtcagacaacaaataacgaaacacacaattacc

SEQ ID NO: 418411 - DNA, 876 bp, Homo Sapiens
  misc_feature (47)..(83): n is a, c, g, or t
  misc_feature (715)..(724): n is a, c, g, or t
aatgatagatcatataggcgaattggagctccacgcggtggcggcgnnnnnnnnnnnnnnnnnnnnnnnnnnnnnnnnnnnnnatcaggccaaatcggccgagctcgaattcgtcgagagcgttgggtgttagattttgtcagcttttttctgtatgtattaataggatcatatggttgctatttagtctgttaatatgatgaattacattaattgatttataaatgatagaacagactttcattcttgggatgaatcccacttgttcttgatatattattattttttatattgttggattaaatttgctaatactttgttaagaatttttgcacctatgttcatgagaggtatttgtcattttcttgtaatgttttgtctggacttggtattacggtaatgctggcctcataaaataagttgggaatcgtttcattcttttccactttctgggaaaggttataggcagttggtatcattttatatctttcatttctaatatatgcatataatgccataattttccccctcaggactgctttcactgcattccacaaattttgataagatgtattttaattttcatttagttcaaaatatgttttaatttctagacttattctttgacctgtgagttatttagaactgtatcgtttaatttccaaatatctgggaacttttcagctatctttctgttactgatttctagcttaannnnnnnnnngtctgagaatgcatttggtatgatttctattcttttaaatgtgttgagtgtattttatcatctaaaatgtgatatcttgttttttcaaatggagttcgctgttgttgcccaggctggattggcatggcacaatctcaggtcagggaattccg

SEQ ID NO: 418412 - DNA, 903 bp, Homo Sapiens
  misc_feature (45)..(81): n is a, c, g, or t
  misc_feature (149)..(368): n is a, c, g, or t
gatgatacgatactataggggaccgggcttatcgcggggcggcgnnnnnnnnnnnnnnnnnnnnnnnnnnnnnnnnnnnnnatcaggccaaatcggccgagctcgaattcgtcgagagcggggggttgttaaaacccagtgcgttagannnnnnnnnnnnnnnnnnnnnnnnnnnnnnnnnnnnnnnnnnnnnnnnnnnnnnnnnnnnnnnnnnnnnnnnnnnnnnnnnnnnnnnnnnnnnnnnnnnnnnnnnnnnnnnnnnnnnnnnnnnnnnnnnnnnnnnnnnnnnnnnnnnnnnnnnnnnnnnnnnnnnnnnnnnnnnnnnnnnnnnnnnnnnnnnnnnnnnnnnnnnnnnnnnnnnnnnnnnngtcaaggggaatgaagatcggtgccatggtattccaagcctgcgggtgaaagcaaggtgaggacttgtgattttcattaggagactcctagataatactgtggtttgaactgaatggtgggagggaggcaagtgacgtgttatgagcggtcgactttatgctgctagttggttccacaaagatcgttatctgggaggtgagcaaagtgagtgtagcggtagtcgaggtcacaaaggcaatcagcctccttcctctcccagtgcgatggccagcttctcagtgcttctccctgttgttaccaagtagtagaccctacccattctggatacttgcacctgttactaatataattcgaggtgtcattcctaaaatctctcttagatcctgtccttggataacagcggtcagtgcctactacgggggtctagacagacctcttgtggagcagttagaggcgtgccctgactccacaagggccctttcctgggcatgacaagtatgactagtgaatccgaactttgccttgactatccta

SEQ ID NO: 418413 - DNA, 799 bp, Homo Sapiens
  misc_feature (51)..(87): n is a, c, g, or t
  misc_feature (393)..(437): n is a, c, g, or t
cgaatgatagactactatagggcgaactggagttcaccgcggtggcggcgnnnnnnnnnnnnnnnnnnnnnnnnnnnnnnnnnnnnnatcaggccaaatcggccgagctcgaattcgtcgagagcggtaaatgagccaccagataagcaaggaggtaataacagcttaaaccaatagccactcatggaagtcagagccacaagatgtgttgctccctatagaaaataaagataacatcttgacataggtccctgagttattttcagaaactcagacccccgccaaatggaaagtgccaaccaccatcatcacataagggggaactgaagactgaactctgactgacgttcttcattctaaatttcttcctgaggggcccggagacagtgacannnnnnnnnnnnnnnnnnnnnnnnnnnnnnnnnnnnnnnnnnnnnctagacaaagccttgcttccttaaacaatcgcaaatcaaagaatctctgaatcctgcaaccccacttcaagatatcctgccttttgggaccaaaccaatatataacccccacgtattgatgtatgattttgccaataacttctgctttcctagaatatatctctgcctttaaaaaatcttgcttgtaagccattggggaggtcaggttttaagcaatagctatcttattctacttgcttggtgccctgcaaacaaacacccttacttctcttgctacagacgtcagtgtcggtgtttggctttactgcactgggtgagtgtactcaggttcagtttagtaacactgcaacttaagaacaaat

SEQ ID NO: 418414 - DNA, 833 bp, Homo Sapiens
  misc_feature (50)..(86): n is a, c, g, or t
atgtatagactactatagggcgaactggagctttacgcggtggcggccgnnnnnnnnnnnnnnnnnnnnnnnnnnnnnnnnnnnnnatcaggccaaatcggccgagctcgaattcgtcgagagcgggggcggagaaggaaccgccaggcccacgacagacggtgtctggggtgggggccggcctggggacgcgggctggccctgcctcgtgttctagcagcgggacccgcaccgcgctcctcgcggtctacggagaaggcgtgcacggtgcctcatcacggatgtgacggtagaagcgcccgtcaaggacctggatggatgtcgtgaagagcaccaaaatcatcatcggcatgcttcgtggccatcatcgttcatggtgcgcggtgatgctcgtggccttctacaaagtctgctgcaagcagtaccagactccacaaagcaccatgggcccatgcagcaccggtggagatcatcaaccgtggacggaggaagctgactcagcggactcggtcgtgtggcgtggtcgccagtggtcgccgagagcacaggtgggcgagtggtggtaggcgcggggaccactcgagacttggggcacatgtcccagccacctggagcgatgatacatcattaaaaagtatgcaacacacgtacgttagttatgggcagacattcaatggctgaattaacaagaaagattatccctggatgggtgggagggattggcggggaagtacaaaggtgtgggcaggagactctatgtgccattccagaaatacctacttgatactgtaccagtaacggggatgaaaaggaagaatggtgacaagtaggtg

SEQ ID NO: 418415 - DNA, 1079 bp, Homo Sapiens
  misc_feature (602)..(602): n is a, c, g, or t
  misc_feature (627)..(627): n is a, c, g, or t
agcggagcacattaccttcctcctcgatgtttccatatggtcagagccccatcccatagtgacagctcctgaaaccaggcagggacctacacgtccggtattgtgctgacagtctacgagacagcagctgctgccaggaaagcagtactggctagtcctacaaatgacccgttcatgccgaccatctcgttctcctaccaccacgggcgtacttcctatcgcggacgtcctggtgagctgccccgtcacaggcttacagagagtatacatagacctcggtgtacgtgagagagccctgggcgcatcattgacatcaataagccactatcgtcgcaattcgcgctcgcgagcaactccaatagatatcatcgcacccaattcctcgtagtataggagacacttcccagatgaggccacgaaaccatgtagctcttagaacctacgcggtactttacatttacccttggtttttgcgccgcccttccttagttggtcactacaaataattctcggataggaaccctaggtcacgaggcaccgtttgtttggatacgcaattacggttttgccacacgctccccgcttgtccacctttttgcacncaaaagatcccattggtcaaatttnctatccatttaagcctaaaacggtaaattctccgcgaaaacgcgggtaaaagccaagatttggaagaggggtcgcccaattttcccaacggcaggacctttactttacccccgctgttggaccattccattttggagagacccctcgactaggtcgggtctcctatagaaacttcgctggacttttggtggcgatgcccttttctaataaagaccgttaatcccccagagtatgggagtcgaaatccgctcttctcttaggcaatatgggagcccaactcgggtaggggcacaatccccttccattccccactttgaagacgcgccagtttcgaacgcctattaaccctcccatttggaacagagcgcatatttggagtgatacccattccccatccattaaagagggattgctcattcgcaggaaaaggagaaaccattcgtggggtctcc

SEQ ID NO: 418416 - DNA, 1595 bp, Homo Sapiens
  misc_feature (475)..(475): n is a, c, g, or t
agcggtgcccacctcggctgacttccgcccgcttcctcttagcggggccgacgtcttcctgcaatcgcgtggtgcctccgggcgcgcgggccttggccctctttgccggtcgccgggcagcacgcgcgagttgatacgattgtgccgtccgtcgagctggggcgagctcgtgtggccagccttggttgggcctatccgatcggttccttgtctgcctaagttagtctgggacagaagcgacgtcttccctgccgtcctggttgattgttgctagcgaagacatacgctcgagactgtcgttgtgttggacagcatggcggtcatgtacctctttatctgcgttctcccacgtcggtgtaacttcttttgtgattccgtgtccgttttatactattcccacttttgttcactaggaacggctagtgctccttgtgatgcgttgcctctcttgtttttggccctggcctacgcatangtgcaccatgcagatggtagcacatggatgcatagcgcttgtacacattggtaagacgaggccacattccctttcaccggtagtgtgaacgcaatcagggttgcagtagctctttgttacctgcaggcatgtttacgggtttttccatagcggtaggaatgcgcctcttgggtgctgaacggaggtgcattaccctacgaggtgggttcttcaggactactcagaattcctgagggaaaatgtaacccggttcattccgcgtatgcaggtgtcggaaggaaggtcccaattcaggtgcggatctccatttttcgttcgctatttgctataaccggcgttaggcgaacggatactcacaggtgcgaagctttgtttatgtggccactttttcgaccggccagcacgtacatttggttttgagtataatcgagaggtcccaccaggcacagtacagcacactgtttgggaagagggacgtttacccgcagaacgaaaatacgcaagtgttagagccgcatgtgcgccactcattatccccgtgagctctcaccttgtaccgccgtgagctttggtcctctgtgcattacatttgggaacaggggcggtttggaggaatagcgttcgctatattgtgtctccacaggaggcgttgcgtgctaaatttccctctcgtggcgcgccagaacggttattggcgtcgtagaacttctatatgggagaaagagagagtgtctgatataccttggtaatgggactaggcagcccttagcaaacatagtgggtagcataggcaatggagcacttgaggccatcgaaggcgccctgtagtacggtctcccctagtgtgaaaccccattttgtcgcgccctacagttgaagcattggtcctgtagaatctcttattcgccttgggtcccataagtcggtcgatgagtcctatccccttttaggccagcagtatatttgtttaacctttcggtgactagggtagcacgataggggttaaaagtatgccgccaaagtaatcgtagagtgctctagggttagcccctacacagttggttgtgtcccagatttacagaaagcttcaactccgaaggcattagtaacgcacgctcgg

SEQ ID NO: 418417 - DNA, 1023 bp, Homo Sapiens
  misc_feature (171)..(171): n is a, c, g, or t
  misc_feature (355)..(355): n is a, c, g, or t
  misc_feature (376)..(376): n is a, c, g, or t
  misc_feature (589)..(589): n is a, c, g, or t
agcggagtggctgtgcgcactgctgtcaatctcggctggtccggtgtctccgcttatcaccttcccctactctctacctaccctaccctctgctttgcctacaccgtcgatacgagttgtcgtccattagcacgttcgtgttagcctcgctctgatgcgtcctcacctaangacgggacggcggaaatcggcaggattgtcactggaagttcgaaccctcccctttgtccttgcccccgcaaagatcagtcctgtaccaaagatcatccgatccgttctaatggaagctccctggaagtattatcaagaagcaagatggcatgaagtagtgcaggcaagacacacatactggagngccaacctctggctgcagagnacacacctggcatacctcctcaccacaaagcacagcgtctgatgcaagggcacagacatcaacactcttgcatgtgatcgattcttgcccagcgaccagagcgcagggagagtcagcatttgcgtagcaattctgcgagagaagtctctaccgttgattaagtgcatgtgtcttgccttcattcgcatgtgacacagggatagcattagttcnaactgcccttcctacctcaggaagaattgacgcgagcatgaggaattcgagaggcagtctatgagaggacaatgaaagagatcacttcagagatcatctttggcatctttagtgggagactagcactgctgagagaagttgaccgtattcttgtgtcaatgtaggccatccctcacgatagatgtcgactcattgctccaaaaaggactatccaggactgtcacgtgaaatgtgagcagattgaactcttcagctttacaaaagtcagattcctaaaacttagcaaagagaaagcacccatgcgaagaagagaagaacaagaaagttctgaatcaattaccaagagagaaccttacgacgaattcatcctgacaggttggaaagccctgcctggctcaacttgggaaagacttagccacactttctcgaagaac

SEQ ID NO: 418418 - DNA, 816 bp, Homo Sapiens
  misc_feature (631)..(631): n is a, c, g, or t
agcggacatggtcataacaaaactggcattaacgtctagtctgcctctgccttatactagttctgctcgttgagaactcgtatagcccttcctcactctcctgttcgacttagccaacatgtcacgtttgcgcgagatactaacacaggtggacccagtgttccactccaatgacgctgccatgcggacacgcgcagacatagagacgtgacgccttctcttctctcgtacactgtgtacacaggcagttagccgaagcacttgacgcccaagatagctatgtagaaactgatgcagagcttgctcattgagggcaaatagcactcttggacgataacctacgcatttcgaatgtctagcaacccggagacccctccatcgccattctcgatgcagggttcaaaagctgtgttgggccttctctctatcttcctctcattctgatgaagtcgggaccattgttgggccgtccgattgcatggcgatacacaatggtcaatgtagcccgtgtctgtagctggaattaccctagtgacatgcggggtagctgcttatctgtgcctaggaccaggccactggctgactatatttaggctacatagagatcaatgatgaataagtcgacaagcgnacaaccccagtgcagagagaggaaatcaaaggaggataaacaccaacacgcgcccactataactggatctgaagcggctcctctgatgcttttttaacaggccaccattggactggtttgaccccctataagactttggacgaacaaacgacttacctgatcaccccctgttatgtacagtgagt

SEQ ID NO: 418419 - DNA, 1140 bp, Homo Sapiens
  misc_feature (445)..(445): n is a, c, g, or t
agcggggagtgagtatcaacccgagcctactcggatcgtgcagttgctctcgcttccatggtttcagcctctcagatggcagccctgctgacggcacgcccccctcacgagttcgtagcaccgccgcgacgcacgcgcgtgggctctctgcccgggcgtcggcgcccagcgcgccggcacactgaccggtccgtggtgcatcgcgtcggtgggccgggcggccagctgtctcgggattgctagggaggacctaggacctcatggtgccgattgcccatgggggcattattgctgtagttggctggcgggtagtgtatccccttggcgaccggactcacggcaccataccggacagcttgagagaaggactacttggttcgctgaacaaacgaattttctacattgttcatcagcggcttgtactttgtagagcgtgagataggancgatgttaggcgaagtgacaccatggagttcgtagatcgaacgttgctgagatagggaaaaaggttacccgtgaaccacttatctctctctggatcgttgtgctcagggcgccacggttgtctaccctacctccacaggttgctgtgtgcgccttggatagagagggcaccaattgaatagcgcgcattgagggtctttcgcaagcactctaagcgatatctgtgcccctacccgtagacaagccagagagcgaagatagcggcgcgacctttcataaccgataaggcgaccgccatttccacattggaacgacaaaaggcttcgccgtcaaaacaaccacttaacaatgtgaacctgccattggctttttattctacaattgcattgccgcacccgttcatagggaagcgcctcatacctatgagctagtgccgttgcggggcatgtcccactaagatgtagatgagggatctctattgttagacctcaatttaagcacgcctttgcggcaaatttcagaccccgcgtttttccgccacagcggcaatctctaggttgaaccctttctttagaagtcccgaaaacaaggccgatgttcctgggtgccaaataaggcttgccagcataaggacatccaatccggactccccagaacgccggacagcaacggcacacgaatacggaccccaagtga

SEQ ID NO: 418420 - DNA, 695 bp, Homo Sapiens
agcggataaataacttggcagtggtaataccgtgattacgtttccagagaggtttctcctcagcagttgtcttagttcattttttgttgctgtaatagaatacctgaggctggataatttaccaggaaaaatacagttctgcaggctgggaagttcaaggccatggccctggcttctggcaatggctttcatgcttcatcataacatggtggagaaagtcaaaggggatgcagacatttgcaaatagagtcaaaacccaaagggcaccctgactctataacaactcacttagaagggtactcatccattctcctgagaacaaattccgtttttccagagtgaaaactcactactgaaagaacagcaccaagcaattcctaaaggattcatccccatgattcaaacacattcaactaggtccaagtttccaacacctgcacactggggactaaatttcaacatgagctttggtagggacaaacaaaccatatccaaatcatagcagtagtcttggaaaaacatatagaaagtaggggcagaactgagggcagaagagccaagaaagagcttatagtagtcaaaggtctaagtacttaagtccaaagaaaacttcaacatgaatgaatatgttgctgaacctcactttaaaataagtcaggaaataactgaatggtttgacttttaaaaattacctg

SEQ ID NO: 418421 - DNA, 1042 bp, Homo Sapiens
agcggaggggagggggcgtcgcgagctaacagcgaggaagagatcgtcggggtctgattactggagccatacgagtgcggaacatctcgagccgtctggctgcatgcgggagagggcatgaccggtcaagcgatgtgaccgaaagactcgaccgactgacacgtctgccacgcgtctagcgtggcggccgtaacatggcattgcccgcgaatctgccaagctcgcgctcttagcgccgactgacgtgaccgagcggcggctgacacctcgcgtggaaccgggccgcacgacggcgtccactacagattctagctccgtgagtcatatgttgcgtagagcaatctcctgtgctcgattgccgagctcttccacgggtgtaaagagttctaggtagtgcttagctgagaaataggctaggaaagcaagcatttctcaggcaaatatgggtcgttggaaaaccttgtaccgccccattgggggggtttgcccgaagaagcaggcagcatgggggtaagcttccgaagctaggttgatctctgcggcgcaaaagaagatcggcacaagcgaagtacgcatcatatgcaagcaaagtcccctaaggtgaccaaggcgggccacggcaggcagctgggcgacactattgcgcaaagccaagaaggccgggcaagcgagccaggctgagcgaagccagccatgcaaagcagggcaagggcacattaaggcaaggcaaacgtcaggactggctgggttactaaggacacagaaaggaaggggtgaccgtggagacctttaccaggaacggggctgccggggggtgcccgccgtgagggcgaaggatacattttggcgggagagaataagggcgtagtgtcaggttcaggtatacgaaaggtcggtgttagcaaggcggtttaaaaaaacgattccaaagaatggtttgtgaacaagggtagaataacccttggtgggcttaaaaaggcaattcaagaaatctttgagaagaaaaattttgtttgaaatctaaaaggacccttggatgagt

SEQ ID NO: 418422 - DNA, 971 bp, Homo Sapiens
  misc_feature (382)..(382): n is a, c, g, or t
  misc_feature (507)..(507): n is a, c, g, or t
agcgggaggtggggtcgtctctattttactcagaatggtatgggggtcgtgctgctgttgtgtagaatagcacttggactgaatggttgtgttgctttggctcatataacgtatccagcgtagatgacgttgactctagggttgagttcccgtgaagatcctggatcacgttctcgttcgctgtccgtgatggtggcactgagaacgggtccctctgttctatcactctcttgcgtgtggccaaaagtgctataatacaggtttgacctaaatcgactagtgcttcagtatctacaaaggatgatgatcaccacacgtcacacatggttgcttaagtcccctggggtcacagcgatgatgatacaagcagcagacacactgntgtagacactcagggacaggcatatactatagagctgtgaaagaagtggaaatgagaacgtttttggaacatccatagacttatattagatcttaatacgtaggctatactatcatagaaactancagttgatgctctcttgaccagtgagaaactggagggacgcgagtgggcaagagggtataagatgcaacgctctcgtcacctgggccttgcggcgctaggcctgggattcgtcgagggctcgcgctttgcctcgcatcgttgtagagagcatgctgtcgtgtatgacggtgaattagcgggtagatccagaaaatgttcgtccctatggccgcacttcgagaagcattgtccgtgttgatccgtagttggttcgcgtgtggtcgtctatgcgttgtaattaccactgtgggctggtgtaccacaactggaagggtgctgctccctgagtctcaggggcacgttacagggactctccgtcatgtcggcgtgttacctggcgcagtggcgtccactgtgcctttcaaggctggccgctggtaaccagaatgattgtgtataaatgactaaggtggcgttaatgaaa

SEQ ID NO: 418423 - DNA, 1132 bp, Homo Sapiens
agcgggctctgttgtgatgatggcggcggtgtcctccgtgtgtgtcagcgagctggatggatactggtactgataaccgggcgggagaaagtacggatcgccgagagtcccgagttcggacacaacaatgggagtgctgagtgtcccgacatccggtccaggaccagacgtggtgacgagccagtcgcctgaaggctggtcgtactacaggactcggatctgatctacgtgtcgacccagagtactcaggactcatgtgcacagggactggctagtagcctggaacgaggtgaccatggtactattagaataactggtgttactttctcctcgcgttaaatattttttactttgctttgttggcgatgccttgggaatctagcatgttcgagtacaacaaggaaactttgaatgacatgcgccacgtcctcaaatatatgcctttaccctaatcgcatgagttacgtcttaccgattgtccgcccttccatcactccggtggcgctctgattccatttccgccccagaaaattttagatgaaaaggaggcccgttatttttcacgagaagtgtctgggcacagacttgagaaatgtcatctttctcccagtgtacattcagaagggttattagacagtcctcggagtgattggcagtcgcaatagagtttaaactgccgaggagaaagtcatgtagtcggtgtaagtcgggttaatgtaaaaaccatctttttatcaaaggaatttgcttaattctaatgcaactgagaaattcgaacggttggtggatgtacgatctggcgggtttaatgagtgatgcatttggagcttacagttgggttcaatgggagccaaagacggaaggtgacttggtgaattgtgcctgatttgaggttagatgggtcatagaacatttgcgagtgtagggatggaacggcaatatgaaaaaccgagcgttgaggccgatagcccggtctccaagaattgcgcatccttctcggcagtaccactgaaagctcgccggagagacaatcatttgacccatccatgacgtccatcgaacgggatgagataccccgtgggattaaactgccgtccatttccacaggatggtccactcaaggcaagggtgc

SEQ ID NO: 418424 - DNA, 764 bp, Homo Sapiens
  misc_feature (72)..(456): n is a, c, g, or t
agcggctaaaaccacccctatgaacctggttttctgttgaatgtgtttcccaagaagataatatgcagtctnnnnnnnnnnnnnnnnnnnnnnnnnnnnnnnnnnnnnnnnnnnnnnnnnnnnnnnnnnnnnnnnnnnnnnnnnnnnnnnnnnnnnnnnnnnnnnnnnnnnnnnnnnnnnnnnnnnnnnnnnnnnnnnnnnnnnnnnnnnnnnnnnnnnnnnnnnnnnnnnnnnnnnnnnnnnnnnnnnnnnnnnnnnnnnnnnnnnnnnnnnnnnnnnnnnnnnnnnnnnnnnnnnnnnnnnnnnnnnnnnnnnnnnnnnnnnnnnnnnnnnnnnnnnnnnnnnnnnnnnnnnnnnnnnnnnnnnnnnnnnnnnnnnnnnnnnnnnnnnnnnnnnnnnnnnnnnnnnnnnnnnnnnnnnnnnnnnnnnnnnnnnnnnnnnnnnnnnnnnnnnnnncctctgtggatgctggccttgtcctgggctcctccacatgtctcacagccacacacaaggccatcaactcagacatggtggccaggattctcctagtcttgcaaactgaggctgcaggtcagagaatctctcctgcttttgggtatagggaataaaattatcatgcctgggcgttatcaggtctcatttgacttgctttctacatgagatctttctgtatagtgtgatattagaggaactccctggacttaggagcccaaatgttcatgatgagtcaggctttgggttgaagagccaggctttggggt

SEQ ID NO: 418425 - DNA, 1154 bp, Homo Sapiens
  misc_feature (25)..(25): n is a, c, g, or t
  misc_feature (73)..(253): n is a, c, g, or t
agcggggggggagctcatgcactgntgatagcagtacttggggagggccgagatacgtgggagtcgaccctgnnnnnnnnnnnnnnnnnnnnnnnnnnnnnnnnnnnnnnnnnnnnnnnnnnnnnnnnnnnnnnnnnnnnnnnnnnnnnnnnnnnnnnnnnnnnnnnnnnnnnnnnnnnnnnnnnnnnnnnnnnnnnnnnnnnnnnnnnnnnnnnnnnnnnnnnnnnnnnnnnnnnnnnnnnnnnnnnnnnnnagccactgcgactccagccgtgggacaatcgagacgtgaggacgtccactcctcatgaaagaagagaagggagaagcgtcgtccacgacgctgggatgtcggcgccaataagggggcccggataccttggacggggggaagccggagtagcaacgttgaggcttgccatgtcagcgaaggggtacgggttccagagactggggcgggtaaacctcacggggggcgcataggccagtggtacgccggggtggtggcaacaggtgtcgtcaatgccacgggtcccgaagagattgccacaccgggcaaacctataacgcgaaggcacagcggccccaggaagggaacagacgcagtgatcgcgctgccttatcggcggacaaggaacggagaggttaccacacgaaaccgaaagcaaaggatggggcacagccaggagtgacaaaacaataagcgagccaatgaaacaagcacccatacaagaggaccaacacaatgcatcaaacagaagagaatcgaaacacacgaggtaaacgacgaactaaacgacaggcaccaacaagtgaagaaggacacgcacggggacccggagacaccggaaccagaaggaaatccaagagcaccgagaagacaaaccgagggaacgacgggacactgatgagagaagaccgatacgaaacaacaaggcacgcacaaacaaaaaacacagacgcaacaagtacccaccaagaaccacaccaagacgcagaaccacagagagaaggaaaacaacgaacagcaagaaaaccaaagcgaaccgacaggaggagacacagaagaacgagaggacaacggacaaaagagaaagatgagagacaacacgcaagagaaaaggacacgagagcaaaaacgagaagaagacaaa

SEQ ID NO: 418426 - DNA, 803 bp, Homo Sapiens
tttggtttatataaccatttaaatcttttataaaggtttggaaggtccaggtttgaattgctggcagctggtgaagcatacataaataaatggaagtaaagccaataacgtggatttaatttatggggatggttaatttcccctaaagacctggaaaatggaacatagtatggctaagtaattttccagtggttagcctttaactttcctcacacaattgggaatcatataatatagggtaccttgggtccccggattaaataattggtgacgggataagaatggcttcaaggtggtgttattatggaaaaggaggtgggaaaaggtatataggctttaagcaaagggtggttgggcccattctaagaaatggagcgaatatattagaaattagtaggggcattttcttcccgtgtaagggggaggtgtatgggtgtggacattttcttccccaaatttctttcccacttcgtggttttctccccaattatttggaattacaggggtgactggctgtgaagaattgacctttggaaactccttatattcgcactataaatttaggtgtttacaagaaaaaacccgtgtacgtggacacgggtgagaacttcttcttcccataattttcacggttaaagagcaactttgaagaaggatgtggacaaaagattaaaaagtgcgctattagaaaaaggagacaagggggccacaagggggattgggcccaaatatttggattcttttttgaattaaaacccttccttggggggtttagaagggaatggactttagcttacattaac

SEQ ID NO: 418427 - DNA, 1068 bp, Homo Sapiens
agcggggacggaacacccaacacggcaggaaggacggcggggaacagcggacgcgccgggcatggaacactgcggagcggcgcgtgggcgcgcaggaggcgcgacgagccgtgcgcgggagtcagcgatgactcagtgtagggtattaaccggcacctcttgccgcaggtacacgagcgaggccggggagtacaacagcgagtctgatcgtcggagagtggagcgttgagatgagcacgacgagctaagtgacgggatcagcacatgcagaggacgcggtaggagtcgcaagaacgtgcagttgagaggtcgccgtagcgcgcaactggtggtgagtaggaagcctagcgtagggggggacggcggagatcatggtgcggaaacgcaggatgaatggcccgcggcattgtggaaaggagaccacacatacggcaggaaacgagtaaccggaaaaagaagccacttgggaggggaactccgtgaacctacccagggctaagccttactccaaaggcgccagaaaggcggaagagaaacaggagactcatcaaatagaaccttttccccggaggaaaagaaatgctactagagcaatgtcggatcgtccgagtggcgccaggaacggagtgcagcaatatgccctacccggagggcgatagcaaagaacagccagaacaggggagctagggggcctagggtcaccagtctccagccttgagaacgtggtgtgggactctgcccgctacggtgggccacacaggcggcgttggggcaaattgtgttgggtcttcaccaatttgaactttcacgcagctttcgttagagttgatccattcgtgttccatttgtatggtttgagtatcattgatggtgttgcatccctggcctccatggggtagagggcattggtgtgccgtggtgaaagttgggcaatctcgtgttgagtgttcccttggggaaaggaaaccggggcggaaagggaaggaatttgcttctggaaggcggctgagggagtaccggggcccctataagggaggccattgattgactttccagaggagggggggc

SEQ ID NO: 418428 - DNA, 1323 bp, Homo Sapiens
  misc_feature (633)..(642): n is a, c, g, or t
  misc_feature (692)..(692): n is a, c, g, or t
agcgggggtcggagattggcggcgtagcagggtgcgtatgtttggcccgtgcgtgcctgccgtgcggcaagcgcgtgccttcgcggagcaggtgtcgtggtccaggcgcggtctccatggcgggacatgaacaccggagaatggcgccgggggagtcctcgcgtcacgatgcggatgcaaagcaagtgatggagaaggaacaggaggtactgcagtcgagccgagtggccagggcaccacccgggtgcgcatggtcacgcatgcgtcctggacaccaatagcctaagacacgtggcatacattcctgtctccgcgttagcctacaactagtgtccagaaggaccgatccggtcagcgcagccagcctgggtgacttctggctagaagggaacgatctgaccatcctcgtggagagagagtcgcatagtatcatttctggggaggaatgagctgtgtgtgagctgggccttcacgatcacccccgcaagcacttgttccttgatttttcctagccgaatgggtagaatcacgggcgattgtccccttaagcctcccctcttgtcatccttctcgcgtaccaattccaatttacacaggtggatggatagagtccgtaaattggagcttcccctnnnnnnnnnncgttgaacgggtgggaacttccgccctttcttccaaaaccccttactcgnggcgctaagctttctctctctcggcagctaaaagcccgagcgctaaagacccagctaggggctgtggacaagtgcagcgcacgtgaaaagccaccagggcttgggctagcctatcccgggttccaaacgtaatggccccaagcaagagcttagggaaggattgattgggcaaggcttgggaacatggttcgcgagattggggcccccccacccctttggttcggaggtaaggcggggcgccaaaaaacgcaaatttcccccacctgttcggtgtcccattcccccgttgccttaaattgcccgccatttaggaaaggtgggaccctgggagaggtctccccttctcggcctagaggtggtcaacacggttcgcccaacggaaaaagccctcttgggattaggggggatttggaaaattcggtggggaggcccatatgttttctcccacgggggcccaaattcgcccaacaattgggcggttattttaccgggcacaatttgaactgatttgccacccctatgtgtatatccatattcctccactgcaacacaagcgggcgtgtgatatacaagggcgcaacccgggaatattttggccgctagagttacgttatatagggcttccaccaag

SEQ ID NO: 418429 - DNA, 1244 bp, Homo Sapiens
  misc_feature (235)..(235): n is a, c, g, or t
  misc_feature (624)..(633): n is a, c, g, or t
  misc_feature (791)..(791): n is a, c, g, or t
agcggacttggagcaatctggtactcggctaattgcgtgctgatatgccaagccctagtacctcatgaaaggactgtcaaaggacacacgcgataacttactgctggtgccctgggatatatctcggatttgaattcccattgttcattgcgccgaacgtatggtgaatcgctggttacttctcgcgaagcatgggagtcgtgtgcgatgaggtactgccatgaattgatagttncgctacctaacactgctccctcgaagcagctaggtgcgttgagctagttggtgtcgtgacgtgatcatctaaggcatttcagagctgcaggagccaagaacagtacctccaaatgaatatatacggaaaagctcgagtatgacgcaggcattgatcgttccgtcgtggcggcaaatcgtggattttcatctagaacatcgtcctgaaggaatcgttcgtggcgtcgtcgtcacgtcggagactggagctgggcaggaacgatgaagcgtaaatcaatgccatgttttccagaacaagcttggcatcatggtaccttggtgatagtacgctcacgtacacactagccataagaaggttttgcaacgtgaaacggaaccactttggagccnnnnnnnnnntcgcgggagtcttagaagtgtataggaggctcacccaaggagcaatggcttgacactatcaaggattggactaacacggagtaaacgacgtcgttacaggattggaaaatcaaccaaagcttatcgtacaatagctcacaatgttcagatccatattncctgtgcgtctacaaataatctcgtttggagggacctccatatagagcaaaaagcagcctttatcacggaagagaacggggagagagctcgtgatttcgaatcttaaggggtgctggtttgccacaattttacgcaccattcagtgaaatgtaattcccgccctggcccattgtgctagttcaactgctaaaggtcaataaacgtgtgccaagaaaattgagaacctttggacatctcgggtttgtgaaatgcccaagcaatgaacgcaaacatggtgaacgctgggaacccatgctaagtctttaagtcactcaatgaaaaggcgcatattcaaggctcaaagaacttggttttaaactaaacctaaacccttcccaagcggcagctcctagggtcaaaagacgcccaggtggttggcggctagatgggccttagtgagagccattggaacg

SEQ ID NO: 418430 - DNA, 973 bp, Homo Sapiens
  misc_feature (191)..(351): n is a, c, g, or t
agcgggcgagctgtgctggcggagacgacaggtgtcgtaagccgactgagtccgaaggtgtctggcggcttctggtggatccggaagaagtcaccgaagatgctaggcatcatacgaggcgcatcactacacctacggcttgcttgaaaaagaaagaaagaacaaccaacgaagcacgaaacacaagaacnnnnnnnnnnnnnnnnnnnnnnnnnnnnnnnnnnnnnnnnnnnnnnnnnnnnnnnnnnnnnnnnnnnnnnnnnnnnnnnnnnnnnnnnnnnnnnnnnnnnnnnnnnnnnnnnnnnnnnnnnnnnnnnnnnnnnnnnnnnnnnnnnnnnnnnnnnnnnnnnngagtaggagcaagagggagcgacaggcaaaggagagagcgacaagcgagccaagaagagaagccgtaagagccccagaggaggggagcagagcagagggatgcggctgtcagcctgcagagggagagggagtcaagcggagaaagagcggagctcaggaggggcgcagtgaggcgtagggcagagccgagggggagaagcccaagagaggctcgaaggctggagaggggtgagggttaggcctgcagggctaggtgagcaggagccaagagcagataggccaagggtccccagaaaggctagaagagggtcgacatggaaagaggtagagcgggggcgaggagcctaagagtagtgagaagccctaaagagggcagagttgaagcagagcgcaggtgtgaagcaggcccagaggcgagcaaagaaggcaggaaaggcagaggcgcaagagagtgaaaaagcgggatccggagtcgagtgctcccgcaaaggaaggacagaaggagtaagtccccccgaaaggaagaggaaggagtgagagtcagaggccgcagggggaagggaatagcgctgaacggtgctaagtcgaagaggtggagccctgaaggcagggtgagggtggg

SEQ ID NO: 418431 - DNA, 1329 bp, Homo Sapiens
  misc_feature (781)..(781): n is a, c, g, or t
agcggaagcgcagcccgaccccgcgcagcgggtagagccaggagccagcgcagcctacggccccgcagctacaagcctacgtaccccgccgccgccgccgccgacgcgccctcggggcatggcctgtctgatggcccgcgtaactcgagtctggcaccagcccctgacatagctattcttttgtatcgactttctctgggaaaatctgtcgctcgcgtgctcatcgtatttcacgacgctggttcttaacgcgtaggtgggtgcgtttcaggtgatcagtcccggtgatactacgggggcgagttttggggctggtcatctgccttgcaattactgatggatattacaacttctcgatggccaaaatcttctctaattctacattacaaccaacccatgcttcccgcccaggctaaagctagtctaatatgcaccattttacacattcatgctaaccttataccaatgtgctgggacctgctgtaaaatttcgaagttttatttctacgcgccacttaaactttaacctaaagggcttatccaatcgctataatatgggacgcatatattcccgattctacactgggctctgcaactacaatattatgcctaacaatgtgcaatgctccgaaaaatacttgcgggctcacacgcaatataactgtctctttaaatgtgtacttactttcgttatgaaaagcgctgcgcggaggagccaaagaggcgcaacgcggttaggggttctcacccttttttttccacgttttatattgtacgacanaggctcccggatttcccaacgtggaccacacatcgtcgttcctcgttccggctcctcaattgcttccttcatttgtgatcgcgcttttcggcgttgccagttggagtcacagtcggctaagacttttagcggacactctttcacgggtctattggggatcattcactcgatcggttgcgataacccggcggctgacacgccaaccctattctcccgcgtcgctactccacccgcacgatcacgtcatgcgacacctccatccttccccgggcggaggatcacgtccctttccgcactgccactctcacacttaatctctggcggcgctacatctcaatcacgcgtcattacgcctggtatacgcgtcttttgtccaattcttccttggcacccgcgtttgcctttgcgttgccgccacttgccttgggggctcatgcacagactactctcgttctgccggcctcttccaaacccgcttgcggctcgcggcgcttttatacgtcctggcaaccttctctacttctccacatctctactacttcgtcatc

SEQ ID NO: 418432 - DNA, 951 bp, Homo Sapiens
  misc_feature (503)..(503): n is a, c, g, or t
  misc_feature (832)..(832): n is a, c, g, or t
agcgggtctatcgggtgctatatgataggccgtgatgtcctcttgcatagtccttccgtctctcctgacattggcgtccctcggcctttgcctgcctcgggcaagcagccgcacgccggtcgagtcgatgaggaacgtgtgagagagacttaccctatcgcttgcattccaggcaccagaccgtgatccacgcgtcgacagtccttctctgtgagatccataggattgtgtgatgtactcacactctagtgcgggaattggcgatgacggtccgagtgactccaaacgagtgacacacaagatagcggtaaggtggttaggtacggcgatagtgacctccattatggtaaaataatcgactccaactcaactgttctggtgtccatagggtcgagatatggatggtgtctacaggtggtagaggatgcgaccttacgaaggctctgtccgttgagcctatcatatgagctagctctttctgctgtgacaccatctttcgaagntgaagtaaccatgcaaggagtgacctgtcccgtatgtatagaactttaggtgtatactattcagtagaggaaggaataggtccctcatacccaatggatatcttgctagatgaaaattgagtctatgagcactagtatgggatagccgtcacaagataggctaaggctaggagagaacgagaactttcgagtcagtcatagataagcaaatgtgacgtagcacacacgatcggtactcgtggtcaagttagtccctctctgcccgctagggatgccgttccctgtctttcccatctgcctgcgcgatcaaatgaaagtgccccccactntgatggagcacatccccacgagtggaactgtgagggctcttgctagggcgaaagaaagctgggaactggtcgtcccgcgggagaagcgcttcgagcgacgtgagggtactcttgtgaac

SEQ ID NO: 418433 - DNA, 646 bp, Homo Sapiens
agcgggcctagcgggtgcgtgctgcggtgcgtggcctctcgaaccctcgccttggccggtgcggcgacccgtgctcgccgggcctgcggcagcgtcgctccctggactcgctgatgtttgcctggcgtgcggtactgtcgcaccgcgcggggctccggtcgtgtgtcggtgggcgctgtcgacttggcggacctctgtctgtgggcccctttctctccacgtccgcacgttgtggacgctcctgtgcccatggactttagtgctaggagcgtggagtcgtaggtgtccgtattgtgggcgatctcggcccagagcgtcgacagtcttacacgctgcctgtataggtcccattctcagatccactggacgctctgtcacactgacgtgcagcatttagtgctgggactaacatgtcgtgggtgaacgcagcgttcgtagcaagctgaggtgtgccatggtgggcgtccactctgaaggagcgccggaagcacgcgagacctggaaggcaacacctgaatggccaaggggctgacgccgataagcatgcacctagtagtcacgatgacaatccttctaactgacgagtgcatgattgctgtgtggaatcgaggtcagtggctaagcctgtatacgatcgataattaac

SEQ ID NO: 418434 - DNA, 1071 bp, Homo Sapiens
agcgggtaaacggactacaactgtggcagtgcctagcttgtgtcagctatcgccaatgtcgcggtgcccgcgccggtgatccgagcctaggacacttatcctggcttcgaatgctggcggcatagatacggcgagaatagttagacctcttttcgcggcgtcgcagatctggcgatgaggtatcgcgagtccattggagagttgcgtcggtgctaccttgggtgatgcgaccacgaatatgggtcgcaagaccgtcacctgaaggaaccatcagtcttggctgcgctctagactctttccgaattacggagcgagactgccgtagatgaaccactataagtaggaagacatatcatacatgttctgatggggcgagacgatgtatgaagacgacaggcggtgctcgtctctctcatcttacgaactgaccgtgccaacgctgtcacaagtgaaggggtgaaccttccatccaacgtatcgacgtggttagtcctagaaagagtgatcagagtagccaggacgggctagagttgggagacggagtttcgcagccgaatacgtaaacagggactgagagtggataacgccaagggctggtgtcactgtgtatgtccaggactaagtaactgtggactaactcttacgcatgtgtaaaccggtaaatctctggaaccagtcttggtgtagaggccatggatacttgggcctatatacggcaccattgtcacccgtgtggagggggcaatatcccaaggaaaatgggtccgtaggactagctctaagagaaggaaaggtgcaaattgtgtaattgaacccccatattacggctaaggaatgggggaatacctttatatggggttagggcaaaacggtaacggcattgtcgcgtccttggtgcgccgcaaccttcttcctgtggggtggtttgagcattttgttgggcaattgcatacgtcataattttaacatgggagttaagatgacgatcccaaggggccggttggttaaaaaattggacctggaatgtcgtgaaaaagccattggttttcgaggtccgcaatatcgcacccg

SEQ ID NO: 418435 - DNA, 1190 bp, Homo Sapiens
agcgggcgggcgctcccgcaggggttcctccaagatggcggcgcagaggaggagcttgctgcagcagtgagcagcagccaagcctggcacacgactgacctgcctctctgccaccctctctggcgcgcttggctcaccctgcaaccgcagctactctgctgactggcaacgggccctgagagccacccgcccagaggacagcctggctcaagttcacgagtgacgaaccaactgcttcctgctctgcggcgctcttcaacgcgctatgatggccaaccgacgtgcacaccttcgtgccccacgcggctgtccgcagagctccctgcctgggccagcctgactgccgagcacgccgacggcccgatgctgccggccgtgtgctgcctgcaggcccttccccatgtgcgcggacacggagctcatcctggcagctaccactcgaacgaaacgaccctagcgcccagacccaagcgccacagactctacccagccacgaccaactcgcccagcacgcgcgaagatcccctccagacacaccacgcctgcaccaccctcacgtaactccacgacagcactccccttgccacgacgcagctccacccaccgcttcacccgcagtggacaacttatcccggcgcaggggcccactgcgccgcttgtcggcccggctcctttctcaacgcaaacaatgcgttctaacgttcgccaaatgtctcggtaccaagatcccggtggcgacttcttatggccaaatcgacccagtgggaataggcgatcagccaaggggtggcaccacaaagcgctggaaaagcgagtggggaacgccacaaaccagacaaggatgcaaccagacgcaggaatgcacagccccccatccccaactgctattccgcccaagcctgggcgccctatcacgaatcggctaggcacaaaaggaatctatcgaaaagcctacgcggtggaggggcaatccacaatcccatgcacgcggcccacaagcaagcaacgctgaccccagggaggggctacccaggcgggagttcgcacagcgggtaaaccaccactcggccaccgccagcgaccacacagcaccccacacgcagtagcaccacgccccaccacgccgcacacccccagacaaacagtccggcggaagacgcgcacaaactccccatggcggccagcaacct

SEQ ID NO: 418436 - DNA, 1296 bp, Homo Sapiens
  misc_feature (1264)..(1264): n is a, c, g, or t
agcggagctggaagagcctggggccacctgtctggttcagtagtctctctgtctgtgggcctcttgagagccaggcttggtttcgtggtctgacctgaactgagcaattgacaacttccgtagggatcctgactggctgttgactgaggccagttctccctgctggtctcctggacaggagatgagagacggaaatgggcgttaggatgcctaggtaggcctttcgaaactctacacagcagcggaccacgtctagaacaatgcgttcaccccactcagcatggagcaagcaagaccagactatctagaacatcgagagattttgctgcacatggccagaggctccctggagagcataaagttattaattgtgagagcatagaaagttacacgattcggtgcaacgcattgatagggcaacgtaagaaatcagcccaatgacggcattaatactatggcaaagatagtccgccgtaggaaggtctccgggagcagacagttggtctccgtgcccgttccttgacttgcacaggatcgcaagcaagcgcagggcagagaggccgttgccggattccacctaaatcttgggaagggggaccagatacaaacggaaagaaccgggtaactgcacacagacatagagggtttgcagcgttccggccctgcacacaaggaccccctgcaaatggagttggacgtagtccgatgagaccctttgggcaaggaatggcattcaactgggaaacaccaagggccacatggttgggaaagtccttatccaagaagaaacgcatgctgtgtggaacttgtccctccgggttggcggggccaacgaacgggcaaagtgcccccatggaaaggaaccgttgccacttggttaaagaattctccttccaaggccatgaatgacaagattgcgaccatgcctggaatcgacctatctgaacagggcgccaattgtattcgtgcccctaggaaccaattgcctttggaaagcgtcacccccacgtcaccttggaaaagtggcggttgccccataaggcgctcccccgtgcatgcgtaaaaggcgaagacatcggtgtccctgtagagaatagaggcttgggggtgagcacaggattccccagaggcgaaccatccacacgggcgcaagccgttgggacgcaacggattatttacggaaagctcgagttcctcccggtgagagtcgggctgagaacttgcccctttgggtgagaaaagtgtgcccttcggcctcttgcgngcacttttggacccccacagagaggtcctacc

SEQ ID NO: 418437 - DNA, 786 bp, Homo Sapiens
  misc_feature (204)..(254): n is a, c, g, or t
  misc_feature (500)..(592): n is a, c, g, or t
agcggtaaagttggaagatacaaaatcaataatcaataacatttctacatgccaacagcaaaaattctgaaaaaggaatcaatgtgattccatttatgacaggcacaaataaaataaaatatctaggaataaactcaatcaaaaaagtacataattctcactataatgagaattatgcaatattgatgcaggatattatacgannnnnnnnnnnnnnnnnnnnnnnnnnnnnnnnnnnnnnnnnnnnnnnnnnnaatggaaaggcatttcacattcgatggattaggaacgaatccatattgtgaaagatatccatattacccaagagcaatctacaagattcagtgcaattgactatcgatatagctaatgatactcttctgcaacatgtgaggacaagagatatttcttagagtgtctatgaactcacgaaagacccagtatatagccagagccaccctgagcagaagagaacaaaactggcaggagtcacattatgnnnnnnnnnnnnnnnnnnnnnnnnnnnnnnnnnnnnnnnnnnnnnnnnnnnnnnnnnnnnnnnnnnnnnnnnnnnnnnnnnnnnnnnnnnnnncccgagaacctggccatctgaactggcctcagaaagtgtcctatagagaaaggatctctgcagcactgtgatatgtgcgtagatggccataatgcccatgctagaaggttgtgggcttacttggaatgagggcaagaacatctggcccacctgggtggaaaacggcttaagggcattcttagactacaacaacg

SEQ ID NO: 418438 - DNA, 495 bp, Homo Sapiens
  misc_feature (297)..(297): n is a, c, g, or t
cgagacaggcccgggatgcctggtgagtgctgacgtggctggcggtggcccggatccgacgcgaggagagaggcgccgaggatgtcgcgcagtgatgaagaatgtagaaggcgcagtgttagccgaccggcgcgagctcggggaaggactcatgcccgagggacgaagacgagtgagactgcgtcgcctggcggtgtttgccttgtcatcagtgtcccgtcgcggctccatgctcgttgcctagcagtcgcgtcgctgaatgaagtgacccgtgtcttcgcgtatgtaactccatgncacagtagggaacctaggtaagcaaccaatgaagccaactattcctaaccctgagagggcagctggcattcgcagccctggcgagtgcatgcactgcttacgaccatgtcctggcagaggatgccatgaccggggcctgctgtgccccgaccatgcacacggaagtgaacgagagcacaggtacatagcccccgcatg

SEQ ID NO: 418439 - DNA, 761 bp, Homo Sapiens
agcggatcgtatctcatccgcgtacctgctgctcacagtctttactatattagaagcccgacaaaatgtgccctgcatactacaagaatgttccatatctagaatctgaaaatctgttataagtccctcgtccgttgtggcattacttaactcggtaacttctccctaggaagctgagggacctctctgaggtcggtaccaattggtcggtcaactttctgtcctgcaagttatggtacaagaatcagccattagaacccaactggtggagtatgtttgatttgattttgtaacttcgactgtatatttaatcatgtaatgattactttaattttgtgatcagagtatcgatgataggattgaaccgatctggtcttctgtgtagtgagaacggtccaagacctattatctcgtaattgaagtgcatcccagtggtccgagtcatgagcttaaaactttatgcgtattgcctttagaatgcaaagcgaaacgttcgacaataaccctctgtgatccttacatgttgtggcaatcctacatctcagtgaccatccccaagcaggaatctcacactcatgtaggagatgtactcggtttgttttttgctcctatcggaagtctcattgatgccgaagtcatgcgaggcgcatgacgctcaatatctactctcatcaatctatggcaccaccatttgaacttaagttcatttccgcgacccatgtgacatcgataccgatccaccggtaggcgtggtgcaaatc

SEQ ID NO: 418440 - DNA, 733 bp, Homo Sapiens
agcgggagtgggtgcccgggcacgacgcggttgatcgctgtaaatgaggtttcatatcagaccttgtgagttgtcatgcgtcatatgggttgcgctgtaagattgtgatgcttctcagtacatgctggacaagtgatacgagacaggacaagctggtacacggcggacaaagaggtcgcacaacaggcgatacacagggaggcatgacaaagccgagcacgtaccagacaacaggacaggagccagttaaggatctgcggagaaacagagaattccagtagaatgacaagcacagacagaaatataccgcggaccggaaaccaggaaaaggaatcccctggaaacggccacacgcgaacggaggaacccgttaagggccaccatcacacaacgggaggcaacggatggacaaaacatagatcaatagaatcgtaccacaccgcgcaaacttcaactcgagaaacgacagaacgtgtgaaaaacactagaacaaaacgagcaaatcgttacgagagggacacaatgggcgaagaggaaaacttgagtgcaaccctaggtattgggccacagcgcctataccctacaaaatgacgaccacaaaccaacgatcaaaagccacaataaaatagccgcacacaatccaaatggaaggacgccaacacggaacacacattcccgaggaagatgtcgaaactgagcaacaagcacgggacgaacacagggaggaaaaaga

SEQ ID NO: 418441 - DNA, 1154 bp, Homo Sapiens
  misc_feature (460)..(460): n is a, c, g, or t
  misc_feature (523)..(523): n is a, c, g, or t
agcggttcttacgcctctactaggccgcttacaggaggctcgcttccttcatggatgccagactgtggcacatcgatcacgagcgaaagcacagcatgcaacagttcatagctcgaggtctcgggataagactgtggcatcacgatactgtgtgatcgagattgccaccggcactcagatagagaagtcacgacagtgttgcgtatgaacgaggaggctcggacgccccagaggtctcgctgcacgagaccacaatgccgacgttgtgcacgaaaggcagaggccacgaagccatgagagaagagcgtcggctaactgagagtactgcctgtgccgaggatatatgctgacggcctcgagtgtaggctgcaccagccgtggctcgtaggaggctaagtgctagacgggcgccgtcaggtcatagacgtcccgacatccacggggtgttcaaccccagagnaatcctccgaaggggctgttcaatgcgcagggaaggactcagtaacagagcattgtcgcattnacgactctgaccacaactccgcgaaaagccttgtggaggggaaaagccagatcgtcgtacgctcgccgcgctggttgatgtggcgcgaaaggacggccgtgcgacggccgtgggttggctcgcgacacgagaaaggcgtcgccaaggggccgcgacagggaccgcacgctgcccatagggggactccagaaaccatggggacccgacggcttgggcagggccccgagccttggctaggctatgctcaacgccgtcgagaggcaatcggctcgaacaaagcggctaactccgccatgcggcgccccccataacgacaaaccgggcattgtggcaagacattgtcagggagttatgtgcttccccttgcccgaaaattcactcggacggcgtagccaggcaaaacgcactgtcggggttgacggcagggcgcctcccctcccgccggttcgcccctgaggtgcactcacttcgcattcgtagcgcagtcccgtgtggcttggggtggttcccctcacggtggctgcccgtgtctctctgctgacagggggcttaccaccgcattcgggacgggcgaccgtcattttcttgctctaatcccttccgttgatccgtcattttgaggggggcccca

SEQ ID NO: 418442 - DNA, 1116 bp, Homo Sapiens
agcgggcgggctctctctacatcgagcggcctaacgagctcgcgcctgtcaagaagccaagaaccttctcctcttcggctccgtgcatcacctcggtggttcgcgacatggagtcaaccatgcttgtagatgcatctccatctccatcgttggcctagggcttggtgtcgcgatgatctgtgaattggccttggtctggggatgcttgcgtagcctgcccctgtgaatcatccggggcatcctaagtactcgtaactgcgtcaatagtgcccaaagatgatccaagaccatgtctgcgcgccgtgaatggtagatcggatctccattcatagcgacactatctatctatgtgaggtactggtgggcctggtcaaggcaattgctgtccgccgagcgctagtcgttgtgtagacctatgggaaatccagagatcatgttgattgaaggttcgcatggtggcatgctagctcgcctaggctcgttccacgccatgattgcaaacttactcagcgatgcgaggaaccatgctgacgcattaaacggaatgaccctgtaggtgcaacgtaacctatacaatctgggaccgacgggatgactcgaaattgaaccatactggtggctaagtgaaccgagaatggcagccacagggcctgggccggaacccacatgtcacggtggtctcccgtggagcttgctttgggtgttgctcaccagacttatggtcggggcggagactgggctctctgcgcgcttcactcttcctcggtgctcatttgggaatccgctctcctcaggttggatgtctattgggcccagagaacgtcgcatatgcttggtaccgctcccgtgatttcttttcacccagggcggccccctaggtgtgcctcgcacaacgacatgtttgtatgaaggcccgtggtaaagcttcactgtactcttcgagctaaacttaagatccaaccccgtggggaagcaactcctggagttagtgccctctcattggcttaggaccgaagtgtaagggaccctgtctatttgaccttcgtggtcgtagaaatcttcgatattcgagcgttcctaggccactattaaccttgaatcaagttcagtaggtca

SEQ ID NO: 418443 - DNA, 1143 bp, Homo Sapiens
  misc_feature (355)..(355): n is a, c, g, or t
agcggatgtgcccgcccgtcgccgtgccggcgacgccggcgccgtgcggagctctgtgatatggcatggatgataatggagacctactgctgtgcataaccactgtctcaaaatccatctctcatcctctctagctcctttcgctctcgctggcgatcaccgtggggctgtacgtccgtgctgtgcctcgtgggccgctgcgtgtggcgtgccgcttgagctctggcgacacgctagtagtcgtactccttattcgctcgaggaatctccaccacgagtggctctcgctagtgttgcctccatcgtgagacctggtcagcccactacttggtgtgctattttttgggacctgctntggtgcatgccgttcgcctcactgtagtcagatggatagccctcatggtatgctgcagcacttgttagtgccggaagttgtcctgggtccgctgcgctgtatccctgggcgtgcaacactcgtttatcctggctgtttcgaggggtctcgcgtttcgatcgatgaagcatcaaggtacagctatcctgacgacttacactggtagctgctgatgcgagacttacacatggtcgaatggatgacgcaggagaccgggcagctggaccggtgtgcacgtcgcaccctgaagagtgctgccgggtgcagaagtacaaccaaggtgcgagcgaccgaagccccctgtagttccatggaagcaatggcatcccctcgccaggtgctgctatgaccggaaagtgcatggtaaatccgccaggatctacacggatcgtgactgtggcggccgaccgaaaggttaacccagaaagggtccgttatgatctgggtaaacctatttgtccaatggcagacttaccatttggggaatcagtgcgcctgggaagtcggcagtgtgcaatccgtgcatactccccaggtgaattgggacattcgggaccgcgaccttgcgtggacttggccccggggacgcaatccacgggcaaaaccaggatcaggacacgtagtagagcgagaaaggccacacccgaaatgaccgggagctaagggacccgggggtaaaccagcgaccggcaggaagcttagacaggacgtccaaggagagggaaagcaccggccaaaaaaactggccc

SEQ ID NO: 418444 - DNA, 896 bp, Homo Sapiens
  misc_feature (148)..(148): n is a, c, g, or t
  misc_feature (528)..(528): n is a, c, g, or t
  misc_feature (856)..(856): n is a, c, g, or t
agcggaaagaaatgctattggacaatggcttatagaacatgctgtggcccaatattattgaaagggacgtattgagtgcagatcaaaacctgaccacatgtgaactcttcttctctccagctgacgagttctatattataacggtatngagtattacacagactgccctatgctaggaagaggcagtattatctggtacagcttcagtatattgctggctctttgtaataaagtctcacatttgattttcctattatttaacctatggtatgataaggggaacagagatttgcattaagatttcaatggagagaatgattgtctatcaatcgaatcttgagattccgtcatggtaccgtctcgctactcgagccgacaagatgagttatacaggaagtgtcgaagtaattcattggtacacaatccgctaatgagagcagatacaatgaatactcacgtatcagatcatctaatatatccatgcgtagaagggccgtatatttttgaccatgtatagggcggacacanttgccagtcttcgggtgcgcattactgcctattacgacgtagaatcccacactcgcaagcgaaggactctcacattgtaagattactgtgcgtgtccaaaaatcagcttataaactatactaatgtgggataaaagcttggcgaattaattagaagttacgttgtcgtaaagttataatactcattaatactaatttgctcaagatagctatttccaaataggaggatttacatgggcataaacattagttagcattgacttttacttgtggtgtcacaaaaaggggtagttaacgtaaagaggtcaaactttcgtaagggtaatttntcgtatgtaatataatcgattgtttcccgtaaggttaaga

SEQ ID NO: 418445 - DNA, 1049 bp, Homo Sapiens
  misc_feature (48)..(62): n is a, c, g, or t
aatccgcggccccgatggagaacgcccgcccccggggttacacgccgnnnnnnnnnnnnnnngaacaatagaggggtatttaacaatactacttctcagcagggggtgggcgcccaaaaatagtatcataaatatcatagcacactatacactaatgtgggggtggcatagcgcgctggacaaagacgtggtgacgactgaattgcgcgaacaaaggtgtgggacccactgtgggagacaagaaggtctggtcgcaaaggacatattaccccactatcaaatggtgtggcggcgccacagtgtaggactctccaaagggggtgggggtggatccattcaacacactccccacaaaaaatactactactgacaagagcatacttatcacacacatctttgtgtgttggagaagccccccggttgcgagaggagcgcaagatagcgcgcgcgccacacagcacaaacaacgaccggaggaaaagcgggaggcgtgatgcgcactaccaaaacatggaccgaggcccaacgtatgttggttacgaccagccccccacacacactttgccgacgcgagacggcgcgaacaactgtcggagagcgaggggcaccaacaacaacaacccccagactaacataaagcaaagcggcgcactcaatctcacaccagccacccgcatgtgtgagtgtaccacagtctaggagaaaacacacgcggggggaaatacttaggggagcaaataaagagggggcaacccccaacacgacgggacgtccacaccagcgtggcacacgaggggaccaacggatgaccgcacatcaagctggagcggacaccacactttatacaataaccgagatggagcgacgaaggaaaaaattacgcccgagggagagaacaacaaagatggagcaccaacccctccgcacaaggacaaccggagtagaaacacctcgcgcaaggaacgtccgcccagccggcgagcaaacaacaggggctgacaggaagggggggcagatcgccgcgaggtagggaggacacacccccgccg

SEQ ID NO: 418446 - DNA, 1350 bp, Homo Sapiens
  misc_feature (285)..(285): n is a, c, g, or t
  misc_feature (405)..(405): n is a, c, g, or t
  misc_feature (431)..(431): n is a, c, g, or t
  misc_feature (821)..(821): n is a, c, g, or t
agcggggtgattgggtgggcgcacggctccgccgtggagtgagtactcctgcgggagcgcgctgtccactgtgcggacatcgtgaatggatagcggtggtagccttgtcacatatgtggtgtgactcgtgatggcgagcactcgttctcgggccgatcaggggggtttggccgagcccacggcgcctgatcgtgtcaatctcgagcgaccgagtgtgtgcagcaggtcatgtggccgacctggcgtgatcgaggcagtccgtacgtgcctcgccagtcacttggngaggttgacgcattcgctagtctgtgtgtgggccggccgtgctcctgccacctgatggtagtgataggcacctgtgtgacgagcatatgtggcgtgacagggagatgatccacataggcntacattcatcattcaccacattaggnagccgattgatacaccgacgcgtctcgctgctagggcttggcatcgccaatcgcgccacagtggcacatgtgttgggggctcgacgacaagtgtgtgtgtgggtggactatctctagttatcgcgcccacaatccagttagaatgagcggcggttgttgcgacgaatacccaatacacggtgcatcgtgcggacttgaggcgatcaatggcactcgatgacaaggttgcgcggaaatagttggcggcacccggggactttcagtagtaatgtggacactaccaagaacactagtgtgggacacaccacaccttagatggggatttggaggcattggtggaagaaggcgcttaattggaacgtttacctctcgttagacatagaatctccnagggtatagttagtaccgtattggaacgggggtatccctctaggtgggggctttctcgagattggttagttatgacttttttcattgacttctaagtgatgcaaccggcaaatccttctggggacctgggctgcctgaaaaccctcttggaacgggacatgttcgtgcgtttaggatgtcccaccgcagcttgaggttcttttggccgtgactctctttctcttggacatagcgtggtatttcattaaacgtgcttgggttttccctccgtaacgtgcacctatcgcgtgttgttgagagccaagtggtgagggttggaggaccttggaaatataacgcccactctggaatggaggtaatgtggtcccattcgcggcgaaattatcggaccctctcttcgtttcacaggtggttaatacacacccgtaggtcgccccacatggacagttcttgaagttgggtcaccgcaaagtgttctcttatccacccccacaggatatacctcttggaagtgttgtgtcggatcccc

SEQ ID NO: 418447 - DNA, 729 bp, Homo Sapiens
  misc_feature (420)..(420): n is a, c, g, or t
  misc_feature (507)..(507): n is a, c, g, or t
gggaaaacttacttacgcccgggttaccctgtgaacacaagcgttcgtgatgtggcattcactttaaattaccttcttgagaccaccccagtgtggactgagctcaagatttcccaaacagcttagttagaaaaacagagtgggttccgtgagacgtgctaaccacagattccaggcaagaacaaggaatttatttaccattagggactgaattaacctgattagaagggatgacttatggggttcccgtttaaaattattggctgattcgcctttagcggctccatattttcctgggattattaagggaaccccttttctcttttctctctgaaggcttattcttattaccttcacaacaattttaagggaagacttattgttttggtaacccggaaattaaacccctttattcttttnttcctcccccggttttacttccctccagaatttcaaaacactctatatttattttaaatttccatgggcaaatatagttactcggancaaaggttccaagtgagttcgtgccttcatagcttggaaacctttcccttattgcaacccaagggctttggactgggaaatgcccacttttgaaacattttcccttttaactccggcgtttgaccaaaatactttctaagatcaccagttgactttttatgacccaacgcttacagccctcttagggaaacgggcctggggacctggctacagagttcccag

SEQ ID NO: 418448 - DNA, 749 bp, Homo Sapiens
agcggaaaaaatgagcaacttgtataagatggcacagctgtaaaaggtagagccagcgttcaaggccaggctatctggctctgccatcggtgctcttggccgctgtgttacagtgcctataaaaggaaacatccactgaaaggagacttgaatctatgagtctctgattacaaatgatctattctaccaacttagctgaatttcttataaggcagttttaaggcattaagtgagaagtcatgtaagaaagagatttgagaaatgaataccttgttcactacagactctaagcatatttatgtttccttcttttcctgttgcccgtaagtgaagtgacggactgcaaaaaaagaggattctgggagaagcatttaattccagaccaatatctaaaccagagtgtgttaatgatatcagaaagctcctcagacacataaaagagaatcacttgagcgcctgcatattatgcactttcaaaaagacaccttcctttttaaaagtctcttcacccatgctgtttgggttggggaatgggaagcttatttaactctggcattatcatcccctgaagatcaagggtgtacaatatcaaagtctagctgttcactctgtgtgatctgaaggtccttgtttaaaaagatgctattaatgcctcttgccatactggaaccaggacagtcgaatgcaaagggcacaggatcacagtacctgtggtatagcttgtgggccttttctgttcgctcttcctc

SEQ ID NO: 418449 - DNA, 1182 bp, Homo Sapiens
agcggagtcttcacgttaggtgcgcctagccctgcgcagcccgcatccggtacctgggctcgcggcagatgcgcgttatcccagctgtccccacggcgggcatcggcagagcgttgccgtgcatcattgctccggttacgctcggctctcgctccaggcaagccgtgcccgacattgctgtgtcgccaccttcggcgcggggctccgggcgccggggcccgtcaggtagccgtattgatcctatgaggcgcccccgctctcccgactggtggcagccggttatgtagactctcatcgaagtctgtgattaactatgtccctagcactctatctgcggcgctgccctagttgcaagggtgcgatcatgtgcaagtagagttactgccacgcgtgtgcgtgttgtccccatgtgtagcactacctgcgcacggcggatcggctaccatgccacatgagtatgcttccctgcgcgctgttcgtccctggcgatgccggactttcccctacgcatttccgacgacgagcggtcttagcagcgtacctgtgtgacttgcgaactcgtctcactgagaaagctgtggtgcgccctcggttgcctcgcgcacgcgagcccgggggagccttgtggcgcgatgcgataaacttgcgccttcccgtcctaacccgagcacggacctcgctcgcgcgcatttcaagctaccccatggttgcccggccacggcgggtgcgcggcccaaggcccccgcccttggggttacagggagtcgctcgaggtgcgcattacccggatctgcggcttgcgatcgcccttagggcaagcgcgcgtatgcggtgggtgccgtcgggcccaggcaaagcgcgagatacgccgccgggtataattaaggaaaaggccctcgattccgaagttttgctttccggttaagaccggaaataatcaggcgtgtatacacgtctgcctcggaaaagttcttcgagaatcctcgggatttcttccgatacttacccgagtcctcgggtacggacccgcttccctcgtttgccgaggacttcctgtagaaagggcgttcacatcgtcccattgtggtccttctccagggggtctttccaggatccttccctttcgcccgtttttcccggttgcccgcttttatcggtgttcccatggaccttcgttcactg

SEQ ID NO: 418450 - DNA, 1139 bp, Homo Sapiens
cgaaaccgcggcgccccgccggtcctaagccccgctccgcggaaacttagggtctccgaacgcagcgccacacaccgagcttcggaccggtcacgcctcatgctgggtagcttcgtctccctcgtgcggcggcggcgccctttgggttcgaaggcgcgtcgcgagcgcagcacgcgcccggcggagaccaggccgtgctgcatgcgtcacatgctggtcccagagtgcgccgacgttcccgtcgtaatatcgcctgtccctggacatctcatggtatcttatcagttcgctttgggatcttcctgcgcaggttccgctattgcgaaggtgtctcaacaatcgcaggtgtgcgatctctgctaagcctggaatcctaccgcagttgtggccctaatggcagcttaactggcatccttgtctgtagtacttccgtgaactgtgctcactcacctggaaccccaaaatgccctaagctttcctggaggacgagctcatgaacgtgcgcatggtttccctgcctcttggccagtacgagtggtcgccttgctgctcacgccacgaaccaccgaggcgggggccttgtttgccctgcacggcgttcccctcctgtctgagtcaatcccacagctagtggctttgttggccccaccctgcatgcctccccagtgaggtgtctggaatggcacccattggggcttgaggttgggcatggaatgtggggctcgatgactccctccgggggccccatgctacgcattgtgtggtttgcccgtccccttcagatgccagcgggggttagttccattggtgcccctgcggcccagacagcgggcgaggcacggggtcccttcaccatgaaggtccccttccattgggggcatctcgtgtaattgcttcaccttgggaataccgaggttcccgaggtaaagcgcgctctttttggggctttcggtctttccccttacaagtagaaattggtccttagatcgtacctcccgtttgttctccttaattgacaaccggttcccattcattttagagggggccttgggtgtggttctccgttcccggtgttttgagcggctctggggaactctcgatgcggtatccttttaggttgttccccccagggtggttcc

SEQ ID NO: 418451 - DNA, 729 bp, Homo Sapiens
agctggacggtgcggcgcctcgggattactcgtggtgcgcgctggcttttggctcccgtgccatctgaactctgtctcagcgtcaaaagctgctgcgacgaacctgtctgtagcactgaaatgccatacctcgtcggggtctcctgtagcctcgagggctcccacacggtggcttacggaacccacaggtcttgtcgcgtcagccgccccggacatggtcgctgacaccggtgtctggagacagggatggtccggacggcgcggatgaggagagtaaggtcggctcgcgactgactgcacgctacgtcatgtctcggtcccgcttgccgggaaaggccctgactgtggacgtgattggaaaagcaggagttgcctccggattacgggaaaatcgctggcgcgaagatcgagggtgtgttaccctcaaattggtcatttaccgtacacggaagaaccgccacttgtaggagaatagccgcaaccaaggggaaacctttgtgcgttgtgcgaggacgaaaattggtacagggaagttaaagtaagtatttccaacgttgaggacccaagacgacgagggaaattgagcacgtaatagaaaggtgcacaaaacgccatggcataccttgacgattagtaagtagaggaccacggtcctactgcaaaaaccagagaacggtgccactggaacactgaagtgaggtcaggaactagtacaagccagtgtcaccc

SEQ ID NO: 418452 - DNA, 351 bp, Homo Sapiens
agcggcataaacttttttttcatggctcttagtagaaaaataacaacagcaacgaccaaaatatgtacacaaatgcacattttatatttcatagtcagacattaactaaaccaaataaaacaatcttcaaagatttttattgcataaaaacaaaatataactttctagttaagcattaagctcaacaaaggaaatgtataaaaatgaaaaaacattttagctttgttcctagcactgctattaactcaccgtgatattcattaaaccaaaagtcaaatatatgaacagcaagggccactgggcattgcaagtctgaaatggtgtgctagaaagtgttttgaaatttaaagg

SEQ ID NO: 418453 - DNA, 306 bp, Homo Sapiens
agcgggtagacaatggctagattgtggagtggctggaatcacagagattagcattatttagttagcagagcaaatatgaaggtttggatcactgaagcacagggcaagaaggataatttcagactaataaattatttttggtctgtgtgcttgtttatttttcagtaggaatcagaagtttgtatatcctattgattatttatatacaccatctacccctcacttctgccttaatggcagggtcccaattttcttctggtatcaactcatttcccacatgactcacagggaaatgagcctatgctc

SEQ ID NO: 418454 - DNA, 915 bp, Homo Sapiens
agcggagctctgcccggtgttgcaggatggcgggcaggggtaagctcatcgcagtgatcggatatgacgacccgggtgactgggtcccttctgcttgggtggcatacggaagcttaacatgaaccgcatcccacatttcctggtggtggagaaggatatcaagcatcaatagagatcgaatgattaggtttcgtggctatagtttctcacaagcgtggatgatgtttggctatcatccatctatcgaacacgaagttactatcggctagagcattggttgccggcaatggcagcctgggacgcgacatctcaagcaatgtccatcgcccggcatgtctcgtgggagatcgcgctcgtctcgagaggagcatccaccatgattgacgctcggatcgatatgatcctatccatgaggcaagtggacccgagggatgcgagttgcttaacagcattgaccagtaaaagatctctgtggacttcaggtggggtagcatgcgcgtcaataggctcctccagacgcgctttccacgttcagtttctctcagaggtgctcatcaccacagggctatgccaatgcgggtacatttgcttgaagctatatgagacgcctgctgatttattggcaatattcccctggttcgctttgccccaactcgcattaatagacgcgcatacggttagaggccgctgcttaggtggtggctcggcgagctcctagctggggtctaaagcgaaacgagggaatgcccgttgattcactccatcgctcgtcccactatcgtcttgtccccctggttggcttgttaaccacaatgttgtccactccgtttggattgcttacaatttttaaagggtccatagttcatttggccttctttctttcggatgaaacaggtaacactttagaacctggag

SEQ ID NO: 418455 - DNA, 1121 bp, Homo Sapiens
  misc_feature (830)..(830): n is a, c, g, or t
  misc_feature (882)..(882): n is a, c, g, or t
agcggagttcctgcgccggagggcgagacaccctggaagagcgcgagtgcgagatccctagtcagtgtaccatccctctgatacgacttaccggatcggccttgtgtttccccagagaatccgctggaatctaggcggctgctggacggcgttcaaaagagtgttggagggcgacatatgagatcgaaacagctaggcaatcgttggatgcattctgcctaacactgtctgtgtgacacttaagggatgcgtctgccatcgatgcccctcttgcgatgctccgggtcgaggcgtgattgtgccacacgcacttgctgccccgaacatagccggacctacctattctcaactttatacgcaggccggccttatcagtccgggcaatcagaagtgtggcctccacttctgacgcacatgcgctactacgtggtggaccctcggggtaaaccgtgctgtggttgaatctagaatgctgggatggacatggcagatacgcaagtggccgacatagactgtgcggagttacgcacacttttatagacctttcagtacagtcgggccagtcgtagagcggtgttgaggcatgtattgtatgtagacctagctgtggtatgccacctggggtcatatcacgctcccatcgtttgcaatctcctctggtctataccatatttgcggtcccatctatgtcacccttcctttctccaactggcacatgtggcttcaagtgggtattgcccttgcttccgttgttccctccaaattctttccaactcccaagaagtcctctcgggtccccatggtgcgcccctcgacttgtgtcccaaccnttggcttgttggcggatccctatcgtaatcccttcactgagtggttccatanagaattcgcactgcatcccggtgataccaacccaatagggtttggttttgaccccctcaccgcgaatggtggctgggtcgggtggtgctcagtgagggccctgtgcacttgttcggaggttctcttcttcccctttccggtggtggttgagggactttggaacccccattaatagtttttgggctttgtgtcacaccacacactccttggaggttgccgcggcgggaacgggggccctg

SEQ ID NO: 418456 - DNA, 1194 bp, Homo Sapiens
  misc_feature (448)..(448): n is a, c, g, or t
agcggaattagaataccctaaggtgacgttgggacagggtcgtactgtgacgtttaatctgtgtccaatgcatctctttctcttaagctgttttctgccccatcctgaacgattcctgaggagtgcggatgatctgggattgcatgaatcgtcgagtaagctcatccctctgctcgccagcacttctgagcatttgggtctaccttgtctttcgctggagcgattcttcatccctcatggagtcctatgtgtatgttttactggccggaatgcatgagtctgcaacgtatagttagttcatgtatgagtatagtgaatgaacgaatggctgagagacagtcggtatcgtacgcgtaaggcggactgacaaagggtggacgtactgatgcgatataattcgattccagaaactagtggtatcccgatccgtatagcgtagtacacaaancgcacatgtcaagaagttgtcaaatcaagcaagattagagacgaggaatgtattgatgcgaccctttgtcagcgaattgccctgtgtctcgtggtgtccataacacatatcgtgtcctctgcaccgtggggaactgaacggggagtgtcaatgtgttgtccccatatccatattttgaacaaagtcccttcagtatatgtcatagtatctacatatcgggcttgggtaaaggtaatccggcgtcgtggtaaataccgcttttaatgaccaaggcataaacagatttaaaaaaggtttttccaaaggggtacccaaagaccacccataatttccaagaaggaaaaaaacggcactgtgcacaaaggaacgacgcggaaggggattgcgcaggtggctctatctatgtcgaggcgcgttgttggaactcccttttctgaaaacagagggggccagggagcgctcccttgggttgctaacccaccacccgttggttatttggggtatggcccaccgcaatgttgtcaaaatcatccgccgtgtgggtgaaagaacctttctcacggaaaacgcacttggaaagagcggacagataaaattccacacagcccgaaggaacggaaaaaacgcaggtgggttttgcgacacccccccgattatatggagagcaagtttagatatgatggtttcgttcgcgcggaaagagggaaaattatagaacctcacaagactccccgttatattcccag

SEQ ID NO: 418457 - DNA, 1080 bp, Homo Sapiens
agcggagggacggacgggctcttacgtcctgtatgtggcgctgcttgccgcaccgtagtgcggattgttcgctgctggtttagcagcgctgcgcaaagagcaggcgagaccggttccgcacttgttatcagtcgggatccccagcaaggatgaagctgcatgcctagagagtctgaccgctgcatggggttgtacgctgttcaggcttcccatgactgagaatcttgggatctagtcaactttgtcgacgagcacgctagacttgtggtcctcgaacgagacgaagacaacaatcctttgagaccgtgattggggtgcacgcgaataggataagaatccctacatggcccgtcgttggtggctagcgagagtcacaaagtcaagtatctcagttccgaactgcggaagaatggaccatcaaaattacctgaagacacgtgttacgtctcgccatatctagactgaacgtgttggtaccacgattggattatcaagagacagaattactcgggcagaacatgggtggagcattgggcattcaagttgaggggtacaaaccatgcacatgatgtaggtaggtaacgagtgatgtggtgtgcatgtgcagatgactagatgtgatctgtaccgtatgcactgatttcggacttggattccttgaataaggttccatgattgctactttcgctggacaaacagttcggaaactttcccatgtaggttcacgaacggaaataggaccagtacattcggggccattggaacagggggacctgtcccaaaacgtcttgacttggaagtcaatccccctgaagtggacaggaaggcccaagggatcccaccaatgatcattactgaaatcaggtatttgcacaggcatggctacatgtacttgcaaaagttgaacggttaaggattaccagtcccaaaagggcctccagtaaacattcccaacacggccttcagcctgggtatttataccggaaggcctgtagagggttaagactgacacaagaggagactggcttattaaagtcagaacctttgaatgaactaggtctgagaatggcccatttaaat

SEQ ID NO: 418458 - DNA, 927 bp, Homo Sapiens
agcgggcgcattcgtccggcccactgcagccgctgaacaggaccatcgaggactcctcaggtctcaagggcatcaagactcgagcgcggggacgccgtgtcctgtcacgagcgggatcgctctcggcagggatcccctgtcaagttcgcgcctttacggagcctgagtagttcggtccggcttgtcctttaccatgctctgtgtacccgtggcgccgctatacggttgtgcgctcgatcactgggtacgtcgcgatcttgcatgctgaggtctcgtgagcgccgtcttccgcattatgatagggggcgaatatcgctgcggtctagagcagacccaacaagtctagaacgtcgcatttggtcttggggtaaaaagcaaggtagattgactcgtagagcatccgtggagtccggtagaccatattgtctgtttggaatgcgacgcggcggaatgagattcgaagtgaacgctcatggtactattagcggttcattggagaacgatgacgcaaatgaggagacggcatgaacagataggtctcatccacagaggaaaatagatctaacaatgagacagagcatgaaagagtaagggaagagaccggtttttgaggcggattatactaggtgaaatacaccacaaaaaagagcgaacagcaaggttttacgcccctaaagccgaaagattccatcacaccaatgaagattcccagtaggactcattttccagccctatgacgcacatggaacattggaagagcttgcaaaaagactgaatgaagcaaagcatagcgcaaaggacaaacggggaatagacttccccagtacacaccactagggataacaacggaacctaggagccgcgttaacggacgtgagtcctgaagcagtcttggaaaattcaccgacacgaaaagagcctactagg

SEQ ID NO: 418459 - DNA, 243 bp, Homo Sapiens
  misc_feature (41)..(60): n is a, c, g, or t
agcggggggacagagtagatagggacccttccctggggcannnnnnnnnnnnnnnnnnnnggcaaggaggaggggtgggggtggtggtgaaaaaagggcttcatgcagcaagttttttttgaaaaactgcgtgtgccggaccctgtgctaggtgttgcaacagatggagtccctgctttaatggagcgtaagagtctagaggaacacggtactaaagaactccagataatggcgccgggccgc

SEQ ID NO: 418460 - DNA, 1094 bp, Homo Sapiens
  misc_feature (198)..(198): n is a, c, g, or t
  misc_feature (379)..(379): n is a, c, g, or t
  misc_feature (878)..(887): n is a, c, g, or t
  misc_feature (921)..(929): n is a, c, g, or t
agcggtctttttggcgaagtgtgctcgtgggttgtctgctatgagagcttggtaatggcccgactgattgaggtagaggccgtggagcagtgagatcccaacggtccttggcactcgccttgtgcgcaattaccccgcgccggtgcgtgcctccgtcgcggcctaggtcttggggtcgcgaggagtggctggtccccnagtgctagatgtcgtgatctagctcgttgcgacactgagtaggtctctacgtgtctcttgcgttgtagacctgatcgcgtagctcgatggcagtggtgaacatcggtttagcagagcccaccacagacgcctcctgctgtgacctcagaatacacaacatgcagtctgttacagacagctntcgatccgtcaccgactggttaatctcctttgagtaattcacgaactggaacctctgggaagaactccaaggcccagggaacatatgccacctttccagccaggagaattctgcaacttaaatcgtagaatgatgcgtcctcagggatattgggaagtcgtcccccctcatgggacgaagaacgctgtatgctcagtgcgctgtgcgaatgcgtgtacgctcgacgttgaattgccctgctacaactttgaccccgtgtcaggagcgtggaggagcaaggtgggagcagccctattgtccgtggtttcctcctcttcccttggtcttaattgtgccatgttcgtcttgcagcgacaaattattactaaccggccccttggcttgcctggggggccattagtcccttaccggaaagccttttacctatgctttttgccctcgcttatctttgatccctgtgttgttgggaaagtcagtcctggatccaccgctttatgtnnnnnnnnnnaaaaaaggaattgtcgcctgccatccaatttttnnnnnnnnnccccccttgcgccaggcctccgatttgggccttccttaattttggccccttatttcttttggtcctttccgtcattttcccagcgcctatctgtgggcttttgttactcccacaaaattgatcttcccctagtataacattgtccactttctcttacccggtgga

SEQ ID NO: 418461 - DNA, 434 bp, Homo Sapiens
agcgggaaatatgatcgattataaagcaaagatggaaaaagaaaagaactcagcaatgatgcagaataatctgtatggcctctaccaatgtctcaaagtgtaaaatatggagaacttgtcatcagaatctcctgagatattagttcaaatgcagaccccctatttcagatctatggaatctgaacctgtaaacgtggggctgcaaaactcatttttaaaaaaatcctgtttgagacttgcagctagagagaaagatttacaattacatttcatctaacaaatccagggaaaaacaattactttgatctgaaataacactcagctttacattcttgataggagcctataatattatacaaactgagtagaagctcacatgttcacatcacattttgtaaaataaacttacttacttcaaagtagaataaatatat

SEQ ID NO: 418462 - DNA, 615 bp, Homo Sapiens
  misc_feature (194)..(252): n is a, c, g, or t
agcgtgggaggccccgggccatggtgttccgcacgttctaaaccgcctgtccccgaggaagtcgggcagggtcgggccggactcagcgccgctggcgggagcgccgtccgccccgaggaccctgcgggcccggaagccgagacagggccgcccacgtcagcgcctggcgcgggcccgaacgtaaatggcgctcnnnnnnnnnnnnnnnnnnnnnnnnnnnnnnnnnnnnnnnnnnnnnnnnnnnnnnnnnnnctcccgcgctcgcttctcgccccggggccttggcccgtgcgcctccgaggctggccacggggacaccgaggcccggcggagcccaccatcgaccccacaaaccagaagccctggatgtgaccggtccgagagcccggcggaacaatggggaaccccgcagaggcagacagcggcgccttgccccccgaagaaccacggcattgggaagcacgggaaacttgatggcaggacctcccgtatcccgacgaggataccctgactgtaattgtccgcttggtgggaccgtgagggaccgcggtccctgggggatagcccctgaagaaagccgtacggtgctcccccttttcgacggcccggggaaag

SEQ ID NO: 418463 - DNA, 557 bp, Homo Sapiens
catatacactcaaataattagcagtttcaccttatttattttttaagttaataatttgtaacttcatgtgggtggaaaaagagacattacaatggagggtagacttaggaaagatttagaatagagccttttccccccgaacaataaagcagtgacataaagacatggaaaataatatatacaaacctggaatgaaaaagagaaaacatgaataacaggcttacatgagtgataaattgcattgtacttcgatgaagaaaatctagagatataatttgctgaaatcttcataaaaatgcaaaaatatatcttctttagcacaaattatctccagaatcacctatgtactattctccgagaaacaaagcagaatagaatgtctgtttgacagatttccccatgagacagttaatgttctcggctaagacatttcaattatagccataccacagtaaatgctgaattcctcagttaaacaaggatagactggggttttaccagatgtgtggtgagtacgatagacactgattgacgaaacacgcaactgtaaaaacccg

SEQ ID NO: 418464 - DNA, 367 bp, Homo Sapiens
cgagagcacaagcaagcacattggcagggaacactggaggcaacactactgcacactacaagctactgcgcgctcttagggcttaactaaaacaaacacagtgaacagcacaagaggaaccacacacaagaaaaacgtgtctcccaggcgcgcgggacccccggcgcccaatagaggcgccctagaactccccttccgaagggagggacccccgatatacacacccactttgtgcgaatccccttttagagtgaaacggcgttaaattaccaaacatctttgggccttcaaacacctgtggtacctattacgctgttaccccccgtcagtctaaccatgtggtaatccggctcacaaaattttgcca

SEQ ID NO: 418465 - DNA, 1179 bp, Homo Sapiens
  misc_feature (362)..(362): n is a, c, g, or t
agcggaattcactgtgtgtcttcacgcccggccgcgtcacaccaaccggccgcctcagcctctaccggcgaccgcacagtatgaggtgcaagttatcttaccgtctccccatgaagaacggaacgacagcccttacgcgctacctcgacggaccagaaccatgcaggtgtctgcccctaacaaccaggagcatccattgagaagtactgtaacagatgatacactttcgcaattcgcttcctcggcgtatcacggagagaacctattgtcctcgtcttaaaaggtcctatagctatccgtgacggcaccgagcgttgagtacctggtgggggttgtggaggagccatcgcgtgttctgcgcncggtacccagacgttgtaggtttcagtatccccgcacgagaccctgtacctagtagtcactgcaacagtttacttgctcctcacttgggtgccccgcttcgcggagccactcgcgggcgcgtcaatgccgcgttcctatccgttgtgccctagggtcctacgctccttatcaggactagttagtgtagaacgtcccttgatacaaaatctggcgaccacatgggatcggagggaagattgcgtcgcgttcccatgcgcttcgtctcagccatccgccaccgtgggtatgccttgggggacttctcgccaacgaatgccgaaggcgagaattccatagtgattgcaccgtccgccatgttatctacctggtggctaccaatgacaccctaccgacgtatttggggcgctcggttcgtgcctgtgtactggtgtcgcccatgcgttccccatccttcccgggtacctacggacaccgggtacctgcacaccgcatggagagtgtgtaggacgtgggtaggatttgtacatggttgcatctctccagagttgctttcctaaggcgtggtccgcggggaggcaacccccttccggtgggttctcttacccccatttcctctttcgccccccgttcttccggttccgcctccggattatttaggttagattgcgttgttcaacgccctcttaaaaccttgacttttttgtggcgccaaattcacaaccatcccttttcggtaagccggtttaggcactcgcaatgtttgttgcttcctaacggagtttgctccagtgaatgccaggcggtgggttgggaccc

SEQ ID NO: 418466 - DNA, 1318 bp, Homo Sapiens
agcgggggacgagccgatcgccgttagcagggagcgggcggtcgccgctccgggccggggtcccgagggcgagcagatcctcacgaatggccctatgggtgctgcgatcgcgacgtgctgggcgtcctgtggcccatggtcagccgcagcggtgggctactgcgatgactgctccaggtgcctggaccctgccatcttaatgactccaggtcttcagcatccatccaccgtggttcaagtgccccgggttgccgtctgtagcccggatgctccaccaggggggcgcccaatggtgcccgcgcctggggctccgcgcgatgcatttggtgcatgcccctcggacgattgcgcactccggcacttgtgtcccccgacgcggacgatgggacgtcccggccctgccaaggtcggaggcaagactgccctcgcgcgggctcgagggtaggatccgctgtgacgtagaaggtcgggggtcccttggaccgggttgctgggccggacgcgcctgcggcgctccggaccccgtgccggtggccggggagcggaggcggacgggagttggcttcgatcgatcgtagttcccctccctccttcgcgtggggttgccccgggcgatgcttgcgttcccccttggggttcgctcgagcgcgccttttgccccatgaagcaccactgtcactatgaacgcgccgactcttgccacacgagcgtcacaatctgatgcgcaatccggaacactcccaattcgtatgtccgagagcaaaagccgtggcggtagtgggaccgactcccccccacttgggcagggcgcataccgttgtccaaactcgacagggctgcccacacaatgcaaaatgccgaagacaaatcccgggtggagagcaccttgggcgaggaaccttcctgtgaattcattcctttggcgaccaagcaaagtaggttcctatttacgaccccctggatggcagagaaacgagcgcattggaactggcggtttgacgaagtatagtgtccccccgcaatccgcggcgaagagacaattttggccgatcccccttgtgaagaagggcgcagacggaggagattggcacacgagcgggagaagagagcctatctcttgttcgcactgtagtcccgctcgatatcgcaattgagcctagcaatatagtcccggacaagagcgcttttccttgcagttagcaatattgtgctttctactcaacgcaagtgtattggatggaccaaccttcggaagagacgtggtccaaccaatagaggaaacatctgtgtacattttggcccgcctttgtaacccacc

SEQ ID NO: 418467 - DNA, 1394 bp, Homo Sapiens
  misc_feature (203)..(203): n is a, c, g, or t
  misc_feature (1032)..(1040): n is a, c, g, or t
agcggatcgcacgtctgcctgtacacgattgcctccgtgattactccctcctaccttcttcccaattcttgtctgacgtctcccttcgaaggatgagtacctctggaaaaactcgactcccgtgaccaatagctgtctgtgcgtaccgtttcatgcctgtcccagcgaagctccatacaagaaatttcgaatgggcactgcanaatgcagcgcatccatgtccaagatcgcagactagactaggcaaccctatctagacccctgacaggaaggtaattgaagaaaggtagctgtcctaatcgaacgtgctctcgatgcagtggtcgcgtagaatggacgcgccttgatggactagcacataccagaaggataggtagccagcatcgcctcgacaagtggattacaccggggtctacccttccgattgctggcacgccacgttgtggcgactagtagccacagtatttagcttcaggaaagaccacgatgagttgaccctcgtagttgaacgaagtagtgactagagttgtgtccccacttctacaccaccttgtcttaatcccatatggataagccgcaataatggaacaccatgttgaaacaatacgcacacagtgtcgagaaccaaagtcttgctacaaactacccaacccttgaggacccaaagactaattctgcaaaagtggggttggtaaactctgtcaaggccactccggagagccacgtggaattcgatttgcataccgttgtgtgggcgcccagcgtttttccggacacgttaaagagtgcaaggccccctctttttacaacatacgagcgctttttcccccttttgtcccgttatattatttgccgcgtccgaaaatatgggacaacggttgtagcacgcggttatagcacgggaaaaacgcgcaacatttgttctgccttgaaagacaattttgcccaagggtaacgccgcaacaatgcataacactttgtgttccgcaaaaggtagactacaaacgggggggaggaaacctcaacattgtnnnnnnnnntatttgtagaacccagggcgacgaggccgaatttttctccccccaaggaaacatttcccgctttaaagaaaaaaggccttttacaatatcctttaaaaacccttaatgtgtggcgcgaaattgggtttgggcggttggccctttatatatgtggaagaggtttggaacgtgcgacaacgggcaaagacattacccgaagcaccaggaacccaactttggtttgacagcaacattggacctataaccaaagcaccacactgttggcttaacgcaggcaagacggcaaaaattttccacactttatacaattgtaactttacttttttccccttgggagggcggcgataaaacaag

SEQ ID NO: 418468 - DNA, 677 bp, Homo Sapiens
agcggagtgggccgtgacgcggaactgctgtgcatgtcctaggcgggttcgctcgctcccgtgagccgggctatttcccggtgctggcaggagcggcgaagagcggcatcgactggcccttacggtcccaggcctcgctgccgcgcggtccgttcccccgtctttggtcgcccaagcatggggtcgtgatggtacgcgtgaggcagcacgcacgaggcgagcgcctcgatcgagcgtatgcaggtgctggtctgctgtgtcgtctcgtgcatagctgcttctctgtgcccctgcttgcttgctctcacttctcgcgaattctcggggagctcatggtggtagtaacggggcaggccgtgcgtaagcggcgtggtgctgcggatccgaacaaggacagactccccgtttcgccgtgcgcgctcgtcggccatgcgtccaggacgttccctagacctctgatcctctgcttcgtacagggcctggcccacggaggacagcgaacggtcgctgcgagctcgagtgacttcccacataggtcattgcggtcgtccgacccttccctctgttggcgggccttcagctgcgtccagcccacggggtctccaggatttggccacccatgactggtggccttagggacggcgctctttgagcgtttcaattcctgctcaattgga

SEQ ID NO: 418469 - DNA, 1111 bp, Homo Sapiens
agcggaccttgacctccacttgcatgtctctggatgatctcatcagaccagttgtccgaatggtcctggaatgttgtctcgcgtactagcatagctagcactcgtcaacgatgcgtccatgcacgctgcaatcgggtcgtcggtagagccatgaaggcagctttcctcgtgtccgcattagcccccgttccatggcctgtgattcacccatcgtcatggccattccatggtgcctatttcagtgtctcgtccttgtactcggccactcgtgttcgcgcaggttccatcggtgtgctcattcccacggtgatgcattgcgaggtggcttggatgtgacgggccgtagatcgcgacttggtgtcttggtacatcctgtcctccttgttgtttgaggctttgattgcgggccattcggttgcgtcgctatcggctgttagacttgccctcgtcgtacggggctccttccggggattgcctttcccgatgcaacgtggtttctgtttgacgtgctacccaaccaagtcaacgtaggcgctgcacagcttgcgtcaagtaggtgacagatcgcgcgatacgtcgaaggatggtgtttggcctttaagagagcttcgtgatatggaatagccatagagtggcgcgtgttaaggcacaaactgtttcatcttggggccaacaacaccaatttgtggccagggcgcaatagaaggggactttgcgtagaccgatacccactacgttgggtagtgaatactgggatttttccatgtacagggaccacttgtacagggtaaaagtttatcttgtcctagatgtttcagtttcctgattggttcccatgaggtttccaacaaaacgcgcaagtaccttggcgtaccctgtccttaacgcattccttgctgggccacagatgaagaattgggtccccagggcagtttactttgtggtgaacttccaagggtttgaaaagcgagttgaggcacctttgttgtgacctgtaaagaattagcgttggtacacaagaaggtccctagcgaacgtgaagagttcttgaggccattaaagcggtcccctgtgtactcgccttgagtggtgatagggcaggggggtcggc

SEQ ID NO: 418470 - DNA, 808 bp, Homo Sapiens
agcggacggtgctgtgcttctgctccagatggtcgactcccttcgctcacgccgaccggctcttgcttacagtcatcccactcggatagatctaccatttatacctgtcgtaagaacacagtcctgcaaatcagactggcatgactcataggtggtagacgtattggcaacttgatgtgtaaatggctctgatgctgactctaagtgccactatttaccgaaccatttgttacggtaggcattcgtgcgcaattgggactgcatgaactgtgcagatgattgaactacttcgtaacctcctactcacaatgatgaaattgccagctgaatattgaaataaaggctcatctcgaggtgtgtggactaccctatcacatgatgagtgcaccctcctccgtcctgattgaatagatgcagcatacaaacgaataccgatgccgatgaattagtgcccctgttggaaggagcagcgctagataatacttccctgaaccacgttagaacccattggcgaatacgagcttattattgtcgcacaactccagtatacctgggactaggcagataccttaacctgaattgatcgactccaacagggatatttggtcgttgaagttgttttcaccattgtaaacgtaacatgctatggtctccaattgagtagaatacataggggtgagaattcctccgccgtagaagcgcagcaattcagccaggggaactcttgtctaccttcacttctaagagaactcgaactcttacgtggcgtagcgcaggaacgctcagagtcttaccaagatgagaaccg

SEQ ID NO: 418471 - DNA, 863 bp, Homo Sapiens
agcggagtgactctagatagcatgagcaaatccggggttagagggaaaaaagctcctgggccaggtgctgacggtcgccgccgtcggtggactcagaccgcctagacctgccaatctctgtcagccctgtccagtcagctgattcgtgtgccctgtcgttcccggatcagatcataagccacttgtctggcttgcacctgctacatacatgctaagttacgctgaaagacgcccttctacagcgtgttctttcagggaatgtcctgtggtcaactttgctgcgagacactagtcctggttactgtgtagaagctggtgcggcctatgtgtacctctatgcaagtaacgtaggatgacggaaatgactctcgaaggaatacattcgtggccttccacgctctagcgacgcttttagttattttcggcccgacttggcaccaacctacggaaagttaattccaggcgttcgttttcgttgagttgccaggaaccccaagattgtgggctgtagagttttttcttgataggatttacctaattataaatttgaccgccaacattcacttcgattccatttcttgtcgggtgatggcgaagagtgggtttaagcacccctttttgacagatagacttgtaattcgctaggaccgtgagggcccttttaaccaaattgtccagcaggacatttgcacgcaaacgggtgcaagtacgctattccctttccctgccgtgaaaatccgaatgtaagctttgtgacaatgagttcatttttttcccggaaatttattaacccccttttaccaggccaaggggaacaatggtaactgccacagggtggaattttccctgtggaaattctgcca

SEQ ID NO: 418472 - DNA, 1241 bp, Homo Sapiens
  misc_feature (196)..(196): n is a, c, g, or t
agcggggttcgcttcttccgcctgtccagaggaacagcccctgtctcctgtctggggtcgccctgccgcagtcgcacttccgacgtcccatcacctcggtatagtgataggtaaaggactaactcaagggtgaatctggtcgtcagtatatggagaacgccttctgcgcactccacgcgtactcgtgtatgttacnctcatgttatcagtgaagcatgatcagctccttgaacagtcaatctaggagctccattcgattgcatccttaacatagacttgtcttatacatgtagtcccaaatactagatatccatccgttgtcccagatatcctacttgggcgagccgttgctaacgagcctaggacgtaaaccagagcgcaacgacgtatgcttcgatccaatagtggcgtagacactactcctacttcaactctactcatttcccccatgggtaaactgtatgcattcaacgctcccaaaagattcccacaaggtggcgagtggccagaattgacatgccaccgaccgttggacgttaactattcagatgggaaggttccccaatctggggcctgttccttttcgtaactaaacccatgtagaggatgagaaagagacgccgagttcggcctgccctatcaggcaaagtggggagagcaaggcacgacttcacaagggcgaggtgccctcggatcgaatctgtgggcacctctctgtccatagctctagcatgggctccctcgctaactcggtttccaggtccaattgggttggtggcttgaaaacgcatatttagggagcacgattatgtggacgaaacaccaagtctcttatctgtatgccaatcccgtccacggctattggcccttttccttgtctaagtccatcaccttaactcgtcactttttgggccctcaccactcctgtggggccttgatcggtgtccagtcccctatgctacatagcttggtgggcgtagttgcccgttaggagaaatcgtgaagcttcctacttggtggtcacccagcgtcccaggtggccccccttcatcctttggaccgaggcaccaacgtagaaggcatcgtgtgttaggcattcggttgccgcctccctgtggcggatacacccgttggtggcgtccgttgtatgagcgacccgcaggcggcggtgacctggcgcaagtcattggtattgcgccccccctttgcacctttgtgtccttagtgttggcgcattgccg

SEQ ID NO: 418473 - DNA, 1222 bp, Homo Sapiens
  misc_feature (470)..(470): n is a, c, g, or t
agcggagtctgttcagcagtcccgggccgtgcctgtcgcagtccagatccgtagtcgcggatccgcttaggctccaggatagcgctggaggaaaacccaggagcctcaggacgcggtccgactgtcattgatcgatggacggtgtctcactcttgcgccgtcccccccgttggtatatcttcccccacggtgcatgtccctgtgcgtcggtccgtaccgttgccggcatgtctcacctgaggaccctctgttccgtgcggcacgacgctcacgtttctattgttcatcctgatgtcccttggtgatcaatagattccctggctaattcgtatcatggtgtgctatccgcattactgccagatattgactctaagaagcgtacattggggatatagtacccatgcttgttattttaacccctattagttagcctgatagccaagacagacgagtctcacatgtctttaatntcattccggtgggcaattgcttgtcaacttttgaggagctagaactcactaggcttaccatatagaatcggttacaccttctcgtggtgcatccatcccgttacagatccttggttccctcggtatcgcccgctctacactaggacggggcgtctttgcagcgcgcctcgggtagcatcgcttccttctactcatcgagtgcgttgcagcgctctactgggatggttcccgcgtgttttgcagtaacctaaggctttgagtctatagggggttaaggcctttgagggacaccacggtaataccttcggtgggacttcaagcgcgagatattctggtttgacctcacctttaaatcgaagggcgatttttgccctgccttgctggttgggaaccgatccatccgagaacgaaggggggacatatccaataacggaacccattccagtagggagattctgagtaaacaccttaaaaggttgaagaacccttacgtcgtgtgttctccgttgttggtatcgaagcaaaatacaagtcttataaactaccccttagacatatctcttgtaagaacagattaaccgccagacctaatataattatggcaaggcgctgacttttcgtggccttgcgggaaagacgcgcatatatggaaattttaaacaaggggcattaaacttttgccatggaaccagatatggttccctttttccccagcggtggttttttactacgtggccattttctccgttcat

SEQ ID NO: 418474 - DNA, 568 bp, Homo Sapiens
agcggttgattggtctcaagagaagaaagctgggaaaaaatggaatgcataagccaaatcttttatatttagtggaaggttatttcaaaatacttactctactaatgccatgttgcaattcacagaatatgccactaatgcattgccattagcaaaataagataagccatgaagatacaccatgaagataaatcataaatgctagttagtactttggactaacatttgaaaatgttttcaaatgtaatacaatataaatgttcttggttgggttacagattctgtagttgctctaagccttatttcactatatgttaagaatcttttggtgattaagaattcataaatcaaagaatcatacctcagctgactatgtcagcagaagtctgagtcgggaacagattctaataattattttaaatgtaattgaaatggctagaattccaagatataacacatgcctataaatgccaccttttataattcttgagctttatatgtcattatgaaaagatttaaataatttcacattttcttatacttccatagaggatatatgtgctaaatg

SEQ ID NO: 418475 - DNA, 104 bp, Homo Sapiens
attcttataatagctgtcagtcgaacctggggaaggaattcaggcgtggaaaaggagctcggaggacgcagtcacgtggatccatcgtggaagcatgaacgtta

SEQ ID NO: 418476 - DNA, 608 bp, Homo Sapiens
agcggggttgcatcttcatgaagatctttcaccacaaactccaccagatgctcagggaagactgtggagtcctgacaaagatgccaggggcatagaaaggtgatgcaaaaatcaacctggatccctctgccccattttcccatcacaataaagttgtcatctgctggggggtaagatgggcaacagaactgtcttgcagctgagggaagggaagagaataaagactgtcagccctggaggaggggtgagaatacatatcagatccaaacctccagctggagaagaggcatggttcttgtggaggccctgagacccagggatacaagctgtaagaccaagggataatcaggacatcagaactccgtccatcccagggcagcaaataagcatcagttaaaagtaatattgaaacattactaggaaacatgcatgagacaggctctccctgaggatcagggaaaagggatacgtaaagctgaagatggggcagactttgagaagaaacctctagaaactcagactccataccaaacccaaggtatgctaggagagtttggggagagcggagcgggacggaaatgagcggaccacggggcgggacgcagagc

SEQ ID NO: 418477 - DNA, 414 bp, Homo Sapiens
agccggaggctcctcgcgtccgggagcagcatctgtgcgggctagcttaagcacacggcgaaagacgcgtctcagttacgggacgcttaagaagcacccttctgtccgtggtcgggcgcttcaggcgcacgtgatcggcgggtgctctgtgacggctctgcgtggtgagatactgagtctagtgcggagcgtccgggccagacgtccatgcccaaagcacaagaaaaagtgcgagggaaagtctcatccttagtagaaaaggtatacgagagaggccaacgagaagggcggtcgctggggttcacttggtggaatgaggttcgatcattgacccagaagaattcagaagatgtgtgacttgaagcttatcatcgcagtgactggcgatggttctaacgatcggacagccggagg

SEQ ID NO: 418478 - DNA, 683 bp, Homo Sapiens
agcgggattggatgaaaagtgaaaagacaaagatttagccattggaactcagttttatcttggaaataatagcatgtttacggccagatccgtccagctaatgtttatctacctagttaagtaagaaatgtgtttacttacacttaagaaagctgaacactagtagaaataatagtcaaacttcagaaagtaattgagtaagagttgagaaattggagacacctagaatggactataacaaccttggagataatgggaaggaagtaacgtactttcaagattaagtctgataaggcagagaacccagcatggagcattaagaggaagaaaaatagtagaggaaagaagggctaagattaaaaacagagataataagcttttgaaatgaaaacactttattctttaagacagactgaggaaaaagggtataaaatatgaaatgaaaaaggaataagagaactagggataggactgttcatttgagcacagtagaatggttccaaataactaacatgcagaatgaaacagatcaaaaagataaaaattaccaggaaggaacctgcataaactaggaagggaaaatgttaatttgtactagaaacctctcaaggcaggaaactgatgaaactctagcaacgctaggcagcacatgaagaggaaacaaaaagcagaagaaatgaaca

SEQ ID NO: 418479 - DNA, 721 bp, Homo Sapiens
aaaaacagaagaaacaagctcgggcaaggggccaaggagggctacacataaagtttcgttaaaaacgcgggccacaatgggacccgggacacagattaacaaaaagagagatccacggtgcctctaagtcacaacaattgtggaagaagtgttggaacagatctctctataagctagtacaacacaatcaagactcgtggaagtgtgtttagagaatgttcttatacagaagggacattccaaatcacacggtatagcatcaatgtggagtgacactctatcacacggagagaagtgcgagatgtgcaaagaaggcgcctctcacaacagcccatgtggggtagaaatcacgcaaaaagagaggcgtaggggagaaaatctacaaggggagtgcaaggggatcaacaacaaaacacacacggggccacatgtgggggaccaaacaagggacactgttcacaaaaacagcgtggggaaacaagcggggcgtagtggagagtgatgcagtatcttctggggcgatcttctcttttaaaagggttatattgtgggcaccttattttgatgttccggtggaggagacacccctcctttcaaatatgtacaagaaagacgatcttcaacgacaacataaatttggggagatacttacacagcgcttttaacaagttcccttgtgttttcataaggacccatatagtggtatcaacaaagcgtaaca

SEQ ID NO: 418480 - DNA, 742 bp, Homo Sapiens
agcggactggtcgttcaatctgtgtagtcgatcctatcaagtatgtatcatggtacaatctaccgtcacttcaagtaacatatactgggtattcctatgttaactgatacttatttatgatcccgaggaatatccgacaggtatctatcttcaatgtgcctacagagaaatactgacgagtcaaggtgaaggctcgtgagaagaaccacgtcataagttgagtattactttaagcattatcatagaatatctgcggatgagctagaacgtactcatcaagacctgttccctcatcctgatatatggcttgtcgactcatctacttgggccgggagggcgtagcatagcgaaccatctctgtactattcgactttacccgatgactggtcatgttgggtgcaaatagatcgcagtgatatttgatattattgctaaatatgtctataggagtaatagctagtttgagagtggtagtaaaaagtataattgtagagagttcttaacaccgttatcactgtcatcttgattacggttgaagtcattcttgattacttagttgggatacttatcattactcctgtcagggtgctggacaagagtgatatgaggacctggaaacttaagatggaacgaccgtctgggtagagaggaattgtgtacaggacgcaccatattctaagttgaagaccagtcttgccgatcctagtggcaaaactcaagtcatcatgaattcctagcacta

SEQ ID NO: 418481 - DNA, 1119 bp, Homo Sapiens
  misc_feature (629)..(629): n is a, c, g, or t
agcggggtgctggcgcgtggagcctcgcgcggcgcgtggtggtggtccgctccctcgtgtgcgcatgcctgtcgcgcggggtgccgtgaggctggctgtgcgatcgcctttctctcgcccgcgcggctctgcacgtgggcattggttccatcggcaggtgaccccacttcgcttgaggaatcagctaggagtaggccgtggaaggttggcgaacacagcatatgccgtattcgcaagaataactgccaccggagctcgcgcgtctctcgagctcgcattgtggctggtacaccagggtgctccatgggcaactgcaagatcgctggaacttctggttcaagccgggactctgggttggggttcctccctttttgacgtattccacctcgatgtgcgtccacggtttccttctagcgtatcaaatcggctggccctttcgtctccccagcatgtctctctcgtgtccagagggcgggatcctctgcatcgctgtcggtgggattttggagaacatccgggcgccgccaaaggtgcgctggccccttccttggtagttcgtggaccagtctttgttcaccggagcgaattcggggacacaaacaaggagtaggacagcgactcgtggagtntctctctatatgggtcgatcgcggtctctgactggaggctgcgggaaagaacgattactatcccgttttctctgtcgctctgccattcgaattgggacccgataatgtcctggcgtccatgaggccgctaggccaaatcggttttagatcttcgtccctaggggtggtttaatttttaaggggtcacacacctaagggttcccaacgacacgactctccttaaatggaattggcttttaaatcaacgccaacggaataccccaatcgtgttcggggcagttaattaaacaacgtggaatataaaaggtttggcaagctttagggtttataactttggcgggagataacacatttcttggttttaggcattaggttatcaggggcaaaatgtggttacttttggtacgagcaacaacttatacaaggttaggttaaagaaaatctttagttcaaatattcaagaatagttattttaagccaaagtaaggta

SEQ ID NO: 418482 - DNA, 747 bp, Homo Sapiens
agcgtgcgtgtgcctcctcccagcgggtgtggatgtgtgcccgtagccgctaccgtggcgtgcctggttcgtcctctctgtgtagatgatcgcccctagagttaggcagatgcaccacttggaatctcggtggaggtgagcagtacagagtgtcgacgacccctgacctcgtatatcattacataggcggattgtctagcacatgtctagcacatggagagacccattgccacgccaaggggcatcgggaatagtctagcgttgccacgaagaccgatcgtaactagcccaggctatgtgactggagaataaaagcttggagcgagagaatggaggagaggtttgagtgcaccgaggcttggaccgaggagttggggactgtttttgggcacccttgtattttgtaaaggtagactcgcattgtagcttggccaccttggtatggccctggtatgaactgtgggccgagagggtacgcgagtccatggaccaggggacatcacggcgggtcctaggggtaactcgccagaagcaatacatggggggtttcccgcatctttcgaatcacactttccctgaggggccctcagacccaacctttactgtttgattgagtgactcccaagtctgtggtgtctaaagtctccgacttgttaaacatttttaccattggaagcctccttgcgaggctctgtcgcgccccgcatagttggcccagtcaatgggcaagatttgaactttaaccca

SEQ ID NO: 418483 - DNA, 1037 bp, Homo Sapiens
  misc_feature (205)..(205): n is a, c, g, or t
  misc_feature (207)..(207): n is a, c, g, or t
  misc_feature (244)..(244): n is a, c, g, or t
  misc_feature (333)..(333): n is a, c, g, or t
  misc_feature (788)..(788): n is a, c, g, or t
agcggagttcttcttccgggcatcatgttctgctagcccggcattcccgagtccattgagacgagtggtcccgcatggggatggagcgagagacaggacgctcaatcctgaccagttctcctgagtgagtgacgacttcgcttgagcaagctcattgatgatcattgaatcctactacgagatgtctccctgtgtcgtcctgtgngngactactattgaccataatggatgtgtatgcctgaangacgccatcttgactcgagtccaagcggaggtgtagcctagtgtcgttaccttgtgataatctcaaggagtatgatcgattcgtgagtnttgcttgcgaacgcacccaatatcttgggagaacatcgtgggaacacaaagtggctacgattattgcgcaatagtcgatgtcttcgcagggagagctatcggatatttcactaatacttagacagagggcccatccccagcgatccgttcgagtgtcccctttagaccatcactcaacgtggcgaaggtatactattgggttgttacaaggcccaagaaaatgagcgagaaaaacaaggggagttggggtattgcgaattggggacaaaactttgacagggcaaggaatctttcagccaattcgcgtggcccgccctcgttaattcatggagtacgatctggctcctcgccttaattaccgggggtgcgaccatctccaaaagcggatacgtcccgttggccctcggaaggggagtggctatgcacaaaccctgtgacaggaaatgggggcatangcctatctccgccccgaaccaagattctcacattcgggatcgcagcggtatcaccgccccaatgaggtccgctagcttaggcattagttttattcgacttcactttgcgcttttacaatcacctggtgaggaacttaaccgcctgggagggtagaacaggaaacaaattatcgtgggattccttacccccaaaagattctccacaaccgctgtggtgctcggaacttttttttgcggttcattttgggt

SEQ ID NO: 418484 - DNA, 1337 bp, Homo Sapiens
agcggaacctcgggaggctgcgctcacggtcgcggcggtggatggctgcatggatcccagtcggggtcagcgcctcgtcctccgcggggagtaccgacggaggcgagacgatggggcagcggctacgggggagactgcctactccacacgtagtagcgtgcgcacgctgttgcgaaggtgaccgcagtgtggcatggtacgggctgctggcgggggcttgtacagtaactggtcgcgctcggtagagtgcgtcgctgcgggccaacttggggggaagttgaacgggaggcgcctcgtcatgtgcctttcttctacgctcattgggcaacttctcattgtgcaagtatccacttcccgaatatacgagttgcaatggttgaacaaccagggtcgaatatacagacagagtgtggtccgaaggtcttccattgggggcgggccgacgtacatgaggggggacgcaagacattccactaccgggaaggccatacgggagattaggcgcaataagttctttggggaatgatgttcataatggtggcgaggagcgacattatgggaactgaccagaattttgcgatatcgccacggtacggcgacttcacaatattaagtgtgatggctcgtggagccataacgggaacgagagtattaccacagaaaagattaagaatacgcgcgcaattactgtgaccgcatccatctaaagcgcaaggttaccggttgccacggacaatggcaggagcaagccgacaggacggaaatggggcttcccaccacttgagagaagcacccacgcaacggttaaagcgcgcatatatacacagaggcgagagtatggaagatatggccggtggatatatgagcctgggaaaccgtgtgccggactacaccacacgttgcgcgcataccgggccagccgggtgagggtggggggacaccccctgtgtgttgggaggaaccgacaatatatactggagtggagggtcaacaaaacggggggctatcagcaggaaaatcccttatgggggtgcgggagcttcctttacccgtttggaaggaccccttttttttggatcaagtgtccaccagtcccagccatttacaccacacaaaggaggttacaggcctcggaggccaacttaggttaaacgagctggaggtcaatggtgtccgaaaggagagaaaacttcggcgatatagggacccacatcgggtggcagaggtcgaacattatgtatcacccataacacaagatcaggaccatcaccttagcactgattaagaattcccctttcagttggaggcccacaccggtatgtagcacataggtgagc

SEQ ID NO: 418485 - DNA, 1410 bp, Homo Sapiens
agcgggtgcgcatagcccctctatcgctccacccgtgggcgtgacgacgacgatcactaccgctcatctacatggatagaccagacgcgaacttcatgttcaaacctgaactactgcccttgtctgagtgtccagccagtctggctgcgggcccgtcgcgtgaaagcaaggttgcagtcagacaggaagacctccaatgatatacaagtgcaatataatctccattcactggattgacatcataggtaccgacgactaaggctcctagacaacaactgatttaatatccttgataccaagctatgatagaggaccagcgtctaggaacagatatctagtagcgaagatcaacccatgcgcacaaagtaaatcgcgtagacaaagactttcgagattggagacccctttgtcgtccttttaaatcgcattctcaccaaagactcattctctctataagcacctatggttgtatgccaagaggaatttgcggacaaattgtgttcattccaactaaagggctagtctttgaaattgactaatgtgccagccgttgaccctcttaatggggaagcatggctcaacccttgacacaaccacgaagtggggtgactacctaattgcctaccgtaaaaagggcggcgaaaacggacaacgtgttgaagtaggagccctatagtccggattttgcaagcagaaggaaaagcggaattctccaacatagggttagcaagttaaggccaattcaccgtggttcctaccgctaggggcaacagtagcacatatcgaaatcggccccccgcttggttaacacggggatggttaaccacccgggcctccaatcctagtaaacaggggcgcgaatgccctttttcctcctagggtaggggaccactccattgtggagcagcaacataaccgttatcacccgagtaaaccccagttggagaataagcggcacgggaaacgatatatactgtgagctgtccgtgcaaacacgggggataccatataatctgtattccgcattgcggctcggtgcacctaaggggtaccccaatctcaccgcgcgcttgtctcggtgaggactggagacggcacaccgaggcttcggactggccatacagcgacaaacacctcacactattttgcgtcacgagtgccatactaaaacggacacaccgtcggaatggaagacaggcctccccgagagccggggccattcacagcacacgcctcctagacaggtatagggagaacaccccctagggggacaggggaacacgcaccgcgaagcaccaaaaccttagggagacgggcgcacggagggagatagagttgaatcccacccaagggcggagatcgaaagtttcgaaaggagagtgtgcccgacagaagacgtcgcactaccag

SEQ ID NO: 418486 - DNA, 1244 bp, Homo Sapiens
  misc_feature (323)..(323): n is a, c, g, or t
agcggatctttccctgactcactgtgtctcgagttctgctgagtggactctggtggctctgggcatggcttcaccgtgctgacatctcggtatgaactgcgtcttgacttggccatctggcactagccagggttagagaccatcagagacagagagtcgtggtcccggtggcctcgttgacgtcgcattgctaagcactgtggcgactgaagccacggcagaactaccgcacagcatggcaattgattacctactactcaccggagtcagtgactggagaggagtgaagctaggagtcagagatgactgatgcgctcatggcnacggggtcatatgaggataggcatgcactactctaggacaagtctcaccgcagtgcgttactgtgggttctttcgaagaaaccacgcggcaaaggcaaccttattaagcctttgcgttcccaatggagaaaggacaccggaagctggcttcccctagggaaggggaaaagtcactcgcaccgaaatacttgggagagaactgggcaggatcagaagacgcatggaatggctcctcacagtaaaagcgccccagggtgacctgatacagcacaagttgggcacaaggaacccatggtcccgacatctaatgccgaggacatccgtccgttcatcacacaggggcgtggtcgagcaggggacgcataccaaacgagtattggatcctgaggcattgggtctggaacgggaagacaaggggatgaaggatccccctgaaataaaatggtagttggaacggatgtacccgcggatccccttcacgtagaagcggggcatatactgggtaaggaactggccacggtaggttggaaactgctactggggtgggaacagatacggtatccccggtcaattgccggggtagtgaagggcttgaagtcgggcgcgacacgggagtggacattcggtccaacgcggttttgaaacccatggggcctcggcgatgggagaactgaagcggtaattggtgtgtcctggagacaacttgggcttccggaacgccaagtccgtgtttatggtgcgcacagctgaaccggtgaggtattcgaccatttgggggggaatcccttggcgggaatttgttccccgtgagtaaggggcaacctgagtggctcgaatgattgtccctccaagatacaaggaagccttcgcatatgttaatagatatccggactttccttcactcgtacactgtgaacacgc

SEQ ID NO: 418487 - DNA, 1410 bp, Homo Sapiens
agcggggttgagccgggctgctatctgtgaggctgctctgcggggcagtgagatccttatcctggctgcgatcatcaagccctaggacactctggtgtaacgttaccattatgcgtgctagtggtcctgtcttgtgttctaccgcgtggagctgcggagaggcgcacgaagatctgagtctagacttataccaggctgcatgtgcgtgcactctattttctcacacagagtggtgtaaggaaggctgaaatctgcatagaatgttgcatatagtgtgtagaccgagtggcgactggactcgtaggacgtatgacccaagcatgatgagcaataaaggcaatgcctctttacatatgttcgagtcgctatgcatggagagacgcttgagaacacctgcattacttgtgaagaaatcttggaataataagctccgtctagtgtgcaagagtgttgggacaggctaaattctggatccagctgaaaaaattctgaagctaggaggtaattgacgtactcatatgcttgaaatataaagcccagtgtacgaagatggggaaatggctgtgttccacaggaggcacatagcacacggttgggagaggggtctcctccaagtatgaaggcgagaagttcctacgcatggaagatgtcgtaaaggttagcaaggaaagataaggatttttctaccgatggctttgtgtgacgcctaacgtgattgtatagccagattccttttgcctgtgaaaaaggaacgaacagttagggtgacccaaagttccacgttaggaagcgcactgacttttgtggcgaccaaacgttaatgcgagagaggcaagcgagaggcctatgctgaggaactttgggggcttgcgacaccgcagcagacattgagggaaaggcaggcgtcttcagtgacatgtaagcgggtgaaaagcggagagaaacaaggagacagcggcccaggggaccaagggtctgataggagagagtaccgcaaatgggggacaacaacaaggtgggatcgtcataaacgcgggcgacgcaaaatcagagcgcgacgacaaagaggtgactgcctgaagcatgtataggccttgggtcccctttgaaggtgtcgcgatgtttgaaaaggcgatgaggtacacccaagggggagcgcgggttgatgtaggagcgtgagaatgaggcgagttaatcgtggtgctaagttcgaacagttctggtgaacgcagaatgctggatgagaaaggcgagacagatgcgcaagacttgattttcgacatggtcaaacgctgtgagtacgcacgtgtcggcaccaactaagcgaagagctaaccgcgggttgattagaagctagtaaagataggtgactagattcgcagcggcgcgataacaagaagtacatccagt

SEQ ID NO: 418488 - DNA, 1275 bp, Homo Sapiens
  misc_feature (99)..(99): n is a, c, g, or t
agcggggggctagaagggtgaagctgtgcggagcaggagagatgagcgtgtgatagacataagaggactaaagaccatctgtctcgcagtatgtcatcnctggacgcaagtcttggaactgccgatgaaatggataacccgtgttgagcttgatcagcaatattgtaattcgggttgtgtagcttaagcctcatttccaccagtctacagttggacaggctccatatgtgcacaagactatcttgtgtagtgaatactcggaacggtaccagatgtccaaagaaaatatttatccagctgcattattgaaactatgaaagggcatacttgcggactcgtaaatctcactctaggatagaacgacgcggacatgatgaagagagaccttataacttgattgcaacttttccagaataacaaattggccactaagttggcgggcattgtcgtggacgaactgggcaggtcaatccatactaataacatcaaacataaggcaattgcccagtatggttcactaggactcgctagccagataagggactagggagctcaatttatggatttggtgggtgccactaaaaaaatgatgttgaacggtttttcagacaactaaacacgtagaaagacaaggatttcctcttgggaacgagagagtatatggaagggagtcccctgagaaaagcctacaatttaggccggttgaaattgggaatcctccacattgtaggaggaaccctaagtacatgttttgagcttggtatagccctaggttatccgattttctgaaccattcaatagattaggaaggtttcgaagggatatatggaagtgtcgcggtacaaagtgggggccgggttttcgaactaccgggaagcttaaattggctgccatttatgaccatttttgtggcgcggagacagcgaaagtaagtaattcggcccaagcagtcaattccggtacaacgggtcggcaagtttcgtttcccagaaattcatccccatgttgccatgagggtcctagggtagtgtagcagccaatagggccccccttccacgagtcaaacaagagtttagggtttacattgggttcgggcgtcgtggaaaattttgtggagagcattaacttgtgccaatgagcgcagagaaaatagacctttatagaaagggacgttcctccccgtgtgaatgcacacatctcggttagttaccgcgaggatggagagagagttgtggggaggaataagggtgccaccgtttgtgcattaggcccctg

SEQ ID NO: 418489 - DNA, 912 bp, Homo Sapiens
agcggaatggctacctgtctacctcgtgcactttgccttacctatcatgcctgctctacaaggacctggacaactcccgggaccaccgacgggctcctttgagtcaagcttgcgtgagaagcgaccttctaccgagggtgctgggcatatgtggcctagtcagggaagatgtcgtgtcccaagcagtgtgataagaattcctcagatggtgattgaaaacagacgtagtctgtcgcagtggccctgataggctcgtcggtccatgagcgttagtctcacggttagtagagtgactcaagtgatgataaatgacattcatacttagttgactctcaacaaaggggaccatttcggattcgcgaccaagtgaacgtgagtcaattaacattcgcgcatcatattgcccgagatcgagattccccccaaagtagtacttcccgacaccggcaattccccgttggcactatgatttcgggggaccatgttgcggagctgaatttcaatttgttgccctattcttgccagcctgtgctgggcacgaaagaggaaccacttccaggacattacggcctggcgtatttcgaatagtgggccccggaaaccgttgaattcagtgttggctatgggcgattttggcagaatttcccctggtggttccgattgttgtccactgtctggccgtgttcgccaaattcgaattccccaaatccgctccaatggtgtgcgactcgttccggaaaatctctggggacacagggagcgttgtagccggaagaggttattcacacccttttccatttgccaacggagtgtttgcaccataacacctataatgcaattttcggcggggcagaaattggataggctgggcaaagaaatgggggcgcttggggcctgtctttgtgaaggcga

SEQ ID NO: 418490 - DNA, 945 bp, Homo Sapiens
agcgggagtcacgatttgtggcggccgatcctggtttgcccgtctcgctgcgtctgcgaatgcagtcatgtcgtgcttcccgtgagctttgtttgagagtggactcgtggatactgtgtgatcgcgactggctgctcggtctgacatagcctgtgctgttaagacctgggaccctatgtaatcatctcatcgtgggatgacaatcgtcgacggaccgtcgtttgagggacttcgataatgttgtcgagttcctgccgaatagggcaccgttgactcatgggaataatatattgcatgggctcaaactggaggagcacatccacccttgtggaccgtttagtcagacgatcttttacataaagtggtacaccgggaattctttcacggggagtaattgccactgtggattggtgctttgacattgtgtcacgacggcataaacttccagtgagtaagcctacattgcccccttgaattccagggcctaactggcttgtacaccaggaaaccttttaccctttaaaaataaccgtaatatgagtaaccatacaattttaccaaggagttgagagcgaaattgaaagttccgagtagcactcgaggcggtttggcagtacacctttgaggtccttccaagttaccttagctaaggttgcctcattcgggccctttttgaacttaccttgagacgggaacttgtgccgaaagcttgcggaggctaccagggagtgtttgcaaccgcccaattacaggggctttggcccaaccgcaagacacatttttgtggtgctcgcggagccgccgccaacatctttaagttagggcccagaggccgctctttcttccgtgtgaagacgtcctcaggaataggttggcgctcaacgtttgtgctcgggctgggtatgggcacataatttcccaacgttttgtcgtcggttatatccc

SEQ ID NO: 418491 - DNA, 449 bp, Homo Sapiens
  misc_feature (109)..(145): n is a, c, g, or t
agcggcttcccccacccccttccccggctcgggccgccccacgccgcgcaggagagcaaagaaaccccgggcggggcagtggcggccgggctctccgaacgcgcgaccnnnnnnnnnnnnnnnnnnnnnnnnnnnnnnnnnnnnncgcgatggccgcgccaggcaactgaccggggctaaacccgggatcccccctaaaactctgcgaaaagagattactgaccagaggcctcggatgcaagtggtgcaagtcgcagagcgagctcttgaagctatcgaccgggtcttaggatagcatcagacaggtgatgagagagaaagagtacgttgatggaaagagaccagcgagtacaggactcggagcggcagagggaaaataccacattcgacgcggaaacagcagaattaaaggtaggcaactctgacagcgaagctcagaacagccgcac

SEQ ID NO: 418492 - DNA, 1103 bp, Homo Sapiens
agcggagtcttgcgatgccgagccgtccacttaatgtttcgtcgtacttgagcctcgcaaagaactggtagcgctatgcccccatggcctaaaccaaaggtgactcgaaccaacgagaactcgcaggaactaccagaaggaaagccattgctgcgagtcatgtcgtgcacccacgcgaactggctgcatggcatatttagtgaagcgtgcatcatgcgcattctggcggtagacgttgccatacttgcatgcaatcgtacgttgggcggagaaattccctggatcacggcaggcatgtccagcgcgagatgctgtacttaacatcgagaggtcacgcatgcctggatgcgtttgatggcgccaacaaagtctggaacataatcccatgaaaaggtccagatggatcaatccattgaaaggtcacaataacagcctgacagaacacccccagggagccaagttggacatggaaatccaatgtaagagtaggcaagtgcgactgacccatgtactgatgatgcatttagaggagaagctccggacccaaatgtcgccgttcagttcatttgaaaagttgccctaggttgaaaaatgagaactcttacaacgacccctatgtggggtggggacctcggaatgccaacagatccacattttgtggttacgcacacggcaacacctgtattaaaacagttcgaatctcgcaacatgtaataagctcttaagacctacaaacacaattagggacttccaaggtggggaaagccgccaccggatttgcttaccggagtatggaatcgccataatagccgatgcggagatggggtaaacaccaaatgatagtagacaataacgacacgcgcgtattggttaagccccaatagtttaagaaagtaagatcccatggcaatagagagagtgcgaatacagaacccctgattggttcgccaattgtgacactatgggatagatctgaaacaccatttccacaggcgattaataggtttggttcacacaaagagaaacttggccgtacaaaggatagagagccgcatcacctttggccattccacggcgtatgctagcacagaaccaaatttaag

SEQ ID NO: 418493 - DNA, 1152 bp, Homo Sapiens
  misc_feature (141)..(141): n is a, c, g, or t
agcggattcttggagctgaaaggtgatccggtgcaccgcatcagtgtctcgcatacagtgcgtgcgtgtattcatcgtggtggtggaggctcactcatcgtctggcgtgtgacctgtgcatgtgattgctcctacgtcagntaacattctcgacaggcattagcatggcttaaatgtgcgactggtactatacgcagacaatgagaatggcatcgatccaatattatcccatgcagagtgctactgttgtcttgtgtgctgactatggcattccactgtatcgatggcaaggatcgtatcattagcctggaaaggtaaacgggtatgagtggatattcgtgtgatagctgtaagtgcccatatcacgtactttgttacatttttgcatgtccacaagggaatttggtatacatatgtcgtgattacgtcatctgataactggcatcggtggataatgtacttcacgcaccactggtggatattatgtagtagatgcataatgccctggtgcctatgccttggatacagtggtggaagtatgtgtccaagctgggcacgcaatggaaataagctaatatgtatggtggaatcagtaggtgaacattaggtgacaaggacaatgcggtactccaaatggagcgaaggtttgtagtagttggattaggctccggtagtttgggtgaagtatgtgtagttgggacaatttacctagaataagcctgacatattgggcttggacgtctttttcttactagtgaggattacatgggtcttttaactaaccattctctttgaacacacgttatttagattgcacacgcaattggaaggtagggttagcggggctgtgacttaggtttaaattgtgattctcaaacccactgtgcaggcatcctaataggatgtccttttttctttaaataaggttaaaacctggttcttgaaccctttgtaggccacgttcggcggggagtacccatccccaggtatggatatgtcgcaccttgcatattttcttggaatgtgcagaggggcctgggctttacccagcacaatgggtttaacaggccgttaccttagcgtggcacgcgggtccttgggcatacccatttggcgaagttggctgtgtcgcgctaggacaagtaaggaaac

SEQ ID NO: 418494 - DNA, 1067 bp, Homo Sapiens
agcgggaatggcgcgtgtgagggcgtttccggagcacgcgccgggcgggggccgctgacgtcgggctcaggtgcgcgcgcccgtccgcacggcccagttggcggcgcgcacctacaggtggcgggcgtgcttgcgggtgagtgggaccgccagctggcgtaggcagtctcgcggttggaccctgggcgtctgcggctcggggggcagcggccggtgatggggccgtcattgggtccatgtcgctccatgttgagcgggccggcgggacggttccgtgctagagagaagcttgcgcacgtcacggtgctgattgctgcggagaccctgagtgacggccggcgatggccattgactgttgttcccgggacccccatgaccactttcagcgcggcccagtggcacctttcgaccgacgcgggaacgcctctccccttccggtgcacgtggggccggcgcgccccggccggctttcaacttatcgcgctggcgccccgtgcgtccggccccaggcttggaacgctggcgcaagctttggttctcccttcgcttcccaggcgaggctgtcactgctgtgcccgaccaaggggcgccgtaaggaaactccccggcgaccgtctccgcggaatgcgggagcgccccggcacgccctctgtggctgggtgccccaccagcgccggtttaaccccccccggagggggggagacattgggcaaaggggggactgagtgcgccccgccggaagaggccccccgcaccaggagagtcgaggggcactcccgcggctgaggagtaccccccaagccgcgccctatggcagcggggggccaccacaggcagggccgtaagagccgataccccttgccgcgacaccatccaggaggagccgcccctacacaacagtattctgaatagtcccccgggtcccgaaccccccagagacgccccccattttgagtaacataacacaccagggaaaggcttcaaactatggggggccaggataccgcggagcggaggctctcacgagcacgaagagtgccacacaactgttgcgggccaaccgcgag

SEQ ID NO: 418495 - DNA, 1094 bp, Homo Sapiens
agcggggtgatgctccctagatggggagggacagaagatggtgacatagcctacatagatgctgagattgtacaacagtgtcccactggatgctctaatgatgaacgatagttttagtgatccatgcatgctctcatctaggcccagtttgctgggaacttgcgggatgaggacgcattgatttggaactggtctgagtgccaagtgctagtaaggcaagcatcttgctctcctgctacgtatacccaataacatggtcattctatatcaggaaataaaaagaaagactgcacagcacatttcttttgcataggcatagcgctagaggtgcacgggcatcaaagcacaacagacttgggcgtcctggtatctttgcgcaattggcagtgtgcatgtgtagcccctctgacctcttgggtgcatagcggagatctgcataggtgagccttggggccatcgtcgagaactcaatcttcgatcctagcataagcgcgaaggatagggatccttctatctgtagctatcaaataccatccattcaatgttttacaccccgggagctctcagcatacaacgctttcttccttcacataaagaaccttgagacgaatgtgctttcactgtggtgcatgtgtagggggccgttgagccaaagacccccaatgtgtagagcgaaaacattggccatcttttgcgggagagtcaccacgttttgttggtcgccacttcttgagttgcatccttgagggggataggaggccgaagagccgcgcttggtggcttattcccccaggagtagaggttttgtgttggggcaagtcccttgttagcgcttcccttgtgagcctgctttggtccttgttgcggcctcgagccctagggcgggagagagctccctttgaggcttatctcagggctaccacttgttgttgtgggggggcatcctggatgcctaatgcgtgcctacgggcgttgtgggcagtgtctgaccgtggtttgcgaccaatttgtaattggcacccaaggttttccaaagagcttgggtcccaggccctgtcccacggttgcgccggggtttcacattgctggggggc

SEQ ID NO: 418496 - DNA, 1296 bp, Homo Sapiens
  misc_feature (145)..(145): n is a, c, g, or t
agcggggaggccgagcatgtccgcctatcgctgtctgagtctattctgagccaaccgacgtaattgcgaggccgtcgacccgtagtgcttcgtgctcgatgagccctggacgttggtcgtgacaggacgctcaaaggccgatcangaaggcgagacgaatacatgaggtactcgggacggacagctgctgtcaaaactctcgatgcaaggagttgacgattcctcctaaggatgctcgccacaacagtcctagagcggacttgcatactttctccggacctgttcacgtgcaaacgggttgcgcacccgtgcatcaggaggctctattgcatatgctcgggtgtggggggacgggcacactcaatcggttgtccatcgactcacacgggcctgcggcgtgactaggtctcaaaatcagtacgtgggccgtggttgttcgcgttggacgctcgagcgtctgcgaagtcggggccgcggccaagaggagcataggactcgaaatctgagcgtgactgtggttgccgcctgggaatcatctaggggcctgtgtgaccaacacaggcttggaaggcccattgaggggcaccattgggaagaaactggcacccgaagggggggacgcaaagcgcaagtgggtaggttgaccgggtaagcgcaccgtgtaacaacgccacggggccaagcggttggggcgtaggccgccaccatagtagggctatgggggacaggcccttctgaggaaacttgtgaaacgccgtaccggcgttagggttctcccttggagaaattggaggtccttgtggggggaaaccccaggtacctttccctggtttgccaagacatttcgtaaaattcgccggttggttggccccgcgggaaacggcgtcggggaaatcggtcggagggcggaccgggccgggaagaacgtggttgggccatccgtggagacattggcggtggggggggcggtgccccaacgaggaaggtcgagacccattggttggaggccgagccaaagcggttggggaacggaggcggccccgtgggaccggggccccaccccggggcccccgatttcccgtgtaggctctattaacgcactttcgccactctgagaaaaaatttccgactccgggcccgaggtttctacaacccccttaggtaggacaaggccggtcagaccggcctggtggaaccttaaggcgcattctagttctcccccaagagagctttgcggtcagagttggccatgcgaaggcaaaggtctgtggtgggaggccccaggaaaattcccca

SEQ ID NO: 418497 - DNA, 806 bp, Homo Sapiens
aggctggcattcctagtggcctgcgggctgctttccctgtgcatggctccagcttgcatgtgcccagcgccccgcgcccgtggcactttttgccaatctgcgcggggggccaaagtccgcggggggatgggcgcccagggggtagcccaagctagccctttgcatgggcccccttccaaggggtcgtccttggcacgcgttggtcagattgcgcaggtgaaaaccttaagggcgacgccgtggccccaaattccgttcgtttcacgcgcgaagagttttgggcgcccacgtttcgcaatgcacaggctttataaggccccaatttgaggtgaaggcgactggtcgcaccgggggacactgactgttccagtgaaagccccttcttgtgaaaggccaatggggacgcaactgtggtgggctgacactctgtaggcccattaagggattgttgccttggcgcaacgcaattcttttttcgtgggccgttcggctctttgccagcccattgggatgacatgggttttggccaggtgcaggccgcttacctgtgcgcggggccagcttgaggaacacttgggccttgcaagccgcgctaatgaatttcgtaaaggccccaactttgttggaaccccttcaatttgggatgaccaattgtgagaacccccaaaggttcgtgggagaccccttcgtgaagttgtagagaaacctgggaccagaatggtcggcttgattcgacccaaaggacccccaaggaagtttggacggggcccagtttttcctgtgggacgcacctggacacgaccttg

SEQ ID NO: 418498 - DNA, 1054 bp, Homo Sapiens
agcggacatcgcgtgaaccaaagggatctagatatagggccggacgttggacgagagaagctagggacactgcgatcccactgcggaaagaactgagtggactggacatgaaattgatggaagcagaattggctaaattctatcatgaagtggggcaccacgtagtaggaacatccgtatggaggaaatgtagcctaatgagcactaataggaactagagtccacgtgataaatgataatctctcgagcgacagccatgctcgaccaggaacgcacgaagggttaacaggaacattccaatgtggaactcgtaaggatgaccaaattgctagtatggagttgaaattgtgggagcgatgtgtagaaactgtgcacgcgtaggagaatttgtgcatagaaccgaaattgggactgggggcacatgaaaacatgttggtatatacgcaatgaacaaagacaccaattgttgaaccaagcagagtgacatactatcacgaaggaaaaggacgaggtggcaacggctggctaggttatggtggaaatttagacaggagcattcgtggccagaaatgggggaggtttaatttcctcctaaagattcgacgtgagtaggattccaatatggtaaaaccaggctcctaaattagactggggtagtgaggaaaccaattaccattcgctagtctggagttaggaaaacggcaagatcgatggtcccagcctatgtaattgggagcaagcaaagggtgtgttgcacttgcaacaaaagtctagaaaatcaacggcgaggttaattaactctgtacgttagttgcgaacttagagttagatatgtgaagaaatcaaaccgccttcacaaaaaagtgtaatggacaatgaaaagttccgttctggtaaaacacaataggagggtggtacacctgaatacgaaagagcaaattgggggtatataaggggagaaatccgaatggatttaggcccagaagagaagattgacttgagtaaaaagatatattttagccttttggctggcgtggaaaaacaagtataggga

SEQ ID NO: 418499 - DNA, 775 bp, Homo Sapiens
  misc_feature (362)..(362): n is a, c, g, or t
agcggggagacgtgtgtagaacctcactggaccgtacggtcgcacaactcgagcctgggctacgagggactgcagcatgcgagcaggtcaagagtgctgtgtgcaccacttgtagcaacgcttagctaggcagacatgtgtgccgtcacagctgatcgcttggtctctgtccctgacgtgtacgacatggcctcagtccgtgccatcaacgtgaattgctcgatcatgaatgtgtgcctggtgaagctgacgacatgtacctacgagttcagacgatgataaagatcatgtagtggctgagcatacatccgacgggctggatcgcttggtgggcaaggggatttcgacttctcagactggangagtgaagcgaatggcatggatggagtgtgcaagggagagtagtcgggtacgatacgccgtagggcacactgtggaatacctagggacgacaacattctaggtgaactgaatgctagctgcttacttggagagtttgcatgagccaagtgtttcgaagtgtgcaagagtactgttcaatacattcagcgttgcattgtcgcgttagattcgtatatgggcgtgttggtctagaggcgagtgtacacgcatatgactaggagaggttcatgataactgctgagaacaaattcgaggcgtaatgagctggtccaattgaccgtgtccaatgaagagggggtgcctgagtgaagttagaattgaacatttgattgacaattcacaggtgggctcattagtaaatggcgtatgatat

SEQ ID NO: 418500 - DNA, 1227 bp, Homo Sapiens
agcggggttgtacgccgaaccccgtagggctcccgggtgcccggtgggatcgctcgagcctcagccaccggcggtacggcggggttctgattgcaccacgggacggccggtgagcgaagcgtgtgaggatggaactgcgggcgttacgctcgtgtgacgtagtaccaggtgatcgttcaagagagaagggcacagagcggctcagcgtctcgacttgataccatgccacgagaagaacgcgttggaggcatgcttgagcagtacagagtgcgtcccagtggcccgagcacggcctctcccagactgacatacggactgccgtagcgtccggccatggtggcgcaccgtagcagcagcagttactcaactttcgctgccagctagtctgccgtagacggctccccgcccaggttacctgaagcggacggcgaaataactcgcatagtcacgctccgtgtgaccgactttgttcggcttacgttgcgcaacatcatggacactattgggctcttcgacatattcaataacggtctgtttggaaacgcggtttgggcgctacaccttgctaactagatcagcgttgtaacttcggccctcgagcgcactatatcattaggttgatgttaatccattagtgccacctgttgtgtcttgccattgcggacgctttggcgataggaggccattgttcagtctcatagtcacatggggtgttcacgcggggcatggggacgactatgcgggacatactgtgagtgggacggcgtgctcgccacactgcctgtggacacagtgttggctcctggggcgctggcatgtggaaaggttctgggggaacgcgactctgggcaacaagacggggctacataagtgtcagctaggcgacatccccagcgtgcgacgcacgcgcgttggactccggttatccttcaggacccgcgtggtacctaacacaaggaatgcgagagattgaccccaatggggcccccgttggtggcgccggccatgtgcgaacacctttaaccgcgcacctttgttgggcccttagccctacaagaccctttggcagcgcgcgcggagggtgagctatcgtgtcgcgaagatggcgggcaagcctgtggatcggcgaaagattcgcgcaacggcgcggccatgttggtggcgctaagctaccctggcaatcaaactcataattcagcacctcatcgaacgacagacacttgcccc

SEQ ID NO: 418501 - DNA, 1027 bp, Homo Sapiens
agcggagtcgcccggaagcgccgacccgactagtcccggccaggcgctatatgctaggaatgggcgcgagtacgcgacggggccggaacagtaggacgaagggcgcgcagtaggggtgccgggcggagcgaccggttccggcgcgatcgggggggcatcacgctagagcccgagattcgcctgacggacaatgtaccaaatgacgacccagcatcaaacgagtgactcgactgatgacatacagtggcgagtgagcggtaaccatagttgcgtctaaggaagcagtcaagagtgactctgccagggaggtgatttggcatatgggctaagaacaggggaccgtagggcatcctatggcgggatgccaaaactcttcccgtctactattacccaacctaacgctgctttggcgtgaatatagccgcagcggacttattagatcgactccgggttagatcccagctgattaggctgttgcgttgtacgttaagtcaggccaaaggattacttctggtaaccccacgtttgcgcatttcaactagggtgtgccattttgggttgctgaagaatcaccggacatgtcgtggctcatctgtcattgtggtatggtacattcgaaggattttgtgcaggggaaagctcactcgctttgtacggaggacgggcacctaaaagcggagccgatagtacctattgccttaaatcttattgagtggcaagtacctattgtttccccccttgggtatatccaaccgttcctcctggaaaggcttaaatgcacggcacgaggttagttcgtaaataccggtcagttgggaaccttgcaatgtcgcattgatatatcagcgggtggcgtcatataggctatctgcaagatgcacgcgtgctctagtatgagctgttgcctaggacacaccacagggggtacgtttgctttcgcctagcgttacacagtgggcgttattatcagttttgtaccgttcgctccatcatgtggggaccctatagacaccatactgtttttcac

SEQ ID NO: 418502 - DNA, 876 bp, Homo Sapiens
agcggatgtacctggcgggatcgggatggtgtaatgtctgagacgagagtttctcgcgcgtcccaatacatgagaatcggcttgcgacttcctgctctcgtcaagcgcaccggcagggatcagtgtagagtgtgaagcaccttcccttagacggacttaacatatctcaaaggctcgtgtcgcacctcacatgacgtctccctgggatactaggattcctctgagtcaggattccgggcggtaaggtctagcagctgccggagagtcccagagctgatacgaacaaaggagggttggcaggatggctgtgagtcctatgtatcacgagggccaactccgattggccggttgtgtgtcgcacttggtcgcgcggtaacccttattagaaccgcggcctccggagggcccctgctcggggagctttcggaggtacgtgctgcgttgttggcgtagacgacacgatactatctggatcgacatttgccagaggaagtggcagtaatccttagtaaaaagaacagtgggcgctgtaagccgtgcttaaacgatacgaaaaatgcgcaatattaatcgaaggcttatcgtgggttcccggcaatacactagccgctacgggcagtaaaagcagatactgggccatatgaaaccgcgaactctgtgccgtacacggggactgtttcaaggcgaagtccattgagaccggaatccgattacgatgcccccaacagttgtcgatttcgcggattgatgtcaattctgattcacaaacaaaaccctagacaattgactgtcttctgggtgtaacacctgcattggcgttctccacgaaacagaaagggaccctatgccccttgtactgagaaacaaataccaaag

SEQ ID NO: 418503 - DNA, 1213 bp, Homo Sapiens
agcggttcttcattaacgattgtccatactcttgttaggagctagtactatataacatcatagctacgctagaaatctagccggagctaggactagcttaaatcgacacaacactagtaactcatcgtggtggtcaagctcatctgctccacggatttcccttgcaatcaagatctcgatagtgggacaggacaaaaggtaatgcttagaaccccacatggaagtgatctaggaggcagttaccatgaatacaaggatccaatagaagtcgggcatagagattatctcgtagaccatctgtgtatgcacgtaatagtattatacccatggggaagcactgttggtgcactattcttcatacaacgggttacattcagctctaatggatagggtcacaacgttggagaggtacatactgattgtaacgaagattgatcaggtatgaaagcgaatgccctataagggacatatcgctactaagggtaagcgaaaacgaatcagaaatatgttcctaatcctcgaacgcaaagaaattggtcgcgaatacgtaagttttcccatataccactttggcctacctttcccgagggaatgacatagcgaaaagaccctacatgaaagtacctacggtgcctggcttctaactgcgtatgccacttcatctgtatgtttcactttacaccacaatcctcgagtacgcattgctatttcaaccgaagaacgcaatgtgggagggtcctagtccatttccagggggcctaaatgtaagtactaaaagagggtcactttgatggacgcgttgaatattttagtcggccaggattatgtagttgcgcgagccaagtatcaggggaactaccccccaattactgtgtccgctgagaccgggttaaaaccggatgttggatgtcaagtttcgcgccgattggaggggatcattttcggcatgagtttttaaaggctttgagttcccagagttaggcctagttgcttttcctctggacgttgtcgcggtcccctagtaagggccacccccgatggttaccgggccgtcccattctttcccgtccgcgtgtttggaggccctttcgcggttggttggcaaggcgttgggcttggtgtgctttcgcacacacacatcgaggggtgtggggaagggggttccccgcgttttatcaccccaacgcttgtgttagtgtttgtgatccctttg

SEQ ID NO: 418504 - DNA, 940 bp, Homo Sapiens
agagcggagcaacaggaggacgccagagcacagcgatacgacgcggaccaggagttaacatcgtcagaggcaagaagcaggcctatctaacagtacacaacgcctgaaccaagggataccagttcgactaaccatagagcaatatgcagtcgatattagctatttgcctacctaggcatcagctaggtgccatacgcatgttagagagcaggctagatatctggaaagttctagaggaacaagcagctattagaacaaatacccagatagctgtggctcgacataggctaaactagctgcacgcgcatctacgagaagtcaggaatactacctagccttcccaacatgaatgtctagttggtacgctactggaaggaaaattcgagtggagcgtttgaaagccaaggaagacgccttcgcgaagtaaggttccaagcgaagaggcgcattgattcagcatggatgatatgggatgatgaatatgtatgatagaaccatagtaggacagccacggaactccgattggagctctagatcgactactgataatgtaacgatgaacaactgatgatttctcacccaggtctgatgcagtactcacgcatttgctagatgaattcttgatggaccctgggttcgactggagttatttcccgccagtgggggactcttagtccttgtcagcttcgcaacgttttttcagttactccaagctttgataacgccagcaagtgacgtaacgggccatcattgcatagggcccggaaggtcgcataacagtgtaggggccataattgggaactagtacggtacttaacttttctcaaagaaaggtttttggtagtaaccttgacgtaaccgggttgcccctgaattgtctacctcacggagggaccttcagtcttcacgacctatgagaagcgaatgctttgggattggc

SEQ ID NO: 418505 - DNA, 1448 bp, Homo Sapiens
  misc_feature (1030)..(1030): n is a, c, g, or t
agcggatatctaggctggagcgggagtctattagacttaggtgcgcttggacgagtttctctagccctcatacccatgcgctcgcacggcttcctgcctcgctagtacgaagaaattgtggacgtcacagaaatgttgcgcactgtagtttgacagcactgaactcggtgaaagtgccgtactcacctctttcaggcaactacgtgtcacagtgcaaagtgagtgagcttgttgacacactcattacgatagaactctcaacagttactggcattactacagtggatccgacagtagagaggtaagttgtcattttgtgcatctgaagtgtacgctagagatgccagagcgagtgctatggtggccgtgttaagcaatagtgtataacgcatgcaaaacccattttaacacagaggtgaccctatgtcaagcaaacaccacgtaccagatgactggttatccgtaatacgtaggcattcgtactgaagggagcaatttctacgaaggcgggtcgtcaaattagagcgattagtgttttgtagaaaactcatcctatgcatatgaggccgttatcccgctaggaattgaggccatacgattcctgttgccaaatagctaattaccccttcggtaagtcactacgtacttctatgcattggtcaggacaaggggtacatacccctacgaaaggctcactttgacaagaacttctttactgtataccctagaggtatcactaccatcgacggcacataggtagaactcgaaaccacgcggatagccagcgggcctcgttggctaaagcccttcaagctatcccacgcaaagcacgaaggactcaaatcttggacccttattcgacttctcaggtggcgagaaacgggggttggagactccgcggtgatatagcacggtgggattcaatcggatcccctcgtttatcttggagtggaaccctcaagcgtaaatcagatggcccattttgcacttccggctcacacggttaaattgcacagtttaagaagtcccncgcgtcttctatattttggtggaggcctgtagcacctcgatgtaggtgttttaccgcacggtccatttgcgggccgtatatatcacaccacaagtagattctacacgtacctacacgtagaagcacgatgtcccacaaccgttcatgtgtgcgattgccgtgtgccgtaagacacccctatgcactcctagactaataaaagggccacagctgtatgcgcgccctagtaacgaaacgcgtgggcaccttggaaagtatagggccacatagggacgaattctagcgctaatgtagtggtaagccattgcactgtatgtggctactgcgatctgcttgtgggcactgtaaacgcgcgtaatgcgccaacagaagcttgacgagtgtcgtatatgagtagagagagaaagcgtcaactaag

SEQ ID NO: 418506 - DNA, 1604 bp, Homo Sapiens
  misc_feature (1271)..(1271): n is a, c, g, or t
agcggggggtcatctctgaggatgtgcgcagctctggtcgcgtgctcacgatcagcttcgcccgtgtgagcgggctgtctatgattgcgtcgctgcctcgcgccggtccactcatggttggcagattgtgtagtcgctgtatggtacgtaacggcagcatcagtggtgactcgatgggtgaggtgctgtactggagtgtcctcgctggatgtactgcgcctcattacaccactgaatctcgtgattgcaagaattttcatgacgtgatggttaaccctggtgattgatcgaagaactgttctgttctagtggctcgctggaatatagttgcagatggtagcgattcgatagaaaacagtgatagtcggctcgatgaatctgaacgagcgcatccagtttggcacgagaccgcgttggtatcaagacccgagatagggacacgaaacttgaggtcgatcgggcagactcgaagggtttgcagacccacataggacttacctgggggaaagccgagttgatcgatgggtgtccgagcaccccggagtttcttgcgctcgctaagagtgcctgatcccagtgcttagtggatgaactgtccttgctattgtccttttacttactcgagttagttcatgctaagctgagcgttctctgcaggactggttactctatcaacaaatcaaggttgcaccgcccgcaatctgatggtacacgggtttggtttccatgcttactccaattcatggattccacactttaccctgaatggatagtaactgtctgcccgtttcatttccttgctagcctccttcctatagggttgttgctctgtcctctattcctaaaacgggtggggatcacaattacgtaagcgcacgagggtctgaagctaggggaatcctaatgcttcgccttttgcatcgctcaaggggagtttcctacagtaatgtacacaccttaatccctcatttggtacggagaacgccgcactctatgctttgaaacctcaaagacacccatagactcctaatgggagaacttgcactccagagtcgttagcccagtggaaagataccctttgggattttcgcctagcgaaggcaaatttcgggttcgcttcgttaacacaaccgtggcgagagccacatgtcgctatccatttaggatataccctcggggccacctagctacttgttatttgaccgcttgcggataaagggcgtgggttccatacttcttaccttcaatttacactgttggggccgttcttntgtgcttagccatacattggggtgaattaatagagggtgtttgtaaggatgtaccatggtgagtttaacgcaacgggtttttcattttacatcaccaggtgttgttgtagtatatatgttgaaggtggttaaggtatcgcattaattacgtgccattggtgtgagttgggatgtagttgtacatagtactttatattgggatacaaatagatatgtctttagacaagtttggtgataaagttattagagaaaagtgtggtagaagagacatagtatctatacgaacagtaacaatagtgtcgtattgaattgtgacacaggttctaatatatt

SEQ ID NO: 418507 - DNA, 977 bp, Homo Sapiens
  misc_feature (490)..(490): n is a, c, g, or t
agcggaggtcttcggactgcgctgtcgaggtgtctcgcctagctctgtattgccggccgaatcctgcgcgccgccgtttctctgccgagtcgccattggaagaatagattgccgcactattcattgacaagtggtctccagtgcactgtgcaaaagacctaggtttagctggggatgatgctccccgatccgtgtatctccttccatcgtcgggactgccccttgacaccatgacggtctcttggcttgaggacagtaggggccattaagtgactctctaacgatagtagtctgaactgaggaccccagtagacacacgtcggtcgggcatcacttgaaccctgtacatgttactcccaattcgacgtcactgagcatcgatcgatcctagtctgagtagctaccatgacaatagaaatctgcgcagctacactcttctaccaacgatgtatggcgcggtggtactcgtgaaggatcaacctcgagtgcntgctgatgcagtaggtcccctctcttgaacccctataggcggcttcatgaggatcacagagtgcactcaagaattaattggttctgagaacctttcatactttcccctctcacttcgctacaagtgaaggctctccgagggtagtgctcgttcactcgtaccgccatcttggtccgctatcactggtctattggtccatggacctctgtggtaagatcgcggaggtcgagcccacaacgactggctgctctcaattcgtacagaagggtgcgtatcgaccccatcactcacgctatcaggccgattgccgtggccgtccttgtgtacgcattggaccttgagtcccggggaaccttagagcactgatatcttacccgtcaattgaatgaatccattcaacttgcgaaccggaaaggcttatgaggcctttcatccggatccgaacagggcccagaacgccttggggaaaatctagtttcggcggaag

SEQ ID NO: 418508 - DNA, 613 bp, Homo Sapiens
gaggggcacacactccggtccaggtaggaacctgcagatgctgccgcctgagtcaccagtgagggcaagctcgtgctttgcacagaccccccaacccccgtgaagccagaacagaaatgtcactcgtgggaaccctcctcccccactgcagggagagctggagtagcaccgtagcattgagaaagaacgacacacagaagggctcctcacatccgggggcccagtcctgaccttggtttaaaacggggggacgtatacatcacatctcaggttcctgcgtcagagactcatggtgtgaagacccttagcatcaaaatctaagccctgtcctcctccactttgggctgtggctcatggaccaacaagaggacctgcccggagcctctgtagtccacagctccgcgggcggctcctccccgcgacacccagtcccatgtcccagtggcctagccccacttcagcagccacacagcccagtacagtcacctccagggcccagacgcatgccagtgtggctgccacggactgcatgggcacacttgccaggggtcctaccctgcagtttctggaaaccctcccatagtacctggcgactgactatgcacctgcagac

SEQ ID NO: 418509 - DNA, 1001 bp, Homo Sapiens
agcggacactgagggccttgccttggcctctgggtccgtcatcttcgtgcattgtctgcagcgctacccctgagtcagcccttcaggcgtgatgaccgtgcttctaaacagtgtcgtcatgctcgcactgatgccacctggcggaacatgtcccttaataacgatcactccggtgctgtagcggcagcgagtgcaatcgtggcttggtgcgagcgctctccacatggtacgtcattcattcgatggcacagacgcctccgagtagcaatatgcacctatctaccacgatctccaagtctatctaggtgcacagagaatccaacgggggacgattctttcctttgtgaccgaatatgtgcgcacatcttacgccctggagtactaggtggagattgaacgtgtaggataggtgcatttatggaaatatgaattttcgtagtcaaactcgaagtagtagtgtcttcgctgcgtggaacaactttacgtccatcaactcgagcataccatctattagatgagcctagtgcctcccgggatcgatcgaatgagacttgtttgctgcaacagaccctgccgcgaatgaggcctctatcgcgtgtaacatgcatcgcaccgaatgccgttcgtagccaggcggcccgatttgtctggtagcgccattcataggatcgacgtaacacaggggatcccttgattactcttcgacaacgtgcaggcgtacactccagaaggaggccgacggaccacttggaaggactgtcgctatgctagagaggatagtgggtgcccgcatgcgggccctggtacgctgcgtgtgtacactgccgtaccataggaagaccctcgtgaccaaaaagaaataccggatgtgctcggaactacaacaagaaccctacttggcgagaagctgccgtggctactgtaggctaaccgttgaagaattactaacgcttcgtagatgagaaggaaccgaactattggcaactaccggggctctaccc

SEQ ID NO: 418510 - DNA, 1240 bp, Homo Sapiens
  misc_feature (291)..(291): n is a, c, g, or t
  misc_feature (505)..(505): n is a, c, g, or t
  misc_feature (1003)..(1003): n is a, c, g, or t
agcgggctatgtggccaggatgaccggcgcgtctgccgagatgacgacttgccctgggatctatacgacccctccaactcgcacccgtgagtcataaaatcgtgtccgcgtcgcaatgtatgggctgcctcgttgacgcttgcagacaagtgaggccgcgtcctttgcgcctgcgtctctgcctccgtactacttgtcgcttccatcgcctagtcctattcagcaggcctttagttagcggtctttcctagtgagaatacggctgtgctgtcgcactagttgtgaacacanggattggagaacgtcttgcattcgcaacaaaacaagaacatggagttacgtcgccacaggacaacagtgctctatgcaagcggtgaccacatgagagatcggttgtcacatatgaacaagaagtgtatagtctcctctataattcaaagaagccacgtggcatactcaggtatcaccacacagactgacacacggattgtacaccaggcggagngttgggtccaagagcattgaaccgagtagtattagtggctcgcgtctttgggcgcatatgaaggtagatcttgacctcctagtcctcgtacattgcatggttccctaggcagttgcaatctttcctaaggaaatcccccggtcatgctggaacgatgggcgttcagaaaccttggtgataaggtctcgggtcattttctttcgcaggttgataatttcgcgtagtaagagccctttaaaaggcctaccgcctccatgtcatatcctcttctagcctattttgttgaggtaaggaacctagccaattcttaaggatacttcttgagcgtaggtaattaacctaggataccttgcgacttggtttggatcccgactaacaaattgtcggttggggatgtccttgacaatgtcccgggttgtaggtccaagaatatttccaagcgctcgcgctggccagtttctcagggtcacgttccatttatgacaccttgaaggtccnttcggttcccttgggcgggaacccaggtgggttttccgttcaattctcccggggggtataggcccccctagcggtagtattgcctatcccaattataacccttgggcccttttcccgttggcttggcccctcggttcacgggaagtagggcggttcacggttcattccttgttccccaaaggtcctggggcccctcggtcccggtggcgttggattgcgctccctttctgtttcccg

SEQ ID NO: 418511 - DNA, 522 bp, Homo Sapiens
agcggagtatgtggctgcgccgagtcgtgccgagagtagcgctggtaagtgcgctcctggggtagatcagtgtctgacgctctgtgagactctagcgatgacacgttgcgatccgatgtctggcatcatagcggaccctgtaacgatgtcggtacgcgtgtttaggtgactgaagatacttggtgtccctcatctttatcctccgtctgagagagaatgaatctgttgccacataatatacgcatatctggcttacttggtcagtggagatttaatcggatattgcatttctactcaaccatgtgacgcctctgagaggcgcgagtggcctcgcaatacttcattacgtaactactggtatagcacctatcgtttcaagcctaagacgaatgcccgacatgttgatcctaaccagcaactgcatgatacatatcactaggcggaatagcgcaccaaaaggaacaatcggtgtaagattgctctctggatttcctttgaaggtgaccccttgtagtgaagtct

SEQ ID NO: 418512 - DNA, 1012 bp, Homo Sapiens
agcgggttctacgccggcacctgtgggtacgagcagtagaactgcgcagaggtcggcgctcgctagcgcagcacctcatggtttcgcgcgccagtacgcgccgtctggacagctccgggcgacagactacatacgaacgtccgatggatcagacgtgccttgagtcgcacgagaagcgcgacagaggatagctgcattgtcatccctgcgggattatacttctgtcttggtgacttagaccgccgtggcccgtgtccccagttgctgtgaacgaacaccgtgtacgcgaaatgtggctagcagagtattgttgaattgctcgtgtaactcatcacaacattgtgcatccagcgtcataccattgatccacagcaagcgctgtattccctccactcgccagcatcctggactatgacgtgggagtcgaccctaggttagcgctatcgttactccatttctcagcccaacacatgtcctccaacgggatcgcgcagccaccatgggcttggcggaatgcggatacttgagtcgtgccatgagttgaatagtggcatgaccaggctagtataggaattacttgcttttactctaccaattgagataaacataccttgtgagtaagtagctaggttgaatgcgccatcatttgaaggtaccttcctcgtatatgcaactctacgatcatagttactataagagaggaccttgacgtgcgttttggcgaggtgtttagcccttcagtatgtttaggtttgcatggacatcacttgggtgcgtagactaagtacccgcttgggtgctggcgaacggtcttgggaggacatgcacaggttctcaggggcatgttggcccctccgtgttgcatacgtaggagtatcacttttgttttaggtaggcgcattgcgattccctccgtggcagcgtaatctcccgtgataaaatcacgttgaggttgtgctatttggaccttctcccacttctgctgaggtagttcgctttgtgggaatccgtc

SEQ ID NO: 418513 - DNA, 887 bp, Homo Sapiens
agcggggcaatctgagtgacacatgaataaaattaattagattaattttgaaataagagaatatgcaaaattaaccaaaaaacccccagaaaacactggtcatctccttctctaatgaataaggaaataagatcataaatagtcccatctcaacatgcatatgcaattgaaaaaactgccctcacaggcaatcctggcacaatcctaggctcataaaatttctctatcttttcttgtaaataagtctccagtcatcattctaaatgggaatcattcttcaactgaaataattataactgttttctgaaatataatcataatcagtgtttctagttcaaggtacaattgaactaatccataattttacccttttcttttcgataagagagtgtctcatgagggctatcttcggtcagagatctttctctcaagctattctactaaaatattcgagtctgactgaacatggtagcataaatacaccagctgtccagatgcctataatttccacaaaatgtgaagaatccatgtatcttaggatgaccataaaacaattcatggtgtggaatctctaagcattaatagagacaacagcgctactgcagtaatacagctactacaaatcagtggcagagcaagaataagtggtgtatcaggcaatgtacagtttagccttttctcctaatgctgtggatcgagtttcctgggaaaatgaagggtacacaacttagcaaaagtaaggtagtgtcaatgactctgatgagcaacaagtctagaattgcaaaggtgcaaaatggcagttacaaaaggcactggcactgaagcaaattccctatatagccctcagtatggcacgctaaaatatcatccacgcaaggaaagcaaat

SEQ ID NO: 418514 - DNA, 1641 bp, Homo Sapiens
agcgggctaaacaaattgcaatataactgtgactaagcttcgtttaaacagaggctaacgcagcaacgctgcttacgggcagcagagcaagacgggacgcaaagcagacatctatgcctggcactgaagccagcgggaacacagaaacgcagaagcaccacatatcctccactcttaagctccttatacacacctcctcctatgccaacggctctcccacatggcctcgctgcaaacacctcaccactgcaccaatcaacactccatgcacacgcgccccacctaatccaatccctcccctttcctgccctcatgcaccacacaacactacaccccccctgggggaccatggcgacccccgaataaacaccaaccacagcacggcaagcgtccaaaccctacgaggaaccactcacaactagccctaacgaacacgaaccaggaccgggggccacaacccctcggcgcccaaccttaaggcaggaccaccccaaggaacacacggaatagtcccagattgcaaacctggaaaaccacacagaacaggcacaacattatgcccgcaaagagccccccaattacgaccccccataaacgggaccaccccccagaaagaacaggaatcgggagacaccaacaccgactctatcaccaggggaccagcgggacatgccagaagacacagaccccccaacgacccctcaaatccccgaacacggaatggcgggaactcccgccaaacagcatagcgcatcaccccatataggccaacacaacaaacggcacaacacacccccaagcgcccaaaaccaaaaaaacaagcgacagaggcaccccccagcacaacaaaagcggacaaaattcccagcagtaccaccccgacacaaacatctggaacaaacccaagtaccataaaaatcctggttcccctttagccaccatttcaaagcagaaacaccccccttgcaactacaaacagaaccacaaccttcagaaacccaacaaacgcacaagcctttacaacccgccacgggaaaaacaaaacctatctccaaagcaaaaccaggaaaatattcggggagccaaaaacagcaaaccacgccgtacaagaagaaggaacggggcgaaaaaagaccccgccgactaaggggagaacgagagcgggccaaaaacacaccccccaatcaggtgcacagcaactcgaggaacacaagacacagctagacaagggaaacgacccaccaccgcacacatagaggatccacccgacacgaaccccaagcacacactacaaccaaacacagagcagtcaatgcagaacgacaccacaacaaacagagacgaacatccaaaacaaacggaccgcccacccccatatagagagcacaaacgggcccccacaaacacaatgcctcaaacaacaacaaacaccccgacaaaagacagacccgaccgacccactccgacaagacacgaccggaaatccagggccaagaagacacaccacccgagaaaaccaccgcaccgacacacaaccaatccccaaaagggacacgccacccccgacaaccacacacacaacactccccacagccgcgaacactgccgacaacaagacgagcgcaaacaacactaaaacag

SEQ ID NO: 418515 - DNA, 1186 bp, Homo Sapiens
  misc_feature (507)..(507): n is a, c, g, or t
agcgggtgcctgccgcgtatgctcgccctggcatgcgctgtctgccctggcgtcctgccgccctgtcggcctgccgccgctggtcgctgggccgtggtgctccggtcggctccccgcggcactcctcatctgtcctctccactgcgtcggggaccagtctcgtgcttacagacgagtgtcgtcggctagtgattcataggaagatctctgcgtgttcccggaacgccgtagaggactgtgctctgtgtgcacgtgtccctacagtctaaatgggtgaacaaatggcatacgcaatacgctttgcacctactttgaatcgaataagtgcgctcattgtgcaaatggccgggacacaacttgtagcactagcgaagataacgtataagcttgtagcaaggaatagaagtctcatcgttgggacttgacgggtcgtacataagcgggggaaacgccaaaatgtccccaatagggttcggctgacatagtattgctcgggggcgagtcacncaaagttgaacgaatcggtgcacactctggcggaattggagtgcatcgactaggttgctcacttcagtgcattccatgtctgtctggctcggatttacgccccaaaactgtaaagaacttgtgcgtgctcattgccatcatagcactcctttagttaacggtcctggtgactctcaccggcggaaagttttccccacaggaactcataccttgtatcgacaagagggccaggaattcacccaacacacaaagtggcggtcctcccaaagggtggcactccatataccaagaccaggcatatcaggacgaagtctcgcaataaacatctgcggcggaaaaatgggagctagagttctaaggtggggttccttactttctctccaagttggtccacgcttgtatgggcggggtagccgttaattatttgccaccgacatgcggagaaaagcccgtagggaactcattaggcgcgcttgagagtcgacgcaaaaaagttgccacaacgcggcggggtccctggcccggcctgtccattgttcccacctttgcggtaaagaggtggccccaccgaaggtcggcgaatagcgcttaagcccctggggcgggggagcggacacccatattcgggtaagccctaatccattggcggcagcggagaaggttcgtaatgttcaccctc

SEQ ID NO: 418516 - DNA, 1591 bp, Homo Sapiens
atgcgcggtatgcaccgcatcaagagaacaacccgttcagaactgagctcagccagagacagatggtctgacttgatcatggaggttgtaaccagctgtgtctgcaaaggcttccaaagagctgcgtacttgaaacaatgaacggcctcactagagtgtgcccatcaggagcatgcacgactctgacatgcgcgcacaatcattcacacacaatcattgcacctgggtacttgcttcttgcaatgtgccagacttccgcctctgtgagaaagcgctgtgtagcactagtggtgaccccatgctcgttatcacgaatgatgctattcgatatcagagtatcgatgtggctcatcgacttggaggctctcgacgagcattcatcatgcacgaggacaacgctaagattccacctgagacaaggctgacatcaaaatcaactgctaggagaatgccatagaaggacacgaccggacctagcacaaagcgaaaaacgagaggacatagtgaggtcgaacatttacctcgtaccatgaaatttaccaccttaggttcgtttctcccggacccaattgcgacaacggcgcaaggcaagaagcggcgtcaaccttacggacagtttccctagtagcaacgtataaatagaagggggtgacgcacgtggaaaccaaatttagaaagcaaatcgcccaggaaatatggataaacacaagatggaacgaggccgttgagctagtgcccaccatacccaattggcgcttgctagcagacagccggtcttttacgcacccagaaccccctgaactactttcacagcggcaagtgacaacgaagggcctggatgcatccttggcacccggcggtggaaacacatggtgtatctcctgggagaacgagagattcaaacttggacgcaacgcgaaaaggttgtagctccaccaacataggggccgttgtgctaccctcgaccaccgtacaaaacatactagttggccccgattgctaccccatacgtacagaaccacgaaaagtataaaatccgccagccgtgagacatatacatgacgcccgctaaatttagacgtcacaacgtcccaactggatagccagacgatttggaacatgactaaaacggccgttgccaacgcattctggacggaaaacgccgccttggcccgtaacatacattacaatacttgaaccacccataatggcttcgcattttgtgaagcactctggcgtacagtttagaccaaccgttggccacgcccgttgtgggccaacacggcaaaaattagggcggatctacactacctatggagcacaaaacaatgagcatccggaagcaccaatgaaaccaaagcaccaggagacacaaccacagggacaagaaatacccccatacggctacaataccccgctcaagatcccacattagaaaaacgcctagggagcatgccgagcacgacccgcaacaaacaatagtaaacagaacagacatcaccaaggagagagatcatcaaggaggcaccccaggacgccaacaaacgacacgcacagcggccacagcaacaacagcacagagcagaacgac

SEQ ID NO: 418517 - DNA, 786 bp, Homo Sapiens
  misc_feature (45)..(63): n is a, c, g, or t
  misc_feature (82)..(136): n is a, c, g, or t
  misc_feature (149)..(213): n is a, c, g, or t
agcggcgcctggcctgataatctgcctattttaaggttgataacnnnnnnnnnnnnnnnnnnnggaaacggattctccctcnnnnnnnnnnnnnnnnnnnnnnnnnnnnnnnnnnnnnnnnnnnnnnnnnnnnnnnggggttcacgccnnnnnnnnnnnnnnnnnnnnnnnnnnnnnnnnnnnnnnnnnnnnnnnnnnnnnnnnnnnnnnnnnataaatttttagagtatttttgggggtagaagaccggggtttccacctgtgtttggccaggattggctcctccaaacctccgtgacctcatgatgactaccccgcgctctgtggtcttcccaagatgctgcgtgaagtactgagcagggtgataccgccagaccagcacccgggcgccgtaatcacagctgtgtttttaagaaaaccttgaaccattttaaagatttggtagcgccgggccgagggggggcgtattatatgcctagtagccccccaaaacttttgggcgaggcgcccaaggggcagggaagggaccttgccgtaacactgtacgagagtttcacgagcacccctgcctttgtggtccaatctatttggacaaaagaacgcctctttcttcttattagaaaaatgtttttttcccagaccggtgggaaaatactcccttagagagttgggtcaccctcttgtggcataaagaggaactttccattcatacccacagattggtggtaagttcattcccgtaaattttgatactagggaacaataacatctcttaatttcttgacg

SEQ ID NO: 418518 - DNA, 277 bp, Homo Sapiens
gaggtgcagctcgggcttcccaccaggcaacccctcccgcctcagcggcgccaaggctgccaacacaggatgtgaccaggcactacgaagacagttaagctcgagcgacgtagcgtagggacccccatgacgctggtgctgaccgagcacacgtgcaacgagagtcaacaacgtggagacactcatacctatgcagctaaggcactcacttgagttctagtgcgcatacatgtaccctaggaacgcgctatccatccagagccgagcgtcaccccac

SEQ ID NO: 418519 - DNA, 1396 bp, Homo Sapiens
  misc_feature (976)..(976): n is a, c, g, or t
ccagtgtggagaaatgtgaattaaaagaggaactttatctcccttttattcctcaaagccaaaacaagaggagttgtaacgagcagcagttgtactaccttagccaaaatttttaattaagacacgagttaaaagccaggttccaggtgtttatctcagaaagtgttccatgtacattttaacttaaatttgggctggaatctcttttcaaagagagacacggggagaacattacattacagaaaacacagaacaccacgaacttcattgttctcgtgcttttcccaagagagaggccattcaccttcagagagccgagaaaaaccacccacgagtgtgccacgagaaacaaatcagagggtggggttgagacaattcttcacccactttacacttagtgtgaagcccacggagtttaatcgtggggcgatcacttattattcgccccatagagtgtgtctctaatattataatctccctatatctccatttagcgctgggggcgagatctagcagacctctcccccccatcgttataattctccccctgtttgtgacccaaattttcttgtgttccccccacagaagacatctttttcctccctataatgtgtgtattctctgtagtaaaggggtcatagtttgctagcacaacgagcaactaagagagtgtggctctcttctccccaagcgattgtggcctattataattatttccccaaaggtcgggcttgtgtgtcacacaacaatatttgtcgcgcctcgacattattttacaagccgctcgtgacagtttatattatacgcgcctataagattataaatctccacacattttacaacgcgttttttccacagacgggttacaaccccgagcagcctctggcttacaccaacggggttttaaaaccaggagaacccggcgggggttgatcttatcccaaggagaagtgttcacgttctcagagagacagcnattaaaccagagcccagatctctacacgtcgggcaaagagacgcctctggggcgcccattgtttgttttggtgggcacctacacaagcagccacccgtgtgtgtaaatattctccccggagcaccaacttttttgggcggtcgaaggacgcccccaaagagagccggcgggccgcagaaaataattcacacccgccgttggagggtggttcccacagcgagcagtttttccaagaggaacacaccaaggcctgtggtggccaccaagtggtggttgcggtggtgaaaaagcccccccgccaaagtttctcttctagtttaagaaaatcatactaacggaaaccaaacaattgtttagcgactgtgtgacacatatgtggttgtgagcgtggttggtctgtcgctgtgtataaatccgcgg

SEQ ID NO: 418520 - DNA, 784 bp, Homo Sapiens
  misc_feature (151)..(151): n is a, c, g, or t
  misc_feature (378)..(378): n is a, c, g, or t
  misc_feature (458)..(458): n is a, c, g, or t
agcggagggtgccttgagtgtagtgtttgccttcacatgaccggattcgtgcttctcacaccagaaccttcatactcatcctgatgttggcgtgacacttggcataattcccatgcaaggaacgccgttggactggttaggcgctcagtanacggctttcgcgagtaagtaacgatacgggcttaaccccggagcaaagacttcgaaccttgggttggtccggaatggttgtttaacccaacaaggtttgtccttccgcctcttattagacgcctgtgggaaggcttccaaatccccacgagaagtttacccgttccattggggagtcctgtggtgtgctgatatacacagtctgcacgcagaggctgtgttgtgacnagatctcgcccaaacggtataacggtgtcgattgttttcgacagcggaatatcgctattttgatagagaagagcgagacncctgtccttcgatccccaggtagcgcctttcgaacgagatatagaagccggaacggttcgaagcaaaaagtcgcatcgaaaaacgccgagaatcacttagttcctggggtgagcacttgccgtaagacgcgtactgaatggttcgattacatgtgtgggcctagaaactccgcgttttccccaaggaggtccctaggggttccccaaagggcggaccttgttattgcaactctctaggtggttgggggattttgctattggccccgttgcgtcgaattaggacgttgggacattttcctcccatatttttcgaaaccaacacacaa

SEQ ID NO: 418521 - DNA, 948 bp, Homo Sapiens
  misc_feature (361)..(361): n is a, c, g, or t
  misc_feature (781)..(781): n is a, c, g, or t
agcggttctagcgatctctgcggaccccgatcatctgcatcgcaccggcgcaggggcgctgatacaaccccagagcctccagcgaatcgagcgacctcatgcccaaaaacctgaagagtgcggaatgagcgtgtatcccaagtacttgtggagctcggcaggaagttgacagctcggggagcctgcaaggccatccagtgtgcaatgtgtgccttcacactatctgacacgtgaccgagtcacgcgagagaggtagcagcgctgggctcggagtgggacaagacatcgcctgagttgagtaagtcctctttgttcccagcgcttggcatccgagcgtagaatgtcctgtgtgccaggaatnacatcccgcagcttccgaggatgaatgcacggaaatgtcggggaggacaaagacagtctacgcggttcgaatgcagaaagcgaatgctaccgtttctctttcatttccggcattccaaaggacgcgcaggtagatttgctcggccttgacattggccctaggggctcctgcagaggacaagtcgcggctccccggaaggaaacttagtgacacgccgaacaggacgcccgtcgcctattgcttgcgggtcaacctcgtagcaccagtctgatgccctttgccatgtggctcggatgcgcgttgcagagggaacgttgtgagggtaacttctaccccagagcggcggaaaacaattggttgcccagttgaccgaaaagaaaggtgcgcgggcgcataccaattgcataagaggatgggggncgagttcaccggcgcccctgccatttaccaggacgatcccgcgtttccggtgcaacccacaaaggacttttgagacaagatacctacattttgctagggatcctaaacggggaggctattagaacagtttcattggctcgtgagtgtcctactacactagagcctaa

SEQ ID NO: 418522 - DNA, 1028 bp, Homo Sapiens
agcggattcgtctcccgtgacctcgtggttcgtttatgctgacgtgctcctacagggggaatgcggcacgccgatgtgctacgtgctcctcagctggtgtcggtctgggacactaatgtgatccctgagagatgaaccttgtaccagcagaatctcggtgcgtcgtagctcgacattagtctaggaaagggcatcgtagtccgtgccgaagatgattggagccgtactcgtgcatatgagacaccagttgaaggtctgggagggagatccaaaaatgttgagcgcgtgtgcccacaggatcccgtgaaagaggagaatcgtggtacccatagcttggaacggcaatgcactcgcaggaaagggatcccctaccgtgccgtgcgttggtaacggcatgggcgcaacaggcctctgtggtagtgatgggcattgcggtcccgcaaatttgggtggctgctttgggtattgtgaagtgagctagggtagtacaaatccttgcggaatttgacacatcgcatgggagccttcgtagaggaatcattaagggatctaccttcaaaaggacggaggtggcctgcaaggacacctcaggggtccttttcggagcatgggcatttggggcgagaggtccccagccaaatcacggcgtctgcggatacgtaaatcgcggccccgggcgcctgtactcaggctccccaagtgaccaccggaggtgggatgaaacaattacccggtgcgtttcaccttgattccagacgcatgcgatcttcccaaagaaaggcaatagttctggactatacatgcttggttgacagcttgcgtacgcacattacccgtggggtggttggaccatggcgcgcttggggggcaccgactgttggagaggcaagcgaaaggcaccatgctccggtggaaaaggggtcgcgatggctcggaagggctgaagaggcatgtgaagaacggaacgaaggcaagggagggaattcttagggagggccttgtcacctggttggacctgctgtggattg

SEQ ID NO: 418523 - DNA, 1131 bp, Homo Sapiens
agcggggtgtgatccgggcgactccagtgcaccgctctccgatgcaggcgacactccatgtccgaggcggaagtgagggacggccacactccgtgaaagcgaggagttcggagatcgatggactgctggcggctggccggactgaggaggctgctaggcactcatcgaaatgggcgcagtgctcggtcgtacagtagacccggtgtaaggaggtctaggggacgagggcagagagctaggtcgtgcagagtggtccgtggtctttcctgtccttatgaataatgtcacaagagtgtaaaggactcccctgggaccccccggggacatgtattgcgacccgacgtgcacgttcgcgactctatgtcttgtgtgtctccttgacgtgtattggactcattcttctctctcagaatgtgtctcttgaatgaattccacatgatgtgtactgggtgcttatctgaatgaatgttcctggtagcgcttgggattcttggccctttggatctggtgtccctcctcaccaaggggcacatgagtaggaagactctgtgtatgtgccagaaagagaggttctccattgggcacggcatgtgtaggcctcattgggagaaaagaatgtgtgcccagactcgttgctgacaaatttgcaagcagggatcctcgcgatttcgcagcggcaatcgccagtggagcgcaagggggcaccggcgagtgtaattgggacttggcacctttgacgccaggtgggtaggacactcgaaattggatacccttggctggggtctcgaaggaaaccattaacctttcgcagtgtgctccctctctgcggattgcatcgcacgccaggattgaggggggatccacagaaagaaaaccgcttaaacataccttggttgtggtcccagttcctctgaaggaccctttggaaggagacctcctttcgtatgcgctggcgggccttgtggaggaacccacccctatggccattggaggaggagcgattgtggagcgtgcggagtacggaccaacagcaattgtggcagggcaaggcctccagacgaacgccttcgttagggactaggcgcccggaggaaaacccgcgccgctattataactgaggaggcttacaga

SEQ ID NO: 418524 - DNA, 488 bp, Homo Sapiens
  misc_feature (390)..(434): n is a, c, g, or t
ggactcagaaacgttcttgaacttcaccctaacaaacatggcctgtgtacagacagaccaggtgactgttaaactaggaatcctgtaaaacacctcagtgccataaaaacggacaagaagaaggtcaacaagtccacacagagcttttgaaaaacaaaacagaaaaaggagataatatttcacacatattacttgaggaaaatcttccttacaccctgagaccaactatgaagaggaacaaaattctaactcagcactccaaacagaataaaatattctcaagtctgcatttcagcatatataaaataccttgaatcagaaattcaaatgtgcaaatagaaatggacaaaaagcaaggaggaataaaaagattgtcaattgaactccagnnnnnnnnnnnnnnnnnnnnnnnnnnnnnnnnnnnnnnnnnnnnntcataaggcacccaagggataacagatgtaaattaaaatttaataaacgacagt

SEQ ID NO: 418525 - DNA, 1115 bp, Homo Sapiens
agcggggaaccggaggatggtgatgcgtgcttcgaggagtataccggtctcggagactgtctgcatgctcccgtgcgacagaacataaggctattaataaatgtatcgagcataaagtcgcgtgcgcgacgaacgtcctctagcgatcttggcaggctcgaggagagctgggctatgaacataccagcaaggacaactggcaatcagtgctgcatacaggagcgcgctgctggaccttcgcattcccgcaggtggcaatttgacgaggagagttgcaggcaagccgatcacgagtagcgctctggaagcgaatcggagagaaaaactctaagcgatccccgtgcgagagaccttgatccaggtcgtccaagataatcgtaataatcgaagcacatccctgcggatggagaacttggtgctatttgcgtttacttgtattctaggtcataccaaacatcaaaggcgtaatatattgcagaaaagaaagaatttagggaagcgcacacacttgataggagtctctgaccattctacatgacgttcgcatgcaccttgggtaaacttgatattggcgcagacgcccatgatacgaaaggaagagatagcatagatcatgcgtaagcacgccttattggtagcctatgcatttctgggcttaggaagggacatctggccgcatgggaagtacctccgataggcccatctaagcccagagttaaccttgtggtggaggaattttagttgggggcttagagcgggagggaattagctagaataacccttccaaatttgggaaaaaatgagcaatatgcttgcgacctgccatgggtatacacaagggcggtctctataaatagagcacgaactgggaaccacaggactctttcttcattcaaccaagtataaagacagcgttaaaagaggccaggaaagtatacccgatgtttggttaggagaacgcttaaaattggggccttaaacaagagacgcgttttcccagagattcattgattggcctttaagtatgaaacaaggagagggatgcaaaatatgcggcaaacttatagtatagtaaaagggaaagagacactttttgacacataaagaacttagcc

SEQ ID NO: 418526 - DNA, 1065 bp, Homo Sapiens
agcggaagggactcgcggacatctcaggtctcttggtctggctcggtccctccggagacggctgagcgacgcgttgctgtcatccttatggggtagacctggcttgtgcctccggtgatagcccaaatcttccagacgtgcaagagagctagatttgactgccagagcctccgaagacatgagcggcgtgacctacgatcgcgtccgacgctggggcattatccgggcaaggagatctccgcgaagcgcgaaggtaggtacgcgactcgtaacctcctataacttcactcactgtggtcattccggaccctgaagttctcggaccctcacatccctcctggaagaacgtagtgacgataactacacattgttgcttcccaagccctatcattcgatgtcctttcgtaggtgagttcgcaggtaatgactctgagttgtcaccgtgtggtgcactcgcatagtaatagggttcaaccttgtggtgaaagggcaacttgagatgaattatgtttacaagtgctaccccatgacctttgtttcctgcggtgatctctgagaccctaggaaagggtgtgttggcgtacccttttaaggtgcgtccaatggattggtcaactctagacaatcgaagtgtgtccagcgtgttccatgatagttacgccgcattgtaacatttcataccggactaatggtgccgacatgcatcgtgggttaagctagtaagaacccttctgaagaatttgaggtgcctagtgcccacgtgggaattcaattgtgttgaagcttgttaggccagtaatgcctagaaccatacgtgccctggtgagggacattgtggtcctggcaacgcgtaggtaccagaacaaggtggaaacccgtctttgagagaggtggacgaatcctttgtcccatgtgtgtgttgagaattacactttttagttaatttccctgacataagaattcctacttttgaagggccgccagtagtacacaggatttaggtcgttcgaaacgacgcgatgttgataaatgcaatcgtatattatttgaactataacagtatcg

SEQ ID NO: 418527 - DNA, 1483 bp, Homo Sapiens
agcgggacttgctcctcgtggtccagtccgtatatgtgggggcttcccggactactcgtgagaaagggtgtgtgcgatgactgggttagattcggaatggctcgttcttgagacagtgtgctgctcccagacatgactaacaggactcgacgtccccaatgtatcaggtttgccgcatgagtctgaatcggtcctggcagtgacgcaggtaccgttcaccattacgaggtgggtgagatgcggcattacacatgtacagtgaatgcgggatgactcgttgtgcgcgtatgcttgggcttagtagccgcatgtaagacagcgtaacaattcttgctcggcggtagcacggcccagaggtagcgcatcgcagcaaaagcgactagcgggtcgcacgggtcaacgtgagagcagtgccagctggggcgatcgcgtggaaaagggcacgctccgaagagctaataggcatgaattgcaatcgcgaggaatcgatttatgatcccgagtgagaaacgagcgcgcgggggagtccccgcgcttgagagtgttcgataccttttattgctcgctattgcttggagagttaaatcccgtggctgttcatttgtgaattgcgtcacccgtgggctggtttgcgcattttcggctaggttcggccctatcccggagtgaaactatttcagtgcgacatttgcagtagtgtatatgtccatcgaacgtgggagcacttgcagaaagtcgtagcgcaatcctttgacggaaaactatgtcgttgagagacgctaaggcatccaatgtagtaacgctttggcacatgtacacctaagttgtcccttaaatataacgaggagtggtaggcgtggaactaggttcattggcgaactccggccaaacgtagttacacccggggggacacaaggccttgagtttaccatggatccaagcgcggaattcttttgaattgggaattacagagcccaacctctgggtgacgagacagacaatgtttccatttccatggaactgtatcgcttagtcaatatacatgttttcgatatagccccgtggaagcagaggggcaccaaatatggggatgtggaacaagtacgccgtgcaattcataggcaataccgagatactaaatgtgtgccattgtacactttattgtacctactgtggtctgtcaaataaaacacgtatctgtacaatataaacccgtgtgacatgtgcattccaatcacttgggaaaatgactgcattcgtgggtgacatccaacaatgggtacacttctggaacgaaggaagacgccattgtgggaagcaaaattcaagttaccccttgcgagagaatctgacataccccacaagtgtgagacaatcccactgggagatatgagtctggcctacaactacttgtaaagacaccacaacccccacagaggatgtctgaagaccatgtcgcgccccagacgtgtaggcacagcac

SEQ ID NO: 418528 - DNA, 1154 bp, Homo Sapiens
  misc_feature (383)..(383): n is a, c, g, or t
agcggagtttctcgggccccaccggagggagcgaagcggtacccgagtacagcctcggagcgggcccgtgtggcttgtcgcacatgagagtggtcgtatagacgaagatacgtgacgaggatcgtgcagacggatattgaaccgtgcaaaggagaggagtctcgagatgatactcgtactattctgtcgtctctgttcttcatcttactggcttgtgcgagagatcagcgttgtggctaatatatgaggtgcgacaggacatcatggattgtgacatccaggggctagtagagtggtagttagctgcagtggtcttcgtgcagcagaaaggcgaaatcggtctcataatgtgcagcccctttagtactgagggggcggtactntgtttgaccgtgacttagaatagtcgtcaagtgacgtgcagcgacatagttacgtttctatgcgtatgactgtggccaggtactgggaaaagtatgggggttgaattcccgtgtgagcatgtaatggttgtttccatgtgtctcgcgtaggtgaagtattgaatggctgagagccaatctggtacatttggaagcggaggactttgtggcgatactcgagtggtcgtgagaacgtgataggaagagcggacaacatgacgaggagaaggtgcccctgttgcttccatgggaaatgtaagtgctctgtggcgaatacaaggtaattagagtgatagtctagttgcacactgtgggagtctgggatattgctgtacggagtaattggaattcaaaggcacctgtgtggtagatgtccttgacttgggaaccctagatttgttaaatggcttcccgtacttaacagtggcctatatggttgcatcgttagagccattcgtaaatgcgtcgcactgtgggacaatgggatttgtaccgttccccagtgtgagccttccaagtggtattacgggagaagtcatatgagaactacatttgtcatgacgaagtggatagtaagaaatgcatttagatgtaaaaacaacttgttgtgaaggacatccatggatctgtggatataaacccagcaattatatatggcacgtattcccacgagatggtttagcaacccagaagagttgacatgctaccgaacaatgaagagcgtgtgaattg

SEQ ID NO: 418529 - DNA, 1092 bp, Homo Sapiens
agcggggttcccctgccccgctgacgttgcggtgcccgccgtgcgtcgagccggtgcggctgtccgtgggccgcgttgtgggcggcatgcctgctccggatccgggcctggtgtggtggtgccggcgacacgactctcactgtcatcgcgtggagctccagggatacaggctatgtagttcctgtctaaccgctgtagctagtcaaagacatgtaaagcgtatgataccaatggttcgtcagaagagggtccctggcacggataggccatcaagacgggatccgtaacctcgagctcgtgcagagcggtatctgtggacgagaactatagttcgcttacgtgaaaactgacgtgttcggcgataagcttagagaggcttataatatagccctgtgtacgagtagtaaaagtggccttgtgacacttgaatccacaacgaaagcggggcgactacgtcctaacatgcttatgacagatataccgcaaaatagatgggttgacatattccaggtgatggtggaaatagtattgctagggaatgacaacatggagagggtttaccccggaatgtctggtacaaacgatggggatgcctgctcgcaaacagttgggaagagtgctcgttgactcgaatgcattctgtgacatggcctaacagattcaccttagaggacaatgggccgtaagaatactggtcttgagatcgttatttggagacgacaactagttttccatagtttgggattgcggccacgtaggcctgggaggccgtacccacaagcgaatggagaccatttgaaacctgcggactgagtcagtaatggcgagaggaatataaagcccttcgctgtgggtatctaacagtggaattgcttggcgtatagtaacttcagagaaatttgaattcccacgggtggcgacatagtttgacagtgcgtagcacgtacttcgatacacttttagggagaggaatccaccgggaatggaagctttccccgggacatgtgacaggtgcggcatgtacattacactcaaaaccgttgagtgcccaaggttgatgacacaggcgctgacgaatagcgagggcccatg

SEQ ID NO: 418530 - DNA, 1252 bp, Homo Sapiens
  misc_feature (316)..(316): n is a, c, g, or t
  misc_feature (345)..(345): n is a, c, g, or t
  misc_feature (401)..(401): n is a, c, g, or t
  misc_feature (407)..(407): n is a, c, g, or t
  misc_feature (704)..(704): n is a, c, g, or t
gagtgacggatggctgattcatgataggcatcgcctggctgtcagatactcggaaaccagagcgtcggcagacgtttcagggaaaggtgagagatcgttagtagatcggtcctttgctgatgagggatgcctaccaatcatggtcgctgcgtcagatctaggagatcaattgattacgtcctctatgaagctgtgtcagtcacaggctgcacaacctgcgttgacggatggcgttcacgttgtcgacatccagtcggaccaggatattgactacgggtgtcctatggagtagggatgcatgacagtgctaacgagnattcgtagatccatcatcctgggagacgntatggtcaggatcgcaatcctctgcggcgtgactgatcctatagggagtctcattntgaacngtagcccgaattgatttgttgccaagtgcaatggtcatctgattgataagacagctggtgatgcgttatatcagatccgtgtataggggcgaccctctaagactgtggcgtaaatatatacatccttacacagtgggcccatgagggtgactgagagtctgtgtaaaccctgcgtccgatatgtcccgttcagtacaggtgtccgatgcgacgtgaaaaaattcctactttactgcgctcgaagaattatttgcttcctaattcttctcgttgaagaatccaccatttccggggggntatggtttcggttatcgtttccatagcgggagagcggttccataaataggaatgggtgggtgcaacccttcggtggcgacctaaggaatacttagcgaggttcctgtgtgagaaccggattatacgctcgaccattggtacagaaattccgtaaaaagcccggtgccccccaataaaagccccgtagggggaattatcctaaaccgcggaaaagatcgcgcggtcccgccttggcggaatcaaaggggcgcgaaccaccggttgcaatttccgttacgggcttgggggggagctttacccagacgatggggaacagaggttggcccggagccatcccaattgggaatttaacaacggaagggggtccattcggcgagacatgtggtgtgtgtcgggaaaaaggtgttacatggagagttcacccaaaggcggagtccgggaaaacacgagggggaatgaaatccgcggaatataccaatcgcagtgtttgaaccgccaactattgtgggaagaccgggtttcccgttctgtgtggcaacctccacaaa

SEQ ID NO: 418531 - DNA, 415 bp, Homo Sapiens
tataagaaacacttcttaacaagtatttactgaatattatgtgcagatatgcaaaccagtagagtgaaagaatggctgaagtagagatgatgcattgagttcaccctgaggaagacttctcctactctaaatatgtagctatgaaaggcaactgtaaaaaagagaaaaccaaaagacaaagctgagatgagatacaagatgagtatctccacacaagaaaaacagagtagaagagactgggtgccagagctgggttcatcctagaagccagttaggcccacatttttagtagaaaacttcgtaactgaaaattttaacagtaaccattaaaataatggaaatatagtctatgactttcgaatcaagagggagggaaaaaaaggagtgcagaaaactaaccatctaacagaagagg

SEQ ID NO: 418532 - DNA, 846 bp, Homo Sapiens
  misc_feature (820)..(820): n is a, c, g, or t
agcggactgtgatccccgtacattggccttgctgtggataccctgaccgtgttcaaaaaatggctctgacgcctcgtcacgcttgtgctgtatagtgaacgtgacttccgggaacccagagagatgttcggaactcgctatgtagaatgtacctctctggaatcactagtgaatacctgagtgcttaatcgctatagcggtctggggagatccattgatcctcgtggacaatgattatgatctctgaagttatagatacaacagaagagatatctgactcagaagctcgtataatgtcatatacgaatcgccatataacactcattaacttgttgcagtcctcctttttgctggtgcaatgtacgattatgaattaaatttgaattgcctctccagctatcatcctgacttatccgcgtatctcttccacaggcgtgttcgtatcgtgtagggtcactgtagtgatgttctttcttttggtgccctttctcattcagatgttggtctgatagtgggaaacaatgcataaaaatcgtgattatgtgctgagcattctgtgaagttaaacctgtacactctatataaattggccagttctttgttagatggtatgatattgggttaaaaagggacttcctcattatgtcgggcaggaacttggtgtgtacctctgtgacgggtactgtccaggaaatgagttctaccatagaaagcgatgaggccgcaaagggatttgagacttgcaatacggttagtacgtagaagccccgttcggcatgttttgcttgtcaaggagcaatttacccagtgaagtagatanaacgtccacgatggctccgctcaacc

SEQ ID NO: 418533 - DNA, 817 bp, Homo Sapiens
agcggagtcgcgcccttgccgcttgccaccgcgaccgccgccatggagcggccgtacgctgcgacgcacttggtcctcgggcgccactgggttgctggtcctagctcctgccattctgctcttcgctcctcttcggactacctgctgaccctgcggaggccggcttcgcttccacgacccttgcctcgacgattgaagacgtgtcgtgctggagtcgagatccgcggaggcagtgtcagacgtgctcggcctaatgatgcgtcctcgcgagaaagggctgatgccgttacgcgtgggtttagcgcagtgggcagagaactaacggctactatgggtcttgccggtgcagtcggtagtttggcgtagtaacaatgacagaacagcacgaacggagaggggtgcagaaaacctgagtaaaactagtcctggagcgtccaggggatgtaaagcagatagtagatgccgatatgtaggtaagagtaagacgttactaatacccacagttggtgactactgatgagtcatttaatgcagaatagactgcccttaaatcacgaaaaagtttacatggcccgaagttattgatgcgcgcactgcactaagatttccaactagagcgacacggaaagtacagcccgtcgcgatggaaacgaaaaggggccaaatccaacccccggtgtgttcacacaccataagcagtgcacccatagtcgaaatccaagatggttcacttttgccactataggatgaacccgcagtatacccacaacttgggagtatctctttgtagaaatcgctagactatggagttgcccca

SEQ ID NO: 418534 - DNA, 1016 bp, Homo Sapiens
  misc_feature (518)..(728): n is a, c, g, or t
  misc_feature (759)..(777): n is a, c, g, or t
agcggagtttatggtacacgcatattaactaagagaaagtgtcctatataggcagttagaaagtgagacactctagagagcttacagcactagatagaactttgtttagttttcggtggtagaaaatgaagctctctttctagaaaagaggagtcctgattcgtacatagcgtttttttcttctgatgaaaacaaatacataaacaagatgtgatttttgatatttttcagcacattttaacttaaaaattattttaaagaatttgtgtaagtaaaaatatgtgttaattatgagaacatcaaaactatagtgattaatgaacatttccatatagtaaattatggatgcaaatgaaggaagtcacagcccactgtttcatgtggcatctagtctcatacattcagagaataatactgaattctggttttgtattctaattagagcactaacaagatagtattcattagaagaagacaaagtgtctaaaaatcaggccatagaaagtacagctagattnnnnnnnnnnnnnnnnnnnnnnnnnnnnnnnnnnnnnnnnnnnnnnnnnnnnnnnnnnnnnnnnnnnnnnnnnnnnnnnnnnnnnnnnnnnnnnnnnnnnnnnnnnnnnnnnnnnnnnnnnnnnnnnnnnnnnnnnnnnnnnnnnnnnnnnnnnnnnnnnnnnnnnnnnnnnnnnnnnnnnnnnnnnnnnnnnnnnnnnnnnnnnnnnnnntgtatgactcgttattaaatatgtatcaacnnnnnnnnnnnnnnnnnnnttgccattcaaggtactaaaatcttaaacacgaatggtcacttccaaatgggttattcacctttgaaaaagaggtgatatagtttatactaactttgtatctattttcaaaatcgctggaaaacaatcaatggaatgttttaggctaaagaaagacaaccttaaccaggatggattcccaataacccggattgatcttacaaatccgctgaggttcaatttcccatgtccttcccttcc

SEQ ID NO: 418535 - DNA, 559 bp, Homo Sapiens
  misc_feature (51)..(139): n is a, c, g, or t
tacaccagtggtttgccagggctctcagaccttctgccacagactgaaggnnnnnnnnnnnnnnnnnnnnnnnnnnnnnnnnnnnnnnnnnnnnnnnnnnnnnnnnnnnnnnnnnnnnnnnnnnnnnnnnnnnnnnnnnaccttgtggatcataatcaagaaaaacttttttttaagctacttgtagcttttcacaattgagtaaggtatactcctgtaaacaaaatttggagcacattcgtctctctctacctgatttctccagaatttgaaaactagttgacaactttgtgccctgtcttccagtttaacatggagctttcagtctgtaatgcagaggatcctctagggtataactccacaaggcagaagacaagtttactgtggacaaaaaaatgggctagaatgtcttcagcttctcaggcccttaatagggctgatgatggatgactctactggagaaaaggaagacaaagaggtttcagatcactcaataaagcagctgactctcaagaaatggctggaaaatcatatttaaagtcgatcttaaatgaatttg

SEQ ID NO: 418536 - DNA, 868 bp, Homo Sapiens
tcttcaggctcagggcataggcaggcggcggccgcgttttctggagacggtcgctctcggagggaccctgcaattgcccgagaccgagagtgggcgctgcctgaaagtttgtccctgggcgcttcgctggcctcatccggtctcggccttgttctgggcctggcgcctttcccattgttggggaaagtggtctaggagaccaaggcagcgtgctgggtgggagagaatgatttgtggcttctgattctgacatatgtcgttaaggaggggagggatgagtgaccctgttttacttatggagaacctgggggcagagctgttttcccagggtgacacaggcggtgagtagtggagctggcattcctgaccccaaagctcagcgtttcccagccactctccgcagccaggccttcacctgcactgctgggcgcaggtggggaagtggggaaacggtgctccatcccctgcagagggcaggcgtgcggggagcggtggctgaactccacagacagctactgctcagctcttcagctgccggctttgaagagtgtgaggggctctgggcaagaggcccccacgttactcaaggaccagatcatcaagagctttacttgtcccacaaaggagtctggacctcgtttaagtgcacagggagaccgctggaaggtcctcagtggcgtgccatggccccgacttctatttgagaaagtttttctctgggccacccgtctaaggaacaggtatctggggtgggtggtgcgggtgagaacaatggtggtgcgggtgcttggcgaagaacgtgaagtgtccaagatgttcacgaagagaactgaccagtctggatgacaggaggtggaattagaaggaa

SEQ ID NO: 418537 - DNA, 877 bp, Homo Sapiens
agcggaggggtgcggtggatgtggagaaaatggcggtgtctaggagctgtgatcgacttcgtcggtgatgcttgactctgtcaatgtcacagcctattgtctcctgttgctccaggggtgacatcattcagacagcttctacagaggtgatcatggccaacagattcccaaaaaggacatggattgaaatcccctttgcctccatggctaggagatgagattgattgagatccatagaaatcacaattagagcccggcgtgctctatagagagcagaaaagaggggaatgttgggaaagtctgtattcttctgagatcttatgatggcctaaaggaacatcgtagcagcacgatgagacgaaagagcacgggtgaaacgtctagtgacctggctgagttaaccgagcctgtagtaatgaggtggcgatatttacgtactgggggcgacagaagcataaagcctatgccccgagacacactatttgagcaatgaaagtcatggtcctgctgagagagcttgtggtaaaaacaacaaagaatcagagagacgtcaggagatctgcgtgtccccaagagtctatgaggtaacctcttttgaattagccactgttggagtctgtgctctgactgagtcctggtcatggggggtatacacgtctgtcgcgataggttaggactacttaattgaatggaacggtataagggcctttgctatgcaccgggctttactttaggattgcccaaagcttggcccataactcccaaggaaacaactggatcacttgccctcaaacgttggattggaaccatgagatcgcctcttccctaagagaacgaataacagtggttaagaagtgccacaaaatggtgggagtca

SEQ ID NO: 418538 - DNA, 1081 bp, Homo Sapiens
  misc_feature (215)..(215): n is a, c, g, or t
  misc_feature (395)..(395): n is a, c, g, or t
agcgggtaagtggccggcaagcccggctgcccggcggcatcgatgccttcctcgttgctggatgctgaagaacgggctcagatatctacgcccatgctggtgtgtgacgctcgtacaaagaactggtagagaacagctactaagagtgggagcacttccgtggctgacgctcgcgacgaacgtgcgaatgaacacttaaatctctgctgcagaanagatccatctgcactggtccaagggtacctagtgggacaaaggtactctcggcgagaatgccctgacggtgcataccaatccaaaccgcgacgagtaaacctggttcaacaagataacctcattgaccgacgacttccccctcggtactgcacgtagttctattccgcaacacttggctnccaaacggtaagagcatgggttgagatgggggactctacacgaggggtcgcggccggagttgcagacaggccaacgagtcccttgaaccatggcgaggaccaacgaaaaggctatggcgaagaaaatgggcacaggcgccccattggtcgttgggccgctagagatcgcgttagagatgttggcttatgggctcgtgacccgagagggtgcgcgcaggttcggcgatatgccccgtgcgttctaacaagcgatcgagcaagatggcccaagggcccaagagcaaaagtaacagactcttggaccactaatgcaggatcgagcgcctagaaatctaggggggagttccggctctcaacccgcatgtaacgcgggccttggcttgggcgggcctcccccgtcgcgtgacctatgggggatggccgccgtaattctcggcttccaactatgctctttctgtgaccacgggtgtcctggactttcgataaggagagggccttagcaagggaaatgggacagcgctaagggggaggcgaaatcaccttacggatttcgagcctgtatttgcggggtaggaccccgcattctctcatctattgaacggtttgaaagtactccaccttatatttgtttggccattataaaaacccaagggaaaaacgtctccatcccagtgttttccgaatta

SEQ ID NO: 418539 - DNA, 677 bp, Homo Sapiens
agcggtgagattggggtggactgacttttcaaaaagctaacttgtgcgtgggaaccagaaagacttgtgtttttcatcaaatgcagaaatcggtattgggggtggtggagaaattcacataatgcattttccatgaaatagcatcgttgtggagaccgctcttccgaatggaaagtcagagtcgtgcagaacattggcgccatcaggtcgtgtatagagcaggatttcgttgaaagtggaattaaacataaagattgcataatttgatgtctaatcatcagcaagtggaacaaaacctggattgaatagacggtgactcgatctccgtacagactgaggtccaaaggtctgcgctcacttctggaactttccttttgggccttgaccgaactcctgttattgtgtgcagtagcagaggctgcgctgcgtggttcagtttgtgcaaaggctatttattgtttctcatttactgaccactcgggagaagcctttagcaatagtttttcccgacacaaacttgaataaagtcgacccctgcagttcttcctgaggctctacaagcttcctggatgcaggaaccatgtgctgttctgacgacgctccgaaacctagttcagtgcctggcactagacaataaaaaattgctttctgaatgaaagtatatgctgggcaggcac

SEQ ID NO: 418540 - DNA, 1329 bp, Homo Sapiens
  misc_feature (252)..(252): n is a, c, g, or t
  misc_feature (1056)..(1056): n is a, c, g, or t
agcgccggatcgcatggcgattgtgacgtgcgcagccgagagtgaggattactcgctagacctgtctgtgtcccatagtcgggatcgatagagcctgtgcctgtcttccactgtgcccacgatgcatgacttgcaccctgatcgtcgtgtcttgcgagctgcggcagtctctgccgcgcggccaatccgggagactcttgcctctggggggagggtcgctgctgggcgcctgtgtgcagtctgtccgctggnctatctgacgcccaacgtggctggggcgtgctggctggttgccctttgactccatgtcttctccgagagaccttggacgtcactctcgcgcctttgtgcgagataccctagagactctctagggagctcgaatcgacgaatctgcctaggtcttctcccccggtatccacgagaaagcttgcaagctagcgtgaggcccgttctgggcaagaaagaacagccgtccatcgcgaagcgcagggcataggcagcagtctcgcccccgggtggtcgcgaggtccccggcgtaagcgggcctcggactctcggccattctttagcaagccgactggaggtggtgcgtggcgctctgcctctggcaatggagggacggcactgctgtcctaggctcccttgacaaggccgagggtgtgaagttcctttgcccatgcgatagcgctctagtccataaggatttgcaaatccccgtgggagaagatagataaaggcgcccttgaactgtggggtgttgctcctttgtaaacggggacatagacactgcgcctcgttttttggcgtctcaggtgtgggccgccacggtatttcggtgggacaaaatcgaatggatcgaaggggtgttccaacgcctcggagtacgttaccctgtacagtcgtatggccgccaaattcacaagccgccatatggtgttgcgataggctaacgcctttggcggaatttgagaggggccaatattatatccccattgggcgggcacaggggcacatccgcgtgggatatatgtgcccgtgcgatttggaaccccncctcgtttgaggtttgaatacagagaaatgtgcctgtggggtccccaccggaaaaggggaacttgggtagggtccacttgttaagctacgggtttgtgtgagcgcttgggtcctaacaacggggtttggccccaaagtgccacctctttgcggggaataaggcaacaaaaggtcctttgggagagtcatcacaacgaacaacggggcctttgaggagttagataacacagaaatagcaacctcacctggcgaatttggcggccggtaaccaca

SEQ ID NO: 418541 - DNA, 967 bp, Homo Sapiens
agcggagcaatcatctccgcacgtgacccgggagtctgctgggagcgctagccgccgccattgttaaaagacgaggcgcccactacgactctgagaggaccgagctggtggtggcgatagaggaatgatcatatatttgcaggacctctgcaactaggaggcccaacgctcggagataagtcaattcttggagttcacaagaagatagtaacgcgcgcaaagaaccgaataggtcctaagatatgctaaccagtagtcgtttggatagttctgcagtaatgctgcaggctctacacagggtccaccacctaggtactccataaaaatgtaagattgtaatagctggcagagacgcattgaagcacagctgagtacacccagttgcccttagcatggaactcatgtgttgacattataatataggaattcaccagtatggatgttccacgcccgagtcgcttacattgaatgaagtatctggcggcacttggtcgcaaagaaacgtaagatactaatgtggtcttatgcaagaaggatcgatcgataccatggcgttggtcgctggatgccaagcgtgtctctcgtggcattttctattttcactagttaagatttacccccaggttactttgccattagacatcggtgctgcgctatgctgcgaacctagtagtgactatcactcatcttgaatgacggaactttgcatgacagagaccaggacacggacaaggaattgctttgggggcgaggccgcacgtcccgatctcgcctacttcttgagccaagatacaagttgttaaggcggtgaattcgtggaaccttgcgcatgatgagcattaacatcatcccttcgtgactcaagcatgaactccctggtgggctttcctcgtaacttggaactattctttattgtccctttcttacccgttggaccttttgcctccccaacacgtccatgtgggga

SEQ ID NO: 418542 - DNA, 1058 bp, Homo Sapiens
agcgggctcctcctgcacacctccctcgactctcccacagccacgtggcacccaggccccggacacccgttctgttgcacgcgagaaatggatacgtcatcacacgctgtggattgggtactgtggcccatgctggtggggtgctggtggcgaccttggcaggcaggcatctcggaggcctggagagttctccgtcgcagcgccaatcttccagcaggatcatatgattcctgggagtcgccttgggttcagacagcggcgcctcgtacttcctgaagtcgaatgcatggcctccagagtgagaatgaatcggcggcagtgtgtccatggtgctaagtcctagtggtgtggacacctcttgtgcaccggagtattgggttggttcgtcaaatccaatgaacttcctacccttccatcagtgaggaaacgcgagttgtgaagactctcgaaactcgatgcgtgcttgctatgcgccagcgcgggatcactctcggtctctcatacacagcttgcgcgtgaggtcctggcatcgtgcgtggacatgcaccctatcctacctggtgtcaacgtggttggtgaagagcactgatcgtaacagaagcaatggttacagcagctgtcatcgtatctaggtccaagggccatgtgaaatggcgctcgcttgcgtcggcaggaccttttggcgacagttggtctcaacacatttctaacgacgtgcggaaaaaccgctagcaactctcgctcagaggggcgtgatgcttacaatggtaggacacattcccaacggacctatctggcgaagggccccgagaggtgctatcaacgggaatgaatcacctgataggttcttgccatgtccctaacacgcagaattgggatggtatagaacggagaagatagtagagaagtccgcgcaagggcctgatgtcctgggtcaatcctggtgcccaaggcaagagttgaccccgcaatgctggtgggtatggtctctgcatcttgttgcctttcccccgtaggcctcagttgtcgcttggttttcccccggctaaaatgttccc

SEQ ID NO: 418543 - DNA, 1581 bp, Homo Sapiens
agcggagttgtgcctgcgaactgcggagtccggtagtgctacgtcgtgcgcggcgggtgagcgtgccgcgagagaaggctggaggagctggacgcgtgggtcgtcgggcgtggtgttgccagaggcgggagacgggcagcaggtcggacccccgcgggcccgcgcctgggggagccgaactagagcagcttggaagggagaggaagacgtgcgtgcaactgggccccaggaggatctgctgcctcgaccgacacgggacagcggaaaagcatacacgcgcgctggcacaagtcaatcacggaacgtgggcgcgtactcatggtcggctgagggactccgtgaaccgggagaagcgcgacagctgatgatgtgttcctcgttctttccctcaaatggaggcagggtgccttgatggcatggtcccattggtcgactggtgccggatggcgcgcccgggggatgcgcgcattgccgggagtgatgcgtgccgacgggtcctccgttactcgtcgcactgtggaaaacttttgctcgctgtgtggaagacaaatcggaccttcttgcgcattggccctcaaacccaagcgttgaagacgccgcataggttacggctgagagcagaaaacaatcctttatcgcatcggggcaaatcggttgagcgcagctcaacagaaggcagcagtgagtctgtggcacggtttgaaaaagcgtgtgcttccacagaggcagggtgcacttgtgggcatgtgctttcgcccagttcctgggtggcccaatttgcgttaccgaccgctaacatgttttgacaccccactctgagaagagttgttccgctggtggctgacaagtaaccacccttattaaaaagcggccggggaggctatatgccttcagcggtctggatgcgccaagagccaggcggcccggcggccggaccgtagaaccttggctgtagaaggacgcaaatctaactggaaagggaaattgttttcgcagcgccattcgagggggtggcggagctccggtagacgatgccacccttgggaggcagttcccaaaagggaaggcgttgcccgtggtcgtattcgacaccggtggggcaggtgctggccaatatcttcgggcccttggaaaggcccatggttggtcaagagtgtgtaaccctttgacacggggatgtgcattgcgtatacaggattggccttgtaggagggcctcccccaagggcggtggaacctgtttgaaggggggcacctggagcagaagtcgccccatctgtgcccaaacggtttaagaccctggtcatagcagcccgacgtaaggccgacccaagaatacggcctggcggcaggctgtacaacaaaaacggggcgaacgggccccaccagcacattgggccgcacagcccctacattacgccgcagccggttaagactgtgggccacgccacaagtccgacaacacctaggccgcagagaactcaacaagcgctgcgccgtagtaaccaccgtccctctcacacacaaagccgtcgaccccgataagggtgggcgcacgggagcataggcacgagcgcgctca

SEQ ID NO: 418544 - DNA, 813 bp, Homo Sapiens
aggagatatcgcacggcggtcggaggcggtacgcgagggagacaagagcactgcgttggacgtattggcgacagctgctggcgtgacacatgactctccttcccccgatagcatcgcgacgatcagtggtcgtcgcagtattacgtggatcgacgctgacccggcgagtatcaccatggccgaccttccggcggtcgcggaggtgatcgcacgcaccggggcaagaatgcttgagcttgctcaggctagtgccgacgctgctgctctcaaactcgtcgatgcccaccggttgttgtgcgctcaccgagaggggccatacggggtagacgagtggtctcagcgcatggttactgtactttcagatgtgttgcctggtgttggccaaggccggtgggttctcggcgaaactgcaatagtaacgcataacctcgcacaattgggagtcaataacggcgattgcggggtcatcgttgaaacaaggcccgtccccacgatagctctaccgggacccggtggagtccccagacggttgccctgttccctcatcccatcgctgcaacccttacaggcgatgacgattcacaaagcgcagggcagccaattcacggacgtaacggtggtcctgccgacacccgactcgcccctcctctctcgtgagttgctctataccgccatcacgcgtgcacgtgaacacctcactgtggatgggcacaacggactcttgtgcaagacggccactggaccgggctactcgatcgacgttctgggaatcagcgccggtgggcaagaaagtcgcacctcccgcctcagaca

SEQ ID NO: 418545 - DNA, 1001 bp, Homo Sapiens
agcgggcttcgccgctctcctggccgctccgttccggtgtctcccgcggctcctctccccggtgtcggtgcgacgctgcgctgccccgcatcgccgccatcccagtagcctgggctcgtgccattggcagccgatgctgaatggtgctgggcactacctggcgtggagcatgctcactaggccgtcgtgcgtctctacgactgtgcactcatgggtgcagggcttgcaaggaagcgtgctgattcctcgtgaggtagaagcctgctgcgtccgagggcctaggacgccagctgaactggagatgactcacgaattgcgcttcctcttggcatgcatgagcagcagacatggaaggaatcagtgagcactcgatagcagctcctacgtgaccgtgcgtgccatgtagatgatccggggctcaccgcacaagggggaagacggccaagcgcattgctcagcgctacccatgatgctggcgcctcagacccacaaacgtatgcattccaactaccgttcttcaacatgtcgcaggcacggtgctacggaggatcgacacaagccactgttgctggtggtgtcaccgtggatgcctccttggcatcatcaagggttgggggccgctctgcagctttccttccatgggggtacgcaggttcctctcatcgcattggtatgcggtctggattgcctatgcctctcgcagtcgatggatgctagacgagtttcgcgggttcacagtatggtgcatttggcgtatcgcgagtgggccgcccggcacagcctattgttgcctgggcccaaggtttttggcgactccattcatttccccccgaaccatggagttgggagggggcctgggtgggttggcttgacaccactcggaccggcgacttgggtcaaaggggctgggcatagcacttggtgccttgcccaggcatatgctcttccggggacttatagctatgcaacttttagcccgacgccatgtggcctttgccaac

SEQ ID NO: 418546 - DNA, 1304 bp, Homo Sapiens
  misc_feature (401)..(401): n is a, c, g, or t
  misc_feature (1100)..(1120): n is a, c, g, or t
agcggaggtgaacgggctgtcctgtgaggaggaggagagcgttggagctctacttgctgtgagctgtggtgtagcccaggctgaatggtagccgaggacgcggcaccgcgctactgcagaggatgatgtacgttgcacgcgcgtggctggccctctggggcatcgctggatgtcgagcttcggggagcattcgccgcttgtgtcgtcgctcgctttcgtcgggcacctacccgtgcggggacttattcctcggacctcgcgtgtcggcaatcccgtgagtatcgtctcgccagcgtggatggacttggtgccctgtccacgtccctgcgtggtataggtcgtggctgtcggctctcttgtgtcgctgctcgctgcggggtcctggcggagagatcgtgcantccatgacttgcgcgaggatgcttcttgtgcgtgtcatggtttcgcgcaagaccgaccgacgcttaggcttccccagggattggtcgtgggtcgtagcttcccgcaccaggttgctgctcgcccggggtcgtgctaacaagacttgtgattacaccctttcctttcgcaggcataggggttccggctatgtcctcgaatccgggttggacaaatcaattcccggatcccgggacgtgaggcatcctaatctttccaagaaagcatctaccttacgctaaaggttgcctaagcaaaggtccttcgtttgtaaagggcaaagttcttaggagaggttgcgcagggaacatcctttggacgaatttcataactccccagagaagaatatgcgtctttaaaattcacccggaaaggaaatttcgcccctgcgagagcggcaccgacctaggtcggcttagacttggtgtccccccgaagcactttagaaccattaaggtatacacgatacaatttcctttctacacactcgaggtccctcgaggggccctagacttctcccctttggaggtccctaaatttttaatttcaaccgcacattccgtagcgtttggactcaggggtaacacattaacacccttttccttgtgttgaaaagggcacgaattaagacagtttgtgtgtcgtgtaactttaaagacacnnnnnnnnnnnnnnnnnnnnncccaatataacctgtgtttgggagaaagccggtttggtaaattttctgggcttaaccttggtatgtgtgtgggtgatgtttgcacgagactgtgcgcacgtctatcttggaaaacaaagggggacgcgaaacactctggtgggcgcattatgtgatgcagtattatgtatatggaacacacact

SEQ ID NO: 418547 - DNA, 1326 bp, Homo Sapiens
  misc_feature (1254)..(1254): n is a, c, g, or t
agcgggggcccggcccctggtcgaagctaggtgaaggtgagtgtctcctaccagatcgcaattgaggcaagagctgacctgccaggctccgggcgtagggtgaaagtctctatgattctctagatcatctctggatattggctaccgtccggtccacgtcgtttgcctgcaggttctcagcgaggctcctagcgctgtcactcggctcttcccagctccacttgccggactctcagggtagagtatccaggcaccccccctgcgatggttccaacctgagcagttgggtagccttagtctgccactggtagtgtcttggcgctatgcgcccttggagctttattaggcccaacggtcagatcgaatgcaagaagttagcggaggaccaggacccgtactttgacctgactcggagccaaatcaagaccatgagatacttcgaccgaagattactcgtggacccgaaaatcacctggagtggccatagagtctagtaggatttccccggagaagcgttgtcggctatcctacgttcacttgtgccacatgaggggtgatttgcacagcaccccagcgaccttccacacggacagagacagctggcggtaagaggagacgttgttgccaaaatacggctttgggcgcgaggtaatccattgtagtccccttctttcgccaaatttagtggatcctttgcaattttcgtaaaagcggccgtaagggttgcctgatagggaaagcccacaacgatctagagaaacgcggcacctggtctctattcgcgtggtccttccactgcgatcgccatggggcgagataagtctacataggtgcaatggtgcctttctggcgggcatgggatggagcttgtgtatgactaaccagtttctggggtcgcataatctgactgagcctgtggttgaatgcccagacaaagatcacagaagggaaattcggggagccctccccaggtgggcacttatcctttgcaaattggagtctttggggcaagaataattgccttcccgttggcatgttttcttgccgaatatggtttggtccctttcccaaaggccctttgtgttgcaccagcgatgtgcccccacagcggtggcggaatgtgggagcgcccgcgatagccttccggggagacaggggtggggacaccgcccgggatttttgcctcgccttggtctcgctgcacacgcaccccggggagtgcgtgggatccccccctttccgtttttggagccntctcaaggccctaagtgcgcgggggcctctcgcggacatcctgtggcacacccctggtggtatagacgcctg

SEQ ID NO: 418548 - DNA, 415 bp, Homo Sapiens
gttcttccagctagaacatttatttttggacgtacatctccacaaaatgggagctatactggttagccagtatcctaatagtatagtgcagttggcataatggattaccaagctgtgaaactggaaatgtcatatgcactttcgtgttgtatcaggcagatactaaacattgtcccctgtgagtcagcttacaatttttcctgtgcttttgaaaatctcacgcagttgtatactggagaaaaattagacgacggtagaagatattggtacttattagcgtatcatcagaactcagcacagtcggccttataagaaaccaaataattttgtgatgattaactcttggagatggtcacttctgggctcttcctggatttcccagccgtaacagtgggtgtaacgcacaaccttcacc

SEQ ID NO: 418549 - DNA, 665 bp, Homo Sapiens
agcggttcgtgtcaaaatacaaatatgattatttcaaagacttgtaaaaactactcactccaatttttttggtaatgcattcatatcttaaagtggtattagtcagtggcttgccaaacaaatattttaataagttattataatccactgggctttctggatagatcttccagtcctgaagatttttcagttttgtagaattcctactgcagtttttatttcttggaaatggactttcaaaggctttaatcatattttctcttttcctctcccgttaaatatctaaaagcagctggaatgcaaaacatttgtatctgtcagatagacatgagtgcattttacctgacaaccacggattatcttagagttttaaacactgttacagagaaaagaaaatttatttgcataggtcacataatatttagatcctctccgtagcacctccatagatagtagatcctgcagtactttaagcattagagttacacatcaaaattaagctagtttcaaatctcaaaggaattcataagctgagatttaagtcttgggtacccctccccttactttccacataggtacttagttctcacacctgcacttaccagcatccagaatatatttcttaaggcctactcttgttaggtactctatgaaaaagggtttta

SEQ ID NO: 418550 - DNA, 864 bp, Homo Sapiens
agcggttagacttcatgataggtgactatgacatgaatgacctatcatgaaaagaaaaagagacttcttatacattcagtgactgccctcattagtgctaaaaccacctaacactgaaaatggaaaggtggctaatttgtgctataagaatatacaaaggaaacacaggattcttgagaccaagtcaggagccttggtccaaaagcaacagatggtgaaggcaacagtgtgcctagtgacctaaactttactatgaatgaaggttgatttacgaattttaaaaggttccttcacctgatcaagcattagtaggtcatatttccccttgagctaaagaaaggaccaaaggataataaccttgaacaggatgtcaacacacatgaaaccagcccatattataataccgtttctgcctttatatccaaaagggcacaggtctcattaccattcttcactgtttctttggttttaggatttcagattaactaatggttaatattcctgcagtaatgacagtgtaagctagagtggttttttgtggcagaattaaagagtttcagaaattaatttggtcctgtattttacagagtcattaagtatgggaaggattaactgtaataatgagtaaaagtttattgtactttaggggaaactttatgtctatggttatcatgacatagaatattccaaaaagctcttgcaaatggccagagtggtcccaatgtcttctttcgaatacagagaagacaatatgcctgaggctttgaagaccatctctttccttggtcttttccaccataagatgtggagactactgagggagaatcggcttttggtgatgtaaagtttcttcccagactaaaa

SEQ ID NO: 418551 - DNA, 1525 bp, Homo Sapiens
  misc_feature (390)..(390): n is a, c, g, or t
  misc_feature (459)..(459): n is a, c, g, or t
  misc_feature (470)..(470): n is a, c, g, or t
agcggggatactccttatagcatcctcacgaaagcctcgtgacgctggaccagtactccttctgtacgctggcctgaaccaggtcctatcgaacttgaatgcgagatgccctatgaccgccagtttgacgaggcatctcttcgcgaagaccatgcgcaggacatagtccttgcgcacttgccggtccatgggaacctaagtgtacggccgcatgctcatgcgaatgtcgcaagtcctggcctgatacgttcgccgaggacgatccagtactcgaacgctttcagacatagcgcaggcctcctgtgacgataaggtgccaagcgagcaggtcagaggcgcaacttactcaatgtgaggcgagaggcgcagaaggaatcgcgtacggttgcnacgccaccgggccagtgtgacaggttggcactctcgcacgggggatcagctggtgagtccagcccacgntaaattttccngtcttgtgtggcgccacattgtggtgcgcttcttgtgacaagagttccggccgcacaatttccctgagtcggaaaccattacgccatgatggcaagaaagcacgttgtgaaatttctcccaaggcatgcattgcgcatgcgcattccaactttaacccatacggataccgataacatttaacagttacctgttcgtgtgccccaaggacatagaacgcttttaagcttcccccaagacacaagggtttagagggaggacgcaaaaggccaaacttctacaaactaggaaacttagtaggactccaggggtagctctcttgacccgtggcacacctcggtggacggcgttctttggcgcacgttaatttccgagaccccgttctccggcgccgcaagggttcctgccaaaaaggggcggactcaatatgtctctgcctggaacccatggccagaagcataatatcagagcaccaaatctgttggtcttgtgcgtgccctatacaccgggaagagccttaagtgcttccgactccgacgggcgtgtaattcggaccgttcggaagctggggcccaccttataccggggatcaggcgcgcccacaaagggcgttgttctccccatatcctttatgtaacgagaccccacgagggtgttgaggaaaggttcttataggtcaagcctgtcaatatagcgttaaacgcggttataccactttcaacatatcgccggtgctatacaccaattacgttgtccggtctattgtagactgagggctctaaatattgaaacagccggtaccgctgaggatatgaaagtccgatagaacctctataacagttgtagtgtacccttaactgaataggtggacgggtaatatcctaacccccagtttgggtgacccttgctgggcggaaaacctaatggtgggagctaatttccgagacgtgcccgctctttgtacctagtgccggtcctctgcagagcgcgcaaacgccgcgtaatatgtccaaggcgagggcggctacaggctctgggaagaactcttacacccccg

SEQ ID NO: 418552 - DNA, 1003 bp, Homo Sapiens
  misc_feature (140)..(176): n is a, c, g, or t
  misc_feature (348)..(402): n is a, c, g, or t
  misc_feature (454)..(464): n is a, c, g, or t
agcggaaagtactgcctgagttcttttttaaacttcagagtttattttctcaagaaattgtatgttcccactctccacttcccctctccctgctgaggaatcatctaaagaaattctcaagcttgtccaagccaccttannnnnnnnnnnnnnnnnnnnnnnnnnnnnnnnnnnnnaggcttttagcagcctgaagccatggtttttagtttctgtctccagtgatgaaaggaaaagagggatgacggaaggggctttaccagcccaatcacaaatagaaactaggaacctatgactatattctctcccttggacacctaaccggtttacttaacaatatttgcaggnnnnnnnnnnnnnnnnnnnnnnnnnnnnnnnnnnnnnnnnnnnnnnnnnnnnnnntggagggctttttgcaggggttcgagtctgggctgggcaatataaggagaannnnnnnnnnnaaacaaccctggcattcgtgaaagagcagccacggacacgcaacgcaaccgcacaagcagcgaacgcgcaaccacacgagagacgagcacaacgaacacgaggaagcacgcaacagcaacgcaacgacaccgaagcgaacgaaccgaaggcaaccgaacgagacgagagaacgcatcccgacagggattacgtcagatttaccattaggttagtctgtgccccaaagaggtctattgccatagtctggccttttggagacttataagttttagaaaaacacaaatccaaaccagtggcctcaactaaaaacaaattaccttattttctccgggggaaatatatatgacgatcatttttttacccatttaagggttgataattccccattaattcaataggcattagacccaagttttttacaccaagttttaccaagatatgcccgcttaacacagcgtcttacgctagtgcaaagaacacaagtaatctcatagtaaaccagattcttccttcccttaacaagggttcccaccccact

SEQ ID NO: 418553 - DNA, 1228 bp, Homo Sapiens
  misc_feature (349)..(349): n is a, c, g, or t
agcggacactctgagtgcagcccggtggatctctcagcaagtgtcatcttcctatcagtcacaattgtcctctgcctggatccctgatctccctacacgcctgtgtgtctgctgactgactggctggcgcccgcctgtaagctccctgaggccgtgtcccattgcctagtcagattgttattcatccacgtatggtacttggagcttcatggatgtgacccatacgtcagtgatgtccctctgcgcctgtggtggtgtgctgcgtcttggacgtgattactcctgatgtggtgtgtagaccctacgtagtactacgtgtacctggtatgtgcaacgtcatataccctgntgcggaggcagactgttccacacagtggtgcatttacattgcatgcacataccttcggcgtgggagaacctgttacgaacgtcttactaggtgagtacccttggattcgaataagacatacctactgtgcttccagatgatgattggctaagactgagtatgtacccaaactacatacaatcgtggcctatatgctataaagtgggagtctggctgtacatatatgcaccagttttgaactgaatatggcgagaatcgagtagcatagcaaccggtggagagggctcccatgcgaaaacggagcccagatgttctcccaggagacataaattagcaagccaaaaacagtgtctccagcgcagcgtaagaccggagaaaaaagaccccccgtacttgaccttagagaagaatggagctaggagtcacaaggaacctcttgtaacaccaaggcattaagccactcaaggcaatttctacgtggcactccaggacttgccaaggacttttgggcctttccttttggcgggcctgagccgccccgaatttctaagattctttacacgaggaaaagcacatttatggttctcggcaccaagaaggttgggctccgtaacattcggtttggggggaactttctggggaaacccagaaaaacgggaaccacaaacgcacattgtccgtgagctccttcttgcttcgcgaaaggcccacgtgggggatatgcaattcccgcaatgaaaataagtagatttttttagactctgggaacgaaaaacctttttagcctatccacgccctaaaatcgaattggttgtccagggtttgcgccactaacagggacaagtacggctgtccagaaagggggagtactttcccgaa

SEQ ID NO: 418554 - DNA, 1289 bp, Homo Sapiens
  misc_feature (371)..(371): n is a, c, g, or t
  misc_feature (377)..(377): n is a, c, g, or t
agcgggattgggcgtgataggcgcttgcagttgcgtgtgttgactctggcctctagtgcgctgagtgcaaggcggggggctcgctgtgtcagctgctggaggcataagcatcctcgcttccgaacccgagggtcgcattgtgcctggagccttcgcagctcatgggtcgtcgtacccggtcgctgacctctgtgggggcttgtcaattcattgggacgggaactgacgcgtgcaggtgcgattggtgccgtaccctggggtctcgcggtgcatctaccccgtacccttgcttaccaaatggttggttcgatggtagaagattgaacagctcgtgtcagatctctaggggatcgtgccaataatggagctcntcgctntcccttcgcaacttagagctattggattagacaatatagctatatatgggagagccggggtcaatctcgtggggtaacctcgttgctcataggatcttccgaactctatgtatatattgttcgcgagaaggggacatatgcccacagatagtgagacatggagaaagggtacctggctgtggggatgtagaatatcaaagaagggggccctctatattctttcccccacaggaaacctgattgctctacagggaggaagagtctcgtatgaggtaatcttgtgatgtgtccccatatgggataaaaagggcaataggctatgtgcaagtgttcactcagaggagacagtgtgacaccacagtgggagtgccagagataggctttgaggaggaacacctgggacacaaagtgatgacaccgttaatcagtaaatgggtcacttcaaagggcctgtctcttaatggtgcgcccaccaattttaattcggacaggataagtaataaatggtcgcagtatggagggaaatggggagttccttctctccctggtctacggaaggcgttgcctttaaaccccctttcccatttcgaaccaagcaaatttctcccctattcgccatttgtttcgtaggtcccaactgccttgcaaggaatgccttaattggggaatagctacgcttgcggatttgggccgcattggaatgaataattccatatatgtttaccatggagcgtacccatcttaagtttgaagtcccacgattgacaggtgaaaacggcattgggtaatactgggtgacaggaagggcgcattggcttaggggaattttcaaacgcaggggtacttttgttgacctgctcccctgtcaataagcgtggcacattccttttaactcctggtggatgttggtcc

SEQ ID NO: 418555 - DNA, 667 bp, Homo Sapiens
  misc_feature (51)..(233): n is a, c, g, or t
gagcggtaacaaagataatttaatataagtaatgttaactgggtactggannnnnnnnnnnnnnnnnnnnnnnnnnnnnnnnnnnnnnnnnnnnnnnnnnnnnnnnnnnnnnnnnnnnnnnnnnnnnnnnnnnnnnnnnnnnnnnnnnnnnnnnnnnnnnnnnnnnnnnnnnnnnnnnnnnnnnnnnnnnnnnnnnnnnnnnnnnnnnnnnnnnnnnnnnnnnnnnnnnnnnngcactaaattatcaccaagacaaccactcataggactgggcagaaagaaaaagagatggatggacttactgaaactgagaagcttcaaaaaggcccccatggaactgaaattcagacttttgagaacaggtcactgcttgcctggtactgatttctctgagttcagaggagggagcctatagacctgggaaccaggtatctgaggaagaagcacccagtaatttgagctggcatctcaagaaggcacattgagattggttctacaagtgctggaaaacccccaaattgcaatcagctgctactactagcaggcactattgctgtcggagtgaagaatggtcgctagagtgagacttaacaggattaagaaacccatccgaaggaaacagcaaattccttcttccttctctacctgtgaagtgtcacgctggtcc

SEQ ID NO: 418556 - DNA, 764 bp, Homo Sapiens
agcgggtcagcaggcaacatggccgagaggccggggcctccgggccggcgccgatgtcctgcgaccgctgtaccctgacacccccggctggaattccctccgcagctccaggcggatgcgatgcggcgccgttttcgtgggcgtattcaattgctctggtgcgccgagtcgctggtatcgagggccctgcgccgtcgacgctcacggccgaagcatggactcattcgagtcagcagtagatgctcactgcacgcacgaggaagcccatgtagacactcaagccacgcgttactaagccccgagcacgatgtttctctcggaaacatcgagccggttggaacggcaagcgctttatgatcctgacgatctgccgttcaaagctcggtttgctagagcaaatgcttcctagatgctcagacagaaaacttttgatgactctgtagcacatggagagaaaggatttggttactaagagttctcgtgctttcaacctgaattattcctaggggtaattgatgtgtcagggtggtgaacttcatacgtccatagtggcatctggctggcaaagtccatcgtatggggagaagtctgctgatgagaacttcatcctaaagcatacaggtcctgtcttgttgtccatggcgaatgctgggaccctaatacaagtggttcccagattttgaatctgcactgtcacgactgagtggatggatggcaagcttgtggtctttggcaaggtgaaggcttgaatcttgtggaggcca

SEQ ID NO: 418557 - DNA, 1299 bp, Homo Sapiens
  misc_feature (635)..(635): n is a, c, g, or t
agcggatcaaggctgtgcgtgctcccgtctggtttacgtacgcgtgggtcttcacgagcggtcgcatgaactgcgtcctacgagaatggccatggcggctgacaccgtttcgccagggccatcgcgggggtttgacgcgaggatgactcgaaggaaggggtaggcgaaacgaggtttgcagtgacttactaaactagcgctggatgttagtacgaagagataccaaagccgttgggaaaggcaggctatggcactagatacccagcttcggtacacgtcgattcactggggaaccaccgattcggcagattggtaaccgaggagacactttggatttcactacaaaagccccagcgtgtgtgctatgaaacacgttgtgtcctcgctttgagccacaaagctgcactggtcgatgtggaaccctaatatgttgaacgcatgcaaagctgacgcaaagctcaacaaggcgaataccgtgggccttgaccgaaaacagagttgagtttgatagactgggacctatttattcaaacttaatgggcgcacgtagtcacattcacaccggttgtcgaggaccgtatgttgaggtgagtagataagcgtgtctgaatttccattggtctaattttgtagcnttcgggagacgctctccattcaccttgttcaccaatttagggtctcgaagagggaaattctaatcggtcggcatgggaagtttgggggccctgtggttccaggttgtttacgaacgacggggttcaatagagaaacggtgctttatactgcaaaagagtaagggccgcggttgccaaagaaggaaagaggctcttaccagctcgaaagcaaattttgcatttctccccgtgagagtttttcttggggttcacctaggtttgtggttgttccttgggacttacgattattaaacctccttctccaggaaggaaactataattccggaaagtaagagaagaggattccgtacgaggtaccctacctattaagctgtttacagaataaaacccctgcggcagagttcaagagagttgtgatagttttatcaaaccgaggacttacttggggctcaatcactggcaaaagggtacctttctacattgggggacccataaattggcttttttactttgggtccttcccattggcccatttagccggttatgtgcattaacctcccttttcgggcccttggaagttgtactcctgtgcgccgctaatattgttcgaaggtttggttcccgaaagtgaataggcgagtgtgagatggacgtctaattggct

SEQ ID NO: 418558 - DNA, 587 bp, Homo Sapiens
aacatgaaaaaacaacttttaatagaatagacatttacatcctctcccattcaaaattgggaaaaaaatcagtgaaagtggaagagaaatggaagactgaaataatcttaaagaaatgttacagatgtcaggcttaaagaaaaaagagtctgtttgtcacatgtgttgagtacagttctaactgaaggctcatccagtcttagataattacaataatttacttttcttaagtgagtaaactttattatttcagcagctggaattaaaatgggcaacaaatgtagaataagttctcaatcatataaaatagtatctaattgtccagataattaaatgatctaatgtacttaaagcgccagagaacctggcacagaggatatggcctgactacttgcagaggtatgccatagattagacagggcatagacacagctgacactcacaaacacctgttgactgactcactcaactccccatcacctcgaaaccaagctcatatactccacagaagtgattgctaacagttctgggtacagcattttccccacgtgtacaatcggacatatgcaatacatatacatacaata

SEQ ID NO: 418559 - DNA, 122 bp, Homo Sapiens
cctcccgtcccgaacatgcggaggccggcccaggcggcgcgggagccggagcgggggcccaaatgcggggcaaccggtagaccggagcgcgcaggggggcgccggggcccaggaagcggggg

SEQ ID NO: 418560 - DNA, 1452 bp, Homo Sapiens
  misc_feature (1283)..(1283): n is a, c, g, or t
agcgggtcgtgcacttgcgtagctcaggctcgtggaggagctgagggcatgccaatgagatcgatgatgccccaaaacgtattcctttcattgtttcagttcgtgcccctacggatgcctgtgaagccaatactcagtagtagctcgtactgacactgcatgtagattgctaccatcagtccgtgctttgctaatacctggcgcgacgtatcataatgtgtggctcgaattcatctctcctcctgtgaacagttatagggaaattggcattctacccggaatctcttcatgatagactgttagttgcctctcggcggacgaagaggctcgacccccctgatatctcccaagggcatttctagcgagattgccctggtgctgaaagcagagcattcaccgtcgaagggctagagagattgtgcacagcacccgcagaccattgagacgaatagggggaagaaaaccaccagtgcttcttgacttcatgaaatatttactaccattcaattgtggaagcccccggtggccggttcgagggtggaagtggacgaataggccctcggtttgagtcctcgcgattgcttatcataaggtgatgattggcgtggtagtgacccaagcgaacgaatactaacgacgctctaggaaaccactggggggtaggttgcgaagtatgggtttagccccttgcatggcttggcacgcattgcgagcgggcccactatggtcggccctcgttttgggtcccttgggcgtctgactcaaaccaaggtctaacatatcgatacgcgttctcgttcaacttgaacacggtacgcacttggacaagacaacattgggaccttgtatgagccgttgtgtatgtttgccagggggggattccagcccgttgggtatatctggggccggaactctccttagaaaagtgagttgaacccttccttgttaatggcgatgggtacttatggaaacccgggcttggcttgtttgaccagcgattggggaccgggagggtgagctaaggtgcgcgaagagccatttgaatttcccctgtggggcattagacgtcgagcgctgtgtaaagaacgctataaagaggcaccgaacctagagggaacccataagttacgagggagacgcttaatccctatagagacgaggatagattccccacacacagaaatcggaatttccgggaagagggcattttcggtgcaagcaacatataagaccgccgggttagacatttggggctgggtacacacgaccgcgccgtatgtaanatccccgacgtctctccctataaggaggcgagtgggatatgacctccttggggagtaaccctcggcctagtggaccctggtcaggtgagttcgaggatagcgcacaccatgaacgacttcacacaccacccggcgggtcaccagaccagcgcggcagaaatcctcccct

SEQ ID NO: 418561 - DNA, 993 bp, Homo Sapiens
  misc_feature (253)..(253): n is a, c, g, or t
agcgggtgtagatagagcggtcgcttcggtattcggctgaggacagtgttgtatagatgccgaatccctttaaaatcatgaaattttataactcgaagtgttgatgataggatcaaccagcgcctattcaagtagttattatataaatgcaaagatgatgacactcgctgtacatcatacgaatgcataaagtgtgatgtctagaccatgagaaactggctaccatgagtccatcaattgggatcttctggtnagtagacgagtaaggatgagtgcctcagttggtaccccaggaaggtatagcatcttgaacctgcaatggcgggcaacaaaattaaagaaaacaaaaaggggcaattcgggtgcgtgttgggaatgtatgtgcccctacccctgtagtggtacgttaatcgggaagaattccctctacgtaaggctggccatctccgtggggcacccctaagcacaaatagtagttcgtctccgatactgagtcaatttccaaaggaaaggaatgtgtccttggagacacggggccatgaactttacttaagactgtcattctttcaaacaaaacatatgccttatcttagaggggagctcatattaatttggggccctactgtccatattattctaattaacaagggccagtaatattggtcctcttgtacttgtgttatgttgctatcgcactcctttttagagttagagtcttcgagtatccaggccacgaaattttttcacgtattacaatcgaaagtggtaggctgggaacatgtagacttaatctctcccggtgtggagcgcatgttcccttaggactctctgaaataactaatagggcactaggggtgtgtgattgtggcttagacatttgacactactggctttccacgctagtgtgtgtacaatgtaatgtcccctaagttcacaactggcggcactttgcattctgggaattgggctaattcatgctgtttgggacccacc

SEQ ID NO: 418562 - DNA, 1305 bp, Homo Sapiens
  misc_feature (316)..(316): n is a, c, g, or t
agcggatgtggcgcagtccggagggaggagcaaacgtgacgaatcatagtgtgggtatcgggagccgtccgccaggcgtcgagccgccaggcgccactccggctgccgtgccctcgcgaaatagtaccagcaagacctccagacgcgtatgcaggtgcacatataaaacgtccagcggccgactcgtaggcgcacggccgtccctgcatgttactgaccaggacaagcccatttggcgcctgaactgacagacagagtttcgagggccggggcgcgctggcatcttctcacgacttcctggccgtagctctgaatnggaactggtggttcacgagaccagtccagccgcaggtagtcgaatggaccgactcgtctggtgtcgcatcgagtttgggctccgtcaatgccaccagatgcctggtggttgaggcgtacgagcgacgagacgcacgggaaagagaggcacttctaattggtagagaatcgactttgtgtggcgaaccgcatagcccccaggcaacctcgaggttgggtagccagaacccaactcaataagccacgccgtgggcggcgagtggccactccctgggcctgacccagagtcgccaggcagagtaactcggaaacagagaccgtgggaagaaagcgcccacacatggtaaagcctgtgaggcaaggggaagacccgttcgctccctggcacaacaacacggcctcaatttacgcccatcggtcatcgttcattgcaaaggttgggtcccctcggcgcggaggaagggggcaagaggcgtcccagtgggggctcctgttggccccggggagccaaacgacacccgcaaggtgccacccttttctcgtgggtgggggccactttcctcccccgtgcggggttccctcaccttggaagtttgcgtcctccctttctggaggccctttcttcgatcggcggggtgacttccggtctctgggaagggggcggaccaaaaaggggtgggcgttgtagggggcaccaccgcgccattatcgcgcccccagaggaggtctcctctgtaccacggggggaggcgttcttctcggcctgccggtgtcgccccgcggctcgttgtgttgtggagtgccagtggccctttgtgctgggaccggaaattcgcaatttccatctccttgtggcccatttaaccattttgtgaaacacccgatcccgcgagtgtggccccgggcgtttgtcccgcgttcgcgcccccctatttgacctacccttggctccggttgtccccttcaccaaaaaggattttggcggccctt

SEQ ID NO: 418563 - DNA, 1416 bp, Homo Sapiens
  misc_feature (712)..(712): n is a, c, g, or t
  misc_feature (1154)..(1166): n is a, c, g, or t
  misc_feature (1236)..(1244): n is a, c, g, or t
agcgggtgcttgtggtgctgggcagctagaccgtcgcagaccgacacgcgtgtgtgatcctcgtcggtgtccggcacagagactaccagtgacagatgctatgactgatggctgatgtgaagtcgcattatggcctatcgcccttgccgatgcgcaactcgtccccaacgtagaggcatactggacctcgatccatgcagttcatgtagacatagtaatgcagtcgttcggaaaggagccgacactgaggtccagctcacaatatccttcacatctagggggtcgatctcctgcatgtttcaatcaggtggactgtgcatgtcaagaagctgactcgtaggaccgatctttgggagattcagtttgctttgctaactcttggctcggcctgtcttgtggtttgaaaagtatcgaaagaatactgattgaccccttaacgatgattttagttgccgactgcccaaagccaagtgacgcacctcgcgtggggatgcacgccacgtagattgagagagctacatacactaggagtcgcgtggtgcgaattcggcccttggatttgcttcgttgctaaccccgatctaagagaagtaaacggagccttcgggccaaagcctcgtagagaacaaggcctacgcaatcccagcattccccagtttcccatgccaagtttcgaaatgtcgaaaagggcctcctgatgtatcgtcttcanagagcccgttgttggcggccgtcccttgctcgacctgggttgcccttccgcctctaggcgccgagggcgctcttcccgcgcgctctcttgaaagtgcttttggtggttatcttccacctcatttttaatatctcttgggtaggtttgattttgccaactttgtcaccggtatatttctcctcctatcggcgcttaacttgtctgtctctaattctgtggtgttatttcaaacacggacctttcttcagtcataaactatatagaatgtacattcccttcggtaagggaaagaaacacacggcctacatggaacagcatagagaacaagattgctgttcctctttctcaaaaagggcctgttcttgtgtgtagaatattcccgtggggcggccaacactaatgacgtgtggggcgccgttggaccctcccctgtgttcgggannnnnnnnnnnnnttgcgcccctgttgtatcgacctcacccgcctgtatgttttgtttgtcacccaattcctataggcccgtnnnnnnnnncatatacacatttggcgtcgagaaggcactcggcgggggggttctattacatttacgttgggggctccacttaacgtccgagtggatacttccccggtgtggcctggtggcacgccatgtgttggggtataacttccgcgcgggctcggcaaatgtttcccgcacgccctct

SEQ ID NO: 418564 - DNA, 817 bp, Homo Sapiens
  misc_feature (297)..(339): n is a, c, g, or t
agcggcttaactccttgtccttcactcaatttcgcgtattcatcatagacgtgtatctagtcagacaatacctagtgatgatgagcgatagtggacgaactcagtaatccttgtatgtacctgctggtgcgaggaggtcaaacagtgcaagctacacttgtgtagaaatgagtcttgagacagagttctcttcaaatcatatctctacagtgtgagataccagaatacgtgtcgcgaagaccgataaccaccataccctatcatgccgtactatgaggacacgcatcatactgcctnnnnnnnnnnnnnnnnnnnnnnnnnnnnnnnnnnnnnnnnnnnatgccattgatgggcggtaggtgctttgagcccatcgcagtttgacgacctgagtcgaacatagcacaacttcctgttcttctcacataataacttaagattcctagagccatcggatagttggtgtacaacctgatggttccctcgtctaggtcgtggagagctgaagtggcgatgataaccctgaatcctgaggagaagggtcacagtgactttccggctgatgcctgttgcttcatgcctgcatgtcctccaggcctgggcaaactgcgagtaaagacccgggtgtctacaatctaaatactttataaacctttcgtgaggtactccacagtgaacccaaaccgtaggtagttgtcccacggctggccgtattgatctgggaaactaactattggaaatgacgttgcttgctgcatagcggttacaatggctagaccttttaaatatcccatgtgaccgaagcctttacagatac

SEQ ID NO: 418565 - DNA, 484 bp, Homo Sapiens
  misc_feature (61)..(109): n is a, c, g, or t
caaaacaacacagggagacacggcaaaaaaaagttctcactggggggtaacaatgctatcnnnnnnnnnnnnnnnnnnnnnnnnnnnnnnnnnnnnnnnnnnnnnnnnntgtctccgtggtggcaaaacttcatggggctcttaaagaaatttgccccaaggtattacgtatctttcaagcagcagcaacccttgatgagttcagtagccatcgttacagttggggttagaaccctccaaccaggaaaacggattggttgagcatttttttaggccaggacagtgtcattttatccaacttatatcataatgcgctattggacccctttcttattagaccatcggctttaggtgttaacccataattttatgcccggtggaaacccaccaatttctgaagagtcggttgataggaaggtcctggaaaatgagccgccacggtttccgaggctaccgggcgtttaagagttcccgtatttatacc

SEQ ID NO: 418566 - DNA, 721 bp, Homo Sapiens
cataaagtgggcctctgtcacattcttccctatctttcataagtagctaccctcacctcttctagtggtggtcccgggtacttatctccatattttcaaagttaaggctctggtcactatttcttatttgatcagtttagatcttacttatggatctcgggccagggtagaagaggatgtagttctcacattagagcaaaatgactcatatcttctaaccgaagggacctaccaaaagtgtgcggtacacatgacttgacagacacagaaaagcgggtcaaaataaccttttgcagaacaccgcgaattagggcctaagagtttccaaaagggaactacacgcggggcttcaccaaagttagggagccaggaatcgaagggcaccaaacgtcaaatgaggctataagcggcaccacgagaaacccgggacagagagtgggacaggacaggggcgcacatgtaacgaacagacacggatagccccacacagaggtagaacatatgaggacaaagggtgatatctcgggaacaagggagattaccgggttagacaagcaaaaaatgacgcgaaaaaaaggggggcccaagaaacccaatatcttacaatatatattagaggaaaaaatgataagacggactcttctaggagaaaaatagtgtgaaacaataaaaagggggatagagaagacgataaggggaacgttctatactatcgataaaa

SEQ ID NO: 418567 - DNA, 1056 bp, Homo Sapiens
  misc_feature (460)..(460): n is a, c, g, or t
aatactggagtagagaattgaggacgagaggcgtagaggaggagtatcatgctgatgactgtatgtgtgctctgtgaggacatatgcttcttggatcccgcatggcttcataacgcagtagagcaaggagtctctctatttggagaaggtgatcaggcatgatttactaccggttcacctgggcctgacggtctcgccgaatggctgatggtagcgacaagtaagatagggattgtccgtatcacggtcaacgacacaaagtcgataacacgataggcaagctgtatctgagaattcggagcattcatatacggagatgcagagctgccatgtccttatcgaaactgcgagtctggttcgctgttagagctctcttcctgtggctctcgtaattaatgaagacttgctgtggggattccccccagaggcaacagcccatggcgtcctcatgtgtccacanaggaccaggccttatccgagtgcacagcccactatggatgaatcatgtgtactaacactatatagctggaatgatgttgaataccagaagaacgaggccaacggctgatgtagagtgcaaatggtacctgcaccgataccaaactttgcagagtagctcggagcgctccgagatgtactccaacgggaggaacagacacgcgtgaggacgggagaagggagggggtcatgatatatccctgggtcgttcggaatactctataggtctagcctgtctagttcctaaggaatcttagcatcaggataggaacacgacttcttggttcagtacccaaggggcttggtatccctgcatagactatgtttgaaatgggtatctagcgagtgtttagtggaacaggggtttaccatgtggcaccgttgcgtaattcggaaatggctcctgaatacttttggcacccagtggttgggttttgcaattggtgccaagtgaattaaggggcggaagttagaaggcctgggtttgaaacatatgtaacaggggggtgaattcttggctggccccccattggaggatgggccaataatggggaatgg

SEQ ID NO: 418568 - DNA, 1102 bp, Homo Sapiens
  misc_feature (975)..(984): n is a, c, g, or t
gcagaacatgggagggacaggacttaatccctggaggtccctggggggggaacacacgagggcgctgcaacaccccaccgaggtgggtatacaggaaaactgccgtatcactaattggggggacgctcgtcggaacgcagacaaaaaggcggggagcgggcacgaaccgagtatgtggtcacacaagcccaacgaggggagccccgccacacaagcaacagaaaacggggaggtaagaaaacaaaaaaaccccacgggagacaaccactactgtccatagaaggcacgacacgaaacgaaacatatggaccggcccggggggagtgccaccacaggggagaaacacaagaacagaaagaagcgcggtcggggaggcgaaaaagggggggaacagagggacatcaccaaccgcgggatgaagaaaagcgcgagagtcaaacaccccgtcgggagaagaaacacgacagaggcgggtgcgacagcaactgactgactcgaaaaaagaaacaacgccacgccagcatagcaggagcgaggacgccccgagagggggggtgatgcaacgaacgcgatgtagaaacaaagcaggatagggaaaaacaacaggaagggaccataaacaaagttgaggaacccgcgaaggaggaacagaaaagagggagcgagtcacacaaaagagggagtgcactgaaaagagaggacacaccacccgctggacgccacacggggaggaaaacagaagggggggcgaccacgacacgacaatagaaagagagtacataccgacacgggagtgggggaaactacacgacggccaccggaggtaaagaactaagtgaggcgtcaagtacgaaggagaaaacagacggagggtccaccagtcgtggtggcgcaacgcaggcggtggtgacgagacgccccgcacaccccaacagggagtactagaaccccgattgggggagccccacacaaaannnnnnnnnnacgaaaaccaacgcggcgtagacgcaccacgtgagagcgccgcgaacaaataatacagagacttacaaaaaaacaccgccggcgcgacacgaggagaaaaccgaaccacgagagaaca

SEQ ID NO: 418569 - DNA, 749 bp, Homo Sapiens
  misc_feature (600)..(600): n is a, c, g, or t
agcggggtttacacgccccagccggcgaccggttccatctggctcgggccactctgacacctttagtttcggcaagggatattggggaggcgggggcccgaaggcttcggaaaacgatgggggagggggcagaggatacccgtcgaagcccccccctcgcccaacatttcgatattggaatcactttccttcttcctcgggccagcctttgctctgtcccctcaggtcaactcaaggtagacagtgtggcgactggagaggtcggggaacaagctttgtttcagctaaggggaaaacaagcgttcacaggagtcccctgacacctcccactcggaagatagctaacgggggtcctgccaacccttcccatccaacttccatctgaaaaggattttctgctaaagttgggtccatggccatccagcacctgtaaggccggcaggagcgtctgccctctactcagttaaagcctgaagtcgtttcctttcgatggcccttaggaggcccaaaagaggggcgacagaacatgatgttgacacgggctgggcgcccccagaagcccgggaacaaacgtttctactttccaggtccactggtgtntggtgtacccatgtgactaatttgtccaaagagagaaactaggaatattccagttggtgactggaccccttagttgggttcctagagtgagtttgatgtggaggagcccaaaatgacctgcagtgaagttggagtgtgagcaagaaata

SEQ ID NO: 418570 - DNA, 1028 bp, Homo Sapiens
agcgggtcattgtaccaggattgatgtgctcggtgcccagaaggcagtaagctctgctccctagcagccttggatacggttgccctggcttgaggatgtgctctgtgtgttgctcatggcactgtagaggactgttcctccaagcacttccttctcttccacaacccatcttgaaaccagagaaccagcaggactaaggatggaattgaaaaaagttgatgaatttatgtttcatcttccatctctacttcttctcctggaggtgtgaacgaataatgaaactgctaaggagaaaggcagcatgaaagaaggaggctgcacaattggaccttgcaaattcaagatctagatcattagctgcaaatctgagttggaggtgctgaatactcattcacacggtcgtgctcatagcagcagcgagattttttttcttgtcacgatgaacagagtgtcctgacaccttgagacattaggtgcttgcagaacatagtgtgaggtgacaagggaagggacttgcccttcacctccacaccactccaaaaagccctaccatcgtgcaaaattacatacacaatctcatgccacaaaatataaaccaacactacatttaagaaattcgatttctcccccttaactgtgccctgtgctttctgagcacatagcatatttttcccttaatcttaaaatttagctttaaagttcactgttaagggaactaagcaggttttttagtcaaggagatatattgccggttaagatacacaaaaacttgaacagtacttggcatcttttgagagggatgagccagaactccgaatattgccctttcacatcttccgtgaactcatacaggcatcttctacatagctagggactcacgaatgtggatctcccagtaagcatctatccactgtgtttccctaatagagctctgtgggggggccaccacatggggggttcccgaggggagcctggaagagaattaaattccgggcacatctctgttgcctgccggatataaggccccc

SEQ ID NO: 418571 - DNA, 1721 bp, Homo Sapiens
agcggactttctgccggggcagtcgtcgtgtagggcatcactgctcttgatcaagggtgaatggatgcctgtatcctgcataatatggagcgtgttggtgtgtatcaggccgggcgctcgcacggctgtctgcgagctcgcgtcgtgcggggtcaaccgtcgtgctcctggtcctcgtttggcgcgtgacccggctactggtacgcaccatactgaatcgtgccatagtggtcctgccgatgcataggtgccgcgaacatctattggcattgtgacacgtgaaataagcgattgacgatctgcacttacaaactgtagatcttgtcctagtaagtgcaaaacattgtgcgagacatagaaattatgaggagctaacgctgatgcaataaattagcaaaacttaagaatccttgagtccccagctgtggtatatcctgtgtatcacgtccgcgagtggaccacatgggatagacaattacttttactggcgaaaaggcaactttcgctcgagtcgcatatgcagtacgacgacatagcgatgcgcacacaaagtaatcaaagatgtgcataaatctcagcgtaccgtagtgcacatcaaataggcaatggcgacagttttggccgcaccagtaggttcacgacaacatagtaatgccgaatctaagcattctattgcgagacttttggaacaccgcgtgctctttcctacatacttagccctgaaacacccaaatagcgttggaagtagagcatcgaaacttataacacccatcggatagttttggcgaaggactagacaatgggcaattgccatataagggtaagcattgacactagactcataacttgggagttacacatctcaagaaaactaacccaacataggagaaatcgaatagcgtaataacaaaagaactcgctcgaatacgacgatagagaactacaacactaccacacgcgaacagaaagatggaacacccattgaggccggaaacagaaataaagcaataaacacgccgagacatcgcatacagccgtaaccaacaccgaccagttatccggatccgaaacacatatctcgtggacctcagagaggaagcaaaataacaactagaaagattaccacatcagagatggaacgagacggatccgcaacgcaacgtggcccctacaccgatggcaacacacctcaaccatagattaacaaagacagagaacagactcgccggaagaactaccgtaacacacaccaccaacaccaaagcctacacacaacaggcgtaacacacagcacagttaaagcgtctcgagaaaaccagacgtgtgccagaggaaacaacaatgagggccaaaccggcacgcagtacggcacctacacgacggagagcaaaaaggacagaagaacaacacacacagacaaaaggacgcatcagcaagtcatcacagggacacacccgtgcaaagaacgcaacaacgccacaacagcagacacaacaacacaccgagctgagtaaacaccaaaagagcacagatcgatacgaaaggcctacaatacacacaaacaataacaatagacctgaaaacacaaaggcaagactcacacaagtacgatcacagcaagcaccacctaggacgaatacagaagatcaaagacaaaacaacaatcagaaatcgacacaagcagacaagacacgacaaccaagcaacacaaccaaacgaac

SEQ ID NO: 418572 - DNA, 964 bp, Homo Sapiens
  misc_feature (721)..(721): n is a, c, g, or t
agcggggtgtggcggagaggaggcatctggccgcggaagtactaggtctgttcagtattaccggctaaacggccactttcgtgcgcgggtcacgcagtcgactcatccagccatgggtccgtggatagcggagaccgtaaatcccgcgcgcaagttcgcccaataatcgtcccatcatcatggtatccacctggcggagtgatcgagcttcggagcctattggtgaaattgtgtaagcgaggcatcgcgagacgatgcgtgacaggcgcacgggacaaatgctgcctttgtccttggagtggagatggtgatggatgaagcatgtggatggtaggaaaggtatgcgatacttgcctattgagtaaattaagctatatagtcgaggaaaagtatatagaataacccaaaggaaaggaaacataatgtgaattaagtaatgagagggtggccggaagaagaattaaagaagttgaatggaacacaagtcaatggatgaggaaggggtcgattcttcaagagacttgttgattgatagacgtagatgggcttgtagatgtgaagctgagaagagattgggaatgggcgtacctcaagaaaagacttggggagtacttgacaaaatagctgggaggatgaaaccggcgaagggagcaattgactgcgattctaggggcataatggaatatggagaatggtgggatagcatattaggatatggtcncgtaagcattgatcggggtgtcatgcgttctctcgcaaaaggcacgactcggcaccccttaacatgcaccaaggaaacgacgcatactgaggcgtggaaaattcgcttcgaacttggggcgtcaatgtcaggtaaattgctctaggaagggaaccaggggtgtacttacggctcccaaaattatcacggtgaagcccaaaggtggcctgactattccgggagaacgcgggttggctgagacca

SEQ ID NO: 418573 - DNA, 1097 bp, Homo Sapiens
agcggaatggtggcgggagagctgctgggccagagagctgtgactcgcccggctctgcgctgtcttcgcccgtgtcggactcctccgccgcgagttcgctgccagcgcactggtcccgagcgtagaaagacccaatgtacggagatgctgcacaagtacatgaagaaactgagcgcactgtccattccattacaggatgccccggggcatggacgggcatcccatgtggtgtggactatcaatgtacttggaaagcgcactactgccgcctgtggcacagtctggaattcaagcgcctacttgacgaagaccggcgaggggactgtgtcatctgtacgtgctagcactctatgagtccaaggctttcccaccgagtccaaggtgcaagtaccagttgaaaagcgtagaactgcatccaaggctctggcatgtgaagatgtgtggcgacgactgaccacctatttgcacgttggtatccattccatgaaggtacgcggtagcgtgtgacccgagtacgaaaggaacttgctttgcggcatgggggccaccacgggtatccatacgtatgtgggctcccgttgacccccccacgactccagtgcgtactgctgcgcactccgcttcggcctagtttgggttgctttgaaatttgcgttagaaggcgaccgcttgaacaactcgcgcagaactcgggaaactcgggttggttcgtgggggaaagagctccgaggcgaaccagtgctacgcagaccgtgattggaaattggggcgcatcccttcactttctggtcagttgtttactctttccgcacagtgttgccataacacttcgcacataaacctttagtgtggatcattggaggctggtgggcactcgaagactccctggtcccactcgttgagacaattgttgtgagcgctcccaaaattcggaagcacaatctgtgtctcaatccgtttggggttgtcccaaacggtgagcggcccatggcagagttgtgagccatagccattagttgcggttggaagtggtgaccctttttaatggtggttgccttccccaattgtgggtagattctacccacaccgacggctcg

SEQ ID NO: 418574 - DNA, 765 bp, Homo Sapiens
agcggaggaatgctgtagcataataaagggagcagatgaatgactgaagccctacagctccactaaagattagagtaaaatctgcacttcaaaagatcctgtattcttgcaagagaacagagctcctgatcacctgtgtgcgtcctttgagtggatggcagctgcatctctgcattacagctagttagaatgatgagtccttgctatgcctcaagcactgtttcgagtgtttgatgtctattatctcacttcatcctcaccaggaccccatccgaggatttgcgacttgagtagcattgacggtggtgatggggagcctggcaagacagcagatgtctacagcaagaggagggaatgggaagctgctctgatggcgtaatcatcaaggttgctgataaaatggccttaatttcagttgacagtaactattggatccccaggaatatgtttgccatatttggggcacgaacaatactattggcaggggaaccagaaatgctactaagggtctcactgtgtcacccaggctggagtccatcaaagctcactgcagccttaaccttctgtgctcaagggatcctcccacttaagcctcctgagtagctggaactacaggcatatgccaccgagcctggctaatcttcgattccctcgtacagattgtgtctccttatgttgctccaggctggactcaaacttctggtctcaagcgatctttccatcttagcttcccaaaatgctgcaactctatggcaccattgagcc

SEQ ID NO: 418575 - DNA, 1215 bp, Homo Sapiens
agcgggggacggcgcttagcgctccggcggcggtccatcggtatctagtgtctccgctgccgcccgtgtctgtggcctagcaggccatgcagcctaccagccagatccagcgttgcgcggccggctggcgccagcgcagcctgactcattgcttcgagacttccgcgtggcctctctcccagtcgagcactgcagcccaccgacagagacatggtcacatgatctcctgaaaggccacgaaccatagtatgtagttcctgagtaacaaagacactgcgtgagaaagcaggtcgagtgttgttgacaggcctgtacgacatgcgaactttattgtcgaaatggaggcttgcaacgatattggaaaagctcattgaattttgtacgcaatgattacctatttggacaccagaccgacggacccgtagttgatcgagcccgacggtcagtccttcgaacttatgggtcgaagtacgggaaagcatgagatgcttgacttttcccgtgtgcaagcacactgtagttatttcctagtgagcacagtacacccaggcgatttttaaccgctattggaacttcacaagccctttaactaggtcactttcttggaacttctttgaacaacccgcatcttgcgaaagtttggttccatgatcttgaagttgggcagaccctaggcctgggccctacttctttaaccctaggtaatccattcattttgccaatagggttgccaccctcttcgttcccaagggagttaccctttggcactagaaaaccctttcgaatccaagtttaggacttcggcgaaacccctttttttcccacagagaagcaaggcgcataaggagaggagattgcaatggcccccacggataggtccttgggcccctttggcaaaaaactttactcccccacataacgtcttaccatggcgcgccaagaagcgcatatagggtttggtaagcaattttcccctggtcccaatttaccaatggccttcgcacattgtccccccacaagggcgtttaattgaggtttaaacccctaaccccaattgtaaacccctttggccacccccagatatgttgggacacacaacggggctgagggtcccccacggtcggaatttcccccttttccaaaatctgttaaatttcgaaggaaaaaacaaagtttcctttttattacacagaaaacggaaaaaggaaaacacca

SEQ ID NO: 418576 - DNA, 489 bp, Homo Sapiens
agcgggtcgttagctcggcagtgctggcagcgctccgggcgcgcttactccattggccggccgtggattgtgagtacgtattgcagagcagcatgcgggcgtgcagagcctggtgttgggcatcctagcggggatgtgtggcacttctcctgcagcgcctagtgtgccccgtgaaagtgacatgggaggccgcgtggatgccaacctgcaacaatgtcgattacacgtctggaaggctatgaatagtcggaaattactactctccttggccaggttccaccaaacatgaacctaagacttattgagtacggtgtggtaccccagccatcaaatcattttgcttagcaacgactaagaaacttacgatcgaacatcacacctcgaattacaacagcaaatgttgcgactagagagtggcctacggccagaggagaaatacgcggcaccgcgggacgaacattgaacacgtgttttagcttgataactggg

SEQ ID NO: 418577 - DNA, 733 bp, Homo Sapiens
gggcagaaatgagaggcggccagttctaagcctaggccccaatagaccttctatctttctggccatcattttggtaacctagctggccaccaccaggtgaacaaactggggctggccagctgggatgtggaggcatgtgggtatagtctctccattatccccactaaccattacccccattaaccaataagccaccaaacccgtgaatgaagttactcggggacagtcacctggcagcctacggtaactggagacacagtttcagtcactcaccactggcagagttcaattaacagagtggaggtcgggtataaagaaaggtggaccttttattccaaacctagcttcggggaagtatggcagggcttcctaccttcagggtacggcttcaatttgggagcataaggcaggggtttataaaagaggactgggcatgcattgacttgcccgggaaggagcaagcagggggggtccacgtgactgcttcagtgccctttctaccgggtgggttgagcagccaccactgggggcagaactaggttgtaaagaggtctggtctcagaatactgtccaggtgggaacgagaagtttggtaacgcagggcattccttgggctggtaacatggacgtgtggtccctcaagggaaatcccctgggaagaaggaagattcctctctgggagctttaaataagccccaagttagagaagcaagtctgaaggagtcaggtaaag

SEQ ID NO: 418578 - DNA, 1172 bp, Homo Sapiens
  misc_feature (599)..(599): n is a, c, g, or t
agcggaaaggtagtagagttccgtgcgcatcggtccgtcgggctagggcggaacctctcgtgtggggcccggtgcgggcgtgaaaagaacgttcttgatttcccgcccgaagggatcggcgcggcgaagtgcacgtagaccaggccatgggatctctgaaactcctgcacttgcatcgtatcgtctctgcctcatcacggacttcgctgcgcgtcacttgagcgtactgctcgtcagactacgggcgtgaattgcagcttgcctggatgccctagacgcaatcactacaatcgttgcgtgccccggggcaatccggccatggcaccgacaggcaagtggagtgggcgaccacaggagctccatagatgggccctccgatgagacggtgggtacctccgcgcatgaggatgacctgacgtcatggtgcgcccaatggcgaggatggaatggcgaatccgcgatcacatagtacaggatggatagggacaactcggcttcgcattaatgcgccgtcacgaaattggtgagagccccgtttgtgagacataatctccgggtacagtttacctgccatgtactgtgaatagcgacccagtatntagtttaaagtgggcgtccaggcaattaagagggcacttccatgtacgttataacctttcgcatcttgtactgagatacctgtggccaggatacttaatgtacgcgggatccatgtggtttgacccctagtttgtctgaaaatcctttgggataaaattcccgtggaaatacaacctacgatttctccctatggaaaggataagcctaacgagttaaaagttgaaaggaacggccaattggaacgtgtggggtgtacacacccgagtgttgtgggcgcgttccgttataaacccgattcgttggaaatttagttggggacttttgatgcgcgtggtgggtacgagagaagggttatatagagcgaagccgttttgcgcaaaagcggtaaagcgttttaagtggattggatgaggatcccctgggtaaaaccgaccaaggggttgaatgttgaaacgcgttacttggaagaaggggggaaaatagggggcgaagacggaaaacagagtgggaacgagccaaggaaaagaccttaggggaagaacagttaatttaacacggttatgcgtcaaata

SEQ ID NO: 418579 - DNA, 1158 bp, Homo Sapiens
agcggggggtctggccgcgattcgcgggagctggtggcattccgatccccgaaagaggcgcgcgtccgactccttgggcacgaatggttcggagggccagatctcggatatcgggatcgaggacgctcacgacgactacgtaccacgtgtggattaacccagaaagagctgaatcccatggcgttgcgactacgagttcgcagatgaaatctttccacttgatacccgacagcatgtctagcggactcgggtatcctgcggtgatgcggaggttctctctgagacaccggagtctcgcattgcacgatcactcaggtctatacgagactacagggatagagtcggtatcacctgctacctagagttccgctaactggcatggtggggactctcagagaagccttccgaatgtttcttgggtggtcagaaaatgcccacacttgagggataatcgattcgatctggatgggactgggatcgccttggggatgaacagatttgcgccctgcgaaggtgaacagtcggttgggcactcactgtgcttggactaatcggaatgcgattgcggggacgtatccggttgtctgaaactcctcgtgtatcaaacttaatcgcgtgggtgaccattaacggattgagatagtggtgccggatcttgcccgatagccttgtgcacgcagccgatacaaagaagccaagacgtggacaaacgtcgtcaaggcggggagagcacaccatggcaggggtaagcggggggccatgaacctgggtctgggtcgcccacgtccgacggaacacgaagagaaattcataccaaaaagacgggaacaacgccaatggaatgggagagactgaaacccaagttaaatcaagcgggatgcgaattctgaaggcgtggcaaaaacggatgaggcaatggggggcgtgccggacgaggccccaggtcaaggcacatttccccgtcgcctcggtttactccttcccaatctggagccaccgggcctgtggaatcccaatccatattggatggcgaggggagaccctgcgacagttggggcccgcatactatggaaagcggtatcaatcggtgagcagggggacaacacagtggccacacggggctgggaccttggcctatattccagtcgaaccaaatgg

SEQ ID NO: 418580 - DNA, 887 bp, Homo Sapiens
agcgagggctgggattgccaggtacctggagggaggccgagcggtgagcagacaaggagtgcagctgcgaggccgagggacttccgaatatccaccgcgtgtgcgcacacttctagctgagagccgcgatttgggtacctaaggaatgctaagaaaagtgtatggagagatggatgagatggactagtgttggaagataacatttcatcctcgttagtgtgcgaggttgggagacgattgctagggtaagagccttacctgtgagaagagtgggagcgcaggggtaatgagtttgcttcgcagatctagtggagtgaatggtgattggtgatgtcaagattgatgcgaaccgtggtctcaactcttgggctgcaaaggacattaaacgccgtgatagtacacataactagagaagaccaggatcggggcactctgcatttactggtggctgaaatagctttgggtgttgtctttgtgcatgtgagaccccagggggacgtctgaatcgacgggttttcccccttgggctgcctcgcggaatgagcgatgtggcgggtacgaacgaagtctagagcccggaaacatgaatggtgcagggccgcgatgatagattgtgtcgtcattcgttgtatgccaacagaaggttggtcgcagcggctcggatccattgactctttagacacgtctggtgccgatggtaggcaaagggcatcgtagagaagaagctggaattggaatcccccggaggaacttacttgcggtggctcatggggggccacaaagtcaagccgggggtcgaacgtggacagaatagccggtaacctcccggcacgaggtcgcctagggtggcataatgtaaacgcgaaggtagctgggcggcttaagat

SEQ ID NO: 418581 - DNA, 1410 bp, Homo Sapiens
  misc_feature (252)..(252): n is a, c, g, or t
  misc_feature (311)..(311): n is a, c, g, or t
  misc_feature (640)..(640): n is a, c, g, or t
agcggagggaggtaccatgagccgttgtgcgggatcggcatgggcttgtgaggtcgcgatccaattgagggatataagccagtgcactaggagcataccggaagaatacaatagagagacgagaggagaacccatcacgacagaaaggggttaaacgtgaacccagaatataaattatagtattgctataagaggaatgtgtggaagtgctaatcatatattatcgctctagaggtggagcagtgccgctangcctgcttaatgtgtaggcaatgcgaggacaatgcataatataagcgagatggggcctnctgtagtgagggaggacgcttggtgtaaaggcaggctatcacgaggtaatattgttgcagcattgtacatcgtcaaaaagccatgatcgtgtagcagatgggaggtttccatccaatgggaagtgaggtaccaacagcttggggatggcttataaatatctcagtagagtatagttactacgtctatagcatcttattggttggaatacggtatcgtgttctcctgtaatgcgtaggagctgcccttcccgaagtattggcgcacatggcaaggtgccgattcgcgggagagcccttgctgatcatatcgaaaataggtggagcgggcnactcaattatgaactttctccctagatgaggtgactattcatgacaaacttcagtgaaccctattctagggctcccaatggtggtccgaagcctggctgagggcatagaatgcatttgacctcgagcgggtacttcttctaatcaattggttattggacccttgggcatggggagaatcgagcgaaggaattccaaaccctgcaagttggaacgaattgctagcgatgagttccacttccgaaaggcttagtcgttaaccaatacttgggctaggggcaccatgtagaatcaattggagtggaacggcattgcaaaaatggacacggcaattggcggtccggtgacccgtcccctgacgaccaaggctggaggatagtaagcagagcaatattttcagaggcaaggaaaatggagaggtaaagaaagcgaaagaagttggactccatggaattaaacaacctggggtatttgaaatttctgcgcggaacatcttgtaggagaatgcgaacccttaccattttgcaatttggcttttattgccaggtggcgaacagtccgaagaaacatggggcctggattgggcacaatgggtaatgggggactggcacaaacagtattcaatgtgtccatgtccagcgggcgcgcaaattgacaacagacaccccatgccggctagcgcaaacacttaaaccaacaacgccacaccaagtgtggggtgcgacaccaacacacggactctgcatgataagaacccaccgcgtcagaacag

SEQ ID NO: 418582 - DNA, 824 bp, Homo Sapiens
  misc_feature (247)..(247): n is a, c, g, or t
  misc_feature (367)..(367): n is a, c, g, or t
  misc_feature (540)..(540): n is a, c, g, or t
  misc_feature (558)..(558): n is a, c, g, or t
  misc_feature (564)..(564): n is a, c, g, or t
  misc_feature (591)..(591): n is a, c, g, or t
  misc_feature (597)..(597): n is a, c, g, or t
  misc_feature (648)..(648): n is a, c, g, or t
  misc_feature (667)..(667): n is a, c, g, or t
  misc_feature (794)..(794): n is a, c, g, or t
agcggaatggctgtgcacagagtgagatcgaactgtggttctgatcaactgtttcggactccaggtacggttgcttggatggatgtgcaccccgaatttctatcttatcgcctgctgctgaaggactcttgggctgctataatgagcaaaccatggctccgatggaacctagtatcgagtctattggatattgcaggaccctgcatgtagacagtattcgtgcatagcagtttaagtcactaataanaacggcagacggttgcatggtacctgtacttatgagtatgggctggattcgtctgattgtgtgagattggtcatcggctcggactattgccatgacttatccggtggatctcgcaatgtncacaagaacgaagatgtgtaagacagcctgtacaccgtggtatataacacgacatatttcattaaccataggccattcccagtaggattgtgtgttagttagacgaggatttgagcgaaggtgggtcatagtattcttagtatagctgtcgcatgcaatcggttctgtcgcgnattgctagagtgtatctnaagccntcgagtagaatgatatcctttgaacgnaccatntggatacgtatagggtttggcattgcatccattgaagtccaatcggtgagnagcggaaactagtatgaantcgcgtatgagatgcgatctaaatccgattcacatgtcactttgataaggattgggtgcgttaccgcaaatttgttattgtaacccatgtcggattaattttttgaacagaaaggactttttgatcntctcggagaaattaggtttgggtaaaattg

SEQ ID NO: 418583 - DNA, 1330 bp, Homo Sapiens
  misc_feature (338)..(338): n is a, c, g, or t
  misc_feature (644)..(644): n is a, c, g, or t
  misc_feature (663)..(663): n is a, c, g, or t
  misc_feature (1013)..(1013): n is a, c, g, or t
agcgggggcgttctggtcccactttctctcctctcgtccctgtatggcgcgatgacccggtggcatccgtgtggcgcagcctgcgttggggatccccccggcatccggtcctgtgcggttcgcctttccggcgatcccatagaccctactgtctattgttgcttctcctccgagagcagaagaggctacccgagctcagccgagagacattagtctactatggacccactcgagttggtactcgacgtacaagccgcgtactccgtcgcggcaagcgtgtcactgcggccagagtggggagagcaacttgagctgaagacaggggctaacctagtgcncatggggtggctgtaagccggtgacttgacgacgtcccaaaaatgcgacatactctctgtgggagctgccgcctggaggtagtacacgaactgtggggtgggcaagacgtggagccgcaaagccgcagggacgacacgaagcggccgcgtgcctagaaagggacatcgtcccggaaaggaagctgcttacctccatgtgccgacgaacttgttgtcgttggacaagggtcctaagatcgcgacaggcactccccaagacacctctggcattcgccacatgagaaaatgtgcggtcgatagcggtcntttttgtcgagcgacaccnagaagctctcgctgtctagcagctattgaccctgggagggcgattgaacagtggggtgcgatgcgtggtggagaatccctcggggatactcaatgaccgctagcttagacgggctgtgcataggaacagaattagcgccagtccacgtggacgggacatacacgggaattgccgatacaaagtggcgggtagcggtctcccgtggggaaccaaaagggctcggtcacgcgacgttggagggaccttgagtacgaaaaaccaccttgtccagcgaaagggaaacgaaaggcccctatggggccccagccgaatagagagagttctccctcgatggaatccataacgaacanggggagcgaaaaggagaagcggtcgctacagtctattcaaggttccgaacacggcggcgatttctatggcttaaaccgagaagcccagggaggaccgaaggcctgtgcatgcaaacctttaaccgcatgttaccggatcggggctttaaccagattgagcaccagggaccttggaacaagtaagttgtattcccgccgaccgttccaacgtgtccttggcattatcaccgaagtcgattgggacagaaaatttccttgtggcccgcccgggggtggggcgaaaagaaagctttcctggacggggcctttaaaccaat

SEQ ID NO: 418584 - DNA, 803 bp, Homo Sapiens
  misc_feature (172)..(172): n is a, c, g, or t
agcggctctcgtgcgggaagggtcctgtggcccttcgggtggcggtcgcgcatgcgtctcagggcgcgcgggtacccgcagtctcgttgaccgtctcaggtccatcacatcccttcagtaggtgtgccaggatgccccacctctccaggaatctgagcaggtgaatgctcgnttcgccggaacgtacatacgatgctagtatagctagtatctcgctcgccgaagtcttgcaaggcaaatttatccggcaactagtggagtgtgtcgtacgcatgaattctcgtcactttagcgcatgcacgcttggccgtcgagcagactaaagacgtagccacggagtactacgaacttcggcagtgggtcccatctcttgtcaccgaccatccttcgacgcgtgtagatcgccgcgtgaatcatcgcacgttcattgtggcaattgcctccatttgcgaaatgatccccctctgcaggcagagcagtggccacgcgtggcgtagtggtttggggaaagtaaccatatccaatgtgtccgagacgacatagcaggagggtgacgtagttagaaaggcattaagggtctagactccctgcgggtcggaggacctcaaaaggatgggggcgtccgtacgtcgggtgcttaatcggcagggcatgtcgtgagcaccaaggctcctgcaggggaacgcactccggggtagctctgttgacacccctaggaaccttccccaacttggggaaccggcctaagcacttgctgccattcgtttgcacataaggcttggaagtaaagggcgccaaggggg

SEQ ID NO: 418585 - DNA, 1440 bp, Homo Sapiens
  misc_feature (909)..(909): n is a, c, g, or t
  misc_feature (1055)..(1055): n is a, c, g, or t
agcgggttgtaccctggacgtcccatggcgacccttgcctacgatgaatatgggcactctttcctccctcatcaatgatcaggaccgcccgtaccgtcctttttggtactttgacgtcccctctgtctcggtccttagtgcgcagactgaggctgatagcaatatagatacgagaactgtcacttggatccagatgcgcttgactaatgatgactggtggatagagcgcatggacgtcctgtaattgctaactcagtgattgcagtgccacctatcctatatatcacttgaataggggctggtatagagttcctgcaagagttcgactaaagcatcgtgggagctgggacaacgtgtgcccccattgtcttccagtgaatgactcgacacatatcgagcacgaattgagacaccgccactatgggacgttgctttattgtcccgtgggctttgttttggcactctggctcttagacatgaaaggccgtgaatcgaatagatctcaccacgcgggaggtcttacttgccatgccaagagtcctagtagaatagtgcgcgcgatggacctgatgagaggctgagcgacatgtgcgtctggccgcttggcctgatgtgaacagccacccagtggcgacaaagtgatcctagcgggtaatcacggctctcgaatgtggcgcgaccagtgaacggtgacttccgaaaattgcactgagactgcaacggatcgaggttaacaaaaaacccatcgtcgttttgtacatcgcccccatggtagttgtcccgaaaccttcgagttcgctgcgggcacagtgcacggcggattgtgcgcttgcaaacaatctgtggtggggtcgcaagagtggcgcttggtcttctccacttatgctatatagcgaggaacttagttgnggcacaggcccgggatcaattaaacacagttggcgatagggtccccagagagctctttaactctcacattattttccaccagaggttcccacaagttgagagctgcgtatagacggcggggaactttgaacgcggcatataacatnttttcgacttttgaaccgagggccggttttgattgttggtcccagccttatacgttggagttgttttccacacggtctatgagactccacgagcgagagttcccttaggtatcaaacccagccgtgggctatgaccgtcccaaatggcccttgggtgagagatcttttgatcttgggtacaccctgtgaatccccagaaccaaatagccgggaaatagaaattgagtgtagaaagcccggcgtagtttacacctcatagtgtgggctaggacacatttgcaagggcctcaacaggataagtcccgcacaaagaggggagaacatttttttagagcacatgggtgtcggacggcgatttataaccagcagagatagttttgtccga

SEQ ID NO: 418586 - DNA, 906 bp, Homo Sapiens
agcggggctggcggagcagaggtgcagaagcaactgaggtccaagctcgtcgtgccggcttctagagtggacccagaagacgtccccagactcaggaacgattcagccgtatcactcatctcgctgctacagcatagtgatactgcctcgcggacacgtgcctctggttctggattatgatttcggcctcccgagggggttcactcggtggtgcctggcatgccctcgttccattctcggccttcgaaggcgacgtgcgtctccgtcccctggccgctttgacttcccggatgagctgcgggccgctgtggctgcatggtgtctggtagttctactagccccgtagccccagagaagctaccccccggtggctcttcaacgtcgcgcacgcctagtagtccacgagagctgtcctgggccgcagtcgcctccgtgggggatctgggcctgcgaaactgcagccctcctgagtcagcaaacgtgctgcacccgacgctgggcggcgaagtactagttccgtgggtacctggggcggtaccaagcagtacaccttctcagagcacagcgtcctggactactcgtacaacatccccaacatcgtggtgcccccagtatgtggtggcaagcacggaggtggaggtcagcatgcatggtgccggagcagtgtccagagactgcggcctgagctgagctgtctgggccactgaaggggctgtggggagccccctgtgccggggccggcttgcgggatgacgatggcaccttgggttgcatgttgtcacttgctgcacttgtcgtgcccatgacggaaaggcctacgggcctgaatcttgggactgccaggcctccttccgaaaacaagccttcagtccgaagggctagaccatgatggaagtcagtaccccg

SEQ ID NO: 418587 - DNA, 1179 bp, Homo Sapiens
  misc_feature (484)..(484): n is a, c, g, or t
  misc_feature (957)..(957): n is a, c, g, or t
  misc_feature (1123)..(1131): n is a, c, g, or t
agcgggggtcggggcgtggcgggggtgacggcgggcgctggcgggcctgtgtgtgctggcgtcgggggcgcggcgggcctggcggctcggtggctctggtgacgtgcagcgggcggccggcgtccgggtcccgcgctgcatcgctgtgcagccgggtcgctcggccggtggcttggccggggtagtgcgtgactgggcgcgaggcgctggaagttcagagtgtcgctgtgtctctacttcatcctggataccgtgcttgggtcatcggcgcttcttacctgctggggacctctggggacgcgggcatgatgtattccaccatgcgcgaaatgactaggactctccccatgtagatcggaggagacttgggcaacggtaatgactgacatcgggaaatggacaaggtcttgtgtcctgtcggccccactgaggcaacacagtcggattggcgcagtaagtaactttgcaccaccggtgacaggtnttcgcatagaatccggaatttgcgacatggacaccccgaaaggagagtgactggaacagcgaaggcaatcgaaacaagagggtttcaccgtatgagaggggaatatcgcagacgcaagcgccgttaacgcagagggtttcggtgaaaggtaggaaggaagcgcaattgcggggaaaatttgtggcacttaccacgtacaaaggcgttcctttgctaaggaagttcgttgccaggtccaattagattcacaatagcacctttaaattaccctagggaagcgttaaagaaaaatttcctagtagcaccgttatggaacgcggacggggaatagaggaattccgattcacatttggaatccctacgagtggaatggatccagagaggctaatccgtgtataaggtgagaaggataagggttccacgcgaaatcaagagaaatggagcttccatcttggcagtgcttagggcgaacngctagtcatcttgagttcgtacattggctacaaacacgaattataggttagcgctccacactctgggggtaccgttttgggaagtaaattacgacgcgtagttttttcccctttagagaacccctttcatgcttgcaccatggttcgtcgaacgtacaagcttaannnnnnnnntggtttgtaaaaaagcacttttcttccctttagacttgtatacacccc

SEQ ID NO: 418588 - DNA, 646 bp, Homo Sapiens
  misc_feature (390)..(401): n is a, c, g, or t
agcgatgtgaactttatacatatgtataggttcgtgtagctaccaccgtcaggatacagaacaaacagttccctcaccaccaaaacctccctcatggtattcctttatagtcccatcttatttcaaggcaactcactaatcctgttctcaatcaccataattttgattaaaattatttttagtatacatattgattacatttccagtggacttgaattaattatatagtcttgatttgtaggttggcttaaactaaacagtttgtaaagaagaatatctggcttatttgatttgtataacttttttatggaaatactgaactgtatctgaagttttccatttccccagaacacaagtaaatacgttagaagttttagttaaccccccccnnnnnnnnnnnnggcatttatggttaatattctgaatagataatagtcaaaggggtcaaaagttctaacatataacagtggtaatttttgggattttactagctcggagtgtatatatgtgtattatttcagtaaaatacagattaccttctaaaacttttaccagtttatactccacgtaatatgagagtgctcccttagtcttgccaacacattgttgccaaccgtgtgtctgtctcctatcttcttacatctgt

SEQ ID NO: 418589 - DNA, 419 bp, Homo Sapiens
agcggctctgactaccttgcctatgaacttttctttgaaattatgcttttctatgagaattgtatatttttgttgatgtttctagccttttagcctgatgataggacctttgagtgtctgtctaggatacatggtaggtaagggtagaccatgatcatttttggcagaaatgaagcctgtttccagaaggcacgttcctccatgattttcctgaacattttggttgatgacttgggggtcagggaatccattcaggtgagaggttagttttttggtcttcaaattggaagagcaactttagcctttgatttgtattatcttctcacagcaactattatgttgactgcctgtacatgccttcaataccatgtaaacctagtttatcttttgtatatttgatttcttagatggttagagct

SEQ ID NO: 418590 - DNA, 356 bp, Homo Sapiens
  misc_feature (43)..(81): n is a, c, g, or t
agcggagtttccactctgccttcagcggtgcatttttttccannnnnnnnnnnnnnnnnnnnnnnnnnnnnnnnnnnnnnnacagcacaggaaccagagcgcctgagcccgcagcagccgcagacacaagcacggcaacccacgcggcctcactagagcaccacgagacaaggctgccgcaccacgagcaccctacaaaccaccgcgggcgagctacgtccacgaaagcatgacaaacgcgccagacagggagcgggagcagacgagcggctaaaccaaaaaccatacacagaacaataatcatacacaactaacattagtgaccaaaacacacaaaaactactcatcgcacccct

SEQ ID NO: 418591 - DNA, 832 bp, Homo Sapiens
agcgtgttgctgcctggcgtctcccggcatattcggtccggaagtctatataaccactgattatgatcctccagtttgttccagttactatccccaactcccggaggtaacgctggcttaggtcgcaaacgatcgatgaagctgatcagatctcgatgatccaagctgaggctacatgcctagtagcacgatgtgcgtcattggattcatgatagatagaagcttccgatatgtagaccttctccttccgtgtagtccataagcgtcgtagctactggattactgctcgacgtctaccgacatacgaccaggtctcacagaaggttcgtaccacccgcatgatacttgagggcgcccagctagggcgtgctacattgctggcgaagactgcctctcggccacgtttgctctggttggcactaacgacatagtgtactggggctcctgtagtagagtgaggggtcacgtctagtcctgtgaagatggacgaacgggctcttgtagtagatcatgaaactttgttctgatcctgttggcgagtctaggactcattgaatactcttgtccattatgtgcacgttgcagatggtaggtatgagcgtgcgttgaattggtgcatgcccccttgttgtactgcctagggctcatcgttgtgattattcctcacgggttgtcttctctccctacttgacgaggggacactcatcatgaggctcactgctttggccgcgcctgtcatctttgcgccttcctctcccagcgttacacattgctcggtctggtgatactttccaaggggtttcccagtggatttgggtccaggctgctttaa

SEQ ID NO: 418592 - DNA, 1377 bp, Homo Sapiens
agcggatcgaccaacggacgtggacccggtaccctggacgagtccgattcgcgtgagcctcttctctggcgtagcaggtctgtcgcccagttgctcccagccgtggctcggattctctgctgtggtacgcacgccaaggatggctggcggcgcactgcactgggagccaccaatggcctagtgtccgtcatgctgtcctggtcagtcggctcggcgtggtgctctatggcggagatcgcagcttcttggatcataatttcccattcgttctgcggtcgtggtggctttctctcggcacatctgcgcccctggggcccgtagtaaccacgcgagcatgcagcgattgccttaaccaccggatggcgtcgcgagtcgctcgcagctggtgcgctctctcctcgattcacagatcagacctgtctctctctggcgccctcgggaccttccggcaggcttgcggtgtagaagcgtgttgacctttgcagtcctctttccagtcggaccatgccccggatgccattagggtacgatgggctccgggcgtgtgcacgtcggattacaacactttcggcttcgttaatcccccgccagtgcgcgagattgttccgtactttcccgttcccctcctgttgtagggctaggccattgcctttggttctccctctctgtatgagttctaccttctgaactgaggctggcctatgtgcggaggcatgtgttctgcgcgtgtgccaaccttgccccggtttgaggtcttatgtgccctgctagggggagcatgatggtccccggtgccttggtcatgtatctggggcgtagggcttttggcgcggcggtcccggcgatgcctggtagtggggcacccgcaggcaacgggctggctttccttacttggccgcctttaggtggggcacataggggcgttcgaaccattgcgatacccaagggtggcgcttttgttggggcagcacgggacggccttctcttggacgcgttttgcggaccgccttttttggtgcgggccccttgggtcgcatgtcccctgctgtaacaggtctcagtgcccccttcggttatgtcgcgtccagggaaatgcccaatattataccccccatatctgtttggggtctacctttctcggaatgggtgtgtatcgcaactgcttcgccctcgtcatcgcggtcggctagtaccgtgtgtttcccttccctctggtcacgccgattcagcggtaaagcctgctgggtctgtttgagagtgcggtgctttggcgagcacggcctggtgcggctccctcctcttatctgttggtgttcccatagtgcaatgcctggctggcaacggtccgtgacctttccccctatgttgtggcgcctt

SEQ ID NO: 418593 - DNA, 1251 bp, Homo Sapiens
  misc_feature (134)..(134): n is a, c, g, or t
agcgggttttcctggtctcccctatgtctatgtgctgccggagcgcgtccggctaacattcggcgtacttgcccagtattggaaggatcatcctccgaatatgctcgtagatcaggaatgatgcctaccccggnctggagtggtcagctccgcgtctatgtctagaggagcatctcaggatggtatggttagcctcgttcgtttaggaagaacggcgatcatcatgacgcgtcgtgtagtccgtctccatgctatgcagctccagtgtgctgacggtctgacactctctggggccacaggatgacgatatttctctcccaaggcgagatcgaaggggtcctgcagggcgactatcgataggtaagctctatagagtgaatactggcgagggaatagcgatactccacttgtgaggagctttcgccttgtgtgacaaacttgaatcagtagtcgttgatttgcaaggggacaagacggagtacagcatcaactctatggtaccaaacccatgcgagcatcccgatggttttgcggacacatgctctctggaacaccagagttttcctgtgtcttgaaacgattcagtaggtataaactgttgcccccttgtagagagacggaaggtcaaaatagtggcttttgcaacaagcaaatgacggggcgcaatacctaggacagcccccattggcagtgaccgttggacaacagggacagggtccatggggttctgtggtacgtaatagaacacatggttggaaatttatcccaatttttcgcattgtcctggtttataacgagccgtggtgcatttgcgcctaccctcgtaatgcagagcttagtatggggaactggatattgcgcatttatatcccgggttgaaacccaatggccggccgaggtaccagaaggacaaccccttgcttgaaagatgagcggcctagcccgaaagggttccttggcgagggcagaaaaattccacgcagtaaggcgttgacgccaaataggggaggaaagggtcgcgggtttccttccttaggccggttggggcggtccttcttcgctaacagggcaaggtccgttaaagtggcgtcctggtgggggaaagggagaacttttggatgtggaattgttcccgcgccttctttccctcttttccaaaaccattgtgaaccatattatttattaccctcgcctcgcgatttgcaaagtccttaagagccatgcgtttcaagtcgaacgtttgtttagaac

SEQ ID NO: 418594 - DNA, 1256 bp, Homo Sapiens
agcggattggatacctagatggaccctaagcctgatgatggcttcactatgccgtgctgcgacagttactcccgttgtcgctgcgtctgcactcagcgaaccttgtgcgtctgaggcgcgtacgcgcgtcgtcgcagttgcctcgtggtgtctggccaggaccggtggctctccgtggcgggttctcgatggtttgctgtgcgcgatgagccccatctgtctcgagcctggcaggtgggtgtgcaacgcgtgggatcgcgggccgtgttccagagctgcgggcagtctcgcctcttgtgcccgtggagccggcaaagggtgattgttccattgccgttgacgaggtggtttcgtagattgagaggggccagagtgctcgtccttgattcagatttggcacaagaccttagggcaattgcgagcaaagtcggggcccgccaattagctcacagggtatacactggtgatgcccctgttgacccggaaagtacgctgtgaaggccgccccttggaatctcgggcgaggaattaccaaggccttgagggctaacattgccaagttattttgctgagaactgtggtaaccacaccgtgttgtgaaagccaaaacggttggactttttggaacggctcgttaaaaccccaggggtgctcgacaatttcggcgtgacgaccgtacatgtttgtggaagctccacccaccgttgtctggaatgtatcgcgcgcggtggtacgacacactttgacagggttatccttcgccacctgagtgtccgcccagggttgtgaaatcccccacggcgtttacactcgccagcgcacaccaaggttggccccaaagaggtggttggcacaaccggcccggagaagccgtgcaccagaggggggccgggagccacacaaaacgctcagagcgagtacatgtatcctacagacagcacccgcgaaaggtggcgacaaatccatcaacccgatggctggcaaagtgaggggccacactatgtgataacccaaaaaaggcacatgtggaacaccgggcggaaagataacttcggcaccccgatgacgggtctgctttttcaccacgatgacgcgggcgtatcaaccaccgtgtggagagcgtgacagcccaagccgactgccgcgtgtgaagacaacacacacccggcggtgtgccgcgcgaacaccactggacgtgcccgacgacgcggaccaccacgagaggaaggacagaacgccacaggggtgcacactcc

SEQ ID NO: 418595 - DNA, 657 bp, Homo Sapiens
  misc_feature (637)..(637): n is a, c, g, or t
agcggggggtgccaggagccggccggcagagagcggctcgtgggtcccaggaccactgacgtccctaggttgtactgggaggtgcgagcccgaggctcttagtcggcccagcggcacggggcacaagcgggccacagagatgggcagggagctgtgtccccagggtggcggatttccgagccacccacgcggttggttgggaaagggcggtggattttcctgcggagaaactttcagggcgggcctggcgcgctctctgaccttgggctagttattttgtgtgcagttcacaagatgcctggccgggctccaaactcgctctctgtttggttgtgttttggctcccaagaaggcgaagccaggccttttttcttttgcacaaacagacaggaaaggagagaggaaatgcaagcaaaggtagtaggtaacctaaggtagtataagcccggggtcatctttgtgagtttgcagacttaacgtcgctaggcctcagtactctgcagaaagatggtggaggacctagatgacctcccaggccattccaggaccagcgtttacagtcctgttacataacctagtgtgggtgtgcacacacaggttattatatgttcagcactgtgcccttggaagctatgtntacatttaaagttgtgttgc

SEQ ID NO: 418596 - DNA, 1235 bp, Homo Sapiens
  misc_feature (251)..(251): n is a, c, g, or t
  misc_feature (306)..(306): n is a, c, g, or t
  misc_feature (343)..(343): n is a, c, g, or t
agcgggggggccgtcgccgggccactggcggtcgcggcgtggccgcggttcccttgtctgcctccctcgcggctctccgtccggcgcgcctcccgcgccctccctggtgcaggctcaccaattcccggccggccggaccggaaggcgcagacggcctcgtgtgcggcctcagacacaacgcttggttccattgtccctcgacgtgcccacggggtcgacttcgcacgagccaaaggaatcgagacaccatnacgagcctctgtgctgtgggaccgctactaaactctgtgctgccgcaatcgtacngaggctcaagctcggtccatcctcgttggttggactngtctcaacattttcgacagtgcatcgcaactctcatcggctccgctctgcgacgaacgattggacacgcaagcaaactgacaagcagacgaccttctcactcgcgagcgaaacttgccaccttaagaatggacgggtactccggtctggtaaatgctccgttcgctgacggtcgtggcaagcactaccgcgcgagagcattgcaccactgtacacaaggacagtgctcagagttattggcgcacctcgattcaaccggctgtggactcggtgtcggccaggaaaccgctccgaggccaaggaagctagacaggtgggacagccttgaggacagcttcggtgggggaaccgggaaagcgacaagaacacccggcgttcgtggggtgcaccccgagggaaggttgcttcccgctaacgacgcaagaattttctacccgccttttgacagggttgaatgattgtcaggtcggaaggaaccagcgtttgcaagatacggaagaacaacagcggaacgggtccttgtgtaatgggggcgacaaggactttcttccaaattcccaacttgtaggcttgtaaggtggttagacaggcgaaaagggccctgtgggctgcgaggaaaggcggaccacacttagtacccggaccgggcccccgaattgaagccggaggcccgattagatcaccgcacgtacgacgctggcgaccccgtggcgacccaggacgtagacaaccctttggaatcccaagcgacggctcccaatggtgtggcccattgtggcatgcacaccagcggttgggcgtgtgaagaagggagccaccccgtggtctggtgtggacgtgggaagttgcatatggatgacgttaacccctaataaacaaagggaagcccgacc

SEQ ID NO: 418597 - DNA, 1262 bp, Homo Sapiens
agcgggctcagtgcggtgatcggctgaccggttgcagacagcctgtcgaggcaggttgttcttggataatgattgcgtcatttgtgcgcccggaagacttgtgagcgacacgccactgggtgcatgcacagcaccatatcaggcgacgagaaagctggacgcatgcccacttgcatgacctgtagagactgtcgtgaccaacattccatagtgatgcagtgagttcactctatgtgtgtaggactgatcgatcacgatcagtgacgcgggctccaagactcataagacacatggtatagacacttacttgggtagacgctcgccaaacgtggaactatgtcgtggttggaagacccaggcgctcgacgaaaatggttccatcgtcttaagcaggtcatacgagaggagtgcttggcaacagcactttggctacagtacgagggcagagggcgagaaaaaagcatgggcacccaggatttgtgcggacagcttggcatttcattcgagcacgagggacaaaaacctcgcgtattattcacgatggccatttttggaacgtggataggaaccaaggccttcctataccacagttttggaaggggccacgaaagggagaaccacacatgagggacttacccccccgaagcaggaagcaaacggaaagatcggtattgacgttcgcgagacctcttgtcccacgcatgaagttgaattttcctgggcatttcagtttagtttgtaacccagtgggaaggccccacaccgataaaggtctccaaggaaaacggaaaaaagtcttgggaaagacttccagatggaccggcttccagcaccgattctccggtgacgcatgatgtagagggcactccgaccgcacgtctgccgagtggaaacgcacactttggtgacaccgacttggtggcgccgtaccctattcctccttcagtaaattggcaagatgacccgagggttaatttagccttatattaccatgtggttatctaccgcccccaagtagaaaaaaccgtaggtgacacctttatatttccacgtgccgcttctcatatagggccgtatacgcgtatggagagccgaatctcgacaacatatcagcaacggtattacgagtttgacttttggagaacactcacgtaggattacgattccacacggtacgccagtgggtgaccactctgcgccccatttgtgaaggtagcgcgacccggcccttgtggcggtattcggaactacagaacgcacct

SEQ ID NO: 418598 - DNA, 1577 bp, Homo Sapiens
  misc_feature (269)..(269): n is a, c, g, or t
  misc_feature (574)..(574): n is a, c, g, or t
  misc_feature (1417)..(1425): n is a, c, g, or t
agcggggtgagcccgcgagaatagttgacatggaccgaggtatgaggctaggatctctgcagcaatcgattatgtttgaacccacgtctcatctagtacacttcaatcggccttgagtctgctgaaacacggtggtttccatgtagtagtaagtatgaacatcggtgccaccaacatcaccgatggagacccgccgaattcttcatgactggagtattgtgtgtctcaatgacgtcattcagcccctacagaagggcgaatgcttcgcntttatggatcccgtcaagatgcgcgcgagaaactggcgcttctagagtgattgacaatatgatctatcttagctagtaacacgtactgttcgtagtgtgataacagataactgacggcttagctaagacgcctgcctcgccgagcggtagaggtgcacttaatcaaggtacgtgaagcctggttacttccggcggacactacagagggctatcacatgtttaaactgatgtgtccccacgtatgtcctacaagggacatactgacacgtaaggaactctataaagctcgtaccgcccatagggantcccgtatcacgacctaatgccaatgattgtcactccgggccgtaagattatacagactatatcgtttcacctagatatcagcgtttcgtcaggtacgaatacccagtgaagatggcacaccagagactaatttaacatccgcggaaattacgcacgcaggatgggcaataccgggccaacatggaaacaaccaatcctaattcccatcgctggcgaagcggcgtccaatctctactttttttcttcattaaaaccaaggaccgaagttatagtaaatttcaaacgtgatatcctttgcaatggcgactttattggaaagaaaaagtccccttaacaggccgctactgtaaatagttccggataagataacggcatccgggagccctagggtgtagcgccacaccggtatattctccttcgcacaagtcaaactcgcgctgttggtgttgagctctaactcattgagaggttttgcgccttctgcactattttcgctaacccaaagggtgagtcttccccaagggaaatccggcttagtttatttaacccgtttgaccccttttgagggaccaattccccaagaagggaaccggggaactttgacagaacgaacacggtaaataagatcgtggggaatatagagaccctgaaaccccctgaggatagccacgtgtccgattgattacgtctttattgccatggtggcgaagaaaaattgaccccacaggtcaccacttcgagtccgtgctcattgatgtcggcgctctgtaacacacgtggacactgatagacactttttctcaagagtgtggtgacttgcacgcctgtgcaccatacacttnnnnnnnnncacctcgaatactcggaggatggtggctttaacaaacaacgtgtgatggtgtggaaggaaatccacatagggggcaatgtattacaggtgttttcacgccggagcttgtaacaaggtgcatatttccggggcgctcaacttgcaccaacaac

SEQ ID NO: 418599 - DNA, 1446 bp, Homo Sapiens
agcggatcgtctacttcgcccgagagtcgtgtgggtacccgtgtggcatactcggtgcattggacgggataccctggcgtcatcttattctacccatactcagtgcctgtgtcgttctctaatagactggcctgatccggaatcgatgctcctatctggcagaagcgcacgtgcagggatgtgcgcacctattgggccccttgcacggcaggatcacttgcgccagacgtcaagtgctccccgtcagtcagtcagatagcccttcttactttcccatccgcacggacgatttcctgcaccttgcggtgcacacctcgtacgtcgtctatgtgcctatgcaatgatgccatctgaggagcacctcaatgtacgcgcctcagtgcaagacgaacacctggacccaaggaactccctttccgtgaggactcgtgcatccacgtcggtttcacatagcagtcttggaccatggtcttgagctagtcatttcacccttcaaaattcccgtaccacggggcagaaactgggtaattcgctcgtgacaatccttgtggagaggtaaagcatctatcgaccgcgaccagtttagcggtctatttcgtatcccaaccacagcttccgtactctttcacagtaacagaatgacgagtaaatccgagtgacatcgcaaagtatagaaccctagaaggtttgcatatgggcttagcttaagaaaaggcccatttccaaatggggtgggtgcccgttcatattccattgtgccgtgttgcatgggaaagtaacttctatctgtcacaaatgccaagtagacgtgtctgagaatgtaagcgctgtgggtcagggacgtcgttgtggacttgtccattggtggccataaactgtgtgaaggtttgggtgccacgatatttgctaccagaacttttgtggggttatgaatgatatatataatgtgttgtaaagtcttcacgcgacatccgagcaaattagacattggctacacacacaccgtggtccattgcacccatatgcggtgggaaacgcctacccttttgccatggaccatgggagaacgtggggaattatccccccctctatcttatctattggtgtggctccgacgtcgtctgtcgggatgtccggaaatgaagcgtatgcgaaggttctaccccacgttgatgaagacccttggaagcgtcggtgtagccctcgtacaaaaatggtcgcaagttcccaataccgaaatccctttgtgcgcattggaaacaccgaattcgtatggaaacgacgaaatggttttgcccgttcaaagacgcacatgtcgagtagtgccgcgggcctccggaaacgtcacatggggtacgtttgggggcacgtgagaagagataattccgtcctgtgagtgtacatcaaatcatgcggagtacctacactcccttgtggtgtagagag

SEQ ID NO: 418600 - DNA, 261 bp, Homo Sapiens
gatgacggcgacgcgcttggtctcaccgggttcgacgcccggggtagtgcgctcaggcttgggagggatgtcaggcgaactccaagccgcggcataactgtcgttccagccgaccaagaaccattcgtgcactgccatacccgaggagctgggcaggctgacatcctggaccgtgacgggagtattgccgttgttggtgatgatctgggtcgagatcatctcgcgtccctccgggccgggacctacgggtccgcacgttct

SEQ ID NO: 418601 - DNA, 630 bp, Homo Sapiens
agcggacgcgccctgggtgggtgggtgaatgtgaagaggcggcgttgggctaggcccatgcagcccgctcggagcgtcctaggcccggggctgcgctgtgaaagacccagattctcatcccagaggcccagcagtcctgaaaggcctcctctccgaccctgagccgggtccgccgaacaaagttcggaagctcgggctagctgggccagcgccattttctcgcacttgtggctggatctggttgtcccggcgactgcgccccggcgcggtctcttttcctctacctcggatccccagcactgactcgccctcagacgccggggaaggtgtggtgagctcccggccccggcgaggggtccctggagaggagctgggtggcggtggccaggccgagcgcggttgctggcccgcgcctccctccccgaggcaccattgttccaggatcgctgtgaccgcacaaagtgaatcctttcggtgcggacagtcgccttcaaagccaggccccggattcaggtcagggagaatctcagctcctgagaaatttgctcctgtttgccgcttctgctactcgaggaaatgaaacgccattaatatttgaaaaggcaattattttcctgttgaatcgagaac

SEQ ID NO: 418602 - DNA, 856 bp, Homo Sapiens
agcgggctgcgcgcggtcggtggctggccgcggccgctgtggacggacggcggctcgcgagccgtcggcgaagagtgcgcatgcgcgaggacgctcggtgctgatgcagggcacagatggactcgcgagggacggacgcacgacctccgcgtaggccgggagcgcggcatgactgccggtggcgtcaccggacatgtggcagtgctcgcatggcgagcgtgaagcccggtggcacactgtgacactggagcgccgtagggcccgtgcaccgtgccctcgcatgaaggtcctgcgcggcttgtcgctgcagtcactatcggcatgagtgtgagcgcacagatgagcagttggaccaaacgatggaggcgctgctgtcatgacacagtgttcttgcaccacggtctgttggagcgaacgcgtgtcatccattcgtcaggggacatgtgtgcatgttcgtgggtagggacgggccacttacgagcatccgggagaccagcgctgtaagccagccggaacacaaggcggaacactgatgtggtcgatcgcagccacaagactgggaagcgatcgtggcacgaccaccggtgctgaaagggccccgggcagacttcgccctctacccctagggtcctcagtgctacctccatagccccatctggctcgccgggcgcaaggaaacagaggttggaagcctaatatacaacgtggggagcccttcatgtggtaccgactaggtgaagcctgcccgctaacggatgcccgggaaccatcagcagggacagcatctgtaccaaagaagcaggctcgcgcgtcagagcgggccgggggacggtgcatcacagcacgggcgggagaa

SEQ ID NO: 418603 - DNA, 649 bp, Homo Sapiens
agcggtatgcagcaattaacaacataagcatttcgttatatgtcctaacacagagaagctcgaaaacaccaagaatgaacctgtttttttagaaagaatcaacactaaacaatacatacatacaaattatttagcccactggaggggtatcctccaactctctatactctcctctaccaccccgccccaactaggtccaaaagagctatgtcttacaacagtcccttaacttagctttccaggaggctcagtcatccattcctagagaagcctccttaactcacttaccattctctatttactgccttgagaattctacttcaatatgtggaattgtatttccttaaaccttagtcaaaaaggtaatcatgtcttggtatcatgaaataattttgaacttgaggaccctctgaaagggcctcagggacccctggcattaccagaccacactcttgagaatcactgatatccatttattttggaaatacaggtagaagaggagcctgccaactgtaagcggcaaatagaaactgagcaggttataggattcaaagtcaaaagatgtggatttgagccctaactccactgtacacttttctggctatttgaactaagtaagacagtaatttaacctctttcaagagtttca

SEQ ID NO: 418604 - DNA, 714 bp, Homo Sapiens
  misc_feature (224)..(224): n is a, c, g, or t
  misc_feature (311)..(311): n is a, c, g, or t
  misc_feature (586)..(586): n is a, c, g, or t
agcgggagggcgtgcctaacagttgtcggctgttccgcaccttctccacaggtccgggttgtcacgtttgggtctaggctcatgggcatggtgtgcaaccagtagaccctaggagtgagatgtgcccagggagtccggggatgcgcgtgcagcaaagagagcacgctatctctgcctgactgtggtcacgtcatgtgatgtgcaatgcgacaacaggttgatgnttaggttgtctccaagtagacgcctctagccatcgttccatgctcggtagcaagatgtagccacgcattttagcagtcacacttagnatagatcttagaagggaccgtggcccagtttatgcatcgaagcatcctcctatagctctaagcatgtcggataccattcaagcagcctggacccttctccatgagatcgcatcatagtgatacccaggggtctcatcacgaagtgtagtaaggccgagatgacttggaggataagttcccgtgttgatccagtccacgatactacaagtctcccgtggaagcctggcatagcgccgatccgattccgtgttcaagcgtcgggcttatggagaggngccgaaagccctgaaagtagcacacgccaaggagccacacgtgtaccatgcttgccgggccgtgtccccaagtacatgaggggaagggggaccggaacaatggtgctgcacggaaggtgaagtccgag

SEQ ID NO: 418605 - DNA, 515 bp, Homo Sapiens
  misc_feature (62)..(86): n is a, c, g, or t
gaatgactttaagggatggaaacatgtcatatatgtccaaatctatgagtggacaatacttnnnnnnnnnnnnnnnnnnnnnnnnntccttttttccccaggggaggatttgggaaaacccaactcattttggaaaaccgggtcaaagaaggggaaagaagcattttattcctttgggggtacaacccattacttttgtgggtagccaaattagctgtgataaattggaatccccttttatagacattattgttccacctaccaaagaacagaaattcatagaatttagtatgccaccagtgttggtaatactctaagtgaaatcaagggggccagggtggtgggggcctcactcccggggtaatctcccaaacactttctcggaggccgagaaggcgggaagaaatggcttggaaggccagaaagattcgagaaccacccggggcaaacaacagaaccgtgttcatagtgcacacaagaaactccgtggtccccctacaaagaaaaaataagag

SEQ ID NO: 418606 - DNA, 1451 bp, Homo Sapiens
  misc_feature (194)..(194): n is a, c, g, or t
  misc_feature (712)..(712): n is a, c, g, or t
agcgggttcagctcccgagtggcgctcacgccgcagtcgtgaatgactccgtgaccgctcgtgactgctggacgtgctcgagacagtcctctactggccagccgggttgccctgcttggcatcacccaactggtgaggcgttcacccatggtcgccagacgggctcgcttacctcatcggacggtccgcacggncgagtaatccgcgcctttccgtgctagcgcagctaccgactgctcgatagctcacaagtccacgatgccatgcctcaaccatgccgaggcgtacgtagagggccaccacattgcaagcttgccctctgaggtaggtagttagggtcgtacgcgacccttctacgggagaccatccgtgacttcctattctcctcgtggcaagcaggaccacacgtaagccttgaggcgacggacagggaacccgttgaggccgaccgcacataactctcgcccttcgggcctcgcttaggagccgctataccggagtctaattcgggtggcccacgtgtccatcgatagtcggggcaattgtctttgccccaaaaactacctcttggaccagtcggtcggtccgaccaatcggagccgccagcaattacccgtggccccctttataggcgccgcaggtgggtacccaggacaaaagtccgtcggttgccaaaagtgaacttctgtacttctgctggttgggcaatggnaaggacccctcagctgtgcggcgcttgtggacattggacgaaagaacaaaagaccagattgacagaggctatccccgcaagacaaaccagagttgacctcaggtacggacaggtcaccaccaaccctaaccctctgtttccgtgggcacctttctctctaccaatgtgggcggaaaacgaattgaagggcctcccttttcaagggaggaccaccgttacctttcttaacccaatttttggtctttgttaacacacatataaggcaaaacagctatgttcccagacccaggtttggcggaccaaacggtggggggacgacaacccgctcggtggggcctacaattaaataaacccacagttaagtccccttgtggctaacgttgggggcgaaacaccccaggcgggacgagagcaccactcctttgtcccgcggggctccccccgttaatgtggccataccatatgaaccccagaagtgtcttctctcgctaagagacaatatgcgttgtgacccatgcggttttgaccctattataagcggcgagagggcacagaaaagttccgaattgcccctccttaaatgtggcgggccttttgttttcacaggagcgcaaacaccggtggcaaagcgtggaaatgaggcaccctgttaactgtcgagagccctacgaaggggcctccttttaacttgagccgcttcaatatgcgggccccaattattaaacactcacaaagagaa

SEQ ID NO: 418607 - DNA, 1201 bp, Homo Sapiens
  misc_feature (377)..(377): n is a, c, g, or t
agcggagtctccacccggcactacgcccatgttggggtttgtggtggctcgcggtgtggccgctgctccggcctccgcgggctcttgcgagtaggactcaccccttcatcgtcgctgcccgcacggtcacgctctttcgtcgcgcggccggtccgacgtgggcggtccaatcctgtcatggcctatgcggcgtatacttctccttccgccgttgaggcatggcgccggcactcgggcggcgagtctctggctgtgtcattggcgctagtcggtggacgttccagtttttcgcatcgtagtgggacttagctcgacctagaattcttagatagtgcccctgggaggtgccacggtcgagaggcgatgaccagtgactngagtatcctaggtaggtgcgccccagcgattctgggctgatagcaacagtgaaggactattgactattgcgatggctactgaagatgtctatgacggtctgaccaagggcctgaccagagaggttgacctggggcaatatctttgagtgtgaccaacttggaattctagaaggattccgtgttttgaggtccccttagaacaaccttgtgcggtcagagacatccccatggcagattgctcacatgtgcgacaacaaaaacccttagtctgtcatgcagaccagaagagggttcccccacactcagaaacaaacgcccagagggcgcaattggtttgtctttccccctagtcctcaattttgtcccttgagaggcctcccaaggaagttgttcgagtgtgcccatacgtgaagcctggcttggatcccaacgggacaaactcgttgtggtggaaccttggttgtcctcttcaccgggtttggctcctcaattcctgggcgataagcattcccccttaattgccacaaagggtcctttggtgcctacacattggtttagcaggcccttccctttcgcgagtggggatggctggcgtacggttttgggccaaatggagccttgtgttacgttgaattcgattgggaacggcttacatttccaaaccagagaggtgtgttcctgtgcgcaaaaagtcccccaccttgtgggtttggggtataacactccataggaattgcttcaagagcatggcacgagataggtgtgtaacacagggaacaccccagggtgagaagggccacaagtgtatatttttactatcccag

SEQ ID NO: 418608 - DNA, 1479 bp, Homo Sapiens
  misc_feature (1360)..(1360): n is a, c, g, or t
agcgggtccccgctcggggtgtttgggcgtgcggctgccagagtgctccgaaatcccgtcacgcgcaaatgacgccgacgacaatgggagaccgcagagagaagacaatatacaacatagctctagtccattaaggtggctgcttcatcgcgggactcatcgcgctggtccatgagcaatccttgacttgttctgcgctgttcagcgcgcattagaaagttcagaaacctggtagagccaagtagcgaccaactcgggcggctgcagttccgtgccagcccgcggcctcttctctagagtgtgaatcgggctgagacctattttcgaatggcgccaggaactcttgtgggaaccagctcgactcgggtcgcatgagtacagcgccatatcgcagtaagtccctaactctttcgctccagaacagtttacgtacaccggctagggtagacagtatgtgagtcggtcgcacctgacttgagtttggtatcgaacccctacgggcaaacaagacaaccatagtattcattatagaaaggaaacagttgagtatgaccgctgggactggtacctgcgacggccttggacgtgatccaccgcacctagcagtcagatacagtccggttagtcaagtgcgtgtggagagtgcagaaccaacgtaggttgatcctttgccgaccaaacttgtgggcccaggacctcgctggaccacgctgtgacccagtgctcgcgcttccctatcaggctagaagattgattgaaacaacgcttgttacctggtcactcgtagtgtaaccctccaggacctgttggagtatttccccagtagagcgttacgcaatacgaaaggccatttaccgaaagaaatccaattgcccgtgcccacaagtaggatacttggcccggctcctcggtgcttctacaagttaaaaacgaggaatctgcgagcatcaccgatgccctgtgcacaacgaagctgaaggatctcccccgtggcgccaaccaaacccgttgggttgggcgaccattgcgattgaggcttgaccggtgccctggcaagcgggaacgggtagcgtatgaaaaggtcctccaatcgaagggtcctgagcaggggtgcttggcacagaacaccccccctgtgtgaccccgcacatgtgtcgacactttcgaccacccttaaggacgatgccagatgccaggccgtatattcaatgagcggcgcctggggaaccctcgggatatacacgaagacaattccatatctttgcggtcctcataacattgtagtacaagtgtactcctttgtcgggccgtgtcgcgcacttccacatggtacatgtggccttatcccacaaatattggngcgtggtttaacggtggtgtacgtgtgtatccagtggttcacgcgcacatgtgtaatacagtggtagttggtcataacaccgcgtggtatcagtggggtgcagcatgtatgcacagcgc

SEQ ID NO: 418609 - DNA, 1377 bp, Homo Sapiens
agcggagctgcgccagctaggaacgatggtgcagcaaacagcatgagataccaatctcgttctgggttccctaagagtgtgctgcaagaagacgacccgcttatcaagcccatcacagccactccagtgccatcgcatggttcccctaatgactaataggaatcgagccgactgacatcgtgatacggggcatcaaggtataagcgactggaaatcggtggcttacatgtgagtttgcctgtgcgagtgacccatccgttgcactcatggtgccgttctcaagagcgacgtagcagatctgacaaatcctcatggccctcgtgtagaatcgttcccggatatgacatctgccttggcgacgcactggtgtgtgtgtacagtgcatcgtacatgggtaattgtacgggaggtgccagctaatacctgaggtgaaaacatagcacaacccgtgtgtgggatgcatctttacgtcttacggacaaaacacaatgttaataatgctcgagcgtggaatacttctgttacaagggttccatcagccccgagcaatactctgagagagagaattgcctgtggcggtcaatgaaggtaggagaacacatcgccttttccctcgtcgcattgccttgcgagggccaatttcgttcaatgagtcccttcgaaggcttcggggtcggcgggaagaagatactctaacttttcgcaagaaagcggtggaagcacctgagggccgagagtggatccaatccatagttaaaacgaaccccattctcccatcatggcaaccaaggaacgatatcattcaggattgattctgtacggaaagcaaccccttgaaaggaatccggttgtgtggcccgatccacatttagggtttaggggatagagacaaaccgtcacattgtcagtgggtagacaaattggtcccattttctcgccagtggggagtaggcccagttagtcccagagtgaacgacatcgtacgacttggggtgtccctttggtaggcctcgtttttctctgagccttgcgtccacatgggatcgctggtctagtggcgtttaaccctacacacatttatgaacagtgtgggtggccttgtcccttcccagggaaggaactcggggcagcacaaccagtggggtaatcaagagggtggttgaaaactgccatttctaactctatacttgacctcccaggtacatgggcattgagcacagatagaaggcctcacagtggtggcaagtgcgagctgtgggtctgtatgaacagtttgtttcatctctagaagcatggtcacttcttgtaatataggcgcacaagtggcctatttgtgcccaagttaattgagacggttctaatgagttacgccatatt

SEQ ID NO: 418610 - DNA, 1081 bp, Homo Sapiens
  misc_feature (933)..(941): n is a, c, g, or t
agcggatgcgacatcatcttcgtcaatgcacaaagatggcgccctacaggcgctactggtgactctgctgccgaaagctctgggtgtgcgggagataccattgtggccgtcagatcctggtgccaacgggccaaggatggatagttgaccggccaacgtcttgatgcccagatggatgctatcgagtccagtatatgaccatggcatagtagcaaagatatcacttgagaagattgattcgacacaacagacgtgtagatcctggtccgcatgatcctcgtcttcggatcaagctttgttgtagttggcacccatcctggagtcaacccacgactagacgcatggataaatatgaatgcagaagcgtcgaatgtgctccgtagccttgccggtgcgagcgtgctctgggaaccagatgttggtcccagtgcaggtgattgtcgcaaaggctcgcgaagaatgcgactcattgcatccaatgttacaataccgggccatacggggggcatgtctcgagaagggtagggctttgttggcacttatcgcgagcgcagagtcacgaactctcgatgggaaaccaatctcgccatttggaagcacccgatggcttgggaggggggcccgatcaaaaagcaacgtgtggcccccgtggcctgacaggagacagattcagagacctgacaggacagtcttcatgaatttgtctcctgggcccaaacgtagcaatggctgcctgagacaaatttttgagcgctgtgggcttttccatggggaacgactcgttgggcattcactgggaaaggtccactttgcgacccgacagaatttacttgcctaggcaaagacatgttattgccgctaacctcgttgcgctaggttgtgcctctcccttggaatcttgtggcgatcgtggaaacgttccgcgcgacatgnnnnnnnnntaacttacgttgtggtcggagctcctattggcgtagggagccagagtacgttgtgaactctcggagaaaggtttcaggcgagtggtgccctgacgaagcaatacatgattgcacattgttcccatgttgcatagagggat

SEQ ID NO: 418611 - DNA, 1202 bp, Homo Sapiens
agcgggtgtcctggcccactacccatagagcgcgctgcggaacctgctgcagcatgatgtataccccaaaaacttggcacggagttgcgggtaacataaccatggcgggttactccacccggcatcccgttagtgagccttgccttcctccgtgactgacatatctgctgacctctcgtctgaagtgtgttagctattaactgtcatgcaagcctagagctggcgatctcgtgaggcatcataactgtctaactaaatctgcaggaaaaagtcctgatgacagatctggccatttgcttgtgctgataccaggacccttgccatccgtgccatactttgcacggtacttgatgcctactagagagtcgtggacctaggagatctgtcctggtcgggcatagtgggatcatcaatcatgtttcaaagcaactcatgtagcatgatacgagtaggtgtcctcgcgataagcctcctagagcccagagctggcgactagatcgatctagggaagatggtcaaacaggttagaacaccgctgcttatggacaccctttgacgacacgcgtgcgatgcaccatagcaatcctcggttgaatatgaagcgttgcgaatgtccgctcgcagtgcatgctgaagattcaatattctgcagattagcatgattaccagccatgctagaaatggaatagatgatcggcacgtgtcataactcaaccctagcttattcagggccttgccgttggccgtttccaaaagcaatgccaccggcaatccctttactatggaacggcagcgtttggccagagaacgaacgaggggaagtaatcttgacatcccagcaaaggagtttgctattggaaggacattatatcccaccaattacattgaagtggagctcctaccaggtttgctaattggtctcgttcatttggaggattggtttcctacataatccaagatggaccgcgagagcatggtttcaaagtttttttgaactcccccatgcgagttaacccaaagctttggcacaggcttcttccccttctatggggtttggagccctctatttgagcctttgccgggaaagctatttgttgatccataagcgatttaaaccttctccacagaacttgtaatcctccatttaaccatccctgtgtaactttagaggcattaattgagcgcatatggatcgtattcca

SEQ ID NO: 418612 - DNA, 1150 bp, Homo Sapiens
  misc_feature (495)..(542): n is a, c, g, or t
agcggattattgatatttctatggaagaatgggctttgaactgccaaaataagaacttgagggtttctgtttccggtaatgaatgagtaaatttctgtcatacttaatcccctgcaataagcaactctaaaatatgcacgataaaaaccagctactccaaggaactctgtaggatgagtgtaagcagagtctgaaatagagttggtccttgaaggaaggaagttagtacactgaatactagttttcctggcttttagcctgaggcaaagcacattaggtggcactcattccaacccagagaaatctctgctgatggagaaagataaaaagaagggacaagaacacgagaacgggaatccccaaatagtagctgaccccaggattatatgtgcagagtagacataagcatctcatctaaagatgtgaactaagaccatagttggcacctgagaaacaagtgtgcaggcctcaattgaatccagatatttgcctacnnnnnnnnnnnnnnnnnnnnnnnnnnnnnnnnnnnnnnnnnnnnnnnnatcgtcaaaataatctagaatcaggatacagtttaaaattaagctctgaaaagtaaactcatactctcaagagaaaatcagtgataccaccattacatttttggaactaagagacagacttttcgtgagaatctacaattagctgtgaactagtctcataaggacgagaagtacgcgacacgacaaggtcgttaccgacgaaagtagacaggcaacacaagggaagccaatgggaaaatttctacactgaacaaatatgaacaattctgaaatacaagatacctagtaataacataacaggttgaggacaaaaatagagacatctgatacagagacgaagcaaagtcacggagtcaggactagctgagcaaacaatatagaaaggcaggaaagtaccgcgtgaactggctgagcaagaagacaacaggggaggcacaaagaagaggtaggaaaaagaacgagagaggaacatgcgtgccggacgcggaaagacacgcagccgcagacagcagtcttacgactacagataagaaagaccaggcgagagcaggcgcgacgggagcacgaaggatacgatagagacagaagcacgaaacagctgacgaaag

SEQ ID NO: 418613 - DNA, 1106 bp, Homo Sapiens
agcggaagcggaaattatccaccctatttctggaaaaaatatcctgcaatttgtagccatcaaaaggaaggactgtggagaataggcaatcccaggggtatggtggatccaggagagaaaattagtgctacattgaagagagaatttggcgaggaagccatgaactctttacagaaatctaggaaagaaatgcaggagttggagagacaattgcacaaactcctcagtcaggaacattttgaggtctataaaggctacgtggatgattctagaaacacagataactgctggatagagacagaggctgtgaactaccgtgatgaaataatggaccatcttcctctggaagctggcgatgatgccaagaaagtgaaatgggtggacattaatgataaacttgagctttatgccagcctctcccaatttattcaacttgtggctgagaaacgaggtgcccactgatgtgaggatatgtatcctgattgccagggatagtagcttggagtctcatgtgagccaaaggccttcaaatgatcaagagtggataagaggcaaacagcacataactcccactaaacaggacaagggagggtcacctctttggtgattacttccaaaactgtgctgtgtgaaggcttgtatttaggaatcatcattagacaatacggcgaaaatgggatccccgaattttgggctttccctgttagaagaaggaatatactcatatgctgctatatattgcgatacctgggtttaaactaacttacacagggtactggcccttggcagaaatgctggacaacaaccatggcattctttcccttaacaaaccatagcctcttctattcagccagggttgcgctttgtccacgtctactattctcccgaatgtttaatgtggggcgtaaccttaaggtgttgacaggctcttgaggttagcatctatttccttaacataaagccctatagaagggcaagcaaaaccatcccgctgaggaatgggaacaccaccggagaaccacccatgagatgtttagaacaccgtttttgtgaaaaaacacacccaacatgttcgccaggacaagtgttgtgatcacagccacaag

SEQ ID NO: 418614 - DNA, 1114 bp, Homo Sapiens
  misc_feature (381)..(381): n is a, c, g, or t
  misc_feature (419)..(419): n is a, c, g, or t
  misc_feature (804)..(804): n is a, c, g, or t
agcggattccctgttgtgctgctcgcataagggcgacaaacggaagtgccgctgaggcagtccgaccttacatcgcagtggcagcggttcctgacatcatgctcatcgtacgcatgcccggtcaggacgatcctgtgcctccccgtgcagtccctaatggtagcgagctggcattctagtggctagagtcaccccagtaaccaaggaactacttcgctggatacattagtgggtagtcattgacttcttgatgagttagcgtattagcgatgactcgttgagcagtagtccgtgcagcgcgtgaagtgaaagtggtcttgatgtaagacgagaccatatatctacggggagcagtgccatgtgggcaacgatggacagtcntgtcgccatactcctcgaggcgacataggacagtgaantacgcatgtcagaatgagctagaaagtataagttatacgctttgctatgaaagccacgaatatgccttctaaacggaccaaagagctcacgcccagaagctatggggccctgtgaattgtccacatggtaaggctatgaataccttgggatatgctccataaccacaacaaaccccctggggaatcgttattgcgttgatcgagaatcgattacattttattggatccatagcatatagagcgatactatagaaaaatagagacttgtcgcgcacgggatagagtcagcggttcgtcgtgactaaggtacccttttttaggtgggtaacccacgactttcatctaggtgccacagtctaaatattttcggaggcggatagttcanacccccttttctccccctgtgttaataaccagcagctatatggaagcctcgaaggttgtgtgcgggatccatcaaacggtgtggtcaccaacttttaataatgctgatgttgcgcctgacggaagaacccggtgtggagcgccaccacccacggattattgtctcctctttataaatagcagttgggggtggacgtatttttctgcccatgagaggcgcacccaatattggagtgtatgtggcagaaggcgaattatccgtctcctctggtgttgaacacccctccgtgaccacccggtggtgcggagtt

SEQ ID NO: 418615 - DNA, 914 bp, Homo Sapiens
  misc_feature (330)..(330): n is a, c, g, or t
agcggtctgtcgcatggtggcccacgtggtgcacgtaaaacagggtgaggagagcggggtcgggtccaccagtggaggaggctgtgcgctgcacagcctgtgaggcagctttgacgtgtctgagacttggcgtgcgatcatcttgactcctatacccctggcagatagccatgtcccaatttgtctcgtggggtctccgatgagtgtgtagcctactgcatctgggtcgagctctcgttggggacagctgggtggtggttacacggtggacctctgcctggctcccccttggtgcatctctctgctcgtctcgatcgaccctagtctggnggttcacctcgatccaacttgaagagagcaccttagagtgaggccaaggacgtcagacaggcaagggacgcctgggtctaggctaacgtggggtgtgtgcccagctctcctccctgaccctaaaaactcctgtactgcccagaccaacagacgagagctggtccctgatgaccccggagacgaacgcagctgacgaaatgctgcaggctttccgcacttctgagaccggtgatcttcgctcctgccagggggacgagccacgccagcaggccatgtgcaggccctacttccgctcagacccctaggggcgttccttctggccgccgtctgaggattcctcgtagggctgtcccgcatgaggggcgttccccaagtctctgtggtagaatgcctggaatgtggcaagagtgacgaaagtcgagacgggaaacacggacaaggttgctaggcccgggctcctgagggcaacaacttcacagactctgggtgttcccccatcatcgcctgaacaagtgtgaggctcctgttaccgactaacaaaatggccttgggattcattgggggaggggaagtttccccaccat

SEQ ID NO: 418616 - DNA, 1373 bp, Homo Sapiens
  misc_feature (342)..(342): n is a, c, g, or t
  misc_feature (344)..(344): n is a, c, g, or t
  misc_feature (351)..(351): n is a, c, g, or t
  misc_feature (411)..(411): n is a, c, g, or t
  misc_feature (421)..(421): n is a, c, g, or t
  misc_feature (432)..(432): n is a, c, g, or t
  misc_feature (446)..(446): n is a, c, g, or t
  misc_feature (450)..(450): n is a, c, g, or t
  misc_feature (456)..(457): n is a, c, g, or t
  misc_feature (469)..(469): n is a, c, g, or t
  misc_feature (508)..(508): n is a, c, g, or t
  misc_feature (518)..(518): n is a, c, g, or t
  misc_feature (523)..(523): n is a, c, g, or t
  misc_feature (526)..(526): n is a, c, g, or t
  misc_feature (621)..(621): n is a, c, g, or t
  misc_feature (627)..(627): n is a, c, g, or t
  misc_feature (633)..(633): n is a, c, g, or t
  misc_feature (638)..(638): n is a, c, g, or t
  misc_feature (659)..(659): n is a, c, g, or t
  misc_feature (666)..(666): n is a, c, g, or t
  misc_feature (677)..(677): n is a, c, g, or t
  misc_feature (713)..(713): n is a, c, g, or t
  misc_feature (740)..(740): n is a, c, g, or t
  misc_feature (747)..(747): n is a, c, g, or t
  misc_feature (766)..(766): n is a, c, g, or t
  misc_feature (770)..(770): n is a, c, g, or t
  misc_feature (824)..(824): n is a, c, g, or t
  misc_feature (840)..(840): n is a, c, g, or t
  misc_feature (863)..(863): n is a, c, g, or t
  misc_feature (880)..(880): n is a, c, g, or t
  misc_feature (928)..(928): n is a, c, g, or t
  misc_feature (931)..(931): n is a, c, g, or t
  misc_feature (974)..(974): n is a, c, g, or t
  misc_feature (980)..(980): n is a, c, g, or t
  misc_feature (1096)..(1096): n is a, c, g, or t
agcggggcggttcgtcatcccgtcgtgtgcgtcgcagacagatacatgcgagaatggtcgggcagacctgctggcttagaggcccgcgtcggcatgatcactcatagccgtcagctaccatgatatgacggaccttacgcgtaccgcacccaggcacactttgctcgtcgatgatccgagttgtcgaggccaagccgcagccatagagcaaggcttggcgggtcgagaccaggggtcacgcgttgcgacacacctctagcgtagatatcatggggggtcgaagtgatcaacacatgctatccggtagtcaccacagaatgtcttcgataattacactcgtancntgtggtntagggacaagagatggaggtaccttagcgtgacacgtcttggataggtggggcgtggcgngacaatgttntgacactttanggatataacagagngatngagcgnncaaggcatctgnctatgtgtgctctaccacctgccaatcacgccttgtgangcaatagagngccgntcnggatatgttggcggattcaaaggcggtatccccttgtatttaaccagcgggcacgcactggcaactgcgaacactctgaatatcatggaatctcngaaccnaacatntaatntccactatggccacgcgaaanaacagcntaaacatagcnacgagggtcgctcgtggggaagacgcccaaggagtntcttgagtaagagagacgcggatggtnttgcgtncctagtgttcgctatcccncctncataggaccttgcctagccacttaacgctaaaaacgcgcttggtgtccgtatantcatccaattgccttngtttagtggttacatcatatgcntagtggccaaatgagtnacacttgacgcactataacactagatctgtgacataagctactgcaanttnctaacaatgatttaaacgaaatacgaagtgttcccccttgganactatntttctgtggcccagaggacacaaggggcggagggccaccatcacaataacggattgtgtacccctacaattctaataatgggcaatctagtacctgaagcgtccacccctaagccntgtcaccatgccataaggctctcccttcaaatcggctcttttacggtctaactggccctggtgcccacactagcgaaaacaaaccctgttgccttgatttatagcggattgttcccctttccaagagttcatataccttgaatcggagcgttccacttaattgtcctaccaaggcttgtggtcggatcccattgggtagctctggtggcccagtggttggaaccaagggacagggtttacacttttaggcttccttaaaattaatacaaatatccct

SEQ ID NO: 418617 - DNA, 1272 bp, Homo Sapiens
  misc_feature (996)..(996): n is a, c, g, or t
  misc_feature (1001)..(1001): n is a, c, g, or t
agcggggtgtacggcagcccggccgggccgccgcaattatgctgatatgtgtgctaccgtgagtgtgctcaccgagtagtctgataagcacagaccgacagaagctgactgacggcgattaatcaccgccatcaatcttccatctgcagcatctgccggtgtagtcacctcggtgatgcagtgtagtggcgcgttcgtttacggtgggccgcattctatcacattactgagagttcaggccgagtcaagcacggacgatcattccgtatgttgcaactctgcaagggcaagtctacgtactaaggagatgaaggatgcctcgtgcacctctattgatttggactggttggacagtttggaaattgagcacatggagaagaagctagacgagtaataaattcctcgctccgctttcccttgcgcgaagatcgtattctcaggcggcgacgttgaaccgtctcttcaaaagcgtgagcattcagttgggaactcgttgtagatagacgccactgacagattggacgagcaaaccatgacgaagcgcgaaagagggagtctcgtgaggcacgttcttattaacacagagggactcgtccagtgatcaattactcttcttgagcgacataaaaacagtagaccggtcaagttgcgttatccaacgaatgctttgttgtaaccaacgacttgaccactaaacttacggaataaacaccagggcgtataacctacgcgagtcttagaaaaactaaagacaaggtgggcgcgttgacacaaggtttgttggcgccaagtgatatgtggggggctcccccatttctgtttggaaccgtgaggttgtacactttgggacttggaattacgaatggcgagccgattgatgacaaaggaaacacggtttaccttacacccgttttttatacggcctagtaggcctttgccaaccatggagataaccttcgcgggtaatataagcgagattgcgcctattcaacgtanattantttttccgccgccagtctacaattatatttgccctcccagaggattgtaaagagtatgagtcggcttttttttggggcgccggtgttgaagcgcaaggacacaggttacaagctcaaggcgtatatataggtaaagaaaaagtctccccctctaatattcgcacaggcgcgtttccctaattatttaaaatatggcgtgcaatttcggtatgacggaggtggtttaccaatggttgggtgcaaacaccaaattaagcccctaaccaaaacg

SEQ ID NO: 418618 - DNA, 964 bp, Homo Sapiens
  misc_feature (617)..(617): n is a, c, g, or t
agcggaggtaccgactacttgctggaatccaggtgcgctgttgatggcggcccgagggttgaatccctgtgctctatgcgtagctcgtacatatgttgcatgtgatagaacataccctagatgctgcgagtgcgatcatacggcatcggaatgtagtatttaaagctggctcttgcgggtagatccaccaatgctccatgggacttgcctgggctaatgacaggggtagagtgcctgatctctccaaagcacgattcagagatctattggtcaagggagacgccactaatagaggtcggaactgttccttcaggggagtgcgctcacaacgagtggaggaatgcaactatggcaatgtaagtgagctctctggtataattgtcgaatggtacgctatgcggtgatccgatctcaagtgcaactgggagacagtactactgggtacacggctatcttttgggcctaaataagtgagtcactagtacgtatacgggactcaatgcttgccccaacggtcttgtgctcgtcagagaccccctttggtgtgtctcccagttaaacttcgtatcgacgagcccttgttgagagaccccctccacccgaaaggaatagcctgnggggaattgtcggcaaggcggttggctggaaagacactaactataacctaaacccgatgggaaccctatgcaattttggtggtctcccagaacttaccttttgggccatttacatctcacatctggtttatacgcgactgtttacccctcaaagatagctttctaaaaggcctttacacgatgggtccaaggtgtacacacatcaatgtgcggggtgtgaatgcctgtgcagtgaacccgagtcagaatagggaaggaaataccgccattggcttggtgtacccaatttcttaattgaagtgcaattcagtgcaggaggtccccatatctacatccattgcggcaat

SEQ ID NO: 418619 - DNA, 855 bp, Homo Sapiens
  misc_feature (709)..(709): n is a, c, g, or t
agcgaaagaggtgatgcagatccagcccattttcacagaggagtacatgcagatgcgaattgaggggtacaacttgcctaccgtgaatctgaaatcgagggtgtgtatgcgtgcgagaaaccttactctacctacgtgaagtggtgcttgagtgtcccttactctaacactgcatatacgtaggtagctccatgcactctatatctttgcacgcctccaggtatgaggaggtgtctgctctggacgacagctgtgtcgtctatctggatctggctacactgtcctttaaaattgtgttacttggactaatgcctcgtgatgcctgagcgagtgactgaaagtacacgggacttgctcgcccgtaacggaaccctacgtatgcacactagggtgctttacattaagcccaagagttctgagctctggtacttgacacgcgacgcaaatacgtatacgtatgagacttgccggtactctcgtccgggttgatcaccttcgcgaattcttcgctcgtaaggtgaacagccaatatctctcaatatgcacccgctaagagtgcagtggaaacgacacccttctagggagacattttgtgaataaatcgcgcggggctaagtacacttagcgcaatgtaaacacgctgctatgccataagatacgccctcgataagcatgccaacctttttcgtaccgagttatcgccacgacnttaatctttccaggcgattgcgggtcgcctccgctttataaccccagggacacctgcgataattggctcgtttagttcaacgggaggcctctaggcataaaactagtgggctttttgtgaccatccggttcggggggtttagaaac

SEQ ID NO: 418620 - DNA, 905 bp, Homo Sapiens
agcggagatagaaaactgaagagatcagcacaggacgctatatactgcccatctaccatcctggacagacctccgtggactgcggggtcctactgccgatgcggcatacttgtgatcgtgatacgtaatgcgagcgcatggcgcctcggagagtgttgggtggccaggaagtgctgacggacggtgtccgagtggcggggccagagggaacgacgctgtccttgcaggaccgattggacacagggctcatcaggtgaatgtcccttcacgtgctgatagtatgggaaaggacctaggtccatctgacaggttatgcggatgattactgtccgtgaatggagagtcattggcatagcgtgcagctgcagggaagaatacacatagggtaaataacctgtggggacgtaaagtagcacctgtgtgctaatgtgtgtgcgtttgggcgacaaactgcgtgaaacagataatgcatggccttacatgttggcgaagtgtagaactccgatggggacactcacgcaactgcatcccccgtgtgtccaggtcccctaggggaccaatcactattgaagaccgcggacgggaagaacctaggaggatcagggtaacattgggggaggtaaagcgttgctgacacttcgtggcgatccagtccacaaggccgctgtggaggtgaaaactcggtcggtccatcgaaaaggcgacccttataggctacggaatggcggtgaaatccatcgcctagatgatacgccaaggcaactgagcatgggcccagaactataggcattccccggagagtcatacggggacgactgtacttagacgggttaggttggggcgcccaccctatcacagatggacgcccaatcagtccccatcaatctgttcctttcctatgcaca

SEQ ID NO: 418621 - DNA, 858 bp, Homo Sapiens
agcggggggcggcggcagaggggcgtggcagatcaagagcatcctggctgatggcgggcacacgacagccgtatgcgggtgagggtggaagactcgggacacagcgccgaccggacgcaaacacatctagtgtcagatccttgctggtggaccccggctctcatcgcgggcgtcaatgccgcctgggaactgggggacgcgccggaaataacagggcgccgcgcgcgtacgtagatgcgaaaagagtgatgcgacggctgaagcacacgagtccaggtgcgaaccgtgctggggcggtgcgcgggaggacctatgggctcgtctgcgcgtcggatggctgggctcgggagtggcacgggacacattgccaggatgtgctatcgggttttcgaacaggacccagtgaagtgacaagttgacgaagttgtgagccaacacagattgttggctgacagcaaaggttcactcgagagaaggtttctgaaggttttcaacacagaacagctacctgacctcgactaggatgcccatcgataggaagttctctctaaatttagtcaataaatgacggttggacaattgtgtatggaacactatgtccaaagctaacttactgccagtgttttagcacttccgtactgagtcttgcgcacaagagttggcacgcaaacactgaatctcgaggacaggaaggcatatgaattcgtgtcttctctgtgtgtgagacgccagtcaggtttcagaatggcagttggaaacttccagacaaagggatttccggtgaaagtggacccgtaagccctcctgacattttaaattcccaggcttaaaccgggtactccgtcggacagagcactg

SEQ ID NO: 418622 - DNA, 749 bp, Homo Sapiens
gatcggcagctgggggccgaggactcttggttctgctggcgacgtgacggtccgcgcgcctggctccagttctctctgttccctgcgttgcgcgcgaggcgactggtcgtgcagcgagcgtggaaggcgcgccacggggcgaagccccgtccgtatcgtcgtgcgaggcgtacccaggagtcactgtgaagagcacacgatggtcgcgtgatgctactggttacgtgagatgcgtatggcaagctgcgtagttgtggaaaggcttcagtgagtggacaagtgattgaatgattgctcgcactgtgagtcatgcaccgaattgaccgttgaggcactgctcagtggagaggagagatatgagaggtagcgtacactcagcggcgagaatcaccccattgcctaccgctcgatttcaggtctctcccagaggctttacttagctgaagcctccagctttccaactagggggaaatgtcatgatgtgtgggctgtattgcttatgtgcagcgaggaggcgacacgtccatgtccgagggctgcgatctctatagtcatatacagaccacacgtgaacaggaccgtacttagccgactggcaatgggaacagtttggcccagggaggttatcggatagcgccaaaggttgtgaagaaggggtcacccgagggtaaaaatgcagagggaaaagatgcaacgaggttgcgtgtgccccaagggggttgaagtcaaaacaggggaagctctggggt

SEQ ID NO: 418623 - DNA, 809 bp, Homo Sapiens
  misc_feature (348)..(375): n is a, c, g, or t
  misc_feature (556)..(570): n is a, c, g, or t
agcggaaaaaaaatatacctccaaagaaaaaataccttcaatctgtcattcctccagatacttcttgagcaaagtctttgtgtatacaaatacccaccattaatgactgtttctcttgtgtttcccagcagcagtgttctccaatatttttaagtttctggaaaaaaatgcgacagttttataattattgacaacttctttttaatatttgcttctttaccatactctgagcttctaaaggttaggggtaggttatagtaggttttcccactatattcctagtgccaagcttattgccagtattgtataactgacactatatatatatttgttgagtatctgcagacnnnnnnnnnnnnnnnnnnnnnnnnnnnntcatacctcatttaatatttttgtatgagaaaatagaatttttttgtctcctaaatgaaaaatttattataatctataatgtacttctgagactctcgttcttatgttgccttgaggttggggatatgtgcctctgtgtactggtttctgtttctccaaccccaaactaacacacacacannnnnnnnnnnnnnnccctccctacctcctgtgaataggggcattgataataaaggagcctatttttactgattataattagaaataaagtctcttcgcatctcagaagagttacgtaatgggaaaaaatgaaactatccatcttgtggatcaggaagatgtttgggttattctgccaactcccactgggtctagtctttactccctttccagtttataagtgttccactttgataactggtttaatcatgccc

SEQ ID NO: 418624 - DNA, 824 bp, Homo Sapiens
  misc_feature (604)..(654): n is a, c, g, or t
ggaaaaaagtccccctttgggccccgcgtggttagagtatacggggggtgatagactctggtggcgcgtcatgggaaaccctctcaacatttctgtggggttcaggggtgatttcctcctgtgcctctaatgcttacccagattacgggggacatccgggatgtcgccccattaaagccaaggatatagttttctacttattttgtaaagttaaaagagggggcttcaacccgagtgttgtagccaagggggtggtctcgtgggaacctaaagcgtgacgcatcacaggaggggatcacaccatctcgtgctagtgtggtcttcaccacagaaagggggggcgggagatatcacacgtgggggagtgaccgcacccgccgcagcacgagaccccaccacactttctttagatggggtgacgaaacaacatatatgtgagagagacctggggggagaaatatctccgcagagaaaagaaaagaagtagactcatgagtagagggctgctgggagaaaacaccctgtgggcatttcatatatagagaagctgtgcgggtggtgagagaaatctttccacacagggagatatttgcgccgcgcgccnnnnnnnnnnnnnnnnnnnnnnnnnnnnnnnnnnnnnnnnnnnnnnnnnnngggtggcggggcgattcttctcctacagtgtgtctcaaaaagactcaccagggggctctctttgtgtgactccaggttttttttaaacatatcgcctagtagggtccctcactatataggtttctacacccctttttaccgacaacacggtttgtttggcgacctccgct

SEQ ID NO: 418625 - DNA, 536 bp, Homo Sapiens
  misc_feature (72)..(86): n is a, c, g, or t
  misc_feature (108)..(352): n is a, c, g, or t
agcggatctgtattaggatgtcatcatatctgtattaggatgtattaggattctgttttggctgactacaannnnnnnnnnnnnnnggaaacggagtttggctcttgnnnnnnnnnnnnnnnnnnnnnnnnnnnnnnnnnnnnnnnnnnnnnnnnnnnnnnnnnnnnnnnnnnnnnnnnnnnnnnnnnnnnnnnnnnnnnnnnnnnnnnnnnnnnnnnnnnnnnnnnnnnnnnnnnnnnnnnnnnnnnnnnnnnnnnnnnnnnnnnnnnnnnnnnnnnnnnnnnnnnnnnnnnnnnnnnnnnnnnnnnnnnnnnnnnnnnnnnnnnnnnnnnnnnnnnnnnnnnnnnnnnnntgagccaccgcgcctgtggccggctgactacaaatttttaaagtgaccatttaaaaagtgaaattttcatctggttgggcatcaatcaatagtcctttggtggactccagctacctattacagctgcttttgggaagaaaatcggttataaatagtttaaattaagctaagttaaatgagtaca

SEQ ID NO: 418626 - DNA, 1222 bp, Homo Sapiens
  misc_feature (457)..(457): n is a, c, g, or t
  misc_feature (461)..(461): n is a, c, g, or t
agcggaatggaatcatcgagcccagaagacaccgagttatatacgaagtgtgatgtacacgcctacgcaacgtagatatgtgcacgcatcgcagagagcgggacacatggactcatacacttaggtcgaaacgagagggaggacaggactacagtgatcattaccacgctatacacagcaaacatacaatgtgcttagtttgactacacgaagtaccaatgaaaggaggacacaggactggaagcagtgtctagagaacgttgtatgcaagtgatattatactaacagggatctgtaaaccgtggggtaccaccagagcatacactggggtgtctgttgaggccagtaaactgcccagttacaacttcagtgcagtcgatggcaatacggcaaagacacaagagtctcacagtgtttctactctctctcgaccaaaagtccccccaaataggttganacanagatttaaagaggagtatcccaagttactggaatcgagtggacacgacacaggacgcagttaggctcacgccctgtggcaggctgagtcctggtgtcaccctctgtgacgcgacacttacattacataaatagtaccagtagtaggggtctctgagtgatcgtgtcatgtcatagacttcagtatggcacggtaatcgtccagttaatgacttcacttttgatgtcacgtcaacgcttagcctgtgcgagaaagattctaacccaagctagagtctcagtctgacggcaattactttctgtgcgcttatagaaacctttagcaattaatttgtgacatcgcccgagtgtgacatggcacaatgtgcacggccactgactggatgctgtgattgatcatctgatccgactccttgaaccattgatccctttgagagtcaacccttgaatagatactgccaaagttgcccttaaaggctagtgggcaatttcccttggactacaggtccctttagtcgcacaagcatatcccagttttgaaggaaaaacgcttcctataagcgcgaggaccctatgtggaaccaaaggttggggttccctaagcgcgaggactgtgaatggccacctggcgtttggatacaaatctgcactaatttcaccagggccccttccaaattgttgttccatctgatatgcggaaaaggaacttatttccaatccccttggaaacccctacctgttcaataatttgcaagcaccccag

SEQ ID NO: 418627 - DNA, 1190 bp, Homo Sapiens
  misc_feature (145)..(145): n is a, c, g, or t
  misc_feature (790)..(790): n is a, c, g, or t
agcgggagaaggcccggggcgggctgtgcggacccgcagcgttgggtgcgatccccggggcagcgcatgggcgtcacggtcgagtgtcctcgacacatgcggctcgacgcagatcacacaccaggctcccggtggcacggggagntcagcgaaggacgcagaacagacagactgagcgacgacaaggagcggcatcgagggaagcgtgcgtcggccgtaccacagtcccaagagagaagccgagacacgaaaggccgcggcagcggagaaccgaggcagtccaggcgtcctccatcccgtctgcttccaagttctctccatagcttcctcttcttcactcactccgtacctcctcgctcttgccttccaggagatggagccggagaaagacaagcagtgcgaggcaagtcactgagaggagccatgacgtgacgagaacgaatgagagatgcaaccacgagaaatgaaaagctttgagagaagtacaggggccagaggggcagtagaaggcggtgcaggacaacctagacgatgggttcgtggaagggcctacgtagtgccgggcgccaccgctgcagatcgttggcagcccagggatagggacgagcccgggaaatcaagggcattgcgcggaaggagcaaaaggaaagcggactgggggccgccgagctgcccgtggaaccgagcactaggacggcgacgaaaaaagttccgccacagagaaagtccctcaccgggggcgccaatggaaaaaggcgcccttatactagcaactcccaaaacggggcgnggaggaccgataggaggagcaagtcgccacccgcgtagaggaggcgaaagtccatgtcccgggcgcacaaagggctgggcggtccgaaggacgcacactggaaagaacaggaaggcggccagcccacacacgaagcggcctatcccacctttacacggggagacccgaactgggcccgatggagcgtaacgtaaggtaacgcgaaaaaattccggcttaaatcccccaaatgggaaacgggacccaacaagggaccgcaaggagtcaaagcgcacagggaaaaaggcgcgatagcccgaagcggggggcacaatgcaccgtgggggcccttcccgcaacgaagtgccgaacagacctgcgaggataggggcggaaatccccctcgcgagggggggcacct

SEQ ID NO: 418628 - DNA, 896 bp, Homo Sapiens
agcggattcggcggcggctcccgagcgcggcggtgcggcttccccgccctctccctccctcctccagcgacgcttccgaccggcttatcatcctccttatgacaaaccagagcggtcgtgttgtgacatcttctggagtgcgagtgatagccactccatgtgtcacacaagaagtagcctcgctaccaggtccgaatgcaggactcggcgaagtcctgtcctcgtatgagggttccgtgggactgtagacgtctgcaaccttctcggaagagcgtcgcgaggaccttctatgtgcatgcatgtgcgatgtgcgtgattcggcatgtccagccggagagacctcgaactgtgtctcaatgctggtgtgcaacaagtaggtttgcatcgatgcagttgttgtgcctccatataacagttctataagtaggacgatgcatatacaaatgcatggatgtataacaatgtaaaaatggtgcgaaatggaacatagattagcaaaggagaatagactataatgaaaatggtaggcctaagagttgaaagagtgtgtgatcggaagtgatgcatcaagctattgtggaatctttactgtgggatatctgatcggtcattattacatgactttatggctgcaatcagatcgtccaccagctgtctgtctagttgctggctctgcagatggtcacagtctaaagcggttctagactacttgtatggccacagagagaaggaaatgtccaggtcgtcttcactcgagaggagaagcctcatccattgcatggtgaatctcgattgaagagttaattttcttcccaaattccttagagtcactctctgttcttgcccatgcatattaacccagatttattgcccaagaggtacccccattttccata

SEQ ID NO: 418629 - DNA, 1049 bp, Homo Sapiens
  misc_feature (714)..(714): n is a, c, g, or t
ccgccgtgagtggtggcacgtgaaccttgtgagctgatccgccgattttagacgttggatgcctgagcaatgggcctcgtcactacgcggttgctaggtcggcctcccttcatcgctgtgcctgtgcccttgaatgcaagtcgactcctgtagccatccgcctgtcgtcgccggatcgccgattaatagtcgtcccttgtcgcacgcagatgtgctctcgttgtcaagcattccgttgccatcctcgaactttgcttgcagccgtggtcctatggtcttgcccactctgctggatgttgttgctgaggtcccttcgttggattctggcatcactctacccggttttgatctaggattcagctagcactgtgcgaccagacctttctactacccaccaatttgcgtgctgagtgattgcgcttgatatacgacgtgctggtatggttgaggtgtcctttccaggcagttggcggccagagcgtgcctttctcagatagtgattgtcttaggactcccccaatcttcggtccacagtcttttcgggtctcgtcttggttatgcactaattagatttttgggggatgtctatccaggacaaggaaacgctcggcatatggcaccaatggccctatgttcctggaagtggctgaattgaacatacgctctttcctatctaatgtgatacatgtgaatcgagttctacgtgatctagtncatatataatcgattcttatcatagtacccaatacttttgatagtttagacttattttgtcatccggacggataggtataggaaacggacactcacgatcccactttaaggaggtcccttgcattcgcgtaatacctgccggtggatggtgcccctgtgacatcgctaatgcatccttttggtttcctcctatttaagtacgaaggggaagtaaaagtcctccagaggcttcagtgtccgtcacttcaagtcgggtccataactccctgtgctgcgctagtcgctaagaagtttacgtacattctcaggtctcactccccttacctacgtaaacc

SEQ ID NO: 418630 - DNA, 787 bp, Homo Sapiens
agcggagtgctgaaagctggtttgcgtctacttggtggttaccctgagtctcttgctggcgtcgggtcgcgtttgcgccgccgtctctcgctgtgggttcgcgacccgtctgtggtggcgggccctggccctagttgtgccggtagccgagcaccccgagttccgatctgttgcagtccggaggcaacgggtatgctgctaggaggttggagatgagtatccggtctctctccccgcggcccttcatgcttgtacgctagggccctcgtgtccccggacgctccagagccgtgcccccttgcgcgccgggatgtcctgccgctaggcttgacgcatgcggacccttgtgttcttctgtacccagtagcttacgtgggcgcgagcgtcaggtgttgcagctccccgggaccactggatcccttcagtatagtgaccttatttctagtcatactagttgtagaggacgcttcggaatagcctctacaggcacgcttcattgttgctaaggtgtcagcgtttacattgcgtgtactggagcatctctaaacctggcatacaatggcccctggtatgcccttggcgatcaatacatgaagagaggcctgggcgctgccctggatttatgcctggaggacttcttctaaaccatcgcattctagcttctcaaccgcatgcgcttctgccattaggtatactcttcccccagcaccctggaaacgaccagaatacaagcgaatcccgattccagaacaattcgtgagtgcaagttggaggcgcctggtgcacc

SEQ ID NO: 418631 - DNA, 638 bp, Homo Sapiens
  misc_feature (204)..(256): n is a, c, g, or t
  misc_feature (260)..(310): n is a, c, g, or t
agcggcttgccagtgctatttgatgccctgttgaactttaggccaaacttcattttataatgttctctcagtcctgagcatatataatatattttaatgaaattacgcttctgtattgactggcagacatcagaaacacattcacataggtcaaaagcagttgagctaagtgttgggtgggaggaactattaaaacagtacagnnnnnnnnnnnnnnnnnnnnnnnnnnnnnnnnnnnnnnnnnnnnnnnnnnnnnaatnnnnnnnnnnnnnnnnnnnnnnnnnnnnnnnnnnnnnnnnnnnnnnnnnnngaacttggatgtggctatgggagttaatgtataattctgataatgtgtgtatttcttcattatattaaacttggaatttatatttttgacattattccaaaggtgtaataattgacttttaaaatagaataacattgtaatgggatcatattaacgcatatattaaatgtaacacaaataagcattgagtctacctaaagtggtattttttttaattgtgtggctactcaggggttggcattatattatcaaaagctaacaaccttaaggccatttgtggtaattcaaaaaatgttcaagcatctatgcttgatggctaagcttatat

SEQ ID NO: 418632 - DNA, 863 bp, Homo Sapiens
cgctaagggaagataccttgcgattgctggaaacaatcgccccttccacactagatatacgacgcagatcagtgtcgcggagtgagcgtgttccatcggcaacttgtcagccggagtatcgtaacgtagaggagtcccacctacatcctgttgcttgatggccttttgccgcaatgcgagggcacagacatgtcgtaggagtcaaatggtgcaaatgcagtcctggggaagacactgctgagcgacgtccgaaagctaatggtcggcgcatattgcggtacaactgcaaacaggatgcactcggctgaatgcctgtagaaagaaacttcgagcgtttgcaagctgatagctccctagaacaaccaccacgttgacagaatcgctcagaaccgtctggagtatgcgaacagcacgaatgcgtgaattgaatgcatgattgtcctatggtcctggatagttgagaaccaagttagagccacatagctagtggggttgggttaaaacctgagtgacctgaggcaacagggcgccccaagaaggattcccacacagataagacatggacctacatgggagaggaacggagtcccacgcaaaatgcctttcccttaattcactagaaagcgtaggggcttgattcgctctcttaatgggaactttcggtggaacgaggaaacggcacttgaggaggcgaactaattttggcaggaaagcgaggcataacacctttgagcaagagaaacgatggagacagcacaaaatgacgttgtttgtgatccaacacagtgtcggaccgaagactttgaaccatatttaagactggaatcatccttccagggcggtccattgagcattaacgccaa

SEQ ID NO: 418633 - DNA, 752 bp, Homo Sapiens
  misc_feature (326)..(373): n is a, c, g, or t
agcgggccttttaccattatataatgcccctcttgtttcttttaactgctgtgctttaaacttgtttgtctgttataagaatagctatccctgctgctcactttggtgtccatttgcatgaaatgcctttttccacccctttactttaagtttatgggagtccttatgtgttaggtcctgtaggcaacggatagttggttgatgagttcttacccattctgcaattctgtatcttttcagtggaacatttaggccatttacattcaatgttagtattgaaacgtgaggtatctttgcattcatcatgctctttgttgcctgtgtannnnnnnnnnnnnnnnnnnnnnnnnnnnnnnnnnnnnnnnnnnnnnnnctagggcctgtgtgatgtatgctttgaagaggttctgctttgatgtgttctccaggatttgttaaaagatttagagctcctttcagcagttgttgtaggggtagcttggtaatggtgaattctctcagcatttgtttttctgaaaacgactgtatctttccttcatatatgatgcttagtttcactgaatacaaatttcctggctgataatggtttgtttgaggaggctgaagatagggcccaattcctcctagcttgtagagtttctgttgagaaatctgtattaatctgatgggtttctcctgtctcacagtcttaagattctttccttcacctttaactttggataacttgatgaccatgtgcctaggttaagacc

SEQ ID NO: 418634 - DNA, 734 bp, Homo Sapiens
agcggtatggtgaactggaagaaaatgaaactcttggaaactttcaagtaccatactctgcatcttgcagttgaaagaccctagaggaaggtggtgggcaaggagccaggcgatgcagtgtactgtgcaaagaagcagtagttggaagacacgtgttcatgaggggtccttagctttttcaatttgcaggtgttcttggggaatgagaacacgaaatttcctttgaatgaagcctatctggtaattgtggccacatccgttatgtatcatgcaggttgaaaacttagacaggctctgatgatttctctgctatgaggtgtccagagatggagcctggctgcagtgatgtacggctgccctcacgtattaaaatcagcaggtaccgcagaccctgactcccattattgcactccagataaatcgtgggctacccagtggcacctgtagagttgtccttccagaagtgagaatgcttcatgggaattgtgcttaccttataccctgtgacctctgacagctacattaggaaaatatgtgatattgcagggaaagaagcagtgtgatatgtagatttctggtagtaataaaattagcagttttaacctggtgtcaggtccagaattgacttgtaggggaatctgggaaagttgcgctaggaagttgtggaggtttaaactataagtaatagcagcacttagaagcattttaagaaagttagaaagatgaagatccta

SEQ ID NO: 418635 - DNA, 702 bp, Homo Sapiens
  misc_feature (66)..(90): n is a, c, g, or t
agcgggctttccccccgctcccgcttgcctttccttccgccatgatgaccctagaccggatgggcnnnnnnnnnnnnnnnnnnnnnnnnnggccaaaggggggcacgggtggggggagcactctccgggagacgacacaagatagcaggagcagagtgatggagggggaaacgaaatttggggcacaacgcaagagggccacagaagaacggcagggagtccacaaccacacaggaagcgagaccatgaggcaggcaagcgagaaggcacagcaagaagaaacgcaaggtatgcgggataccacagaactgtatagacagcaaagacaaggagatcagcacatgaagtcgagagcacaaccacgacgaacgcagcaagagagaggaagagcacaccagtgataagagaaaagcaaagagcacacacagcagagaagacaaccacacaccgcggaacaaagagtgcgtagagacacacacacaaggtaggggccaaacacgaaggcacacgagggcagacgacgatgaactacacacaagaccacgacgagagcaaaacacaggcaggacaacatgctacgaagtaacgcaagacagaccacagagccaacgtagtagcgaaccacacacaagaaagggaggggagtaaaacacaacaagaaaagagatatgaagacaagaacacaacaaacaatgacaacga

SEQ ID NO: 418636 - DNA, 593 bp, Homo Sapiens
  misc_feature (69)..(179): n is a, c, g, or t
gcctcccgagtggctgggattacaggcatgtgccaccatgcctggctacttttctgtatttttagtagnnnnnnnnnnnnnnnnnnnnnnnnnnnnnnnnnnnnnnnnnnnnnnnnnnnnnnnnnnnnnnnnnnnnnnnnnnnnnnnnnnnnnnnnnnnnnnnnnnnnnnnnnnnnnnncccatgaaagcacttttaaaaagagagcacctctgctgcctggtcatattctgtacctgttcccaaaccctgaaaccagtgatgtcaatggctgcgtgggcattgaacgtgtacatgattcctgcagctttcctgttgacctggaccatgttcatcaatgcttttggtacattaattctacatcttcttcggtgaccacagtttatgtttatttcatttttcaggaatatccagccactggtgcacagccattgccacttgtgcccccaggggatcttgtcaactccagtatgtccccgcagcactgtgttatctggcataataaatgtagttgggctgtagttgtagtgactcctcccaaaacaaccaggagtttaatactgtttggccaccggttacagacattgctgccct

SEQ ID NO: 418637 - DNA, 1090 bp, Homo Sapiens
  misc_feature (316)..(316): n is a, c, g, or t
  misc_feature (430)..(430): n is a, c, g, or t
agcgggcgtggtctagctgcgcactgagtgctatgtgctacgcgctgggaatacgccacgctgggccattgagtctgtgcacaatgaagtacatcgagggtttattaccgccgggctgtccatgccaatcgactgcgctaacttgggcgaaagttccagtggaccgttgctgcgtagatcgttacggagacagggtgcgtcaatggtttaaggcccctatgacaatgggatgcgcagacaatgaaattacctaggagtgcatactaaagatcggtagcacagctatgaacgtgcccttttgaagcgtgtggccatnctgtcgtggacggaactgaaggcagtcattgtcgtcttaccagtagggtagtgaggctcagcttggaggcatacgaggaagacagttgatccagtttgacgagattgacagtancaagtggagtcccaaagactttgagatgacccggcaacaggttgagccaatgcaagtcttgcatcgcaaggaagccttgaatgacagttggataacacttggagctcaggaataaaaggtagggcaaccgtgaaagatgttagacacttgccatgcagtatgcttggcttaacccgcgttcaaaagaaggggtttactctgcacaatgggctgatgcccagcgcttcgtgtttgatagagcccaacaccttcataaggatgagcaccggagaaagactttacaagttagtgattggcggtacaacaccccactgagtccaaggttccctatggaacactccccactcaaacagtattttcggatccttcagagcaggggtttctagcaccttcggggaaggtactcaaaacacgccttatttcattttttttacacttgcgctaggacgttgttgtttgggaccctcgataggacttcacctttcctcgtgtgtcaagaaaaagttgattcgcctccgactcccgttatattcggggcatttccaaagcgctcacgtggtttccccaagagaatctactctttgcaattcccttcctttccggaggggccataccctacgagaaggaccaagacccaaggcattggaaagccaagtgatc

SEQ ID NO: 418638 - DNA, 855 bp, Homo Sapiens
agcggaactctgcccggaggcgacgggctgcggcggagggggagagagaggaggacaggctgcgaccccgggctggggacgccaggcagggacagcgagcatcaggaaggagagcgtccggggaactcgagtggccgcgccctgggtcctgcaccgtgaggctggggggaccaggaccggcgggcgcccaccttggtcctgagcccagctgccgacgctgggccagcaccctctccaccgccgccctccagtgagcagagctgggctcaggcagcagcccctgggcgcgggaaggtagcgggagctgcatttaggggaggggggaggtagcaggagctccgccagtgggaaccttggagtgaattcgtcggcgggtgccaagtcgaagcgccgacctcctgtctctggactggggcccggacccctgcgtcccaaactgcgtccccgccttgctcgtcgcccggtgccttctttaggcgcagcagaccctcggtaaacagcggttaattcgatggaatcggatcacagggccctcggtgaagcagaaaggcggaggaaatccaggaggcagaagtgaggacactggcgcctggcgccgctgcgttgtcgtataagaagaggcatcccggaaggggcttcaaaccacttaggaccgactgttgaaacgaattcaagcttgtggtgtctggcagaatttaactgtccgctcaaccccagttttggttctaagaattatcgaaaaactgtgcggttgagtgatgtgctacaaagggtttaacccagattgtttcccaattaggggtttccacacaagaaatcgtgctgtcggaaccagggactatctatggttacgac

SEQ ID NO: 418639 - DNA, 1019 bp, Homo Sapiens
  misc_feature (135)..(135): n is a, c, g, or t
  misc_feature (440)..(440): n is a, c, g, or t
  misc_feature (446)..(446): n is a, c, g, or t
  misc_feature (463)..(463): n is a, c, g, or t
  misc_feature (501)..(501): n is a, c, g, or t
  misc_feature (593)..(593): n is a, c, g, or t
  misc_feature (715)..(715): n is a, c, g, or t
  misc_feature (784)..(784): n is a, c, g, or t
  misc_feature (834)..(834): n is a, c, g, or t
agagggagtgttggcacgtgagcacggctcagtgcgagagacgcgcgcactcattgcgctacgtcaatgcaaagatctggcgatctgtacggctgccggcgcaacatgagggcatcaaaccgactcggccgaagnaatcggctgggatggcaaaatgcgagacgcgcgagcgttaggcacatgctgttgacgcgcaccgaggatggagcgcatgctgggatgattctaagggatcagacgatccgggagggcacacagaaagcgtgcacgtgcaggatccactccgagacgacgcacgtcactgcaggaagtcgtcagaagtaccagtgccgagcgggcacataaggttggcgcgcccgaaagtagtagggtaaggcatgattcccagggagtagtgagatcgcgatgtgcctggcacgatgcgagtggcattgaaccanttcgcnttgattcttcctctagntcgaggtggacaccgcgagtcgaagcttccagtgctgnggcagaggtagttcgtagctggacccgacgtcggtctaatgcggggcccacttcggtgtaaagacggccccaattagcaagccgagctcggnctagtacttgcttcttcattgtcacaggcgcggcgtcagaacggaagcggcccgcgcgaaacttgcgcgctagcacaggctcaagttctccgccgagacgtgactgtcgtggtgcgtagcgngccctcgcagatattcatccccgagtggtagctcgatggcgtggaagtggtggggcggcgccaatagcnagttgtggcgcaagtgcaggacgcgcttgtcgccttgaatgtaccgagangtttgcattggctgaacgatttaaacacctaatttgcggcttgcaaaagcggaaccccccaggccgcctatgagtggtaaccaaagcgttcgcatgaagaaagcgaagccttgacatggcgatggagcacccgaagaaacttcgcaggtgattcaccacgattgtggttgtcacacagaagggtg

SEQ ID NO: 418640 - DNA, 1064 bp, Homo Sapiens
  misc_feature (471)..(471): n is a, c, g, or t
  misc_feature (793)..(793): n is a, c, g, or t
agcggatctttctctcgtatgtgccaagccgaggtgctgcccgtacgagggactgatggagagactcaagtggggttgctcgggatcaacgccggtgccatagaccggtgtgcaggggccggggccggagagcaccgcgagcacgagtcgagaaaccgtgctgtggagtgaaagcttggcaagccagccggaagtcggactcgtagcgaacaatacgagctgggacgagttctgcaccctgcctacgtgaaatttatcgaattcggcacgaagaaagcgcatgacagggtatggcacccggatacgcatagggcctgcgacgacggtggcaatgtggcagaggtattgggctcggctcgataagcggtcttgtctcggcggaaggtctcaggggatgtcacccatccgttcggatccagccctcgacttaaaacgactcatcgactcgaaagcgactggcctagcatcccnagacggacgagaaatagccctgcgatgatcatcgtggcgccgaggtcatgtctacgcaagtagaccattcagatcaatcgattaccatccctttggtcaactatgggcaagaaagagaccccctgcggtgacacgcgttcgccttgaagtcgagaactgctctagctccagatcaaaccatcgcttaggatcgccgcgagggagcggcactcggcgaaagcttcattttggaggctgcggccctggcgacctgtcgagaaggagacaaggggttgttgggtctcgcttggactcgacccttgtgccgggtggttcgataccnggggagcgccattcctggggcgttggtagctgttgcgtggtgcggcctgcggcgctgaaggtgttggccccttgcctgcagaaagggagtaaattaacgcaacgatttcagactgggaactttcgacctttgggccctaatcttgacgcttcgaataccagatcgcttggcacacaggtggttttgccatcacgaaagcttaccttattgttccatctaacagacacgaaagggattgtagcctgacggggacgccggggtccaaagtaca

SEQ ID NO: 418641 - DNA, 126 bp, Homo Sapiens
caaaagaagtttctagaatctacggggcttgatgaacacaaaccacagcagaccctgaggaacccagtggtggcagtgactcgggctcctctgctctctaaagctcctttgagaaaacatgggagg

SEQ ID NO: 418642 - DNA, 775 bp, Homo Sapiens
agcggaggggccggggcgcgggcggtcggccgtgtggtgcggctagagcggtgggacagcgcggtgggctggagctcaggtgcgcgggcgccgggcggtggcggggggtcctgttacacacggctcgttctcgccctccagatcgagagcgaacgcatggcccttcccgtgcataatcagagtcacataaacgcaggcgaccggggcatgactgtacagagaaccaggtgacttgagagacaggagtgtcggataaagcccgtcaggtagagaacagtgaagttgcaagtgcggccgaagacagaaagatatccgaagccgtgaaagcctcgtgcaccggtcatgggaaaggtaagagtataagaataaaccgtaacttagatggagagagaagggcgagtactgtaaaccattaaaagatgtacgccaaagcacccagttctcttcaaagaaaggtacagttcaggagcaaaaggatcacagttagacacatcctttatatggcagatggtaaaaaagtagaatcacaaaaacaaaacaagaattggtggaaactaaggaacaatagacataagttagggaaattacaatgttactcataaaattattcattcacgtaacagagacaccagaaattaagggtttaagaggagaacggcacacaataagtacgtcgagaccattcaacctggattgccaacgaagggccagcagggggacaagtcgtttcaagagctgaaagaaccaagaccagtaaaatacgcgaagaggaact

SEQ ID NO: 418643 - DNA, 1237 bp, Homo Sapiens
  misc_feature (1112)..(1134): n is a, c, g, or t
agcgggaatgagtgatcgaaacgcatggtgtccgtggtgtcggcagctgacgtgacccggacgaggcgttgacatccttgcctaaggccccactcaggctacaagctcttggctgtcaggatacgccatgcccagaagatctgggctggtagactccaaaacacccttcgagtggatcagctcgtcagcgcatgtacgtccaaggtcatcaagaagatatggaatggtctcctactgcttccactggctgcgtggcaatcatcacttggctacatctacaggggcccacctgtcacggtcgttgagtcgatcctctatgggtaggcacccatttgcttgggtgattgctttggggcataagcagattacaagttgatccttgtgacttgcaccttggaaccataagtggcgagtatgtccttgcgtcacgtatagtgagagatcctatcggttggcctctaatcgcgcagcaattaccacaggagtgcatggttggaactcctagcatcggacacgaagggcttggcccagagggcgttggccgtcgatcgcgtccttcacgacagcgacatctattggctcggcaacgcttgtggcttccccttggccccgatgcactcgtaagggccattccctttcaaataggcatgggttgatgccttattcgcttctgcgcttgttctcttgggctgtgaaggaggacccactgcggagaacatgaacggactgtgcatgccgcgcagagaatgtaagcagaggaagcactgggactgcactatgccacggacaggctcctagggcttggagcgagttgagtcgcaacgggcgcgaagcttcgcgcgaaagcgaaaaggagagatcctggcttggattgggaggaacttcctggtcaagcgtgagcaatcttcttgcacgaggttgaaccttgcctggaggggaaaaacccctttttggggggaagaatccctgtgagtcctgggggagcctcctggacaatgttaaacattggctggaagtggcctatgcggggttcgatttggaaaaaccggccattgcctataattgttaggcggtaaccaacgaccaaaaaaagatttcataggaagaaagannnnnnnnnnnnnnnnnnnnnnnatgggaatacacacggcaccaaatacaggagagcctctaagaacacgccatcggaagggaagggcggcgccccggtttacacccaaacctttcttggtaacga

SEQ ID NO: 418644 - DNA, 1195 bp, Homo Sapiens
  misc_feature (308)..(308): n is a, c, g, or t
agcggagcggtcggcgggacggctcccggatgcaatctgtcccgtcccgtccccgcgcggggtgccgtacgtctgctaagcgcgcctgcgacccggtcgtccggtcgcgctggataggacgctgaggagccatgagtgcgccacgcctgcagaagtgtggcgtgctgctgcttgctctgggctgactcttggcagtgcacagtaagccataataagcattgctggtatttcgaaggactctattccatacccttattatatatgctcgtctcctatcgatggacttgccttgtgcgcgtcccagtgtngcttgttgttgcggagccctcttccattacgtgatgtgatccgtgggtattgatcctctgtcgggaattcctcttggctatgggcgtttcccaggtcctctatcgccctgattcatttccctatgcgtgcacgtgttgtgcacttgctaggtctctcccggtcgctatcgacttatcgttgtcgaaacaatcgtctctactctgtccaccctcggttccagtaaaccttgtgtcacgatcggaccgaggcaaataatcgttaattttgagagggttcgctccaatcaaattgcttacgtaagacgtatgaatgaagcatggttatgcaatgccgcgacctttatacctgaatggagccactcatttttggtccctttacgctttttggaccccgtttttaaatctttcttctacgaagcaaaacgagtgggaccttctggctcgtggaggactttgacgtggacaccgttggtggcggaagattctacacttgccttggaagtaattcactcttcgggaacttgttcaattagaccagccatgagcctccttcatttttcagcgtggccttggttcctcgaggtagcggtatggctcatctaaaggtacgactttgttaggaaattctcttcctgcatgcgtgttctgttgtcctggtccttttccttgtccttgggggccgggcttgttatggggccttggagcagcgcctatgtttcttgggttgggggtccttccaacggatttgcgcttagcgttgttcgacgttgtacacccggggttcccggccgcgtgtgtggcaatgaccgtgtgtcccctttactgggggtggaggcgatggtagctcccacggtatttgctcgacccaggtgtgggtgtacgcaccg

SEQ ID NO: 418645 - DNA, 921 bp, Homo Sapiens
  misc_feature (46)..(824): n is a, c, g, or t
agcggaaaagtttaggggcctatttttagccttctaaaaaggaagnnnnnnnnnnnnnnnnnnnnnnnnnnnnnnnnnnnnnnnnnnnnnnnnnnnnnnnnnnnnnnnnnnnnnnnnnnnnnnnnnnnnnnnnnnnnnnnnnnnnnnnnnnnnnnnnnnnnnnnnnnnnnnnnnnnnnnnnnnnnnnnnnnnnnnnnnnnnnnnnnnnnnnnnnnnnnnnnnnnnnnnnnnnnnnnnnnnnnnnnnnnnnnnnnnnnnnnnnnnnnnnnnnnnnnnnnnnnnnnnnnnnnnnnnnnnnnnnnnnnnnnnnnnnnnnnnnnnnnnnnnnnnnnnnnnnnnnnnnnnnnnnnnnnnnnnnnnnnnnnnnnnnnnnnnnnnnnnnnnnnnnnnnnnnnnnnnnnnnnnnnnnnnnnnnnnnnnnnnnnnnnnnnnnnnnnnnnnnnnnnnnnnnnnnnnnnnnnnnnnnnnnnnnnnnnnnnnnnnnnnnnnnnnnnnnnnnnnnnnnnnnnnnnnnnnnnnnnnnnnnnnnnnnnnnnnnnnnnnnnnnnnnnnnnnnnnnnnnnnnnnnnnnnnnnnnnnnnnnnnnnnnnnnnnnnnnnnnnnnnnnnnnnnnnnnnnnnnnnnnnnnnnnnnnnnnnnnnnnnnnnnnnnnnnnnnnnnnnnnnnnnnnnnnnnnnnnnnnnnnnnnnnnnnnnnnnnnnnnnnnnnnnnnnnnnnnnnnnnnnnnnnnnnnnnnnnnnnnnnnnnnnnnnnnnnnnnnnnnnnnnnnnnnnnnnnnnnnnnnnnnnnnnnnnnnnnnnnnnnnnnnnnnnnnnnnnnnnnnnttcttatctattctgtgcattgaccatctttaaaatggcccatgccagcataagcaatgtcacactttttaaatgaaatccttagcaccattggccg

SEQ ID NO: 418646 - DNA, 979 bp, Homo Sapiens
agcgtggcggactcgcatgctccagggtggccgggcgtgcagtcccgtccgtccccggcttccttgggaagtcccgggtctccttccgcccggctcgcgaacggctgaacgcctcacgtcgctcgagagcgtcgcccagggctagcgtccctgtcggagcgggcctcgcgttgtggacgaggcgcagagaccgcgtcagggacgcagccagagggtcgcttgggtgcatcacatgaccgggaacgaggcacggcactcaccagtcggtcggcgccagggcatcggaggcagcggtccgagcgactggcgtaagcctcggcgtgctcgtcccgttccgcacggcgcgggatctgtctgcctagcggcagcaagagacccatatagcgcgggcgcgggccttggtggcgccacaggccccgctgaaggaggacagggtgcttgcaacaccagacggagcttagcaaaagcccatgaccgcaggccaaaacactgcgacgggtctcgtaccccatgtggaggccaggcgtcaaaggcctaagactcgtgttgccacgccttggggaggcacttcgcggaaccacggcaacaccggcaccataagctccaatggccttggagaccctacgcgtgaaacaggcagtggggaccagaagaggtggactccattccaaggagaaacctgggtaggggagccaggggacgcccgcccggggctatcttgacaggcagatccagaggggaagacgaaggcatggttcagggcaccgtgaagtcccattctgttttgttcccttggaaaagactgggcaagcccctgggaagacgagggcttgttcggcgttggcaagaaagccgcttggaaggccggcgggttgcggccacccacggattaaggtccacgggggcttctttgcgttggtctttgcaccctggggcaccgaaccgtcccagaggcaaacggaaaagttgggagccatta

SEQ ID NO: 418647 - DNA, 1018 bp, Homo Sapiens
  misc_feature (571)..(571): n is a, c, g, or t
agcggaaatgctccccagggcattcctgcccgattgtgcgtctttgctggacctgcgcggtcttcgtgacacccgcgtgcgagacctggggtagtctcctggtctcgcatatgaccaacgaggaaaccattggctggaaccctggactgaccgagatgcctataagtgtggagcttttgtgcgtgataggactatcgcaagcagcggagcgttctgctgtgctgtgtcggcgatcactggggcgtattggtaaaatacacggcatacgatgaccggaccctggcgtgctcaggtcttgactgcatatggagactgtgcataagacgcagggctcatggagtctgccttatcgcagccatgtgtcatctcggtgatccaagggaaaccgtctgtgggggttattgctgtacacctatggatctgcataaccatatgccatgcgtaactttacttagcgcatagtgacccgtgtctttagcccacttcctgtgcatgatatttcaaatgctccgtgttaaggagatgccaattgggtgcatgggtttgccaacgactatctgccatgatgtgngtctcagctcccaaaagatatgggaagcgtatactgtacatgctcttaaacatggacacacccatattccaggcaggaaactgtcccaattgtttcccaggccctttggaatcatggggtgaaacgaatccttcgaaatgatttcttggaacctcctttccgcacgttagtttttttcgatatcattgggttcacatgtacgatcatgtttacgttggctagtcgattccggtggcctatctatgaaccaattttttaagccttgaaagtaagacccttgaaacttccaatatttttggtcaggcatagtgctgggttaacctttctggtccctgcgattgctaaaatcctttttcaaaagagttgggcttgacctttttggttaacaataagaatctgtaatgtaagaagcctgttacaaaaagacttggaaacctttggtactag

SEQ ID NO: 418648 - DNA, 938 bp, Homo Sapiens
  misc_feature (158)..(158): n is a, c, g, or t
agcggaggtaggacgcgtcctgggctgactttggaacgtccgctgagtgctctcattgcacgatcattcccatcgttacgggccttgccgtaggctacggtcgagtctctctcccttctccatgctcgtgagacctgcatgaccgcgacacatgctcncgccagagtcatcggcgtcaggcacaagaaagcatccggagcattgatcccacctcttagtatgtattaggaagctggacgctcactggagactaagcagcaatgtattcctcgttgcagtcggatgagcacttggttcaactcgcagactgttctgttggggagcatgaatagtatagccctagatgcccgtggttactcgagatacatggcgtcccatattgaatcaaactacataagtggtactactcacgtgatatgtggatttacatggaagcggacaggaaggaacgtccacggatttcgtagcatgagaatcgtttcacgtatgagacgctggctattgagcaatgaaggtcgttccgagaagccacatccgctcaattatcgcacttgaccacggtaagtagtttctcctcatacatgctgtgagactcactcgttggaagatcgtctaattgctaaatcatctaatttgtgcagattagcaaatgatttccctttcagttgtgatagactggaagaccttggacatatggactttaccacttcagcgtaattccctattgcagggattgccggggggcctacgtgggcgcggagagactcgacccgggaggtggcggtgcccgtggttacccagagctttttggctcccccattttccgtggcaggggttagatctgctggcccttggtactttacctgggtggggcgatcggacggttggcccggggtctgggcttggggtattgccgccttgcgcggatcccagactct

SEQ ID NO: 418649 - DNA, 298 bp, Homo Sapiens
agcggactcgccgagatgatccgcggggaggaccaggctactgtccctgctcgggcttgcttggggagcggagccgggacgagcctgctttcggactcgggatacaccgtgggtcctcatcatcagccgctgagtggagcgctcgcatgctccgcttcgctgttgtgctgctcggagtagcgtgcacgctcccgtgacgcgccgccagaccccgactgaccttacccggggccttgctctaccatgctgcctcgcttggggcttgcatgtgtaccgggcatgaatttgactagaccct

SEQ ID NO: 418650 - DNA, 1135 bp, Homo Sapiens
agcggagttccttgcgtcacaccgtgatatatgggtcgcaaggtcctatgtatgatggccaattgctgtgattcgttgctgcgttggacatgtgactacatctttccttgacaatgtactcctaaatctggtgaagaaccagtcacctcgttcgtagtgcttcgaactcctaagcagtactacctatcagatgaatggttcaccggtagacagtatccgagtattaggataggcaatcccatctcgtgtcacatcgagaggcttgatcttatatgcttggatggctagccatggaagaatggtgccgtctactccatgttcttgtactacgggcattctcgaaggaatagtagatcctaacctctgtcatcgggatagctaccgcaacttaagagaagggtgaaggagttccagacttttacgacgaccatactgatgaactagctgaagaaaacagatccacttcatacaaagagataggaaaggcgctagatgagcttgtcgttttaagaaattgttcgagagacctaagaataccagaataccatagtaaagcgtgatctcactaagcctgaagacgacaatagtagtgttttgcatgcataggtggcatggtgagagggcccggacataggtaagaattgaggaacgactcccctcttgttacattacactactcaaataattcctagtgacaagagaatcggcccatagggatcctggggttagctggactgttcttccaatgagtgctagtgggggttcctgggaggaaagctgctcataataagtaacatggttaaaccacaagggaaaatatttaattaaatccagtggcgctccgcaagggctgagaaaaaggggccaattgttgggtttttgacacctttttccatgaatcccagtcctttttgtagttacgcagcatatcaagcaacagtttgacagagaaggagaaaggttactccataccttgaggatttcaaggataattatgaggggcggataaatcattcaagggtaagagggcaaagggcgcgaatgtggaaagtatatccgaggcagttacttcaccggaggttgcctagacaaataacttaattattggcgtaagaaatcataagattatagacgc

SEQ ID NO: 418651 - DNA, 905 bp, Homo Sapiens
agcggagagtgaatagaatgagggctagagatgggagggttcctgatgagagagggtcaaaaagtgagttttagtgaaggactaggtctgaaatagttacgttattgaatttaaaaatttaacatttcaaatatgtctttctttgacaaaactttacagagacactgaagtccaggatctttgtccagaatgtaaaatattgtcaggaattgacaaaagaagctactgctcacaatgtactcttttaagaggagagtaagagtccctgtttctgtaaaggctgatagatgactgctggcaatacctgtactgcagtttcttcaggaacaggaaacagaagaaaacaatctagctgtttgtgggatatatttgaagtggaggggccccttctttaaccatttgatcctggtgacacattgctaaggcattttcaatacctgtaggggatcctgacgcttttaagctcattggtggccccaggtcgatgactgcacatgggctccctccagtggcgaacttctcacattacagaatcatcactgttaaccatagtcatttcacaggacccgggatacagagggatctttgaaaaaaatctagtatagttcatttgttttaaggacaaggaggctgaagcccagaaaaaactgaatgacttaccccaaatcacattgataattcaaagacagagttttatgcttgcctccctggacaataatcctcatgcatggatttccttttaaatgtaaaggttttaatcgaaaactatcccaatattcctgttttctccacaatggaaaagaccatccaggaggaaaagcagacaacaaggattttacagaagacttgattctctgactttctggaagccaggctccaccgggggtacctctccctgataaaac

SEQ ID NO: 418652 - DNA, 1515 bp, Homo Sapiens
  misc_feature (372)..(372): n is a, c, g, or t
  misc_feature (496)..(496): n is a, c, g, or t
  misc_feature (683)..(683): n is a, c, g, or t
agcgggtcttctaagatgggcgatcggggacggaggcgtgctgcgcccgggcagtaatgacgggatgagtccgagtatagggtgatgcttgctcaggcacacgagactgcttatcactagtgcattggagcagtcatacgatgtggaaaagtgcccggaaactatgcctatatactagccggtgagcatgcggccacggagagcccatcgacacaattcctgttgtggagtggagtcgcactgcccctgggtggacgggcgtagatctaatccttctgggaaatgcgggccatctgcgatctacaaatgctagcgactgaagacgctgctcaagctggacttctaaaacaacttctgcctaatcctcatctntgatgcgccaacttctgcgcaaaccgcaacgtacattatgctggcaactaatcaccttgcctcgaccaccgcgaaaaatgacgaaattctcctaaccaaacatattgcatctcccacggggaanaatccatcaaccgaaattgcaaatcgttgaatctgctccaaattgcctttgatttgaatcgaatgcgatgtttcgagatcggaattctcgaaaagatcgcgatatcatcaacccgattccttgcggggcccgcacaccgaacatcgcaactcgacacatcttcttcggcatttatccaaaatgccgnttgtatgctaaaacccaacccctaggtcaatctataacaaatgaaagcaaccaaaaaaactttaatgcccacaagaacacgcatggaattcttgcgaagcgcgccaaacttcgggatatcccaagcgcagcagcatttcccgacaaaacttttctaaactttctaacagaaccaacaattttgcgtacttaaaaccccaaccggtaaaccaaagccattcaaaatttcctgattgaaaacaataattttcaatgcgcgcttgtgcgcacatgcggctggatccaaacaaaatctggcaactggaaaaaccaccacgaatcgtgctctacaacttgccgaactttggggattcccaacggcggacattccgagaaaagcttgaacaaaagatcaagcgcagatgcgcgggacacaatgcgcaatggatgcgataacccaaaaggagaatggcttttgcgaagcggcgcttttgggagcatatggccaatttcttttaaagaaaccacaccattcggtctccctcattgctaaaccggagataacttggtagcccagttggtgcttcctttcacgaggagtggttcttcaaagagaacacttgggtggagagcttccgcagtcaactaggtcgtaatgttttgcgtggagtagatggtggagactggggtggtgttttttctcacacaaaaaggacgttttgtggtcgcgcgtgccacatttttggatataagaagcatataaggctgtataaaagaggggaaggtctaaattttcgtcgcaatttgtcgccacttcagtaagtttcgtagtgcatcgaaattcattatgctgt

SEQ ID NO: 418653 - DNA, 993 bp, Homo Sapiens
  misc_feature (485)..(485): n is a, c, g, or t
  misc_feature (680)..(680): n is a, c, g, or t
agcgggtgtctcttgttcttgcctggtgtcggtggtatagtaatcagcgacttgtgtagggacagctgacaagtgaagatagacaacaggaaatagcgaaaaatatagagcaccctacccccaacagacagaagccacgatcgagaaatatccagaaagaacgaaaataagaaagagacaaccgagacgagacgtactaatgggaaaataatagttgagtgttaacatactaatttaccctacattggaacgatactaccgttatagtagtggccccagcgggattgaacagatgactaaacgagaatagagaggaacataatgaaaggaaataaacaactgagacaagccaatagaaataagaagaagcaacatatataagaacgatcacaacataacaaagctaaacagaataaacaaaaagcacctaaaggaaatcaaaataaagacaaaagacctcaaataagcgaaatccataaaagagnatcaaaggccataagactcacgcaatacactagaagaaataaagaatagcaaagagatatctaaagaaaaaacatacacagatcaaaagagccaagaaacacagaaatataaaaagatgaatatcaacagacaagaactcatgataggaacctaccgcgaaaaatacctgcacaataaaatagaaactatagagnactaattagcagtatgcaacctagatacacaaacaaacagaagataataaaaacccatgtaacataaaaccgagatcaaatagaccgaagatgtctaatagacctatgaaacgaagaaaaaggcaccaaacaaagataagcacaagtcatattaagaaccatgacaactgatgaccagcgaagaaaaacagaaacgtgaacaataaaaatggagaccgaaaaggaagtcacgataagacatgaaacagcaaataaaaaacgaacaaatagaccaaaccacggattaaataaagaggcatcaactgaggtacag

SEQ ID NO: 418654 - DNA, 936 bp, Homo Sapiens
  misc_feature (384)..(384): n is a, c, g, or t
agcgagaaggtaagaggagagaaagcggataaaaaaaagacagttaagtatggtagctactcgactcggaggagatctgcatatgagaacggaaaggagagaatcgcgacacttgggacggcgatgaccgcaagaagcttaaagtatgaaagataagaaaaggggaaagatagaatgggccttacgatactggatgtttaatgaagaggttataggatgaggttgcttctgtagaggaagataacctcgaggggtatgtactttagaaacgcaggatcaacacagatatatcagtacatggcaagagaagtgccaattctaaataaaataataaaccatccttatgataaaaattgaatatatcttcactgatagatacttccncaattgatcattacatagggaattaattaatcgcttcggaatgggaactaattcttgatcttaatttcgggcaatggaagcatccatagcattcttggcagatggcggaaatgaccaatccaggattcctggaatgtctgaatggttttcctctattgtggaacccatgattgcagcaaaagatgtctgtcaaaacggtgaattctgagttcaaatttcaatgtatgtcaatcgtgtggctctaagatggaataccgcgtaaaattccatacatgaaacccctgttcaaattatcgaagatggactgaagataacctgtgatatggattaactcaaataaccatagataacgaacaaaaatctagacatcgaccagtctcttgaatcccggggataattggcgaggagcgtgcaatggaattttgcccgaatgctcatgcagaaagcacgcctggttggataagaaagaatgattctatgggaagggtgatgtcaaatttgggaaccattacgccaaggatgagcttaaaggatgcgctcctcggaccctga

SEQ ID NO: 418655 - DNA, 1217 bp, Homo Sapiens
  misc_feature (418)..(418): n is a, c, g, or t
  misc_feature (445)..(445): n is a, c, g, or t
  misc_feature (555)..(563): n is a, c, g, or t
agcgggcagtctagtactagagggcggccgaagaggcaagcgtcaataaagatgagagcagtcgagcagctatacacctagtagagcagcgtctagcgataggtccggagcgagagccactggccgagatctaaaggcggcagtaccctagcaggaaaatgaaagaatatagcagaacttccagcatgttccacgtagcttgctaggtaccagatatttgatgtattccatgagggattagtaggctggagatgtttgtgaggtgagttacatactgggtgtattcgccatttagtgaccctagacattatcagcaaaaggaggaataaggaagagacctactctcactaagccagagaataaaattaagcacaaaatgcgatgctggagccaatgcaaactagacaatatgccaaanatgagaataatgacgaaatgaagatanaaagcatttaaaccggaatggtaaactataaacaaagcgtttgctccgaaatgaacaaaacaattaaaaaacctgataaataaaatattggaagataacgatggaatatnnnnnnnnnttgaacgaatattctaagcagatagggtgaaaacccaaaagatgaatatatgcattgagaacataagggaaaatgaaatcattgagaactatagataaagccaaaatattgaaagcaaaaccggaaagagacaaggactatcctgaacccaattctaaagcgaaactgacgagaaaagacaattttaaccgaaaaacttacatataaattagaatttccacaatgaaaatcataatagatacagctatattctcccaagcatgccatttcaattcaaagaatggcagtcgactctaaatacacagccagcttataaattaaactaaccaaaggaaccagaaaaagatttgaagccgcgagaatttcaaataaaccgattttttataaccaaatcacagaaattgatttgacccttattaagcgggatgatacgcaggctattgccatgtaattaagcgaagacgcggggaaaaatcaaatccataattccagggccaccttgagaaaccctccaaatttaaaaaagccctcttgtagagcgacaaaggaaatgaggggcgaatttcaagccgcaacaaaaatcgtgacccagcgggccaaacaaatttgacagcctaattaacgaggaaaaagcatacccggggcctcccgcgc

SEQ ID NO: 418656 - DNA, 1103 bp, Homo Sapiens
  misc_feature (352)..(352): n is a, c, g, or t
  misc_feature (413)..(413): n is a, c, g, or t
  misc_feature (457)..(457): n is a, c, g, or t
  misc_feature (503)..(503): n is a, c, g, or t
  misc_feature (520)..(520): n is a, c, g, or t
  misc_feature (977)..(985): n is a, c, g, or t
agcggctaatctagtgtacctaggcccgcggccgtacgggtagtagagctagcgccgcaccgctactagagggtaacgtggcccaccgctacctatacgcggtaccctgccgccaccgtaccacgctacagcgtagttagagaagataaagagggtacggaacagctgccaacgccggtcaatattatagctgagccctgttacattgggtggtaacttggctatacatctgtcgagctccgcaattagtactaaagtagaggcgccaactagcatgagtctttctatcatgttcgaaatcaacgaacttaaacggatccattttgatatcatcaaaatgagttcgcaatgntaaccaaatctcaggatagatatctaataaggctttatctataaatatcggactcggaaanataatgctattgatattatgattgaggagactatctacattttnagagacaaattaggcttgtaacattttatctgggctaacaagaagncaagatatcaattgganaagatcgttccactttctatttgacagggattgtctaattcattcaaacctctataccgatcagcgcgattagagctcgggagattcaacgtatctgaaatcacccggacagaatttcggacaacaatgaaacatatgcggcatggaacatagtgggtatgcacaaactcaatgttaaacgaataccaattgggactgcccatggtaatgcacacatttaggtcatttaatgtgatcaaggggtcagggatttggaaactttacttttttaacttttaaggaatgttctcaaatgtttcactaaaccgaaaggggcaatcttgaaaacttgataacggaatatttttcattctggaaaattgtgggttaaacggatcgggtgattcgcttaattgcgggatttgggaccgactttttctcttcggattcccatggacgggcccccactctcctcttnnnnnnnnnaggccctattcttcttgggcaatttactgccgtcatcgttcctacttttaacgcgctcccttggtcccccttgccttctgccgcccggtcaaaccggcgactcgcaccgaactcgcct

SEQ ID NO: 418657 - DNA, 743 bp, Homo Sapiens
agcgggggtgatacttgcgggggaggcgaggtgcggtaggggccattatttactcagggtgctccgtagtcggtcgaaaatgaaagagagtgctgcggagcgctcggcaggcacgtcgtacgggagctgggggtaggaggctgcctcacgtactgagacatagagaggatggcacgctacaggccgacggtttttacgtgatgtttctgtgtttctggatgattttgtgttttccgtatgaatggttatatggtggtttattgtttgttattagagggtacaagtgctgggttgattgttaaagaaaactagaatgcaaatgacggattccagattgccgcgatgatgcactgatgctcatcgcgaacaactcgaaacaacagaggaaaagagcacatgaaacgaaccacaaggccaaataccatcacgagacaaaaactaaggagacagggcatattgcttagaagagcgaaagcatcctccaaagaaaactcggagaaacgggatgcgacgaacagaggtccaaaatgcaaaatatactactccagaatctgaaacggataagcaaacaataacacacgccacacgctaaagacaaatagccgaaatctaacaaaaccaagagcgagaaacaccaagatcatgtatccgccccgcgcgaaaacgccatagcaggcacgcgcaatggaaatccacaataacacaaaaacacagtcgcaacagccgcgacttggacaaaggag

SEQ ID NO: 418658 - DNA, 928 bp, Homo Sapiens
  misc_feature (233)..(320): n is a, c, g, or t
  misc_feature (588)..(631): n is a, c, g, or t
  misc_feature (705)..(760): n is a, c, g, or t
agcgggaaattggtgcttctgtggtatacaataatttaacataatataattactgataacgtacactaagtcatatcaaaattataggtgttccagtattttggaacacataccaattaatatatttatatagatacaacccaaagaaagccaaacacaacttcatatataacaaaagcttcctaattgattttaatataccaaataagccaaataatatcattttttacttnnnnnnnnnnnnnnnnnnnnnnnnnnnnnnnnnnnnnnnnnnnnnnnnnnnnnnnnnnnnnnnnnnnnnnnnnnnnnnnnnnnnnnnnaagacgagaatagaaagagagaaatgatgataataccgaaatacgacagaaaagatacaaatgaaggctaaagaaaagaggggtaagaggaatgagtacgaggaacctaagaccaagaaaagaacaaagaaaactaaagcgagaccaaagcaaacgacgagatagatggccaaccacgagagaaaagaatgctaaaaacgaagacgaagatgatactaaaacgagagagacaatgaaaggagacagaaatgagaacaacagcaagagnnnnnnnnnnnnnnnnnnnnnnnnnnnnnnnnnnnnnnnnnnnncgcgcaggaacaaagaaaaagatctccaaaagacgaaatatggagccaggacatgacagcagtaaatgagccannnnnnnnnnnnnnnnnnnnnnnnnnnnnnnnnnnnnnnnnnnnnnnnnnnnnnnntagaagggaccctcggcgtggaaaccagggtcgaaagtaggcgcagattcgaacgaggattgattgtccggaaccagcgagaagaccccaaggtgaatgaaaagtggagcgagcaagggaaaaacgaaggcaaacgggacccaaagaagaaattaacggggcaaggcc

SEQ ID NO: 418659 - DNA, 1074 bp, Homo Sapiens
  misc_feature (369)..(369): n is a, c, g, or t
agcgatacgtctgctgctctgcttcctatccggctcttggttactcattactgttgcccctatccccgctgcgtgtgacttctccctctaagtccgcacgattccacacggacaccgtcggtcagagcacgcgagcaatgcattgtcagaggcgtcgtgagaccataacgcacaacccccgcagcgcgtgaatctcgggtgaattatacctatgtcaatctgctgcaagattaagcagaagagtatactgaccccaatggttggtcaaatttgccgtagcctcgccggagcccgccgcactcacgacagagtttgagacctctaagggtcgagaactagatatggccgtagcgtcaatagagatggtangtagaatcgaactcctcattcgccaaataaactggttatatctatctcctcgtgaggtctaagatatgagagcatctctcctccgattggatcacaattcattttctcacttatccgacacatcagatagtggcatatgtaatatccatgaattctttgttgatccaactaactataatttgggctccattaacacccctaacaacattggcgtaattaaagaaataaccgctctcgaaactttattgccctaatgacgttctcactaagaaaacttcgtgccataagaacttttaatactactaaaacaaaatacctggactctgttccccgtaaccagacataaacggagacccaacaaggctttatatcaaagcgtcgaaccatgggaacctcctgtgcccgagtttgaccgtgtccactatgtaccctctcttacggaaggggaaggacgcgttggctctgcggttgttacacattcgcgatttaaagaggcgccccttcgattttcaaaaccgttccagagcggcaatccccttccgttctggaccttcccatgggcgcgatatgtaagtaatccccggcgccgattccttttaacgacggtctaataacccccccttttggaaggttggaacaccggggcttaggcaaaataccggttagaattgccggccaaaatgtgtaccccccaaccggtcaatg

SEQ ID NO: 418660 - DNA, 928 bp, Homo Sapiens
  misc_feature (458)..(458): n is a, c, g, or t
agcgggtcttccttacggctcgcgctacgaaaagttgtcccagagagaaggccctgtacaggacgcgagagccagaatagagaacgcgcccggtgcgcgagaaggcctgtacgggttgtcgcggtctgcgcgactcgtctccttgccttgttgcctggacggcattgggagcatgcacacgtgccgcgagcgcatcggttggttgcgtgcttccgagcgagcgtggacctgtgatctgtgctgacctatggtgcgaatttgacaggcgtcttggtgtgttcgcggaagcatatctttcctacgttctgtttgcctcggtatcccaacacatacttaatactcaatttcccacgcaacacaataccaatgggtaccgagcctatggatacgtcgaggtatggcatgtaatgagatgtgtgctagatgagagacaacagtgatcgttactctaatttcgntgtcttgaaagagaggtttaattcctatgccccttaaatggccaagacgtgggacaaattacacgtccggataaccatttggagagaaattgaagccaatgaaaaggacgaatccctgagtggaggacccgtattcacctacttgatgcgagaccctggtgagccacacgatacttgttcccatatctacgtattgtagcgcggacacgatatagatgtttcgctattacccccattaccgttcaggaccatactattctaggtaagagcgccattaccgataagattaggattacccccgccaggattccacaaaaacattaacgacttatgggacagagaccccagttttggtccacctaaaagaggttaggctttcgcatttttggagagaacccatataatcggccaacgattgtctattcgaacagcaaaaggtttagttaggtaaggatacagccccacattgg

SEQ ID NO: 418661 - DNA, 758 bp, Homo Sapiens
agcggagtaactgatgaaactaaaatgaaaaaatagataaatctataattatatgtgaggattttaacatcttattcacagtaattgatagaactccttagacagaacatcatcaaggaaagagaagatctaaacaacacagtaaacctacaggaataaattaacattcatagagcattccacacacaaaaaaaactagcagaatatacatttgtgtacgtgtgagcctgtggaatattcaccaaaatcaatcatattttaggctataacaaaaatctcaaaaattgcaaaataattaaaattatatgctgtgctcactgatctgttctttcttttgttattttagattcaaagatatttgtgcaggtctgttatgtggacatattgtgtaatagtgaggttttagcttttagtgaacctatcacccaaatagggaacattgtacccaataggaaatttttgaacgcttgtgccgcttctacccaccccttctgggatccccagtgcctattatttgtatctttatgtccatgtgtacccattgcttatctctaacttataagtgagaacatgtgatatttgattttctgtttctgaattattccacttaggataatgacctccagctcatccatgttgatacaaaggatataatttaattctttttatggcttcatagtattccatggtgtatatatgccatattttctttatccaaataatcactgatagatacttaggttgattctattgactgg

SEQ ID NO: 418662 - DNA, 411 bp, Homo Sapiens
cggagcacagacatgagaaaaccaacgtgaatccgaacaagcatgacttaaggtgactgcctattacctcctggataggttagactggacatcactcaaggaatctgtgctcctgtccctagacatttttcataacgctttagtacagctattagagatttatctataacctaaagtcaggatctgcaagttgttgccatctatctgggataacattaaattcccttcttgccatttatggcactttctgtaagacacgatttctgtgctagagctgcattctaagactgtctattctaacccaagttgtgtctcctcaggacctagcatttgaataggtcggaatatccttctggaaaatgattgactccatcagggaaagagtcaagtcccagtctctgagcgaagata

SEQ ID NO: 418663 - DNA, 1371 bp, Homo Sapiens
  misc_feature (258)..(258): n is a, c, g, or t
  misc_feature (1045)..(1045): n is a, c, g, or t
agcgggattgcctctcgatctggtgcctatggtcccggctgaccgtatcgatgaccgccccgcgatcattcgtgtatcctctgcctgtgtggtgaacgctacttgcatgtgcgtgatgcatgcggactttcccgttccgcgtgcgtggaggtggttgtcagtacggatagacttgtgtcacttattgcgatcagaggaccgcaggcactgctccgaccactcataccatgcggtgaggcgcctggtgttacccatggncctgacaggactgactgctccgtgacatgatcgctcgactaggtcgcaccgacagggttcagcctagtagaagatgggaccagttggcagtgttgaccttgagagtgcttgagacaagcgcctacaccggtcgactctagcaattggatgacttgcatgttactgtcgattttcctcgcgcgcgtatggacgtcggtaaaggaccacaaggtagacgttacgggattacccttaagcgtgttggatacaaccgtgtttgtgcttgcctagcgaacgagttggacgagcacgggaccctccaataagtgttagtcaaaatcagctccgctgtaatcatggacgccttcttttattactttccttcattgaggagtggcggccagcgtggtgcaattcgcttctaactttactctcctgtcacacgagggtaatcatgtgagggtaatttaacgagcaatttatgccccaagtaaaaggtcggtgacagtggagcttctcttgtaacttcccaccttggcccccggcaaccaagtgagagccagcttgccctaaaggacacatccacattgtgcagctgtttcctgggatgagtcccccgccaatatgggatgggaaaccttggttggaacgccggagggtatgcaacataccagttgttaccatggggtaatttgtgcaaaccaacctatgtctcccccttctttggcacataacttgtgtgtccaaacgcggtatatttgtccatcgatgggatcccctttattgtgggattattgttcgttgaaanccccccaatatacggggtgagggtgtgcaccctttggttacgttcccttatgttgccctttgtttcttaagaaccccccccgattggtggttgccccgggttatatgtcctttggcccgacggttattgggggcgccgccgtccgcgtcgtgtttacacccctccttccttgtccccccttggcgccaattttcccgaagcgctgctctccacctttgttggtgcgcccttgtgggatgcccattcttcaggctacccggcatggcccttttcctacacccggggttgttggggggcccccggtaagcctttgtgccccgttatct

SEQ ID NO: 418664 - DNA, 965 bp, Homo Sapiens
  misc_feature (242)..(388): n is a, c, g, or t
agcggagtgctgcatgctagtccttcagctcagaatatttagtgctgtttttcttgcttctgcacaattttttcagttagctgttactattaaataaatggccccaaacacagtagtacaaaactacaaattattgtttctaatgtttctgtgattctgtggaagggctaagaggttgtttgttttgcattgtcttagctgggcctgaatgatctcccactaactcacttacatatctgggnnnnnnnnnnnnnnnnnnnnnnnnnnnnnnnnnnnnnnnnnnnnnnnnnnnnnnnnnnnnnnnnnnnnnnnnnnnnnnnnnnnnnnnnnnnnnnnnnnnnnnnnnnnnnnnnnnnnnnnnnnnnnnnnnnnnnnnnnnnnnnnnnnnttagcgtctggcacttctcctgtaagcacttttcaaatctctgcttgtggccatttttgttattgccccactggcaaaagcaagtcatatgccaatccagacttggaagatgcggaaatcaaccccactcatcaataggggaagtagtggcaaagtcacatcacaaaaagatgtatacaaacggattagaggcgtcattgcagctttttttgaaaatgatcttccacatcaatcttttagcctcccttccagtttctcttctttaagatgaagtttaggaaagaacctactcatcccatccataagttttgtgtgacttcctactctcagagaatcttttattgtgttccgtttctggcattaattatatttatccggccaatattttaaaacttgtgtctgtctttcatgccttatcccgtatatccagtcgcactcaggtcttctgagcctgggaatgctccatatttttttcaatgaatgcactgttgattctcccctgggtgacgccgtcggcttttgggccacaactgagctttttaagctggaactttattcctcaagggtgtttgtgctg

SEQ ID NO: 418665 - DNA, 1002 bp, Homo Sapiens
cggtaatacacacaggagtgagacacgaggcatcgtgttgccctatttccccgacctccgctcacacgccggctcatccagtccagtcgcgcgtgccaaatatcacacgcattgggtgacttggacagctaggcgtgcactacggaatggtcctggggggagtgcagaacccgtgtgtcgtacctgcttggacaggaggtagtcattggaccgcttttccgccgagacctggtcttgtccgaaggtacctactccggtggagtccaagaacccccaaattcggaagggaagacgcaaaaggtctgtgcaactctgcatgtctctcccctgccggtgtaccgacaaggtgcgtcatcctggagtggcgccgagaaggttgcgcgcagagtgtaatggtccacggaatgtgtggagtgaggagtgcaggccgggtgcaatgcggaaggcgattgcggcagccgaggctcgcgctgcgctcactcagggcgctctctcactcccacttgaggtgacccatcgctctctgggactgacttggtgtggcacgtcggcggagtattgaacgccggagagcatagcggcattgctaagaaacatatgcaagagacggggaagcgagcgctcaagagtcctggtgtggagcttgcgagtcccaagacaagtcttcggagggtccacccccttgtagtagaagaaccattgtactcttgaactcggggtggcccactccagggaagatttgcccgtggggccttcttctgtgggagccgtgtaatcttgggcgcattttctgtttggcacccgcggcgttggttgcacctgtgcttcccccagggggacgttggtgaccgggacacgagctgtgttgtcgccgcctttggggagggttggctttgcgtcgccccgaccagtgtgggcgtcgtgcatcgtgtttttcgttgggggcacgtgtttggcccaacaattcctctctagcggaagtgggttgtccatgtgccgagc

SEQ ID NO: 418666 - DNA, 943 bp, Homo Sapiens
  misc_feature (426)..(426): n is a, c, g, or t
agcgggtcgtataccttcagcaggagaccgggttaccctgtgatgtgtgtccgtgtcggccctcgtgctgccggtccgtgcggtggtgcccactgtcctcactactggtcctactcactggacctggcgtgcactccctggacggcctttcactctctccttgggattccgactagcctgtcgttctcacgccgggcgtcatctgcgctcggcgcggtgacttcatgcctaggatttcttcaggctcgctgtcgtgcgagctcacaatggtaggaaaagatggggtatcatccgaagattccgcaatatctgagaggacgatcgaacagttgaaacgctctcttagacagaagtgtgatccgatccaaatacgcatagatagacgagttgaagctccttggggagctctagagttgccctagcgcngggaatggagttagccggaagatgcgctttagctgctcgcattgctcctaagccgattcgcgcatagggctaacgaagggccccattgattttagcgctcgctccaaagctactttgggacgagaaggagactacgcttgtgcgaccctttgcgggggacttgaggcgtgaatgtggttgcgacagttgcattcctgccctgaacttaggtcccattggggatgaagaacccagttgacaacctcttatgaagccgtacgtgtgcacggtttacgtcaccttgttgcagggacctattgtgtctcgtgaacctctggaaggccgttagaaggagttcggggaagcgcgatgttttcttcttgacacccacggagttttttgtgaggggttacacgtctcgacggactgattctttatactggccccaaaacgccaaacgcttggggggaataggccaggaacaagcgcagtccttgcaggggaattggcctgtggaattgctagttttacctagtgg

SEQ ID NO: 418667 - DNA, 896 bp, Homo Sapiens
  misc_feature (502)..(514): n is a, c, g, or t
  misc_feature (610)..(656): n is a, c, g, or t
caagggaccacccggtaaagggtgcaatatattttatattcccgtgtattcaggaaggataaaaaaaggtaaattttccccaaggcagtggttttaatagactctgttgtattataaggcggattaaaaaatgtgtagtgttaattaaaaaaatactattacagggagactcatattaaatctcatagttgtgtattctttaatttaacaagcagaggggcaaaaaattatttacaatcacactatgagagagttaatatccaccaaaaacgcggtgggtttttccgaaaattcacacaatggtggtttcccaataccccgcgttggggttttagagctcggggggcaacattttctccacacgagggacacacaaggatctttcacaaatttttgtgttttttaaacacacattatacccccaaagttggttatcccgtgtgcgaatatagagtttttttaaaaaaggtgcgaattccgtgtgctattagggaaaaagggnnnnnnnnnnnnnaaaaaacgcttgagaatggggcttgtgggaaaaacggggggtcctccctataaaatttatacagaggagtgtgttatataactctccagaaaagannnnnnnnnnnnnnnnnnnnnnnnnnnnnnnnnnnnnnnnnnnnnnncccttgggaaaacgcggggtggcttttttatataatacatttgggagaaaaaggggggtttcccccttgtggcaccccagggggcgaggaggagacaaagggggccccactattgagggacaccggggagaatcacacacctaccgggggggtaaacaaatattccccgtgaataaaagcctctgcgagaagcagggggaaatatagggggccccccccaaacagggtcctaaggaaaac

SEQ ID NO: 418668 - DNA, 964 bp, Homo Sapiens
  misc_feature (414)..(414): n is a, c, g, or t
  misc_feature (429)..(429): n is a, c, g, or t
agcggtgcgctccttccgcgagcaccggcgggccgccttttgcgcgtgcggtcgagccgggcgattgccgggcgccacgttgtgtgcgggcgactggaccgcggagcccatggcttgtctgtcggactcggccgtctgctctccctgagcgtggcgggctgttcggccgtagaagactgtctgcgttgggtcgtatcgtgcttccgcgagcacgctcctgcgcagtacctgggcgggcgcggcgttatgtactcctggacggagctgactccggcaggacttatctgtcctttggtgaccgctgtctctgggttggcatgtgtcgattgataggttatgactggcttcatcgtcctcgcatgttggggtgctgtttatactcattatttccatgacgatcttgtcgcattgtgntgaatatggtcgtcnagtagtgtctcgggagctctatatgccggttgtggggacctctgccattccatccaagtcggattggactcctgagtcgtgacctctccggtcgtaacaattggggcgcaccataatgaactggcgcattctgcgcttaccattgaccaagatgtcgcttggatggttaaatctgcgtcgatttaggccttgtagggcgtaagtctttgccattgaggcaatgccctattgccttgggcgcttatacgcacgtacttgcactggagtaaaatcatctggggttccctctgtgcactcgtgaatggcgctggtcgcaatggtatggaattactacgctagcgcacctccctggtctgggcctgcgctaccttatgtccgtggccagccttgcaacgacttgctggtaggtactcgagggtttccttcgatccttcttgtattctctccaatggaccctttgggaccgcgtccatggttcagtcaacccctgaatatcaaggtggacgggctatctgtggcccgtttctttgattcc

SEQ ID NO: 418669 - DNA, 1585 bp, Homo Sapiens
  misc_feature (201)..(202): n is a, c, g, or t
  misc_feature (217)..(217): n is a, c, g, or t
  misc_feature (221)..(221): n is a, c, g, or t
  misc_feature (264)..(264): n is a, c, g, or t
  misc_feature (288)..(288): n is a, c, g, or t
  misc_feature (327)..(327): n is a, c, g, or t
  misc_feature (361)..(361): n is a, c, g, or t
  misc_feature (363)..(364): n is a, c, g, or t
  misc_feature (392)..(392): n is a, c, g, or t
  misc_feature (429)..(429): n is a, c, g, or t
  misc_feature (463)..(463): n is a, c, g, or t
  misc_feature (477)..(477): n is a, c, g, or t
  misc_feature (485)..(485): n is a, c, g, or t
  misc_feature (487)..(487): n is a, c, g, or t
  misc_feature (520)..(520): n is a, c, g, or t
  misc_feature (532)..(532): n is a, c, g, or t
  misc_feature (554)..(554): n is a, c, g, or t
  misc_feature (563)..(563): n is a, c, g, or t
  misc_feature (594)..(594): n is a, c, g, or t
  misc_feature (641)..(641): n is a, c, g, or t
  misc_feature (647)..(647): n is a, c, g, or t
  misc_feature (679)..(679): n is a, c, g, or t
  misc_feature (708)..(708): n is a, c, g, or t
  misc_feature (761)..(761): n is a, c, g, or t
  misc_feature (763)..(763): n is a, c, g, or t
  misc_feature (765)..(765): n is a, c, g, or t
  misc_feature (805)..(805): n is a, c, g, or t
  misc_feature (1019)..(1019): n is a, c, g, or t
  misc_feature (1047)..(1047): n is a, c, g, or t
  misc_feature (1109)..(1109): n is a, c, g, or t
  misc_feature (1112)..(1112): n is a, c, g, or t
  misc_feature (1144)..(1144): n is a, c, g, or t
  misc_feature (1159)..(1159): n is a, c, g, or t
  misc_feature (1198)..(1198): n is a, c, g, or t
  misc_feature (1285)..(1285): n is a, c, g, or t
  misc_feature (1296)..(1296): n is a, c, g, or t
  misc_feature (1298)..(1298): n is a, c, g, or t
agcggaccacttactccaaccttgtacagaatgctcagtctggaatcttacataagacgtactgctctgtccagattacactacagtacgctgccttctagcacccatgagaataggagctgacacgccgagtagactcgaacgttattcctagactgaatcagtagtcatcccatgaaatcaatccaagtgaactagtcnntatttaaccctccgnaagngtcctatagggtcgaacataatattgatattgtctctcatcanaaaatagttagcaactcaccatanaactattatatgaaaccatgtgctcaactatcccaagtngtggaattatcaccattggcatatcacctacttntnntaaaaatatccacctatccccttcgtcntgttggagtcaatcgagtcaccaaatttggtgacccntcgccaagctgctggataagtgcccaattgtcgnaataactgagtganatcaactnantggttttccgtatgccaagaatagcgtcaatanaaccacacggcntacgtactccaatttaccgttntccactaangtgacaatcgtcatgagtgcaatcaactctntacacaaatagtaatacctatatgccttgcggggagttcaagtaagntgaccntagaggaccaacgcctggctgtcgtattatcntgggttctccctgttccatgactccgcanacctgtaatgcgaacttgatcattttctatcaacctatctcgggacttgtagntncntaggtttgacgaggcgagcagacattctatttttgtcganccttggcgttgagttccagtcttctatctcctttgggtgatacggttccaacctacgtaacgtctgtccacctcccacactttactttagggcaatcggtaatttggtccccaccacaaatagatggtcggctactaattgcgcgttttttgatttggaggaccacttgttagaaatttattacgttttggattaaggagtgcctacctaaggncattcctatactgcgcaggttcccgctnccacgggacaattatgctcccatgcgctcattggttcattcctctccttagacgtgtgtgcnttntattttacaaaacacgccggatgtgcaccccnaatctggtgtgctcnttctcacatgtgggatcccttcacccgttcgtggtgcgnttatatacccgtttaagtagagaaaagttagaactctcttacgtctggaacgcccattcaagggggttccgatcttcgctcctgggnatcctacctantnggtcaccggattcctccccgactagattaaagtaacttgggcgcgccgtagtagggtgtcactctccttccccagtgtgggaggccacctatgtctcggcccgggatatgttgtttggagcctgttgggcgccacttactttccgggcgggtggatcacttcccactttttcctacatgtcttgtggtgcttggccgaaggcgttgtttggggccgaagggaccttccccccgtttggcctgtatcgaggaagcctctctttggttgcgtcgttggcttgtgccccc

SEQ ID NO: 418670 - DNA, 1089 bp, Homo Sapiens
  misc_feature (326)..(326): n is a, c, g, or t
agcgggttcttcttctggcttgccaccatgccttccactgctgaggcatgacccggtagacactatcacgggcgcccagcgattagtccacttgtcctaccggcctctgtatggcgatgctcctgcacaagcgccccgagactgaccgcctgtatgtgttgcgtgcgtctgctgtcatacgaccggattcaatcttatctgataaaactagccattccatagctacattctgtggcacaacgtccgagtgatggacacgcgattagccactttacaaggaagcgaacgcttgagctttcctgccgcaattgtcacacctatgaccnaagttgattgtggcgttctgggtcgcgtgcacaccaggacttcgcggttgagcctgctgcctaggggcactgacgacttggggcctggttctccagtccattgtttgctcggtgcgggttcagtgcgctacgtacccaggttcctgggagcaggggaggatccttccctccatagtcgaccccttgctctgtgccgttgtagcgcggcccgtcttgttactttgcacggctcggggagcgtaggctcgatgggagagatgagtttaccgcacgttgctctgcgggtgcgcgtgccttggtgttcccgtttggattgggcttctccgaatggggcgcggcggattagccggggacccgttttacagctttaacatgttggcattatccttaacgttttccatttacaccttttgggagtgcctagcggagaaggttggattcgtttacacggcctttgctatcgccattttcacgaggggcccgccaataagggggtggggcccttccgtttacaccattctcaggaagaggggcgggtggcgccccctcggtgtcacccccacgggcttttgttaggttgctccgcgccgtaattaaagaggggagcgcggggatgaacacctttgtccagaggaccgttggggggcgcatacaggtcaaatcgcggggccttttaggggttgccccccctttaggtgtgaagaggggttttggttatttcccccgaggccttcacgggggttttccactcatatgtacattg

SEQ ID NO: 418671 - DNA, 702 bp, Homo Sapiens
agcgggggtggggcgtggcggagtggccacgtgggccgcgcggagaacgcgccaggctcatcacctggagcatcgtgcctcagtttcccctcggcaaatggggcttcagcggctcgcgacgcacattggtggagcgtatgcccaggcgccggtgcaccgcaaggagcaaaacagacacagttcttggtcctagggctcacgtcccggggcgaagaggatcctccataaacgatcagccatagcagctgtgattggacaagagactgatttcagtgactttctcctgataagagaccaccgaccagcttaccatgccgaccagctgacgcgttaatagagagagatgatgcacctgcatgcctttgtgtcctgaaaagacgttttgccataaaggccctaattgtaagatgtgtaaatgttaagtctccaccccaaagtgaacatgggtcatatattacatgctttgctcaataagagggcatgtgtcaggaccaccttcatgaatattcatagctcctcctgttacctgttgaatatgtatgtttagccaatcccttcagcatagcgctcctgccccaagccctcctccttggacgtgcctgtctctggccttggctggagacagattcccagcctcagacagatggccgccaccttgcaggctacgaccgtttacaagaaataaagccttctctttttccc

SEQ ID NO: 418672 - DNA, 1238 bp, Homo Sapiens
  misc_feature (252)..(252): n is a, c, g, or t
  misc_feature (377)..(377): n is a, c, g, or t
  misc_feature (547)..(547): n is a, c, g, or t
agcggctcttgctcagtgaccgtgtggtttgcttaggcgcaaactcgcgtgaacgcgcgagccaacatgccactggccggaatctgggttagtcgcagaacttatgtgcaaccccgctggaggacccttcggagcaacatctcgtctcggacctaaaggatctgcagacgctgagtcgaggcgcagtatgtggctccttgataagcatagacgtgtagtgtctggcatgggtcatgacttctacccatggcncaacgatccgcagacgtcgcccgttgaactgcctcgacggccttgcattgaggaacgcgacccacttggccgccccttgttcggcataggccttactcccgtgctcgctgcgcgctttcgtcccngcattcgttgcgtcgctcggaatcggagttggcgaagcattgaatccttggatttacttcccttgggcctggcttagcataggaccgcatttctttcagtatgatgacagcctgtaggaacccagagtcgtttcccccgcgtagcgcgttgagttcagcagtcgctagtncgcacgcaacgctcagcgttgctcgatccccgccatgcaggccagtattcgaatggggtccggctaaccgcaggagttgtgttgaaacatttccgctgtaccttcaatttgtccaggcctggatttcccatgaagctacatcgactttcgtctctggcgcatctcccctaccggtggctttgtccgtcccgtggccgcggtgaaacgaggaacgaaattgccacagcaatgggccaaggggttggaggacttggcgagcctggaggaacggattaggaaggaacggatttaaagtcccagcgcctttgctgccccttcccgttggcagtcttgtctttgtgaatttggtcgttcagtgtttctacccgttgccctaaaacttaatagccaggggaatccaagactgtccttatttaccgatgagcatgatgaaaggatctacttctctagaaaagtcgttgggcaactccccggagcgaattaacgggggcgatgaaaccccgttgcgaagggggaggggcccccggtgtacccccacgtctttttggttgtctcccctttatctcgaccggcggtttaaccttccggagcccgtgtgggggctataacccgatatgggtcgaaaagcgttggttgctccctgcttgtgttcaaaaattgtgttcatctcgcgattcaagaacttcccgaa

SEQ ID NO: 418673 - DNA, 1138 bp, Homo Sapiens
agcggctgtttactgcgaactgggttttgccagccatcaacacacgagtgtctgtgaaatactacccctaatagagccaacaatgggcaataggaacatcatcgtcgatatcaacatctgtcgtcgattgtgcacaccgctagcattcgggggcaacacgtccaccactacctgggccactctgactctcataaatgcagcgatgtgcactctggcacaaaaagcaacctagttgaggacaagatgttcgagcaagggagtgcgtgactgagcatcgggaagaggggctcctatcaggctatggcctgagctctctgggaatcaaacctgacatagcatgcagcgtgaacgatgagtactcggccacttgaatagtctcacttgtgtgaaattggagaccgagccagtaacgtaatgtgacttatcgattaagatgttcccagggacgacagtaggacttcatcaaagaacttgattgaccgggacatctcacggctgacatgtgcctagtcctcgacttagtgggctgctgggtgatcgggtcgacattttagaacgtcgtaggtaatcgtccaatgaattgggcacgagcccgaggaagcatagcccttctaggccttacatcatgtgcggctgtgaagacaaactaagtctagtcgcgctgtgtgacacaatggcactgggatatcgcgacatggaagtcccaactcactaacaagcacgaggttggaagcaatagtgccacgggatggattttgccttaacgggaaggtgcaacgaacctttacccactttaaggcaaacgggttagggaactacagaaacccgggggaccataaggaagccattttggtgccaagtaatcttgggtagggaacatggggttcgagcgagcgctagcttggagaaggcccaaaagttggctaaacccaaatggccgcttgggtttgtccaccgtgtggaatgagtgaaaggaacaccccccggacacgggagttcgggcaaattagcgaggttggaaagccaaaaggcatgggttggagaggctctctggacactagagtaccaaaaccccagcccaaaagtgtaggtcccaaggttggaccaatgccctttggagcgcgtggcggtctccaag

SEQ ID NO: 418674 - DNA, 659 bp, Homo Sapiens
agcggggtgctggtgcctgcccggggactctggagcattgggatttgtagcgctgccctctgtgtgtagtgctgtgctgtagcggagaggcgtgcgggatcgggatgtcgtgtggctgctcactgtgaccctgtgagcaggagagcgcagtgagccgcggtaccccggcttcgtgcatggggctggatgtggtgcagttctgtgatccgcatgccacgtctatgacctgggcggcgcgggtctgcgggctccagctgtggcagaaggtaggaacacagtcttgagtcctcagaagtttggcttgggtcagaacatttgatcctgattgttacgtttgagacttcaaaggtttggtttgccggttacagtcgcacgcgaaaggcgtgtcaaagatgacttgcgaggtgagataagcagaattgacattcaaagagttgcttgggatcatatgggccgaatttgtctatagcagcaggagtgaaggcaaagcgtgtgttaattaagcgtgtgggaaaagcagagggagagagatcgacggggagaaagtgcaatatggaggcaggcaaggcgtgttgtaagtaggagggtatgggcaggagatgaacgttgtagagggaaggcctgtgttgtggacagcgtttgtggtaagggagttctac

SEQ ID NO: 418675 - DNA, 1340 bp, Homo Sapiens
  misc_feature (126)..(126): n is a, c, g, or t
agcgtcggagaagaccttcagagcaacgcgaccgcaccttctgatacaaacgagtagacatcatgctgcgacctctattcgagacgcagcactccagaccataaatccacggtgatactagaacgnatagaacgggctgagaagcacgcttcactgttctggagtaacataagcagagagttccttgtaccatgatccgatgtcaatgatagagtgagctcagtcaagataatttaggagaggcgcttaacagtgtcaactgctagatcacgtgccttctgtcctgttgtgtgaacggacacacgaatggtcagctgtctccaacattcaactgtcaggagggtgtagtgacgacgtgacgaatatgatgcaatgactgggaattgccgtagtacaatgagtctagtgctctgcccaaggatgacgttctgaggcggatgaagggtcgctcacgtgctcaaacacccggagagaaaatatgtcggtcttctatctagaaaatcgatttaaaacccatatagccacaggtacaccaagacataggggatggtcacccaagcgtgtagactccgcagtcaggcttcatgtccaactcactagagtcatggaaacaggtaggtgtttcccaggcatagggaagtgtcaggcaagattggtgtcccggtgatttccaatgcgaggaacaaaagctggaggctccaaagttgagcaaccattcccaggctatagggaaagacgtatattactctaagtggtcagaggctaggcttagttgggtcaacatttcttcaacaaggttctagacactctaaccaattactttctgccattcctcaaaagattaggcacacaatgcccataagaagcgcttcaagggtgtattgtgtaactggctccttttatcctccgcgtaagatacggggaagcctgtggtatcatattccccaggcacggttagtttgagcgactgagcttaccaggaagaagaatcccctgcaggatacctttctccgtacagcggattcacaaggaaaccccggacggcctatagctggggggcatacgcacaaaggtagtgccgtaaggtacgggtggtatgaaggaagaaaacgccaccgataaggaaaagagacctcaacggcgcctgaggcattggggaagacgggcacaacccccgcggacaaagagggccaattatagcgccaatcacacgcgatgagggccgaaaaacggcaaggggggtatacaggggaccgtggtgttagcaacaaaaggagcgcccgaaactgtcgcacaaggggtagaagggacgcccgcgaagggccgcgtgaagaagaagc

SEQ ID NO: 418676 - DNA, 811 bp, Homo Sapiens
agcggatggcaggtttacgaggaggagtgaggcctcctgccggagccccacctgcattcagcctgaggccaggccccccacctactctaactaccctgctgagaccaccccactactcacagacctgttcaagaaaaagttgtcctcagggtctctcacacactgggaaatctacttgaaatgtaaacattactttttctcatttttcataaaaggcaacaggctgatgttcatatatttctcttgaatgcggattcagtttcactcattgccctgtcttggaaatccccatgttaatgatggcttaaattaggttgatagagtcctcccttggagtccagcttggaaaatcctcactggagaggggcaggcccacttctctttttggaagatggttcctaactaaagaaacgagggaccagattgggcccctggccctgcagtgcgtcccaatttatctgacgtagaaaccgggatttggaaaataccatcctggcttttctctggacttcacaatctagagggcgaggactgtggcccagtcaccttcccacacagtgcacagtagaaactccagacatgctttgtggagtggaaacatttccagtggcttctgactctagttcctgatgtggtttaaactaatttgggcagccattggcagcagaggccaggaacagtattcaatactttcttgaacttgtgaattctcccccaaacctgatctgcatgaagctactttggaacatttgtatctgcgtaaaacttaagagacctcagtacacccaattcccctcttcaacacatgtga

SEQ ID NO: 418677 - DNA, 1152 bp, Homo Sapiens
agcgggtgggccgatgcctgagaaagcgcagatgtcggtagggaggtgacatcgccgtggacagtctgagcagctatcgataggagagaacgacgcagtcgagtggacgcgtgcacatcgctctgagtcagcgtgggctctcacctacttgcgagaaagatcgtgcgggtgctactcggctcgctctgcggctagacatgtgtgtctcattgtcactcttgctcgcgagtagtgtctattagttgagcgtggcttgggatatatccgtgccgtagccagccagattcgcgaaactaatacaacaatttccgtatgcttggaatcttcaacgacgagataaaagggtagttttcacatgtgattgcttgcgcttaacaaagaaccagggatcgcaacatattgccatatgatgtaaaccgaccactatcgagtggtattcgttcccaacgagagggccgaaattaaagcggtattcccaaatgcaagagcataagatctaggtatgccttcgcaccgactaaatggcgattgcggttaatttgctgctagggaaacgtttctaatttataggacttcatgctttgttcagtggaatacgagaccgtccttaggacacgaccttcgtctgaattcggttaatgggacttcttggggtacaatgtttggcatactttcgccctttcaaactggtcaactagagtgtttgacaccccggctaatggggctttagggaattccgttaccgtggcagaggacaaggtccactacgaggacagtgggattccagcgattttcataacgcaaggcctaggtcacggacttcgcacctttctcgtgttacacaattacaatgggtcatgggggaccatgggtaaacgaatatcaccataacccactgttgtgcgtgtttcctatttcatatgcaggcaacgtaacgcgtataccctggccttatggttggatgtgcgggcggacttggaaaaaaggaacagtgcggcggacttaccttgcctttgtcaatacacattgcccccccctattacttgagttgtctccaggtatcgagtgggtatggcagtataagtgcgtgctccgactcaccccttgtgtatagttgaccccccaagtggggcttaaattaggaaatcatag

SEQ ID NO: 418678 - DNA, 947 bp, Homo Sapiens
agcgggggcgagtctctgcggggtgggaccctgtcccaggacgcaggattggcgctgagctcgggatctctgtgtgcacctgcatcgctggtaggaggacgcccaggaaccaaggagtgaggcaggagcagccccggcatcatcactcccagtgacccaggaagggatttgtgcttttttccctgcggctctgggcactgcagagttagaggtcctggtccccggggatggagggagggggtatatcagcgggcacagagcatgtccagtgacgcacaaaccacggctgccctctggtgcgtcgggttccttgtggggggatcaccaggcaggagagagcaccaccgtcctggcaggtacaacagaccccagccagagggtggaggcggggccgcggctgcacagggggcatgtggggaattcaggtgatctgcgtggacacctcatggtggccctggccagctgtcactaaatgggcagctacggcaggccccgctggacatggcatggtggcagggtgccagagccctcggtaggaaggactgggtcacagcactaagtgaactgctgttgtctgcagagacataactgagggtgagggtccgggctgggtaatggaaggagggggaaacggctcaaagggggctagcatgggcgcagcagccactgcactggggccatgatcacagagtcattgcccagaagcatagctccgggggcactgggccatgctcgtgacttgggtgaaatgagtgaatggggtgagtgaactgagcttcacagatttccacagtgaagagaacccttagagtgtctgatccgccctccatatgcaaggcacagatctggaactggagggccaactgattccagtcctggtctgcaatcggtgacctggtgaagtattactccgcgggttcagtccttcaggaaatcgcctaacacct

SEQ ID NO: 418679 - DNA, 1129 bp, Homo Sapiens
agcgtactctctctccaccattgagccctgagttagggccaacctgtgtatcggggggcgcctgccatggctacagccaagacaatcggcctccccgtggcctctgtcttctctggcgctacgacgtcccctctggcgtcgtcagggcattcgtcgcgacctcgtggaatactcgctggggctgagcgtgcagcagccaccactcgggggagagtgataagtctcctcgcgtgcatggagcagcggctactctggtcggggatgtatagaaaagtgctgacccataactgatggtatcagcagacactgctacatcagacgtgcaatgctcctgtaaggcaaccaggggactctgaagcactagtgaggccgcaacatggtcgtagtagagatatgtgcagtagcatagagttgacctcttgcagaacccagtccactagaccttcttcaagggactgcgggtcacgtaaagggactatctagagggggatataagcatgcttcttatgctcttaacgtccagtatttatatagagcccttgtggaagtacccacgtacggaacatttctttgtccctcgtagcacttgggtgggaaagtcttgagcctagtcacccagaatttcctcccagttccctgagagaatatgtacagtgcttagcaaggcaccccaaagggctggcaacatccgaggggtgtttggtttaggccacgtgcaagcctggcctttttcaaagaatggggttagttaaccccttgcgaattaaaaaattaccaagaaatggacgtgttccatctttgtgggcccattccttgtaccctcgccctttaacggccactaaatgctcccaatcattcgaggctaatgaccttgccttgtccaggcatgttggtggcctgaggcacattgggggagaacctcatttgcttactcgtggtaacacccgtcccatgttagggaaccattgtacccccatccaaagggtatggcggcccctttcaaccactcacttggaagggcgtgtacatgaaccctgtcgttggtccactataatatgttgtccaacacttggagtggtggagacatctgcataatttctttggaccccctaataaaaaggtgatcctg

SEQ ID NO: 418680 - DNA, 1401 bp, Homo Sapiens
  misc_feature (205)..(205): n is a, c, g, or t
agcggggtgcggacacacttgtgtttcaggagcaactggataaacgtgaccgatggcgtgcctaacgcaggtgtccgaggccgtgacgtccagggctcccactgttgggattcgtgtctgcagtgcgtgcgtcccgagtctcgaggtcctcactgcatgtcattcgtacgtatttgcggactattgcgggattagttagtctctnttattgcatcgctactaaacacagactggaaactagacgtattgataccacgacaagtaccttctggggcacgttcgcgtagagactctgctctatgcaatggcattccggcccctattcgaaggtaggtcagtggcccaaagacatagtttcgtctacggaagggtaggcgagtatatggtccccaaaggcccatgtatgcacctcgcaacggtatcttggtcctttaatcccgttgcgtgttgcaccaccattgtgttggcgaaattcattcggcatgttcgggtccagaaaggaaccacgcgtcgcgactaaggtggtaattgtaattgcatccaagttcgcaattggcgtagaacgttgaacactggtttgggaacccatcgaacataggcgcaaaggccattttgggtatcaaaacccctcctactttttggaatccctttctgccgagggggaaccccacgggacattggcacagggtcacgtaacctcggttagattttcctgtggacctacgtatgcaccaaacgtaactctccataccgaacgcgaaaggttccctcggcaacgatcctcttgtgtcgattgtggagcatgtgggcaccattccccactttatgcgagggccgactttgtagaacccttggtgccagagtgttgcttgtatatcgccctacacggaactgtgggcaacctctatgcaacttacttagggggcaaacattccccatactcgtgcccctatcacatacctgttccccggatacttccacatgctcgatgcacaaaaaacctgtgcaaataaaggggcaccaaaaaaattctccctacgcgctggattctgaacttgggaattgctatgtcatatttatccagaccacccatttgtgctcttccaagttacttgggagtttggaaacgttagcttatggggcacgacaaggggaggctgagaattgtgtcaagagggggcccaagcacgcgccacttcgttggagccacgtgagccatggcatcatgtctagtgggggcgggcccctattggacactgttagccagtaagttttggaaatcgaaattccttgtggatttatcttcccttcaccttctgatatgagggatccgcacacaatggtgagcccccagttcccggtgacgaccccttgtttgctgtgttgttagtcacatcgcag

SEQ ID NO: 418681 - DNA, 1213 bp, Homo Sapiens
  misc_feature (302)..(302): n is a, c, g, or t
  misc_feature (336)..(336): n is a, c, g, or t
agcggctcttccgcgtttccccatggtgtgctgcctcgagcgctcgccgtcttcggccgctgtctctgcctctcggcactgggtctccctgccctggtgctctgtctcatgcgcggtcataggaccccggggatcgtggcctgctttgcgtgaaccgaggaccctactccttgatcgtctttgagctcgcatggcggtagtgtgcgccaggttgctgccgtcgtgtgagcagtgctcatcgtgatcccgagggttcggtgccacgtgaggtcgccgtagctgcgcttcaggcagtttccttntgggaccgtcctcgcactctcggaggttgctggngcttcagttggattctttctagtcttcagacttggctcgttgccctgtactctcgagtctcggaggcccgctagtttgcctctatagttcgcatgggttgcttgtggtgactcgaccattgctgcacgtccgtcgtttccgacgcaactcactgtttgatagccagagactatctggcaacagggcttcagttacagctgagtaaaaacccgcgagagatgagaatcagtgtgtgccaggcgagagagcctttgtgaccactatgctaactcgaactctacgtcgtgctccaacttaggttagtgcgcgtggcagccacttcccacttgaggtgacttcctcgaggcgcctagcgtaggagaggaaagcgttacacttcggcaggtggtttctgcgaaggatctccctttccattgggcccgaggcgctttgcgacgatagattatgcctctgaagggcctacagacgatagccccgttattgcggtgatcctcccgttaattttgtgcgtaggttaagcaccccccatgtttgaagggttggttgcgacttgacgcgttgggggcttcgtgttaggcgccctagtgcattggcccatgggacggtggcgaccgttccggagaacagcgcgcgcttgtcttgcgcagatatgcattcgaggttagcgcgggtcgtttgccccgtttgcacttggctatctgtggcgcgaaccacgttcgatttatgcgttctcacctttgcggccgcttatcgaagatggtccgcgtttccttggttcgcgcacgcagtcgagggtgggcccatacgtgggacaagcactgttgttggacccgctcgcggtttgggaccgaaaaccttgtggtgtgggagaccccct

SEQ ID NO: 418682 - DNA, 1704 bp, Homo Sapiens
agcgggctcgtgccgccggaagtgggaggtgccgcgcgcgggccggcgctcgacgcctccgagcgtcggctgagtacgggcagactccactaacgtgcggtcctacctgctagtgcgttctatggacagctccgatgcgagctcgtagcatgcgccgcccgctgcgcctgacaacgacccgcgcctccacatacccgggagatcttccaagcacgcactgatgcgataccgagagctcaacaccgcacactgatcctcagacaccaatggaccgtacagtagcgagccaagaaggaaagtcgtgaccaggcagtgagtgtccacctaaacggcagacatccgcgagagccgtgccgtggaacctgggtgaagccacggcgacagcgtgcgcgtacagagcctgaacaggcactgcaggtcactccccaagcaggaggctaacgcacatgtgagaaaaagtcaccaggaccgccgcccggagcagactgccagtgagcatatcaacaccgcgaaaaggcgggagagccccaccacaatcgccacgggcgcgacaccccggcggaacgcagacacctacgcaggcgacgctaccagggacgctcgccaggaagtgccgccaacagacgcacggaggcagctgcattcgagcgacaggcccaccaagagagcgtcggccaagagcaccaccaaaaccattggcagcgcaaggacatgttcagtacaacgcaggagagcctcggtcgatgcacggcgccgccaaggaaagatgtggtggaattcacacccggcggatgttatgtaaagcagaatgaacagaaggaagtcgtgcgaatggcggcagatgtctgcgtctttcgacgtgctctcgcctcgcggatctaatatgcacacagtaggctgcgagcgaactggacgacgatggtgctattgactcaggcgggaatttagtagtaccaggtttctccttcatgacactttgtttgtgtctcgtcgggttgaatgcgcggcatacggcgctgcgtgctaacgcagcacgaggaaggagagtgatgacgggccgtagccgcaacaacacagacaccgcaccactctcacggcctcctgtctctcaccaccacaggcctgcacgcacaccaataccgagcaacataacccaccacaccactcatacgacatgccattgcatcatccactaccttcctgcgactgacacaacaatgacgacaatattgacctcagtctaccagcccaacacaactgtatcggccacgccccatactccacaactatcatatcaaacgtctctacaagcagatcatcagcacgcacgcaactcatatcctcctcgcacccacccggctgtgtccacacttgtgtgccgccaccagtctggcctcaacgttcgtatcgcgcacttactaccagcgcgcgggctacctcctgcgcccagctcctccgccgaccacgccaccgtgagctgagccgcgagagacgccagtggggggtgctcggtcgctgggtctaacgtcaggtgctcacgtcgcgcgagtgcatgcccgcggagcggcgtacgccctacggtgctcccgtagggccagcgtcgacccgtacgtagccccgtcgtctcgtttgcgaccagacgtactgacccctgcgccagcagtgcgctgcgttagcggactgctgctcgtgagcgcgtgcttc

SEQ ID NO: 418683 - DNA, 1276 bp, Homo Sapiens
agcggatgtgacccgcgcaggctgccactgatcgagcacccagcgagacgaatgatacgctgatctgatgttcctcaggcccggccgagccattgaggtcttccgtatgggtgtcatgggtctcaggcgtctgcctgttgctggagttccactgttgtctgtgtaccggactcctgtccctcccctgtctcgcgtgtcatcgataccctgtcagtggctgcatgggcgtgtgtgtctggccgggagccccgagacgccggaggtcaacgaacttacgcagctcgctactcctctgtgcgctcgtctcagggaggccttctactccagaatactacagtgaatgcatgcgatatagtctacgactcatgagccaggcatgacaaatggtacagaatctggcccgattagactggaatatgctgcatggaaccccgtgcgttacatgcctcgggatggactcagacatgtcagacccctggcagtcatcccatggagctgaagtcaaccggactcgccatctccactcactgctttttgctgaggacgtcgctcgcggtgaactgcaatcttcaacagtcaaagtgtccgggacacgctcctaaagtacggtgctcatctatgattgggtttggtcatgcggcacccgcaacgattccagcaattgagtcttaaccacccacgatctataatggagcgcccgcgcattgttgtatccgaacctttgctcgcgtaaccattaacaacgctaacgaattcggttcccgagatttgggctgtggaagattcacttacatgaatatagcgaagataaaggtaagaggctcgtgactccaagttcagaagaatatggtgccgcactttaggttcccgctagccttaattcgaatttgccaggtttcccttggcgctgtgggcttcaccgtagaccggcgaagtcggggcgatagggcaaaggtccccgccaacagggggctttcaaagcccaaccggggaagtttggcttcctttgcgtttgaccctagagggtcgtggtcactggcggacttcatcgggaccttttcaaggccccggtgcgttgtggaagggccaggtttatcttccacaggaaagaggcccccccatttggtgcccattttctgatctggtaaagccactttgtcttggggcggggaccccgggtgttggcccatttggggggtcccaggggcccccttccgtgtgccgtcctcttgtgcgtttacccgcgactgtcccccacctatggctcttagccttt

SEQ ID NO: 418684 - DNA, 799 bp, Homo Sapiens
  misc_feature (84)..(96): n is a, c, g, or t
  misc_feature (454)..(650): n is a, c, g, or t
agcgaccatcattcagcaattactcttactgcttgagaccgtcattatgactgaacgaagggacaaatgcagaaatgataaccnnnnnnnnnnnnngaaactgttttaaggaaaggcaacatgaggagaagagaggagagaaaaagaaaagagctccctgcttctagtgagcaaaggccactgcccgagcttctcagcccttcatatttattggggtaacaagagcaaggaggaggaggtaacaattggtccagctgcttaattgatcacaggttccatattgttacagacaggcttcaattttggcctaatcataagaaacttttatgcagcctccaactttacattaatgataaaaaggtctagtccaacaggaaaattattagaattcctaaattatttttgcaccttaacactggagctcccaagttttacaaaaattagttgccactannnnnnnnnnnnnnnnnnnnnnnnnnnnnnnnnnnnnnnnnnnnnnnnnnnnnnnnnnnnnnnnnnnnnnnnnnnnnnnnnnnnnnnnnnnnnnnnnnnnnnnnnnnnnnnnnnnnnnnnnnnnnnnnnnnnnnnnnnnnnnnnnnnnnnnnnnnnnnnnnnnnnnnnnnnnnnnnnnnnnnnnnnnnnnnnnnnnnttggcaatattctccaagacagaccgtatgataggctgcaaaacaattctcaaatttaacgaaaatccgaattattgcaagtactctctcaaaactgcagtggaattacaatgtggaaattcactcccaaaaggaactttccaaaaccg

SEQ ID NO: 418685 - DNA, 977 bp, Homo Sapiens
agcgtagcagactctgtggggcgctatattcatgaacctaactacgaggtcctgacgcggaggcgagtaagttacgagcacagaggccgctcgtgagcaagaagtagtcttccgacctcgttctgacgcgcagctcttgcgttgcctcgggcctgcgtgtgtgtccgcatgtgactctaagatggaggcgcgatcagtgcctgcctcggatcgagctctcgagagccaatggtagttcggcgaagggacttgtggtccggcctgtgtggactccgcgcggttcgtacccgtcccaggggtgtccgagactctcgcgccagattagccggtgaaaggcttgcgatgatgtacgggctgtcatgtcgctcctcacgacatctagtaggagcggccctcaacggtctatgctctcgtacgcagctgtagacagaggcccttgatttcgcatattcggaggacgacctgcgtgagcaggtttccttgggaagacgtacctgttccacccttgagaccttcgtctcttctaaccttcgccactggggggatcccacaggcatgttatgctcttgcctctattgcctacgtagtaagtccatgacacaatcattccagatctgatagttaggcattgatcttcccattctattgtcatcatatgctaataaaatcatcacataatcgctatagagtaaattgaaaacataatttgcaatgaacatcatttggtcctgcaatttggcctgaaacaatatggactattgtacaggaaacaaaccaggcgagggcaaagggaataactgaaggcccgtacttggtgacagaaatgggcgagggcctcccaaagcagtactcacatgttattgcacttcctttaccttcgcgaccagtaccacaagggatctttcaaggaaggcccccaattgcgggaagacccactactaagtgtttattttggaccggagccttgggtaccatca

SEQ ID NO: 418686 - DNA, 950 bp, Homo Sapiens
  misc_feature (758)..(758): n is a, c, g, or t
agcgggggatctggcgatctgtccgcaagcacgaccatcccgggtgttttgagtgtctctgctggagccgactcctatggcatgccgggcaccttcgttgatgcctcggagtcccccatcggcactagggtggtccttccgatgcggcctcggacctcctgcctccccgcacatcctcgttgcggccatcggtctctgggcctgtgctccgtttgcgtgctctggccacctccttgtgccggtctctggtgctcctcattgtctcttctgcactagttcctgttctgctatccgtgacactctgatgcgggaaggcgcaacaaggcaaggatggactccagcgtccgcctgtcccaggctccactgcttcaggcactggtgaactgcgcgcttggcggcgagtagcttacaagtggtatatataggtcgatacgtctagaaaggataggaagggcatgcattagagaaggaccctacgacaacgcgatttctcagagagtcccaggagacgatgcaacgtgtcgcgacaaggaaccaaattgccttttgcagggacatcttgcgtagcggaccctagacgacgctaacgtacaccgtgaagtagtcttagtgggaactctgcgcattccgttcgcgacgcgaaggcataggctttgaagtcgtgtgccagtatgctttgcctatattgctagagtagtgggaatcttggtggcaatgccttgtagtggatccatggggctcgtgtggtcccactccgngtgtaccccccgtaagttggttggccgtgcgcttcgtcccccttagtcatagaacgcttaggaccagataccaaggcaggcggacgagggacgggatgcacaccatagtgcttggcaattttcccggtcccgaaacaggcttgaaaaccgctttcaacgtataggcgcggaggaccctgtacgactgacgcc

SEQ ID NO: 418687 - DNA, 1356 bp, Homo Sapiens
  misc_feature (652)..(652): n is a, c, g, or t
agcgggccctctttccgtgcttgccctgtgtggtactgtagctgtagctctatctcggcgcagcttgctgtctgcgactgactgcctcgagaacatgtcttcacgaagttgctcgcgttgcgcgccctgccccccaacgttcaaagaactccagcgtggtactgcccagatggctcaggtagccccagcaagtcatcagactctgcttctgactgacgagtccgcaagagattatgtgagtagttctgtcatgtaacaccctccttcgtagctctccaacatctgctgtagcgcccctagcgagcagatctcttggcatgttcccgtggaggtacgaggacaacgtacaagaaattgtaaacgggaagagcactccaagctgccacacgcatggagtgtgagctgactgtctgtgtctgcgcatctcgtctagcgtatctatggatcacctgcgtaccgagtgtgtggctcgacgtcagcgaccataaacgacaaccagaaggtcaggggatctggggcacccacgaatgacggccacttgcacctattgagtgaattccagggacctcccgggaaacggcggcgagcaccatttgtggacgtgcacagggaatcccatgaaggcgttcccttcaatacgggctcgtcctangagacgtgccagtgcattcggctttgccaatggcgaggcgcgtgtaatgtgaatacgattggggactagacttaaccgggcttattacttgaccgggggcacggatcactcgtgtgtaagattggaaactttcccgccgtggtcgggacccgcgttcgtgcccgggaattgcaagcccctttcttggccggactgaggttctccatggggccccttgcccaacggccttctttcccttggaacccaattccaactccggggggtaccttgttcgattggcccccatgggttcgtgcctccgagtagccaacgcttcgtgccacgttggaatttaagccctatttccaaaggcccttgggaatttgtacgcgagaccattgttgtgcctagcatggccctctccgttgccttcccatagcgctcgggaaacgttgttcgtccgcctggggggccttcgtatgttggaagctcgctctcagtggccttgtgggtgctggtgcggccttggcccattggacgaagtccgattggcgctcttccttagcatcgttgggctggacctgggctttgggcccccgtctcaatggatatccagcacgcggcacgacttgaccgttccacggacttcttcccggggcctgtggacctctaggtggggacgttccgtttacacaagggcgcgagcctctctttttcccctaaag

SEQ ID NO: 418688 - DNA, 1199 bp, Homo Sapiens
  misc_feature (294)..(294): n is a, c, g, or t
  misc_feature (462)..(462): n is a, c, g, or t
  misc_feature (510)..(510): n is a, c, g, or t
  misc_feature (575)..(575): n is a, c, g, or t
agcggctctaccagggccggcatgccgaagattgcaggacgtgcaggtaccgtggctgcttgactggtcgatgggccaccttcctggtttcccgtcctgctcggacatccctgcgctaaagcagtgctactgctagggtccagagaaaggttggctcgtgatacggatcgactcgctgtacacgagcactcgagtcatattctcgagcaatctttctcatcaggaatacaaagttcgagaggctattcgcattgtgccattatccgtcgcgggcgagaagccgtgcagttgcangcgacccgagagcctctttccgccgtaggagacccccgtaacgcgaacgtgtcgcggggggccccgcctaggtcgcagccattcttttcatggggcagcgaaccagctgcgtaggggttgattgtcgttgccccgctctagggggtccgctagacggttgcttgaaanaggccccttaacgagagcgaaccttctcttggcactctattctagagngagctcggtccttggtgctctcgacgcagagctattgcgacttggatagagatatagcccagagncaagtcggtacaagctcctaccctagagttaggcaaataagaattgctacacagaagagacagcgcccatgtaatcccaactatccggtgaacagaacgaatagcgacgcggcattggagggacttagccggagaaacgacgggccctgaggaaaagaagcagctgtgcacgacacgacaactagtttgaacacgaatcatggccaagaaggctaccctcgagagcaacactcaatgcggcaactcccctgaggtacttgcaggcctcgcatatccctgcctcttggtctcaatatacgttacagttgccgatttcgtgcattgggccctattctcctacgcggttaggtctgcgcccgtggcaagttgtagccggagaaccccccttgggggctggcaggccggctgcaccagagggtgttcccgaaccagcgggccagaggcccatgcgcgtgaacaataacgcaaagagtctgtggtgaggccacggggacacgcggggttcccctacggacccactggatccttcccgcgtaaagccttgagcggttgcaaagtgcccctaccgcaggaagagttttcttcccagggttggttcgctttaacaaccaatgtaacgccata

SEQ ID NO: 418689 - DNA, 1527 bp, Homo Sapiens
  misc_feature (395)..(395): n is a, c, g, or t
agcgggttttccggcaagatgagctggtgttgattgactcccagatggctgccttcccggtcccccgagcactcggctccccgcgcgcgtctcctggccgtcggtagacgcagctgttcggacgttgtaggagaccgcgctgtacctaacgacttctgcgcctgacatgagcactgaccctggtcactaaagaccgagtgccgcactcgagcgattgcacatgtctcgtggcgagaaatccccagggggcatgagcactgtagcgtaccgacgagttgcactgtcgttccactgtcataacaaggcgctacccttccagcggtagagacagttacgggtactgtgtccgtgaggagtcgtagtagtacccagtctcggctacgcatgcggcgacnccccttgcagtcctctcgggtgtcgctggtggccgctatgttgtgtgcttgcagctgagcacataccgccccctaccgaggacgccttcgcggggagcgcatctcggccgtacgtggtgctctgtaggcctttgagaccccgatcaagattgattgcaagttgacgcccggtagggccggtttttaccctctacagcacatcccgtgtccctttgccttcatttggccggcacatcgccctcttaatcatccgatcagcatcgcaagagacccctgggacttgcgcagtctccgggactgtgcgcgcgtgcgccccgccgtggggggaccagggcctttgtgcaagctgccccttgcccgtgagctacgtgcccgatctcttcctgatgtcattgggccccgacattgcgcaccgcattcggccgcccgttgacatgtgccgtccttgacaggcccgagaattggcaaggggacccctgcgcatgggaatgggggtttgctccccccccgtcgaaccccagggccgtcccgcccctaggcttggcccttggagggatcggggctccttggcgtgcagccgcccgttgggaatgcaaggggcctttcgtaggcacggcatttggccttcccattgattggttcctcttccccggctggttttaggttgggccttggaacttgaatgttgctgccttcccgccagctcattccctgcgttgcgaccaaattgggggccagggcgggttcctggcccggcgggtttcgccccaggtggggccgggtttggcggaccggaccgacatgcatggcgccctgtgcttgaaccgaagcggcgcgtaccatgcagccggatttttttggcgcttggcccctgtggagcgcccagtttgggtttcaccatgcgttctccgtttgttaccccgcttgtcccttggatgccgttgagggcgacctgcgcgccctgtaagggtgtatcaccatccagacctggccccttttgtcgctttccttcgaagggggagtagtcccatcaagggattctcgggcccccggtctatcctttggttcgtacgagcgggccaaggtgggatcgaggaattagaacgcgcctcgagtggattattaacactcc

SEQ ID NO: 418690 - DNA, 986 bp, Homo Sapiens
  misc_feature (371)..(371): n is a, c, g, or t
  misc_feature (397)..(397): n is a, c, g, or t
  misc_feature (403)..(403): n is a, c, g, or t
  misc_feature (590)..(590): n is a, c, g, or t
agcggattatgtcacaaccagatacagtttagcaaacggtgcacgtgacagaacgtcgtcggcacagacactgtccgtgcaatgcgcctgagctccagaattctacgctacacggaatgcactgtgcaacatgctgcaattcgcattgatacgattcacctggcgtacatagaggattcgcgttgactcgaagacgacagacacagtggtaccttgtgcttcacaagcactccaggaaggttcatgcgagagcaggtcacgtctgagtccctcgcgaagcgagcgagcctattgtccctaatcaattgtgcaacgagatcagcaattgctagctccatttcacgcagttgtatcgcacctgaacctacttncgttaatgggagagagcagcgcattntggcanttcattgcgagctatccctcacgttgcattggcttgcgtctccccgtagcactaagcaaggcgccctaggcatctatttctccccaatctaagataagcgtatgcattacaccgttttacattctgaaattgaccataggctagtgaagatagcaattgaccgcctttgaaaagacccacacccagncgagtattggatatgaatggccccagtgaaggttgattatgcatcgttatcaaacaacaggtactctaggcgaaatagacacggtacacgcaagagttgaactgcacgccctggacatagattattcaattcgcagcctcgtgtgcaagcaagagcaggaagctgccttgatactgttctacttcgcaattgatgcgatttgaactctatagatggagaaacccataggactctcttcgtgggctttgcaaagcccatgacttcgcggcatctttcctcttggaatttgatgtcccgcagaaatgggcgaatgaggtttgccaacatcctagttggcctgattccaatccctcgaggctatttttgccatgattccgtcaggctgatactggaacc

SEQ ID NO: 418691 - DNA, 1610 bp, Homo Sapiens
  misc_feature (961)..(1023): n is a, c, g, or t
agcggagtgggagcgcgcgtgcccgcagagacgtgacagaacatgggacagaaggagcactgaactagtgacagcagccggcactgaagagtagtgatcactagaactgctacacggagacgagatagacagcgatcatgaaatgtcatacatgagcaacaccatgactggacgtgctgagttcgggatgaaacgcgctcagaccggtgagaggactgtcgggaagaacatgataggtaaccttgagatatcacagcgagagataaagtaaatggacccacgatagacttacgggcgcaggataagacataagtccgacgacactaactagaggtaccaaacacgtaaacttaacattctaaacatgtaaaaacaaaacacaacaagataccaatgagctaagcaaaatacagtttgcgcaacatgacatagaaatataggaggtacaaacattgaagagacaacaccaggggccaatccaggtgcaccacaaattagtccccaatattgagcggacgataccggaaagtgcaaccgttaagaaccattacctacgccttccaacccactgtttacacacccaactgaaagaaaaccaccaaaacaggtttcaacacactaagacaccaaagactttacatacttcaccccgcgaattatataacaaacctaacttatgactgcaaaccatacaacattactaccaccaaactaaatcgcgacgcgccaaaaacagataaaacgctcaaccttaacctatcaccttaaacaccataaacaaccatatacatactctcgacaaacatactgagaaaaaagataacactatctacacacacaatcactaccaccccacaaacagggaaaaaccacaccaaagcccatatagccaatctatctacaccctaaaaacacacaataaaaacacccaatattataacaaaaaccgcattaacaaatnnnnnnnnnnnnnnnnnnnnnnnnnnnnnnnnnnnnnnnnnnnnnnnnnnnnnnnnnnnnnnnttcacaactacaacataacactatcataaaacctaaataactaaaactaatataatgggacccaactcaaaaccaacaccccacaatttcccactaaacaaaaagagaaacacacgacaacaacagaacaaaaccaattaaacaatatataacaaagcaaatggcagacaccacctccaccacctatgtagattacaaattttcaacatacactaacatcgaaaccaccacacatttgcaccaaaaaccaccacacccctatatcacaacccgcagttactaaatgacaccacatatatagttgtcataccacccatactcacaacaaaaaccctaataccatccaaatcacaatacacataacaaacactaccactccattagtcagaccaaccaaccccaaacatcaaacaacagcaatatacacaacatacacccacaccgcaattaaaatttcttccaaacatattaaccatcattacactaataacatcctatacatcaacagagaacatctacatcacataactatcccgccagcaacacgcaacacatacattctacagcattatactatttcatccaac

SEQ ID NO: 418692 - DNA, 635 bp, Homo Sapiens
agcggcgacgacgaaacaagaataggatgagttctcagttacctactttattcttcaaatagcccttattcagcacatctttcttgtttgttgtagaatggagagcagtttattacatttgataatccttgaaagcattaatttgcttggagggtacccagggagtagagttcaagcagtatgaagagtgaagaatattcattctggtagagtttagtgacagactaagcttatattaataacggttctatattatagaagaatactactgctggagtatggcagtatattaggtttctccagagaagcaaggccaatagggtgtgtgtgtgtagagattgactggttgattgatgtttgaggaattggctcatgctattgtgaaggcttgcaagttcaaaatctgtagggtaggctgacaggccggggacctggggaagaggtgatgttgcatctcaagtccaaacgcagtcttttggcagaattctatcttacttgggaaatcagtcttttctttttctcttaaggtcttcaactgatagaataaggcccgcccacattataacagatacattgactttactcctgagtctgctgacttaacatgtcacttgtatctgaagaaatatctttca

SEQ ID NO: 418693 - DNA, 1248 bp, Homo Sapiens
  misc_feature (254)..(254): n is a, c, g, or t
  misc_feature (458)..(458): n is a, c, g, or t
agcggacggtaggcgtccgtgctcgcttcgctagtcggtctgaagcggtggccagagcaacagtcaagggcacgtacgcatccaggacaatgccgtgtgtctaggtacaatcctcggagaaaatggttcggcacttgaaccattagtatcgactgcgttgaccaactccaagagtgcgtgaacagtccttgactaagatggcattggtcggatgccaatgcattacgcacaaacagaatgggcatacgaatgtngctaccgatggaaatcggtgtcatatctcgaggtgccgacgcacatatgaggctgcatatgcactatgagactactcgattcgaatgtgtctggtaggaaagcctgggtgtatagctttttcggtgccatgcaaaatagcggaatagacgcaccgttcgaccacgagttatccaactacagaggacaggacgaagtccgcccgntactcaaagccttgcaatagactagggagccggaatatactggtagcgacccctcgatcctaacccgtcaagctcgaacaaggtctcgagcataaggggcggggtcgatgcccactcaagggccccttgggaaagacaaggaacgctagggcgtgcgctctagatttggtcataggaaggggcgatagaccttttattacaccgtgaggtctcgtccttgctttcgtccgccaacgctcgggtaatagcggggtaaggttgttctaccccgatctagtataatcccggtcccctgttgtgtgtcttagaatagagattgctagtagacacgacactcatacattcggacttttcgcgtgcccatttccccgtgatatccaacttcaactcgaccaaaatagggccacattcacattataacaaacacctattccttcaacacagtgggcggtcttttagggcaaatccccccgtggtcgccgtcttcaaaagcggggctccaattagcacctcctctggtagtccagacacagtggtgggggggtcaacccccccggtggggcacccaagggggacgtttccaagtgggaaccccccactcatatgaaagccaaagaagaggcgcgggattaccaacctttgcgcagagcccccttatggcagacggaacaacgtccgagaagtgggccatcccacgtgctctggtcggcacacacacgtgtggttggggaccagattggaaggtgggaccccgccgggtgcgaccaacaattccccacgaacaccatct

SEQ ID NO: 418694 - DNA, 1422 bp, Homo Sapiens
agcgggctggtcccggggtcccggctgtgcgtgtgatgtgtgaacaacctgcgccggcgcgtcgagcccgaacggagcacccgagtactacgcaagatctacatgggtgcgatcgagacgtgcgaagggacatcgcgaactagaccaaccagaagacatgccccatatcgatgcgcaaccgagacaggaatatccgacagttgatctgacggtgtgcttttgccgtccgatgtcctggtgccccagtgggactgtgacgacagcactcgtcggactccttcgcctgcgacaggtgtcggccagattcgtcacccggactcggggggctggcgcctagaaggactcaggggtggactgcccggcttgaaggtggcgtgatgcgcggccaggcttggtgctcagaggacggtctgccagaagattgtgacagcgtcagcgtcagaggaccacgaggaccgagaggaccggggtggacaaagggtggccgaggaggcccgtgagccagggatgcccgggggctgtgacgcgtcacattgctgggtacgcgacctgggggagagcgggggactctgaggggtcattaaacccaatagaggacgtcctacgagggccgacgactgaggaaggggggacggactcttgaccggaaagggccacgacatcgagtcgcaagttgccgttggaggctcgtcagtgccacaagccaatgggacgcacgaggggggcaataccaggcgtgtgggctagacattgcactagtgtgagattggctccgtggcggtactctttggaaaaatcattgccgcaacattgttccctcgaaagtaaaggcatacgccacgtttcctaggtggtgagatgatccatagctttgtaacgacgaagtcacttttatttcctccttccggcggttctgaggaccccattggttcacccagggggagagtagagcccaatgttcataccttttctcctctcaggctcctaacactggcatctgccctccctccacgtaggcggcgactcacaagttccttgtacgtatacgcagtgaccgaaagacattgcggcattggggaccctgggatactatacacggcgggatggcgcttaacacgaagggtggccaacccaagaggtaaggacgctgggagggagggcccctacaaggaacgtgaagggacgctcgccactgtaagaagcaaacgtgagcggtgtgacactggtgacaccaacaccgagggactatatctacacccatagtagcatacgagaggacaagagggagacagattacccgggaagaacacaaaagatacagtgacccctgcagagtacccgcagatgccagatggacagatgtggcagtgaaatggacctggcaggcaagctaggcggaggccaccacagcaagtgcggccc

SEQ ID NO: 418695 - DNA, 690 bp, Homo Sapiens
  misc_feature (62)..(467): n is a, c, g, or t
gtgtatagaggtgggtggggaaaatgtagagtgaagggccataagggaactttttgcagtgnnnnnnnnnnnnnnnnnnnnnnnnnnnnnnnnnnnnnnnnnnnnnnnnnnnnnnnnnnnnnnnnnnnnnnnnnnnnnnnnnnnnnnnnnnnnnnnnnnnnnnnnnnnnnnnnnnnnnnnnnnnnnnnnnnnnnnnnnnnnnnnnnnnnnnnnnnnnnnnnnnnnnnnnnnnnnnnnnnnnnnnnnnnnnnnnnnnnnnnnnnnnnnnnnnnnnnnnnnnnnnnnnnnnnnnnnnnnnnnnnnnnnnnnnnnnnnnnnnnnnnnnnnnnnnnnnnnnnnnnnnnnnnnnnnnnnnnnnnnnnnnnnnnnnnnnnnnnnnnnnnnnnnnnnnnnnnnnnnnnnnnnnnnnnnnnnnnnnnnnnnnnnnnnnnnnnnnnnnnnnnnnnnnnnnnnnnnnnnnnnnnnnngacagaaaaactaataccaaagccatagaattccagacaccaataaaggggccaggaacaccttacgaagagggaggcccagaaaaaccagcataaggaacaccatagaggggaaggggataacatatcacgaagcattgtgcggctaggcgagggggcacataagcgaggaacccgtgggtgaaagatggcaaagccgcgacacaaaaagaccagcgaaaaa

SEQ ID NO: 418696 - DNA, 1300 bp, Homo Sapiens
  misc_feature (286)..(286): n is a, c, g, or t
  misc_feature (1182)..(1182): n is a, c, g, or t
agcgggctgcctaccttgaaactcagagcattcggtcccgacatgtatcgctcccgtagacctaagctgtgctgcgctcgtcctctctcattgctgggcctcgccaaggatttcccacgaactgcaactactcaacaacgattcggcagtcctatccgtcactgggtcgacttccagcgaaagcaggttgggcctctcggcatctccctagaagtatgctagtagtgtctggcgtgacagtgccatccggaacctccgaagagtgtgactcatttgacagcacatnggctcagacgaatgcgtagtacataggtgcgcagcagtgtcatacgtgtgttcgttgccagtcacccggaactcgcgtcgttgtcgtgattctctctaggtaacataacgtcatagtgattgcatcgcaccgcatcttgcacaaaatgatgcattttgtccttcggtgttgcatcctatgctcgagttaagctacattatgcccacaagtactttgcttgaacatggcgactcgatgaactgtaggtaacgctaggtagtcatgtggtctggctagagatccgacttccaggattttagagaattggcctggaattcccaaaattcatgctttggcttggcttgtggaaactagtctgaatatatgcgtctatacaccttaccacttgtagtgcccccagagatgctaggggttataatccactgtttaacatgggaccatgaatcgtttctttagtaaattctaacgttgtggagttgcttgtctcccatggtttttgacatgtagtccttgaagcagtgttggcttccaccaggtagctcttaaagagaaagggttgggcaaaccttaagcaaggttggggggagccagaagaaattcctccttttattcccaaacaattcaagccatctttggggcgccagattttggaacccttcctttcaaatcctccttggcacctcccaacgcttgttgcacgcattaaggttaaaaggcggttgcccttaaaggtttaactttctcaagttttaccttaacctccctgcttaacgacaattgtgggggggaacacaattttaaggaacaactacttactttgacgccggcattaaattgggacacactttgttcgataacgtgaacttgaaaaccctttttgtcccttcttatcaggnttccgtaatcttaaccttccttatataccttttgggttaagcgttagggccgggtggtgggtaacacccggcgaatatttggttcccccagtttacttaagtcctaaagctgcgaaaa

SEQ ID NO: 418697 - DNA, 620 bp, Homo Sapiens
agcgagttcagtctcgatgttcccttccggaccctcgcagctgaacacgaacggctacgcgtccgagtctgccatcatgggatgttctctgcagatagctgaatggacaccttatgccattacataccttttttgcaactactgctgagtgtatcattactactctcgcaataagtgtgttcaactcacccatgatcattgttcggtgccctgatcatgatctatatgtaggcgtgaaggtatgtcactcgcttgccacatgattagtcccacgaatacatgtgacttttcagagtaaaatgttggcggtcggtccgagacattcccactaagaggcttcctaaggtcatcttgtctcagccgaaagattgaacaagaaccttgtgcacaccagatacgtatgcgatagtaggtaggcccagatagagcttcctgatgggcgagaaaggtcttgataaatgtcgcttgttcaatacttttgaggagaattgcctggacccataaagattggctaccaacagtcaggggattgctggagagccttgaacttgtccattcagctggcccgatacgaagacagtgccctgaaaaacctacgatgaaagctagcctgtggttgg

SEQ ID NO: 418698 - DNA, 1383 bp, Homo Sapiens
agcggattgtcctgcagcgtgcctgggatctggcgcctcgtccggctggagtgcgatgcgcaggctcgcagtccgccagcgtactgagcgctgcagatgacacgcgcggtgcatgtatctccgtgcgcatgatggcggtcgtcacgactctctgcggctgcatgcgtctgcacacgcgtccttcctgcatgtcgtgagaggctacagtacgatgatcgccggcacggtgtcgcatgccgtgtgcgtgggacgctggcttgaggtctcatgtcgcagcatcctcgatattgggtgctaatacaccaggtgccatgaggaagtagtgaatcccttgcctgttgcttcgaactcgtggcgctgggatggacgaagtgcattcgaattgcacggccttggtacgctcagttttcattgtactttttgcggtcgggcctatatgacttctcacgagcaaagcctgtgggtatccaggaactcgaatttggctgcagccatccaagattgtaaagcggcatacgtcacgggatgagtccatgcgctggatcctttccgctggcttatggttactttcccctttgtgtcctttgtctgcggttttcgggctggcgcgtcgtgcctccttttcgccttgatatttgccctgcgcgtcttcaggtttcccttgtgcctgggggtttggtgaagtgcaacgagtctcttcacattaggttgtgtggatttgggttcagctccttttaataatcacggcccacacggaggttcccccctttggttaccctctgcgtcgtccgacgaattcaattgggggccctattgcatcttttgcaagatacttgagagggcaaatctttcactatatccttctctgttatcaattcggtgactcgggtccacgtttgtacaccgcgagatcatttgtgttccctcctgtcagcacacattgttacactggatagcctacgttgaaggtcgctacaccgatggggtcacattgtacctgtgatttggtctgacacaagtgttgttagatacagtttcctatcccctataaagttccctacccctcgggggaaggtttggaccggcaaaattgggctgtggtcgcagagtgtaagtagcccgggcgaaaatgggggcaccagatgcgaattggcgctatggccaccttgtgttagatcaccccatttgtgttgggtacccgtgtcattttcatgtcgactctgtgttgacgctttggaaggtattcgccttttgatttgcggcgaaccccattatggttgcactgtcgtttccacctgtgctaaatgtcgttatccggtcgtaaagaacagtgttcgcgtgcaacactggcgagccctctgtgaacctcgcattccacgcatt

SEQ ID NO: 418699 - DNA, 1186 bp, Homo Sapiens
agcggtgttgctttcctcccacccggatctaggcgcgcaggggccaagcagggacgcagcccagtggctccagccacgccgtcctgcccccttctgcagaaactgatgctctgagaggccaagcagtttgcccaagattacacagtcatagccgtgcctgggagaaccttctcttcaactctgccgcaccactgtcaagctcacctttcttctaaggttttattttagagttaacatcctccaaaaagccttcctcaggagttgaaggtgcccctaatatcacagccatggcatcctgtacactggaccttattgtctgtctgcctgttgtaccttgtatgagtctataagcaaaacctataagaagccacatctggctattctatgtactcaaaaaataattggcaagtgaaagaatgaggaaaaggagaaaaaattcagaaggcccctaccccttccaatgggtcaagtcaggaatttcctacctgcatgtgattccctgtgtcctagagggtttatttactcctcagaccttggaaactgttaaccagagtctctgtttggagatcttatctgtgtgcttctccatgggtgttgtttccctgtctctgcagccatgcattcctcagctctttaagtggtggagcctgttctgcctggatagagtgccaaagctacagttgttatctgctttctttcagggccactgacccagaaggcacattaaacacttggacttgattgggggctctcgtgaatgtaggacccagccagtgggccctcttaggttccttctaatgttctaacatccctttatctgacattgctagctgaatcagaggccccacaggttcacactgagggcttatcttcccagggctggaagcttccaagagatacatgccacgaatccccctggggttccaaattggcctgtgtcccacgcacttgggagctactcgcgagccggccaacattaccacatttataccagcgctagtatgtttttttcaacaaccacaactattttaccttgccccagtatgaaagctcacacggccttttatcacatgggcactacaccatgggcggaagaaacctcatatagctctatggtatatctcgccagacagtactctgctgatggtagtcgacaccgtagggacatcaggcgccaatacaagcg

SEQ ID NO: 418700 - DNA, 1311 bp, Homo Sapiens
agcgggtttcgcggcgtaggtcactgtgacggtcagagcttccttaagatgccatcctaacggtctcctcgtcatcgcctggcagcatcgcatctcgcgtacgctgcgtacgcccagctcgcaagggaagaagttgacataggcttccgaagcaccgagcagtaggcgaaactaactagatactgagacgcaacacccgtttctaagaacgtgtgtagatgatgcacgggacggcgactataggaagcattgctcattcgtgtggtagatgctcggggactgaacagggaaattaaagataactatgcaaagaggtcaaagtgttcagattgcatgcagttgcataaaccggtcgaccctgggaactggtctgtaaccaaagccggtagagggtaattgcgccttgatactagaccagcgatgagaaccctctaaattaacttccacggcatttaaaagaagtgaggcaccactgtctatacacggcacgtgacttccaggcaagacatcgtaggcgtacggtccaagtaggccgtgccaatttcccatacttggtactaacgtcagtcaaaagactggaaggtggttactccacaaatatatacaaaaggagtcctagactgcaaattctaaagattcctacgttgattgaatgtcccgtgtgtgagttaggaaacttgcttggcaagaatttgttgaagcgcccgtgtaaaagacaccttgcaacagggaatatccagatgctatgcatgacctgtctatcctgtattgagaggcgttggaagcaacccagagtatataactccatggcggccctaaggagcacaaattcacccaacgagtatgtgcggtggatccttcctccaaggaacactcaatagacaaataatatcccctagaagcaagccatgtgtagcggagctccaatgcctaaagctttcaatgccagacacataagtatgggtgccccatttcacataaggagaaacgaaagtaacgggcttggtacttacttcgcaaggctagtccgcatgaaagcgtaatgaacatcgtaaaaagacattcgccgatgtaatttggctatagccttagatacaccatatgtcaattgagagacattggagtgccccattggggcaattggcacaatatctcatgtgacccaggtggagtatgtaacagaagcctttcatttctacaagtagccccgagcatagctgaatccacctacaagagagcttggtagtataatccaccaacacactatgaaactatgtgtaaaacacagagcaagagcgtagtttacaagaa

SEQ ID NO: 418701 - DNA, 1048 bp, Homo Sapiens
  misc_feature (88)..(101): n is a, c, g, or t
  misc_feature (253)..(261): n is a, c, g, or t
agcggcatagcatttgtatgcactttatactttgcagaggtgagttaaattattaatcatttgcacatgaaagctgtggggcatatcnnnnnnnnnnnnnnaggtgaggaagttatgctacgactctaattaattccacgattctattgaaagttgaggaatgctgttttacccctgcgcattataaagaaaactagaattactttagtcttcagattttctccctgttaattctgtatcttgagaggtttcnnnnnnnnnatattttacttccattttctgtgcaaagtgcatcctttggcatttaaaatggtcccaaggtaaagccctgttggcaaaaccgtggtactttaccttaccagaggaaattaccttagaataagatgtgagaccccagttccccttaaagacaaagaccttgaaattcacacttgggagtcagttatacctattcaatcacagtcctgggatataagaaaggcccttagactctctgtgttaaccctgtaggcttttaatataaatagggtggcattggctcatggcattatacccttctgggcctggaattagacggagtctcaatttcaatgcgtatcttgtgaccacttccagccacagggtacataacttcgagacttaatttgcaaccaggtcacatttaaggctgaaatggggctacgctgaaaatctccggtgtgattgaaaaccccgaggggcggtatttccaagtttctcaaatatattggccagggtgctaacttattaagtaatattcgcgatattgtgcctgaaaattttaagacctatgcgcatttttccctttttaaaggggcccgttatagttgctaagtacatacagtggcaaagtttgggaaatacgtagtgtgtgaaaaaattttctctgtgaaaagaccacgccctagatttacaattagagcacaccgtataattattcccccaatttatacgggtgatcataagcatgtatatacatgtcctggaattaacaaaccattgtgtgtgtactggcacatttagaaacgcg

SEQ ID NO: 418702 - DNA, 898 bp, Homo Sapiens
agcggatctttgatgagggcagagctcacgttgcattgaagactaaacctcggtgaggctcgaggcgctgtctgtatccttccgctccctgctcggcggatccagccatcgagttgcaagatgcagaggcccggtagaacgacaagcctcccgaaaagcccaggtcagagagccaaagccgtcacgtgacgcctccaagacccaggctgcccgagtcgactctccgcgagacgctagccaatgtgccgcaaagacggcaggacagatgcgtcgaattgacgctgggaggaagcactgcagtcgtagagcgcgcctgagagccagcctcggagctagtgatgcagatgcggctgtgcagaagagcacacctgtgcgtagatgctgacgaaactgaggttggcaaagaacgcagctaaatgagaatgccatgggtgattcacgcggacattgtggttctacttggttgggccctgaaaagcaaggtagatacaaagcttggacatcggcacttagagggcaaggggcagtgcgtatcctaacagtctaacctcaacgtgaccactgtaaagacgcaaagctaggagacatagcgaagtctttgactgggagccgtcaggaacagaattctggcgaggctgtatagatagtgtggtccgcttgtaacaaagctttgcaatccaacgtagatgctttaacaattccatagccttggggcatgatagtcaaggaacgcgacgttgtgtggtccaatgccaagaccctggacttcgatgttagatgcgcacagaaccgagtgatgcacgatgcgccatacagtggcaaggcattcatgcctgcagggttatacaaatttgatttgcctcgaagaaaaacttgaacatgggagtggaaaacacct

SEQ ID NO: 418703 - DNA, 1168 bp, Homo Sapiens
agcggattcattgatctgcggtaacccgggctgttaagaacaggatggcccgcgcgtggtcggtgaaggcgaggcgcgccggatgctgctgttcggcggcaagggctctctgtgttctcgatgtcgctgccaggacttcctcgggacccgtcaactgggtgagtgcttagcccatgcgtgattgcttcggtgggaggaactgatagagggtcgcagtgcctcatgcaagttctactttgttcagaagtgactatgaactcgtctactactgagctaggcctgagccatagtgactgcttgaggactgaacttcagcacttcgcgtggcagcgagccagcttagagattacctaggatgtggaacagcattgcgcaatggacgttgcgtattcacatggggaaaataaccgtagcacgatgcgtccgatgggatagcccttaagtccagcgctgggtatggcagctgaagtggaagggaatgggatatgtcatccccagcatatttcctgagcgtccctagagtctccaaagtgcccctaatgtaacgtgggcccttgaccagtacaagagatctacgtaaaaacgcgagttcattcaaggtgatgggccctttggttccacaagcccccttggtgatatattcttgttagagccaccctggtagggttggaatgtactgaagaattaattgaagcaccgtaatgggttctactggcttcgactatatacataatcgccacttctatgccttccacgcgttaggtaactagtcgctgaactaactagttcctactggctagaaaaggttatctgggaacattgacgttaggaccgtttggatggcgccccttggcaaaaacacttaggggcattcctcaggtgggaaatccgtggtggggtttgaaaacttggccaattatacgcgaggaacgtgcggctcttcctagcacgagttagtgatgcaaccctgtggtcttcactaaggccgaggtaggtacagctctcgtttttggggagtgtccgcccattgtaaggtagaagcttgggtttgcaagttgccttgtcgccccttttggaacccgactggggcatacgatcagaagtcttctggaagcgtaactatagtggtgtaggcattcacagcgagagttggttacgaggagaacag

SEQ ID NO: 418704 - DNA, 884 bp, Homo Sapiens
agcggcctggcgatggtgaggccgcgccaatgagtatgctcaggcgtgcagaatcaggctcgcctctagtgtcctccgatgtggggaagaagacggtctggttagacctccaagtgagaccgaatggaaaatcgcgcatagtgcacaacatcgccgtcatgaagatcgcggaatgctcatccagtgtatgggctgatcagtccgctgacgtcgtgtgacggctccattcccgcgggctcgatgccggagaaacggcctgggcccgcgcgcgataggggcaggcacactgggcactagggtaacgcgggaaggtaccagccaacggccgcgaattgccgagagcaagagtcagccatggaatgacggacgcaagtgagggagtataggccgccggcctgctacgagaaggatactcgtggaatgctacaggaacgatcagatgcgcccaccatgttgattcgacatgccgtgatacctggaaggtgaaaggcgtgaactgttgcttccatacacaacgaatgcgagagttctcagtggaaacagcagtcacacaaagtcgtgcaacggctagaacacagggcgccgcgaaggaagcctccctgggctgggaccaaaggctgtgaaggctccggaccagggatcctcaatgaacgcaagaggaagacgacggccaaagcagctcggctgcagagagcagccattccgaggcgcaatgacaggcaagggaggatcaatgcaaggaccttgtgatccagaggtaggaacggaagagcggaagagagaataaaaaaccttcccaacttttgttctgtagcattactggccctccttgtgattacattaggatcagccacttaaagataaagacgaagccttaatctcgc

SEQ ID NO: 418705 - DNA, 1500 bp, Homo Sapiens
  misc_feature (312)..(312): n is a, c, g, or t
  misc_feature (942)..(942): n is a, c, g, or t
agcgggaaggtatcgggaggtgcgagcaggaacccgagttgctacgactgaagccgcgtgtgcaggcgcaggtcaggcatggtcgtcaggcgagactatgagcgaatcggacgcaaggcacccgcgtagttgctgacgtgcatggtagatcggcgtgggacagcaatatcatgcaacagtgaacgagaggccgttggccgtatgcgatagtagtcacaaaagcgcgattagggagctgagacagtgacctgagtagagcacagggaagacagagagtcgacggtgacatcgcgcctggtggcccggcgacgngtgacgcggaaggaactcctgagagacgcgacaacagagtcagagcagggtcagtctgacctgtgtccaagtgtgtgtctcacccctcgtgactaaggagtaacagtgagcgcgtgagaccaacaccgtgcggagttcgcatggacaaaatgtgcgaaggacggtgtgtacatagtagggctgcactgaggctcacctgggaaggtagaagtgcaccagtcatgttgcgcaatttagagatgggtcgagttcaacggtgtggccctttgagcacaaggtgttttgccatcgcgtggcgccaccacattgcgttgctcgctttgagaaaaaaccctgcgggattggcgtcggggggggtcgaacaatactgtgtaaggactcccgtgggtgggccaaggccacagccgttcaatagtgggatatttggaacttgtaacgcaaaacagtggtggcctaatgcagcttgacagcgatttaaaagcgtcgtatgtcgcacctaagaaattcgggaacatgttggactttacgtagcgcacacagacacctggggataagaccagaaaagcgctccacgcccaagaatttgaccctgtttagcgaccatagcggggttcaagttccactcttcangagcgttggggctcctcctgttgtctgtggaggatcttggaagagctacccaaagcctacaccgtgggagattccattcgggaaagaacggcaattttatagcgcgggggggacctttcttgaacaacactttccaaagttgtccaaaacgctagggggaacactggggagatttgaattaaagagccgaagggagagagtgctgtgcaaagcattgccgctctcggtcgggtgatagttaacacaccacatgtggcctgcgcgttgccgtgataatgttcgcccaccttttactttgggagggagcgcgtacgtggtcggttcggcgctatgtggtaaacgaggtgcgtccacttccgcgcattcggcaatttcgccaacatttttcgccaacttcgcgcgaatgtgagggcgcgcaattaaaaaagctctcaaattggtgtgtgcacacccccagttgtgtggcaaacttttttggagagcccctgggtaaacctcgtggtgccaatacgggaaaagagttatggagcccaccccgaggaggatccaggtgcggca

SEQ ID NO: 418706 - DNA, 944 bp, Homo Sapiens
  misc_feature (163)..(171): n is a, c, g, or t
  misc_feature (634)..(634): n is a, c, g, or t
cccctgtgtcggccaaaacaattggctactttatcatttttgggtattaaaagggaaataagtcttttccttttttggggtaaatttttggaaaaattattggctaaaagttgcattttagggagatggggagacaatttagcagaagggagaaagtaagtcnnnnnnnnncccaaatttatttaattggtcccgtgggtctctattgtatccctctatagccgtgtccattttggggacacttttcccgggttcccaaacccagtatttattccgggggtcctattaataagagttggatatataatctctgggacttctttagaaacccgtggtgtttctctattaacaattttttgtgtttcctgccaagaaatttaaaaccgtgagttcccctgtgaaaaattccctatgaggaagagaaccttagaactcttttaaaaggggcgcatctctccagaagtagtgcaagtggaaaacgcgccacttaccaggtggggcgtgcaccccaaaattttttcagaggcgtgaaagagttgcgaaagcctcactctctaattgtgagaaggacaagcggcgggaggaaacccccactattttacacatttatatttttcccccctataacctggtngcctccttcccccccaaataaggaaaaccccgttggaacacaaccccttaacctttcttcaacacacacttcttttctatgagcaaaggggtcaagacagttgcacctcgtggtgggggacatttataattgagggcacggcccaaaggggaatttggttgtccccaggaaaacaaactgtgccgtgaaagggtttttgggaacattacaaacgtgttgaacatcttggtgtgacaacttcgtgcaatgtggggctccccggcttataagttccttggaaatgttgtccttttgaaaaaactccctaata

SEQ ID NO: 418707 - DNA, 831 bp, Homo Sapiens
  misc_feature (328)..(328): n is a, c, g, or t
  misc_feature (412)..(412): n is a, c, g, or t
agcggagggggcgaggcctcgcggactggcctgggcgactgagtctgccccgctcacggccgacggacgggggcgccggcgcgatgtggtaggatctcgctgtctgactcgaaagggaaactgggcctgagggatttcctaattcatgcacaactctctagaagctcgaggaactaacattcgtatgtcccgcagcgtcgcgcgttagccattggaagcattgcgagactagcagggagtcgctgcacgcgacgagtaacacctgggagcataccgtcacgaataccataggctcgtggcaagggatgtacacacgcccatgtacctntgggcaactgctcgaaggcgatcaaactcgggtagtctgggacgtgcatcgagactggtgccgtgcattgtgggcctacgcagnctattgtaggcagcgcgagagggcctgttgccgacttgcatggcccatcgaaggatttgtgtgacactccttcaaggatgcaattcgtgttgaaaagccgcgaggagtgatcccattcgaaagaccctgtgtgcagtagcgacacaggaagtctctagtaggaagagtacctgtgccattctatgcgtgtgccaagccatgagctagacatgatgcatggtcaaagaccatactgggaacggtgtgcacgcaatgcgttgtactgatgctcgacgctcaggaatatatccaacgggcatgctggcagttgacgccgtcgctgcaattgagaggaactctaggtgagataggagagtcttgcacatgcggcgacgacgttgtcctagcctgtggtctaacgcctgacaagtggtacctca

SEQ ID NO: 418708 - DNA, 934 bp, Homo Sapiens
  misc_feature (120)..(138): n is a, c, g, or t
agcggataaaatgatttgacgtttgctcaagatcatactatgataaatgccacagccaagctttgaaatcagtttggcctgacttactgttatgtactaaacactctggggtgtttaacnnnnnnnnnnnnnnnnnnngactctccatcttatcccagaaagtttgctgtaagttaacttggctcctactcaggttggaggaagatacctgaggttaagaataagcagtcactgaaaagattgaaaatttaccacatagttatttaaacacacacacctaacttgggaaattctttacaaccttggctggcaaattaaccctatttttagagaatttaccaaagacgctttctggttttcttctgggtggctggtggttacccctttattttttttctttggcttggcaacctgggagcctactcagaaatggagggtcctttaagaagttatccttagttaaatggaaggattgtccatttcacttaagaaaaaccttttttacgggaagaactcagtacacggttcctggacttagttaaccagaacctgaccaaagaccacaatcaatacctgaaatctagttctctggccccaaaacaattaggtcccatgggggctccacggccctttaactgaacataattgctagaaccttaatattgacagattctcttttaaaactcctggaccatgacttatggggggcacattcttaaaaagaaattccaagagtggaacttcccatttgcaagggtctaagggtgtgggaattattgcagtttgcaccctttcttacaccgacttacactgggccaagtggaaaactacccggaccttttttcaacaaatctcccgagcttataaagaaacagggacatcctttccaaaaacccaacgaaacccaaaaaagcacactttgacacgcagttct

SEQ ID NO: 418709 - DNA, 1165 bp, Homo Sapiens
agcgggctgttggatccgggggacggccggattgaggcgtactctggaggacgtggaaagacatacgtagtgaccctggacatatacactcctggcggtagcctaatgggtccacatcgggaggcgtagaattgatgtgtcgttgcgctgcgaaggaccagtaggcatatggtggatggcctatgctaggggaagcttttggaacgctcgataacatgctgatgatggttccgtcaattcctcgtaatgtgtcaatagatagtactgcgtgtatggcagctatgcgaacagcatactgctagggaggcgttgctgaaggcctttgcaagcgtaagcggacgagcctcgatgagaagctcagagagtatagcgattttggcgtggtttccagctcccaagacatgtcttgctgcgaaacattatcgtcttattggcatttcgcaagaaagatgattgcgtgcctcgcggacgcgctttggggcgcatcgtcgccgcaattgaatcttcgcggcaggggaagtccggttggaaacgccgttgtgtgtttctgtgctgtatgaacacgaattctcgttgagaggagcccttgccagtggtgtcacgtgtctgggactgctgagcgcggactgtggcaattgggttggactttaggtttgagctgaaccttaagtgcgtgacttcaccatgccccgtcttgaggtggggattgcgctctgtgtgccccggagtgaccgtaacatttgtggcattcgaagttagttaaccgagggggccaaacagtaaaaagagcggcaggccattttcttagcgcgcaccgcacaagtgggggttagattgtacacagctccttcgggatacactcttacgcgaattttgcgacggctagggtttttaagcccccccaaatcgcaccgcagagggctctcaaaaaatgggccccgcgttccgttcgatcttactcggtggggtgggagcccatccgatatcatttcgggtaagtattatcagcatgcgcggtatactaaggagtagtgagcaagacgttcgcgttggatcaccagaaagtctcggagacataatcagactggcccacaagacggtctcctttaaccatgtcggcttctatgaccaattggatgggttttgacgattcaacgttggattt

SEQ ID NO: 418710 - DNA, 1264 bp, Homo Sapiens
  misc_feature (242)..(242): n is a, c, g, or t
  misc_feature (310)..(310): n is a, c, g, or t
  misc_feature (369)..(369): n is a, c, g, or t
agcggggcggcagcggtttggtccgttcgttgggcggctgttggttctgttcgtcctcgtcgactgtggtgtcttcctcgtatgtttgtggacaggcggcgtcgcgggtgtctgtgagaacgtgagccctatatgagcttgcttgacgctttggtgctgacataggaagagactggtcccgaaactcagatgcagaactgtcgtcgtagcgtccaaccgcgtgcgaaaatctctcctccgcnaatgcaaggctggaccatcgtatatagtccgcccagaggaaaatgtacgtctccacgtactagccggncgtggggtggcaagacattgcactcaatcgcactagcatggcactgcggggtaccctgntggggcgtactatcgcatagagaaattctggtcgatttacttcatgaagatcgtatcacgagcactgtatcaggtcccgagaacgtgctgcgccacttgtcccatcagcggttgcgatgcacgcggatgactgcgccggcagagaacttttctcaacatacctgagccttgtagtgcgtttccactgagctcgacagcccaatttcgcgatgccgactgacattggaggggctataccgtagacgctgattaacctttggcttgtggggtacgtggttatccagatagcgatagcctagagctcgtagatgttggcccaggtaaacgaaccggcttaggacgaccgtacgttcgagcacgacttctagttgacgcacagaaaagcactagttctcataggttatgggccgtccgaccagtgaggtacccgagagtgatagacgaagcaagcctttaacgtttgtaaatggggcacgccctattgtcaattgggcggataatctggttagctttataattctactttgttcgatgaaataacttttcaggctttttaactcctggggtggatcgtatttgccctgtggttaaccgcacaaaatgtggctctgtaattacacattaattggtcttcgcgcaagttttatgtgtgagccgtataagaggtttctaattttccccaagttccttttttcccacatctttccacggcggcaattggacaaactttggcgcgcaccactgagccggttttgaaccagtgggttattccaatcgagagaggaagcccttcctaggggttgaagatcggtttggaaggccagacccttggtttttggcctccccaggggggaaaggctggacccaaaggcgtttggcctataaaatcacattg

SEQ ID NO: 418711 - DNA, 873 bp, Homo Sapiens
agcgggccaggcccaggaaatccatgaagggctacatgcacagcgggtcctgcatgcacgccgaccaaaaggacgactatggcgtgctgcatgctcgtcgcgtccacgctcgggcatcgactacacgcctgttaccggtccgaggggacgcgacgagaaccccagtcagtccccacggagagacccacgagccgggaaagacggagcccggaagccaagacggagagtctgggcagacagcaggcatgaggaggaagaagcagcgtgcgagggggctacagcctgcgatgagagattgatttggcacgagcgatgatggggacgagtggtcacccagtaacgagtcgcacaagcaagccttgtactgagtgacacgtaaacgatcgagggcccctctcaagggcagtcacagagtctggtacgaacgttgggggaacaaggtcccgattgggtgcaaagacatattgccttgagagcattaggaggaaagccccctcaggtagcagacccaggctcttacgagacgttcgagaatgcacctcaagggaccgtgaacgaaggacgaacttcagcctgcaagctgcgcgatcgtacttccctggaggagcgcaatgcgacagaagtacgaggccaggcggggaggacgtcgtacgagcggaacactgagcctgaaggttgaaggtggatgaaggttgaaaggagaactccagtggcatagaaacaggcatctgggatcaaaacatggggcttgatgtggcaggacatcgtcacccgagttcaggaattgacagctgaggctcccgatgccaggtttgaacgaagcgaccgccacgagactggagcccttgtgtattgaagcttcttggagcaata

SEQ ID NO: 418712 - DNA, 1060 bp, Homo Sapiens
  misc_feature (387)..(387): n is a, c, g, or t
  misc_feature (543)..(543): n is a, c, g, or t
  misc_feature (604)..(604): n is a, c, g, or t
  misc_feature (745)..(745): n is a, c, g, or t
  misc_feature (811)..(811): n is a, c, g, or t
  misc_feature (816)..(816): n is a, c, g, or t
  misc_feature (818)..(819): n is a, c, g, or t
  misc_feature (838)..(838): n is a, c, g, or t
  misc_feature (844)..(844): n is a, c, g, or t
  misc_feature (847)..(847): n is a, c, g, or t
  misc_feature (871)..(871): n is a, c, g, or t
  misc_feature (895)..(895): n is a, c, g, or t
  misc_feature (898)..(898): n is a, c, g, or t
  misc_feature (938)..(938): n is a, c, g, or t
  misc_feature (991)..(991): n is a, c, g, or t
  misc_feature (1008)..(1008): n is a, c, g, or t
  misc_feature (1017)..(1017): n is a, c, g, or t
agcggaagtaggggccggcggggtgctccgcgtggagatgatggcgtgctcggcagctctcgtgacgtgtgttcgtatcttgctcgagccagctgaagaccccacgacgaggtgacttccttgggcaaggtcagtgtagtcaccgcgtgagcttgtcccacgggtgcctgaccggactcctgggcctgtggttgcccaggtgtgtctccgaagacagcgtagtcgcgcatctgccatccgtccatctgctctcacacggactcgcggcaccatcaccgttttatcgcctggcaatgatactttggacgtcacatttcagtcttgcttcgagatcatggcgagagttcgtggcatgcgcgggtgcatgtgggtaggtcgccctgtccntcgcatgccctagaaatgagaagcgccgcaaggatcaagcgaatgaattgccgcctagtacggcgagtgcggataataagcgagagtgaaactccgcgacacgcctcgggtatttctggtaggccagtagagttttacccatggttatttgtacgngttatgtaaataactaatactagtactactcactttactttgagtaatgctacttttggtngagtacgcttccattatttccttgctatgtagcatcaagttctcttgcacacaaagtggccagcctctagaggtatgcgttcctccatttaacattagaaccaagacgccactatagacttctcgcatgaatgagagaatncgggccacaccgctgcgtggagtttacccattgctctctctatccagggcttgtgtcatacacagntctgngnnttcatgtgcgtcccttgtntgcggntgngcacggttagccctatatatgggnaatgtcttccaatcgcgtgagtgnctntcgattgtaattagccgatttttggtcctttgcgtcattntcgtctcagaatgcgggaagccccacactgaatgctgaggcaaatacattctnttaagagctaacacggnacgtggtgngcgccctccaagcggttgtgttatggtttagcgccacctggaa

SEQ ID NO: 418713 - DNA, 627 bp, Homo Sapiens
  misc_feature (64)..(475): n is a, c, g, or t
agcgtgtgctgttgaatttaaccgtggtaaggtaacttgatagtttatcttcacaggtgtgagnnnnnnnnnnnnnnnnnnnnnnnnnnnnnnnnnnnnnnnnnnnnnnnnnnnnnnnnnnnnnnnnnnnnnnnnnnnnnnnnnnnnnnnnnnnnnnnnnnnnnnnnnnnnnnnnnnnnnnnnnnnnnnnnnnnnnnnnnnnnnnnnnnnnnnnnnnnnnnnnnnnnnnnnnnnnnnnnnnnnnnnnnnnnnnnnnnnnnnnnnnnnnnnnnnnnnnnnnnnnnnnnnnnnnnnnnnnnnnnnnnnnnnnnnnnnnnnnnnnnnnnnnnnnnnnnnnnnnnnnnnnnnnnnnnnnnnnnnnnnnnnnnnnnnnnnnnnnnnnnnnnnnnnnnnnnnnnnnnnnnnnnnnnnnnnnnnnnnnnnnnnnnnnnnnnnnnnnnnnnnnnnnnnnnnnnnnnnnnnnnnnnnnnnnnnnacaggctacatctggccttgactggcttggactggttttgactggccacaatggtttatgtcagtttcgactggtcttggccatttccaacaagtttacaccagtttcacctgaccacaaacggttcagactggctctgtctggctactatc

SEQ ID NO: 418714 - DNA, 1030 bp, Homo Sapiens
  misc_feature (301)..(301): n is a, c, g, or t
  misc_feature (962)..(962): n is a, c, g, or t
agcggagtagtcgcgaggccggctacgtgcgctcgtcgggtaatctcgacggaggtcgaggtggagcgtgcagcgggctccgagagaagcctggaggagcacgagtgtgggctgggggcggcgcgatgcagaatgtatgtgccggccgggaggacgttctggagttgctacgtatgctggaagagctggaagagttacaggcattgatcgttgcacagccgttcgtagaaatctgtgctgcccgcatggtcgtgactgacgttcgcagccgcgagaatccctacgctcgcagtacgctgcncagacccagtgccgcaaggtgcgctcaccagtcgacctagaacggcaacggactcggtaccctcgagaggtccgcaaaagtgagtgtggagagccagaaagggatagcggggacatggttggcgccgcacagaaaccagcgctgagcgtatcacctaggggaaagggcctaggggggcacgcccgcggaaagctatgcgcaacccaattgcggtctgtagacaaaccggggattggcctttgaacagacgtatgaaggaccttgcgcacagtccccctggtgggtgacaccgcctgttctgacgcgacgcgacgattgtcagtaccggggaccaggtcacaggtccatgtggaagcggaaagacgccgcggcagatctcgggaacgggcggatggccttctaggaaaccccctgggggatgccttcggcgtggcgggcaacagccgcgggaaggaaatccccgaggggcaggcgtgaacggaaaagcacgtcctggagcaagccgatgcgttggtcccccgcaggagccgcgacagtggaaacccttgtcacaaaaggcgaatgcgactggcctaagagccaaccccggtggcctcgaggcaaaggagagtccggctcgtagaggacgcaacaggggtggtgacacccacacgtccagggnacacggggatagcccaccgggtgaatggtagcacggagggctcgccaaggagcctagaaccccctgga

SEQ ID NO: 418715 - DNA, 889 bp, Homo Sapiens
agcggaggtgcagcccaacatccggactccgtagaccagcggatctcgtgcaaagcctctttctcgaccacccaccctaccacttcttgctaaccatggcggtagttggctggtggtctcgagtctgaactgttcatcatcggcgtggtactattcgttccgcgtgctgctgcaggtgtcaaggtactccctgcagaatcctgtcatacacaggtgtcgcaggaacggggcaggcaggtgtatgaggggaagcagcatggcaacgactgatgtccactccaagcttgagtgcaccccatgcatccactagctccatggggtcgtgcccgttcattcatacacggtcgctccgtgtcgccgatcttcgtgcccacggaaaccaggcgaagcctaggtgtactggcagtcaggtaagtgctggtggtccccgtgttgtttccctcggccagtaggagtcacttgtgtcccggatcaatgaaggggccatgttaaacctccagggagaagcagtgacccgaccaaagtcaccgaaatgaattaccaagtagtcccatatcggtaagccgcgtatatgctaccaggggtccgctactatatagcggggacaagggatacggataagcagtgcaagcggttgagaattacgagggaagtcatgacacccgccattgcatcactcctgggggccattagagacagcgctgcaacattcttggaattctcgaggaacagataagttcggggcaaccaggattactctaatcctccacgtcccctcatgtaaagtccttgtggatcgctggccgttgattaggccccgaaccaagtgggaagaactctaatattcatccgaaactccagtgcgagtcacagaaactggaaccattcc

SEQ ID NO: 418716 - DNA, 773 bp, Homo Sapiens
acccgggggcgtaaccagagacgagtgcacgccccccgggtgtcccatgaactagacgttcaaagactccgagaaattgagagcgcatgaaagaggaattctgttccctgttaagatgagcatgctgcctgaccatgggaggagtaaggttgcgcagttcctgggcggaccagactcgttgctacagagaacaactgccgactcgacagaccgatgtccagattaccagttgtagatcctcctatatcatgaagaaatcgaaatattaagcttgatgtactgataccacacagggagtgaataaccgactaagatacttctacatagcacatcacaacaatacgagaggatagggcgcatatgagcaggtggcatcaatggcctataacataaggcacaccaagaagcacccgagggcatgaccacctatgacttcgacgaccttcgtgagactcgaaaggatcgtgggcagcaaggagactccctgttaatgttgcaatggatcaccgtcgaaggaccgtctggtgaacaatgtaagacagatcgccttaaataataggacctgcaatgaaaggttccatacggcaccagcggtcatgcaccatattggctcaagtgccataggtcggccaggcaagcttttcgaagcagtgatctcgagaccctgcaattgcgacctatcgttacttcgtaggagtcgaatggtcgactctgcgttctgaagctccacgtagcatgggacagagacgtaggcgttttacaagtactccctg

SEQ ID NO: 418717 - DNA, 1336 bp, Homo Sapiens
  misc_feature (1046)..(1046): n is a, c, g, or t
agcgggagcgcttgcggttgccgggcccgccgtaattactggcgcggaagacggggctccgtagtgaggtccagctgcggtctgcgtcgtcgtgtgcggcccctcggcgcgtatgagctggtcggcgaaggcgtcagtaaacgacgctcatcctattcgctgtggggacaacctccgtagacaggcgaggaatgaccctctgcagatgcatgtgtgagatgcgcacgcttccctctatgtactgaggggtctattgctgtgctcggtggccgttcgtcgtggcggttccctttcactttcctccgatacgcaggcattgggcaggcatggcagttcccaaatgctcccgggactggtgtggcaggattaatgtacgtctagctcactacctggacaaagcaaccgtttgcgtctgtgctggcttttcgtcacattgctcgatctcctagctagcatgtctaggatacagtcgagtacccaggtttccggcgaagagtcactggtagaggtatgcacccgatggtcgacaaggcaatacacgtgatgcatatcactccgcaaggaaacaaaatcctccgcgggagtgctccgactttggataggacaaaaatttcactaacggatcgagaagaccttttttccccgtggcctcgctaaggaagagaacatgcgtcataacaaatttgattggagactatgttttctgctatgacatgtcaacggtcgacttttccattgccattttaagaaacgagactccttgtgcatgaaacaatcttctagattcaactggaccaaggttaagcggtcccaaacggactttgcgttgagagaacttcgctcaaaattggggaaaaagtcccctatttgagaaacacccatgtcgattgggccggtggaaagaaattgttggccttaaaaattgtacacgttgactggcgaccaagttttaaaagggctaccaaagtttgcggtataccgataatagcaatataattccaaccggtggtcccaaaaagcaatatggggagaaatgcctttgaacnctggataatggaaaaccgcgtcaacgatgtcaaaagaaaacttttgcggaatttggattcgaagcagcccaagacttaccctgaaacagctttaaaactagtattggactgcgcacatggacacctacacccaaaggttagggaccctgtaaaaaaggggacgatgtgagcaccccagtgcccaagttaaagacgaaactttaaatagggcaaaacggaaaattgtgttgcccccatagaaacatgttaacactcccaaatgagagagtacacaagtatagagcctcgtg

SEQ ID NO: 418718 - DNA, 950 bp, Homo Sapiens
agcggggttgtttctcatctagtcatctctcttatgatcccgcgaatatagcacatattgcacataccgcgttagtgtactgatcgaagcgtgatgccaacagcatatgagataacacactcgatcatgactaggtttactgcccccctttgcatttgaccgtacatcactgaaccgttgctaagtaacctggaccagtttcctgtatcaacataccacactcatcccaattgagctgagtcctaggacttaatttgaggagttggatgcagacacgagtttgagggttccgcaattgtctcaacagtctgtaatctctctagtctggaataccctctggacatcctttctggcattctcgaagcctctagttctactaaagacctatatctaagatagcaggattccaattgtctactatgtgaaacaattttgtatccattttgaaggaagagaacgcgactcactcttccctagcccagtgtctagttaaggggaccggccatcatgcattagcattacttcaaatcatagagtcctacaaagacttccttacagctctctgggcatcgccaggctacaagccccagccatggaagcattgacgctctgttggtgtatcctgatgaacctgggggtgattgcttgactgttctccccaggtattcgggcctcacaacaatgcgatggcttgtttccacacaaagaacgtacatcatttagtccaccaaatcgagcttgaaacccttcttgagccttcggcaaggaccataattgccaccagggttgatactattaaacgtggttcacaattactatttgaacaagggctttcttaggagaaccttttgacagattccaagagtgggtacagggagacacatgcggtagcccatttgggatgtgtgcatatcctccccagaagtacagaattgttcgcaggtgacccc

SEQ ID NO: 418719 - DNA, 486 bp, Homo Sapiens
agcggagtgcatgttgacagttacctttcgagacgcgcccttttatgtctatctttcgttgcccctcactcactctccaataatttgcaggccccagaagttgtacgtacccagaattggatagcctagtaaatactgcacgtggttatacaaaccctgagtcaacagatgcgttttgtgtcaactcaggatccagtgattcgagtaggtaaccttgttgctccaaataatggcatgccataaggagatactgctttagaactccacatttttggtccaatttctacagtcttttagatgatgccaactcccccgcacttaactcttacctacctgatctgcatagacattgaaaatatcttcttgcaagagtcaacttttctcttggctaactcttgaagctgcataaaatcttgcataattactataatgttgagttacgtttagaaaaaatgatttttttgaggaataaatttcacatgaagc

SEQ ID NO: 418720 - DNA, 554 bp, Homo Sapiens
gagcgagttgtgtgtgtataattagatggcatggcatgacgtcgtaacgtgtctcggttactaggacacgtgtggcccgcaccagagcatctgtgatatcgataatgccgatgtctaagcagttgctattgtcactagcacgagtcgcgcggcagagaatatctccggacaggcaagatagagtcattcacgtagtcaaggttactcaggttagtagataatcacgcagtacgtagaaggcgctactttcagcaactatcatccaggtgtcccagagtgcaccagacaaatccatacataaaaactcactggaaaagtactgaatgatgcaaaccaggaacttgggtcaaaaccagcgcacgtagtacgcgtcgcaaaaacacgatacagagaggcgtctatcgatagcaggacgttatagcaaggctatccattcaggagcagattaaatagatccgaggaattacgcaccctcacgagatcctgcggaaagtaacagtaaccaccgaatacacgataggcatcctggttaatttaaccgacgcccatgaatc

SEQ ID NO: 418721 - DNA, 1195 bp, Homo Sapiens
  misc_feature (371)..(371): n is a, c, g, or t
  misc_feature (720)..(720): n is a, c, g, or t
agcggattgcgcactgggggactcgcacggcggctgtgtccgccctctccctcctggatcacgctcctgcggcccggcctcatgccgagcgcgcggctccgtttgggagcatgcccagaacgtcgcgcgccagggtgctccctcgacgtggttggtcgcccgaggcatagtgttgtacagaacggcgtcgtttcctgaacgtggcagcgcgtgcatctcgtataccctccattgcgcttggccttgatccagtccttgggacagccataggctcgaaaccagctcgttaacgtgcctctttctccctgaccgcaacaatatttgccattgggaacagtttggtaccacgagtaggcattggctagactatngacttgaatagcgtaacatattgtcgatcctagaaggatagagaacgaatccatctgtttctaactttcgcgcatgaaatactcgagtaaaacgatagagactttccgtggttaacacggccatgcattgttctcttcgtgtctcatccgtcacatcgttaagcagtatggtgagaacctccccatttacacgtctgcatggtttacatctcacgtgcgacacagttctatatatattaagggacgcataacccctgtaagtgcctgtctaccctggtgggccatacggtaggctagacatctctgccttcattctcccacaccttcttacgcctttagaatctttccntcgggagaaacacgcatccaattacgctttaggggaggcaatagcaaatctaatctccagacattcggcaaacgcatcgggatacgctctccaaaattagatgaattctcgccaggaatatcatttgccaccgattggaacctttgtagcggattgaagctcgaggaccctcggcgtttcccttagtgacagcctttggcactatttcacaaaccttctacaatcacagtggtttaaactcaattcctatgggagctaagatgttccccctcgggacacattgcattaagttctttctgcgaaaacaggacaaaggcgaaataaatgagtggaggggtaaacacagtatcccgagaaccaacgatggaccattgacttggttgacccccgaaaatataagggggaaacgcttgaagcgaagttaaaccaacttaacaccgctggaccgttgaaacatctgtggaacccttaaaca

SEQ ID NO: 418722 - DNA, 1143 bp, Homo Sapiens
  misc_feature (185)..(185): n is a, c, g, or t
agcgggtcttgttgccgatcctggcgagatcggagacgtacagcacaaaaccaagaccgtaccttgccctctgtttcttctcacgcgctgcttggtacttcctagctaagctggctgcttagtggtcccttctattctagcgtgcgtgctggctgtgttgggtcgcggctgtcgcgagcagcgcnagagtggcttgtcacgcgggagaccctgcgagggcgagagcatcaacgtctcgtgcttcattccggcctgttcttggaactccagaaggtgtgcgccttccagtttcagaaaccgaccaagctgagaagcagatgaggacaactcttggatgagagcctgtttgatactattcctaaccacagagtactcgtgttggcccatgcaattcgttcgcagcagctattagctgagcgatttgattgactccttgggaagcaacaggtgtcgctatactcaaagacgggaaccttgcatcaggcgctttttgcgctcgcgtgttgcttgcttcctcacttttccttccccatacagcggccccggggagttgggcattctgggccaggggcaccccgtggttctcctgtccaggcccccaccttcctttccctttcgccaggcatttctttttcctggtacatctaattgtcctctcgagtctccatggcttaagaaatttgagccgtgagttgacaaccaaatgcgaattgttgcctttacattcaaagggttggtggaaataaaaccctttccttggcaagttccccccttttaatattgtgcccagttaccttcttccaagggaatttccacggcgttaggaaaaacggccaaggcatatgtggggcttgggtgtggcccccagttgtaggtttgcgccaattgggggtgtacatgaagaatgtggcccttcaatttccatggcttggcacggggttgtaaaagaccttttaccttggattcacacgggaattcccagaactaaaggccccaaacgaatggggtttccccttaaaaagagcaaggttgggccccatgagcgttgtgggcaagcagtactgtgactccttgtgcccgttaattctttgaggaaagagtcttctctcacaacatgagcaccccgcggtggggaaacacacc

SEQ ID NO: 418723 - DNA, 983 bp, Homo Sapiens
  misc_feature (66)..(109): n is a, c, g, or t
agcgggatgaggcgactgcgcatactgccggagcggggtggttatggcggctccatattaacagannnnnnnnnnnnnnnnnnnnnnnnnnnnnnnnnnnnnnnnnnnnatatcccatcccaggcagaagacacataaggccaatcgtccgacatacacccgaatgacgccatgccatctgccccatcacagcaaaacacacccatacacacctggtacaaccacagacccggcaatgataggagaaagggcacagagagacatggagaagaaccagaacgagccaaacggacaaacgcccaaaaagccacgaccagagaccggcaggcaggcagccaggaggcaatcgaatacagccaaccgagccggaacctagcacctaaatcagcagcccccggagccagcggcctgcgggaacggacgcacgagcacccatgaagggcgaccaaagaatcggaggacggaaatagagaaagaggcgcgacataccagcgaaagggagtccagaggcgtgcgaaaagcggaggaacaccagcgtggaagaccacaagggaaggagcaggcaaagaagagggaagccccacaactccaccaggggacacgcccagaaggccaaccgaagcacacgccctccggtcggccaataccggcacgaacagccgaatgcaacgcaccacacgaggaagccagggacaaccacggcccgtggcaaaacgccacgacactaccacacaccgagcacaggaagacagaaacacgagaaggatcagcagccgcgaacgacacccaacaggcgccagacatacaacatgaacaccaacgcacaagacgccagcgcccacactgcggcacagccccacgacaccacgacgagcaacacgcgccacaacccgaaaaagaccagacccaaccgacacagaaacaacacaaaccagaaaacgcccagcgaaccaataagcaacaaccaaagcgaagaaaaacaa

SEQ ID NO: 418724 - DNA, 1189 bp, Homo Sapiens
  misc_feature (660)..(660): n is a, c, g, or t
agcgtgtgtgcggaaggttggtgatgtatgtagtcgaaaggatggacataaggtgctgtgatacgagacgaccaaagatggatgaattggcaggaaggaatgtaattaaagatctatgtatgcacaggagaatgaggcatcgagtgaaggaaatggtgttatatagagagtcatacttgcttggtctttccttcctctgcatccacaatgatgtagatcataggccttgattagatattactagggtagtattaccatctcctcccgccatgtatagccgagagacagaaggaccatgagatcacgctcgtaggtacgtagatggttacatgatagcggatagccgctatataccttttggatcgctatatgctatagataacgacttagtgcgcattagcccctggagaaagaacttgcggtccccctatgagccagtaataataggaccacatcatagcttactaagttgagagtaatcctcggtgggtagttcgcaattaatcaccggaggaggttgaacctactaggtataaagggcttgagcccccatgggggaaagccccagtgtataaacggtggatgcctatttccatgatacgaggaagcttcctttcgcttggctgtgatctataacggcactttggatatccttggttntatgcccactacaacgtagcacgatcgcgagtcagtgtaataaatgggatgaaaaatgcataccttactaaatcttggctggtccgtcccttagaggcatactcattttgttgacatcgtttggttaaatcctaaatcatgggattcttgtgtgtggtcttgcacctggttaccttcgtttgcttcgcgtttgcctgggagtaccaacaagcttgaggtggatatattcctggagggaagaaatttgtggccggtggagaatccaactggtatggaggttaattcgtccatatcagcaagtgtgagcaactcccttgtataagcgtcggtatataccatttgtcctcttttccgattggtcccaaaaaatcctgaaagcttgatataattcaaaggtccctggtctctcttgccaaaaatggttccggttgaagcttggcgccttgtttgccacacaaacttccttgggttgtccccgggtggcgtcatattaccccaccagcgtggttacccattgagaggacttgac

SEQ ID NO: 418725 - DNA, 831 bp, Homo Sapiens
agcggaggtctcgctgcgcgccgttccggggtccgctcgctcccgccgctaggccgcttgccgtcttctgctgccgcagctcatggaggtgcatccagggtggttcgtgtgcgcttgccggccgaccgcccgtgagcgtgcgtctcgtggacgggcggaccacgttgcgttgcaggcggcctgcgtggtgtggccgggcgatgtcacatgcgaagctagtcgccgagatcggtggccggactgactgattttagctgcattcttcgaagagcgtgggatgcgagttgggcatgcggatatcgtcttatagttgtagggcgctacgacgctggagtttcccgcgttgctggatctcttgggggagcgcgcaacttgcaatcgtgcgtagagtcgcgcgcggagtctgctgtcgttgtgttcctcgattgaggatagtcaagccgatttagacgaatcagtggatatgagcaccccttgtaatgatatgaccatggcttattcagtgggggagtaacggaggagcgtgttgagtttcatgaatgtcttgacttgtgattgggcagagggtcttggctctgccaattggtgagctgagttggtactttattccatccctcgaatatatattatccaattcacgggttccaccctctcgattgatgcagtcgttcgtcactggcctctgtgtacttcttccgccgtgatgtcgctgtgcgatcctagtacactgtatattcgaattccttctcttcgtatgctctggggcgaaggtagggagcggctcaattgaagtgatggcggaggggagactcttcgaaactgcgcttctgg

SEQ ID NO: 418726 - DNA, 1151 bp, Homo Sapiens
  misc_feature (261)..(261): n is a, c, g, or t
agcggaaaatgaaaacaaaaagcttgggtcgatttactagtcccaccctccctgatcattttcaacgtccctaattacttctcgacggccgtgtggccggctaccgccgtctgtctgcgggacccttcggttcaggtcttgcccgcgcgggctgtgttcctctcacgaacgggccttggcgactttccggcgtcatgattaccgtgcgccttgtgggccgggcccctagccccgtaggctggaatgccgagacactgcgantctcgcgagaggatttaaaccagaattcttcgtcctctcttccgcccggccggcttgctctggggctttgcagcacatgccatgccgtttatgggcgccatagcgatgggaccaaccttcgttaggcgcccatgatgattccgagaacttgtggcgcgcgttttcataattggttgtggtttgctcctcttctccacttcgtaccctttttatagagagatggagggtaaacgcagttcaggcaatgggttctagacaccgtgggctctcaaaaatttcccttgctagactaccccaatccgaactgttatggtgcacaagcgccaacagagcctatacgttgggattaacctttagtaggtggctcagaaactatgtttgcccaacatagcaatgccctggggcacaaaaacgtctgtgtttccgcatagtcccaccggggtttgcgtgtgtcgtacaatagattaccccaacaagatttttgccgtcttcgtgccctatggcgttgcgaatgggccaatgccctaggaaaagccccgcagatcctcaaatgtgcgtgcaaagggttccgaagggactcgggacagaaactcctatatgggcaaaaccctggtgcaaaggggcctagaggggtatacgcatggttagaagccccaaaaaatttccggaacgcaaatcttgggccgccccccatgaccctggtgggcttgacaaaggtcgaaaaaaccccccatggttgtcaaaaccacaagaaacagatacaatcagctttctcctaacaaaggaaaattacattccgggaagccaacaaagtgacgcgttaaaatcaactccacatcaaagggacgtgttgcccctgtggacccctgggttttgttggaaaagcccct

SEQ ID NO: 418727 - DNA, 747 bp, Homo Sapiens
agcgaggaggtagacaggtcatcccactgaagtgagcaaagggctgaatggtctgagttgctgatgaagaaaactcatgaagagtttctgtaaaagcattcccaaatgtcctcatcaaagggaagggagtagatctaagggagggaagagtggcaaactctcccaacattttcctttattagtcgttccgtgttgaccaagggctcttatgaaacatgacatgtggttaggccatggctatgctgcactctgaagagtggccatcctgccctttagatttgagccttttttctttctctgcattggtcgtgcatcaggttgttattgtcggggacaatcacaaatattactccattaggccaactacacatcttaaccaagccaaaaagatggccttacaaacacactgggttgccgcctggtgctgtgaccccatgagcattagtttcttcagtatgtaaagtgagaattaaattaagatgagataatggttataatacaattagtatgtaattggcctttggtagattcttaatcatcagtaacattattattaccaagctatggttgttatcactaaatcagaatgtattcgtgattatataaaaagctcttttggtggatgctatataaatgaacaactgactttgtcataagctatttcagatcatggtgtatttgccctgttttgaaatccaaaggctccaaatggttgaggaccaaactcatcggctaatatcgagattg

SEQ ID NO: 418728 - DNA, 802 bp, Homo Sapiens
  misc_feature (374)..(374): n is a, c, g, or t
agcggtgtgatgatcacgcttggcacctttagtatagggccatggtgacgcaattcacagtaagtatgatccgaggtgcctgtgtcacgtgtatcattactcaaatgaggtcgggcggtggtcgtttcagactgtgccggtacgcatgcggcagacctctggcatggactggcacgtgccacgtgacgcgtagtcacttggaagtggctctaccacgagttacacgagtcgcagggctcgtaggcatgctgttcattctactcactctcgctctggtactgggaagggcactatggttagaccacctctatcaaggaaagcacctagcctagatgcagtagcatgagagttggatgtgacacgtagaagctgantgggcaatagagtcgagctgcaggtatcctcgatggagaggctacaattcgcgttgtacccatggttgtgaacgatgaggcatgaaattgtgaacttgactaggtgctagcaggcgcatgaacaccgttatagcgagatgggtgagtgaggccgggatacttagtcccgtgtcgctgagaaaggcagtcgacattgctgataggatcgcgcagacggatgttggcagaagcgtgtgatggaccagagcaagaatcacctctagtggtgctgtgttgggcatgaacgcgcctaccagcctgtcccagttcccactttggcgagtttggataacaggtgtggcagtggaactgactagcaactacctttcgtacctccttccatggccagcaatacttttgcccaccaacgatgtagccactgtactggg

SEQ ID NO: 418729 - DNA, 696 bp, Homo Sapiens
agcggaggtgcagaaagcaagcctctttgttctatgggcattttcctccccctggatttgactgttatttactggccacgtgagcgccaggcgcgggtccggcggggaaggcgaccccagaacagggtagacaaaagctggcccagagcgcgacccgtgcgccccaggacgtctccccagctcctgcgacacgcgtgaaattggcccggacctgcctcatgagaggcttttcccagaaatgtcttgttaaagcctttgtaaaggaatcagtgtttacttgcgccgggagagctccggccctgggtcctggcaggcggcggatttctgagctgctggagagcaacccgggaaagcaaaatcagccttggactgtcggggcccctggggctccttgctccttatcgaaagcgagttattagatagacccccacagtcccattcagcagaatgggaaactggactcagacaccttttgccctccccacagggaggccacgccgtgcggctttgaccactgatctcccacccggagtgcccgacgcccagggtcctgccaccgggcagcctcggtcagtccacagtttgtggctccttccagggcctggactagggtgagcacaagccttgagcgcaacatttaagaagggcgccgaaaagtcagtaatcaaaagaaatatcttgatgcaatgcctcttt

SEQ ID NO: 418730 - DNA, 695 bp, Homo Sapiens
agcgtggggtccaggttgctcttggatttgggggttgatatggatgccatgcaagcaggtgcctcagtgaaaactaagacgagggctagctcaagactggaaaattcagctcatggctatgactgaaccaaaacaaatctggtagttttcctaccaattaatcacttaaatttgcttgcaaattgactgaaatcagccaagggactgatttcatattggatttggtaaacagaatgaacatttgaacctatctaccgagaagattcacctctccttgccaaccacttggagccatcagtccgaacccgtcgagacataagcattccagttctacaggaactagatcattagagaaaaagcaagtcatctctctgtgagggaacagtcaaacccggccaggtgagagtggtgacagctttattcatataaagagggaaaaacacctttaactagttagagtgctgggattggtcaggacggaatctgaaaccacaaactctttgttctagttgcaaccacatcattccaatggagaatgtctgtcattgggcacattagctagtaacaacttcagacactggccactaccagatcctttcctcttcaaaggattgtcatcacaatatcatacacggcaaaccctagaatctagaccttacagaacaatggtattcaccaattataccatggaagaa

SEQ ID NO: 418731 - DNA, 1179 bp, Homo Sapiens
agcggctcttctccgctgctggacgtctggagacgatgctcgcagaagaatggcaccgtccaaaggggggaagagagatggaggcaccgagaagcaacaggtcatcagcactcggcaccgtcgaggtgagcatagaagaatggatgagaatctgtatttgtggtgtacatagaccgactattcattataggcatcgcgttctaagtgaacacgtatatgtccactgtcacatgaatccttttctcgcggcataggatagaaccatgtgcccgtgtgtacttgagtgtgggactgaagggtagaaggagcccgatcctgtacgtatgaaatccttctacccaatattgccttcgcttaattgtattgggcattgcacgctagcgcactcgttgggccctaggagagcttgcgcaggaagacgttgtgctcatcgactcggtctcattacacgagtcccaacacatcgctgacggcgcacacgaggaagacgaacatccgggacacgaaagacaccccttgggacccgtggtggcccagggtccggaccaatcaaaaaggctcgctttggccccgacgtgcggagcttatttgcacagaacttcgaggacgagcacctttgcatgcgtactggtttcagcacccaccaggtaccttctccatcatggaagaatgaaaccatcgctaatgggataaggcgagaggctccgacacgatgcggtctcggctcggggcgggttgaaatcgacaggaatttgcaccttgcttggagactactctcattccttaggtcatagggtataaagttttgccccttttgcacccttgtgtacacacctcttggtttacccctagagaaaaattgagagcgaggattacacgccatttatccttggccacgtttaagtttcagagatggtgccgcagagggcggcataagaagcgcgcagggaaccagctcctttaagagtcacgagcgaaggggaacaccgcagcggttagccaacccgacttttggtgtcgtgccctcttctatcaacatgggtgggagatccacatgtggcaacagaaaagacataggggggccgcctaatcgacttgagagcccttagagtgggtaacccctatgtctgtggaccatgtgttacaatccgtgagcacagaataactgaccgagatcgc

SEQ ID NO: 418732 - DNA, 865 bp, Homo Sapiens
  misc_feature (487)..(487): n is a, c, g, or t
agcggggtgtagcgcccttcatgacggaaggccgctgcacccgaggggctcctccaggcacccatgcgcagaatcccactcagccagtcaagtctaagagcactggcgggccatccccgtccagtcgggcatcgcatccgatgcgtgcacccatcagatctacttaccggcagccgaccatgagcttccactatccaagcaacacgcgtccgtgcagcattaccgcagtgccccgtggacatcctattcctccatcactcctctaggtcatccgcacatagggctagacccagaggttcgacttcgtgtgtgtgccaggtctattctttatttgaccggagatatgtacacagcggactacccacggtattcagtggggctccaccagagcaggtttgggcgaagttccctgttacgcatgttcatccatacgagaccacacattcacactcgtgcgtcttgccaaggccagaccttagaacactgncgtatagcttgggcacatagcgtctccagggggatcggccccacctgaagtgcaaacggcaggtcgcaggccagcgggttcaaggtcccaaggacgacggaagcacaaagcgcgccgttcgtgctccccctctgtggtgctctgaacccgttgaaaggccggtgataaccacatcctcagtaaccccctatcgggtcaattccgacgaagagtggcttggtgtaccagtccaaagagggcccacaaaacgtggcaagagagtttgcggtgtaatttgggtgtccagagaatcccgggagtggggaattattctttggaacccctaaccgagtggggccgttggggaaaggaagtaagcggtgggatgagttccccacg

SEQ ID NO: 418733 - DNA, 948 bp, Homo Sapiens
  misc_feature (495)..(504): n is a, c, g, or t
agcggaacgtaccttaaactgctgcaaaagagtcgtttctcgtggtgtcttgtgggagtggcggtgcgatccctctcagacttgtgagtccctgctggagtcagaagttttaggcgaatcccaggcgcgccaaggaaagtgctacaaaagccatccatcttgcaagcgttggtgccgaggcgcaacgctgagaacgcaaatactaaagggcgctgttctttcctcgtggagctcacagtccgctggggagaccgtgagatgacagcagagaaactagcgcgatcagtagtactcagcgcaaggacagcgagcagagaaggcaaacctagtgcttgctaaggaagacttcacagaggaagtagtgtcagggccgagactaggagaaggattgtaagtgactagattttactttatccttctcgttaaccaaaattaatttacctctcaccttttctcctgttgtcgtccaacccctatcgaggcagtcacaccttnnnnnnnnnnggaggggttattcctgcttttgccgtgctgtgatccagggcagaggtgaagtatgatttaaaattaatctgtagccctagaatatgacctcgggtgatgagggtaacggtgttctccttggagccctaggtggtttagatccctgaagatgcctgtgttggggagagaaggtgtccaataggctccacccttcaggcaaagacctctctggtcagctttaccgagtacctgttaagtcccaagggggtagcaatgctctttggcccttaataacaggtgaccccagcaattaacaaggtattccttccaagggcccaccctgtgtaacattgaatggcttaaatcccggtattacacggttacactgaaacctgtccaaaaaacgtttaaagaccgtggatttcccacacgggaatggataccaataggtttgatacgaaaagc

SEQ ID NO: 418734 - DNA, 1060 bp, Homo Sapiens
agcggggaggcgacccaggcctagtaccgcttggatcgcggtatgccggcaacttgtccccattgaaaagtgcttgcacatgtaacgtcttgtaggagacaggtggagacttccctcagcgtagctcaagtcttcgagttccggcccgcttgctcgtggtgagaaactgcttggggcgtcatcctcttgcgtgtgcacgcgagcgtcgttgtcatcatgtcacctcctgttcgtgatcgctgatcctcttttactgaggggcctgtgcgtgttgtgcgggaatgtgatcggcctcgtggggcggaggtgtggacgtgtgcgtccaagttggtgagtgccccagcggcttaccgcccatcgcctcgtgcgcatccatgagcgagtcaacgtagtgcacctcttacatctgcgtagacgtggcggtcgctttggatcgtatctgagccgatacttttgcgtacgcttcgcgagcggagtcagtggctatcttaggcgcctcttactgagcgtagcggctaatcccccgaaggagtagctctcttgtcccctccaggtctttcgatcgcctcatgggaaagggcctctctcagtctgtgcgctctcgcgagccgcatagaatcccgttctcaggctctcaggctccccattttatgatcgattccttcctataatcctggggaatgctccgttagatgtggctgcattgcgatggggggctctttgccccctgtggcccggtgtgttatctccatttcccctggatccatgcagcgcatctcaaggggccaagcgcccatggttgcgtgactgagcatccgtggtgggtaacaatctacccctggtctctttcctgctgggtcccatctgagcctcacgctgtggagatcactgcgtggggtccttaggcccttttgcggccactcctgggaggaacgtagaggtccagctgatccaggagcagggtgcttcgtgcagtcaggcaaaggttgcttgtccctgggccattctcttgtccagcccgtgagaaccctggaataattcctggtaccctgatttcccg

SEQ ID NO: 418735 - DNA, 433 bp, Homo Sapiens
aaccaactagaggtaatactacattgtgagaagatgctacacgagctaaaagataaactataaaagtatactagtagtactttttactttacaaccaacgaagaacgaagtcatagcaagagtcagctcctggagcttctgtagggaagaagatttacaatcgaatgaaatagtgtgatccttcagaagacgggtataagctttccgttatcaaaagtattacaaccacctcctctcacccttagccactatctatcatctcagatgatcggagttgtatctatgatacaatcataatagattcagaaagtgctaactataaggcgttaactcgagcctgggttaaaaagcagaagtagagattatatgaattgtcctgattactcattctttcaagatattcacagcaagcatattctttggaaggaacatc

SEQ ID NO: 418736 - DNA, 1081 bp, Homo Sapiens
  misc_feature (294)..(294): n is a, c, g, or t
  misc_feature (299)..(299): n is a, c, g, or t
  misc_feature (448)..(448): n is a, c, g, or t
  misc_feature (551)..(552): n is a, c, g, or t
  misc_feature (563)..(563): n is a, c, g, or t
  misc_feature (628)..(628): n is a, c, g, or t
  misc_feature (685)..(685): n is a, c, g, or t
  misc_feature (848)..(848): n is a, c, g, or t
agcggaagagtccaccttgtgtaccgtatgcgctatcgtcggcttgggatgcgcttgcggctcacctgtgcgtccccaccatgcagggtcgaggcacgaaggcattgaatgcggctgtcatgcactgatgctccaccgggcgcgtgtccctccgaggttgcctgagtggactccagtgcgcgcgtgcgtcatcagcgacagtcgcgcgacggtcgaaacggcgcctgctggcaggacagccagcttgcgtaccacaagcgtcgcattagacgcaagcagatagcccgatcgcgntaagnacttaaccgctttccgggagagagcattccactgcgaagccaagcacttcaaagcagggctgtcctctgagacgattccgttctcggtagtatgtccgagaattcaataagggcaggacgtggacgctccgagccggtacaccggactnagactttgaggcgaacgaaagccccctaatattacttgtccgctttggagatcggaaccttccctgtagaccgtactcccagcatctccaaagtctttcccannaagaattgtgnctctacccagagacttgttgtgccaagacagatacctcgagacactggggtagtatccgttcatnacgagagaacgagggctcctgtgaagcgtgagcttagttaggaaacttcactgtacnaggcccgggaactgtctgctcgatccatattcgcgacgaacatcaagttatgtggaagcactgttgggttgaatcgacatcgtttgaggaaatggcgccaacatgcacaggacttcgatgggaaacgatagagaaaaggcaggagaccccgaggtgaacctgncgcagaattgtatgctgtctgcgaacaaacggatacgcgttcggctttgaattccgacgagaagggagaggccggagtcacagctccatgaccaacggtgcccgtgggcccagtaccatgcgaggtattgcgacaagcaatgagcgatcccgaggaagatcgataacaccccgaccgctgcgtgtagacgattcgtgtcaattattcgttgttcactagacgctcgctcgatc

SEQ ID NO: 418737 - DNA, 733 bp, Homo Sapiens
agcggggtgagcactgccccgcatttgccctccaggtgtcaggtgcccacctggtgatgtggagttagctgctgaatgtgcaactgtagggaaatacaccctactttttgaagcctcacttggagcctaagagttctctagagtcatatcttgattggatttataagttaaagttgggggaaaatccattttaatacaagttttgataaacccaatttattttataaggaaggagccgtttaccctgcagtcattaacttagaattgttagtttaattttccaccagcaggaagaaaatcttgcaatacctaagtagttcaaattagaaagtgtgtcaacagtttttccttttccactatttaaccctaaaaatgataaatgtcttcaatttgatctgactttcagttgtatggtatgcctctgtaggtgggaaagggtgtgtgtgccaaccccaaccccaaacccccacatatgcagaaaacttggtttgatcccaggagccccagaaaggaaggggtgcttgtgagaaatgttgccggtaagtgctagtattaatacttgtagcagtcacttgctggtgttagtacttgtagcaaaagttgcatctcagaactgccaaaatagtgtgacttttctaagaacgcctttaggagtcattaaaaatccccaaacatacacctatacaccctgccatccagaagcttaactaaccattactcattctgctttcac

SEQ ID NO: 418738 - DNA, 1297 bp, Homo Sapiens
  misc_feature (325)..(325): n is a, c, g, or t
  misc_feature (355)..(355): n is a, c, g, or t
tgtgcgtcgtttctactgtgcgctggctctatcttgcgtacactgtctgtctgcatcggcatgggtccacgtgcccgcagcgccgactcgttcctatcgccacgaattatgggagcctagtcatgagcgagtctagtagtggaagctgacatcacttgattacgcacgaatcgcatagtaacacacgagccgatacctacctgctgcaagatccaaccctatgggtagctccggagagcttagcttctccacttgcaccggcgtgtatctttcattgctcgatcgactgatatgtgctcttcgtcgccatgctagcatctggtgntttacactttgtgtgctctctctagactanatgccccctctgttgagccatatcactaatatatgggaagagctaaatactcgaggatcagggggccgacgattggaggtagacgttggttgctccacagaagctcctaattagagccccttagacagaactcaaatccatatgaaatctagcacttagctatatctctctaatctacctagctatgtctctcccgatgagggggcaccaagtgagtagtgggtaggcaagagattgtatacacgctggtttatgaaaagggtgcgtctacctaccaacattttatctttgtccatatactgtaaccccttaattaactgtgaggccaatattgggaaatctcataaattttgggtttcaaataattggggcttaggaaggccattacgtttttcaaagagaaggaccgaacaccgggaggggaccaccagggtacacgcccacaaattttttgaagattccccattaccggtttttggagaacggcttatgaccggatggttgccgtttaggaccccaaagtctcgggaacccccaaattaagttagcgcaacaggtggggaaaattaaaccggtgcaacttaaccccctagggggctattaccgcaattttcaccgtgtctgcgttcccccccagaatcagaaccggtggaaaggcttccatccgatgtgtagataagttgccctcggatttgcccaagggaaaccaacggtcattatgatgagcaaaaaagacatttggaaactcccaccacttttgagtttggaacagtttcaaccactttttgtgtcttttgtttccccgaggcggactttttgtgcgtatatgcggcgcgtaattggaacttcgggcggatacaagaggagagaaaacttttggggtttatggtcttacccaattgtgaacttgggggtacttaacattactagcgttccccaaag

SEQ ID NO: 418739 - DNA, 976 bp, Homo Sapiens
  misc_feature (370)..(370): n is a, c, g, or t
agcgggtctctgctgctcctgttgcagtgtatgtcgcttcaactcatgcgtaggaaggaaaagcacgctcgctgcgactagcagcattgcccgaagcgtgacagcgctcgggacctccagcgggactcccgtttcccattgagacggctgcgttgacccgaatgatagctctccgttggtcataagctagggaagttactccgtgtgggcaccctgcagagtggcccgccattcagtgtgacacttcgcagatacagagagtgagagcattcctcgccgattgactctctatgccacccaaactagtccatatgtaccgatagccaacccgtctgggggcatgggggaatcggaggaggcgcgttgtctntccactgcagactcccaatagcgagtcgtttcatcgaagccgtaacttgcgtgcctaatgttcggaagcgtcgcgggcagatgtcgttgcgcagcttgatgtacagatccgggttggttacgctcccaaccctgggacgatccctttgaaccctcccttccgagcacggacattggcctgggcgtggttcatttatcgccaggagaaaggtgtacggctcagagatgcgtgttcgttcattcatctgtgtccctccccatccttgttctcgtagtcgtcgactcccaattgtttgccgttgggattggcgcttgtgtggacttctactggttgcggcatcttcttgtactactttgccttgttagaacgcctctgtcaaaagcgggactgtcctttctccttagggcccaaacccccagttggctttgaggtaccctcggccgtgagtcccgtaagttggtcttgtccgtttccgtataggccatatttcgttgtactttggatcgcgcttggggcattttccatttgatcccttgggggtccccaatgcccgggtctttttcgcccccttgcgaagaccctagccttgttctcccttggaccccc

SEQ ID NO: 418740 - DNA, 751 bp, Homo Sapiens
  misc_feature (259)..(259): n is a, c, g, or t
agcggaaaacatcgtgcttcgcacagatcggttcatatatttgagaatacaaccttatgacctgcttgtctctgtactgtccgtagtgacttggaaggtaaatccagagtatacttagagcgatacaacgcaagtatgctatttcctcgtagaaggtgacattagtgtgatcactctactgctcaacagtagaattgctagtttgcatctgcgttcctctttcagttcctgtgtaagcactgatgtatgtacccgatantcaagacaggatgtgatatttatttctcaaatctactgggaaaaactagttggtactagatgagcaatatacatgcctttttactcctcactctagaaataggaaaattaagaccacttacaggggagagaatccttatgatgctgatgaattaatgaggagtgtaattatacaccttgctgtatcttgaaggtcgtagagcaagaggaggaaatgatatgacaaggtaatactaacatggtgtgcctgaagctgtttgtgacttaaatggtgtgtagttgactagaaggctgggagagagtgcacaacacttaggcatcatgtttatctttttataaagaaactgggtacacagcgttttgtaattggttttatgtatcacaggaaacattaggccaagatatacttgtaaattcgtaacgaatagttttagtgagatactctgataggcaagatataatatcccttcggtgaaatgtagaaggaaatcct

SEQ ID NO: 418741 - DNA, 912 bp, Homo Sapiens
  misc_feature (478)..(478): n is a, c, g, or t
agcggacatgtcttcgccgacacgtcgccgggatctcgtggactgagagcgctcggacgtcagagcctatgcctcatccccgcgaccgggggcggcgcgcccatggagcgtgctcaccgtgcgcgtcttcgactgcagccgtgcggacctgtcccagtgcccaccgcgcccggcggcctggactctgtgcactgcacacggagcagagctaagcgttgttttgcttggattccctgcatgatggagcgcagataacggactagattgctagcctcttaactggaacacagcagaagactcataatgcgagcacctcaatgcgcttagatgtgctctagcgtaggacacaacaactcgtgcgctttatgctatcatccataagctacacgactggtacatattacatatgttgttgcatgcgacttgtgggtactagatggattcctgggaaggaccaattcctagtgcgacattacgncctatcacaacgcataattgtgctacctaggcacagagataggcgaccgtggacatagcgaacttctgcagtgcaagcttagatgtcatcacgatgtgacgagatgctgaaatctagcgcatatagagaatattcaaggaagaacgaagaagaaagtgaatcgacgctcggtcaaaaaagggggaatgatgtaggaaatgtaaatgttgcggataatactaattgaggattaaaaaactagatcgaaggtaagtggactgaatgtggatctagcagtcacaggataggagaatatcgcaaaaattaagaagcatttccaaaccacttaggaaagattggaagtcacgatgtgaaaaacggaatttgtactttcgaattgaaacgaagatgaggaagctagttggaaattgtagaagtggaacacaatagtggca

SEQ ID NO: 418742 - DNA, 921 bp, Homo Sapiens
  misc_feature (183)..(211): n is a, c, g, or t
  misc_feature (520)..(520): n is a, c, g, or t
agcggtttagtctttttattaaaatatagtctccatgagtagactttgtattcttcatcatatatttcctagcacaggcagcagtcaataagtatttgctgaatgaacaaaaaatggggccgggggtagatggcaaatggaaacctactctggaagcaacattcattctaattcttttcctgnnnnnnnnnnnnnnnnnnnnnnnnnnnnngagttggccctcttggaagaagtttttaaacgacctaattcccttcctcacccagaaagagggcagcgtgtgaaacttctccactaggtgggggtttaccgcccccaaagcacccaccagggcgagcgtgcaggagggccaaaaagagggggagaaatcccagcaccagagcacagggggccaccaagaggaaacagccatttgggccccaaagacaggtggaacctatttgacctcctatgtggtttgcgcccggatattattatatgagaagaatatcctctctctggggagaaaaacccccggganaagttacaaatatcccacaaacagatatgtggggaaacctcctcccccaaaggtcgtccccaaaaaagagagcgggggctatcctctctcatcacaaagaggggcaccctatattaagctgtagaagagtaggggcaccctcctaaagaaaatctcccctatatttttacctcttttggggatcgtgagcagggagacatggacaccggctctatttagacaacgtgttggggcgctcccaccacccggcggggggcatacaccatctctctttttaaacagaggcatcttcacattttttccccaatttttaacacaattatcgctaaggggctcttcacattgggtacatttgggcaaacgcaaacaccgtgggacacacgcttaccctagggggtgga

SEQ ID NO: 418743 - DNA, 1336 bp, Homo Sapiens
  misc_feature (1250)..(1250): n is a, c, g, or t
agcggctaagctcctcagaatgtgcttcagcccaggagtcggcaggttgcgatgatgacgtccagtatgcgccaccagcttggcgacattgcgacgatgaggtcgttgacaagcacgcgcaacgtatctcacaatactcacataggacaagacagagacagacgatgaacacacagatggattcaaaccagtctcgaggtctctgttaacgactccagctaggaacgtaaaggactcccggtaaatgccaaagggagctgcctgggttcgctcatctgcgccctcccgtggtacagcgcgtacctcatacctggtcccaatcgattgctgcttgacaccattagtgtcccgagtatacagcagcggacaggttgcagctgtccgagccttggggctttcaagaccctggggaagcgaagcgtcccacggggttgtgcccggcgccattttgcaacgaatggaacactgttgtgtctcgcagagatggcatgtcgcgcctatttattctttgcagaggaatactctgaagagaaggagtccgtggatatcaaaaagatactcagcgggatgtttcccctggtgcagagagacacaaaccgtgtggcgaattgtcgcgcgcctgtgagaaaacgtgaatggtaaatcctctgtcatcacacgagaggagtctttccaattcacccttatcctatgcctcaactcaaggggagaaattgtggcgaccttccttggtgggtcgcggcgcaaattccgcaaatttggggcaacgaccatgggtgttctttgggcttaggaaaaagaggaaaaacctttttggtaaccagaagcttagagtggcccaccaaacctgctgctaaatggtcattgtggtaatcgctcaggtgggaaacgcccagggaggtctaccaagtttttggccctccccgccgactaactcctggtggaaaatgctcggttacctaattttcctcgtggacaaaccacgaggggatggaacagaaagcgcggccttcccgaggaagggttttaccaatctctccctccttcttttagaacacagtcaggcaacactcgtaaaggaaaaggggaaagaaatacactattggtagaagaggcggcccccttaataccagggctttccacactgttaacgcgtacaacccggagtcaaattatagagccccccccacgggttatggcacacacaagatggttgtcggccgtccatcctggtagccttctaccttgtntgctcggaggcccgatttataatcctggtggtgggccacacacgcgccaacaacgaggaagggtccgccacgagtcgggcgaaacg

SEQ ID NO: 418744 - DNA, 941 bp, Homo Sapiens
agcgggggcacggtgaatgggtggcctgtggtgtgctcgtccttcctcggcagcttgggcggctgtcgcgggagacttgctaggcccactggagtagtgcgctgatccgcggtgtggccgcgggtgtcctgtgtcgccctcagctcaagcatgccggtcagagtgcgactactgaacctgccacgtcggcttgtttgtgcctccgtggctgcaggcaccaaagtgtaagagccgccagctggtccacctgaggtatgtaaccaacgtaggaggactcgaaacgaagcctgttacgaagcgccgagggaccaggacgacagcaaagtgaccaggcggctcgtcgtaagtgcgcgccacagtactgaccacatgcagtgcattgactagaatgcacaattctccatccctgcgaagacatgtcaataaactgacacgacctcacctaatgttagacctcaatgcatgcgaagcatgcattggtaatccgaaggactcgaaaccatgtgtgcataactccgtccaggaagaagacgactccaagctagatcttaggctggcacaggaaagcgttaccaattcgccaagggaacctcgtcaaaacacggatagacttgaccgcgaaagctaaaaaacacgagcagctgaactcacagacgaggcgcactgcgggaaagatgcactaatacacgtcatcgcactgcacgtcatcgcacacaaccttgtaaaccagggctgcgaactcgacagaccttaccgcttcaaagaagacacacagaaaggcaagcctgtggacacccacatgaacggataagatgacacgagcttgactgcgtgctaacaaggggaacgaaacggtgaaatatgcacgcagccaaataataaactagataaagcacagactggacatcgcagtaactggcagcaatactttaggacatgtc

SEQ ID NO: 418745 - DNA, 1134 bp, Homo Sapiens
agcggatcgtaccccgcaagactcgaaggagcccaagggatgcagtaacgcagtggcgtcgctgtccctgcgaaagaagcccacccgtgcgagtaccgcgtccccgcgagttcctccgttcgcagagacatcttgacccgatccgcccgatccgggcggtcacgtacctgcgaaggacggccagtgcttcacgagttctctctttgctagtcagtggagttcatgtgtgctggacgaatcgtcggtacagaggcgacgcatttcgtgaatgcgagaatgatcgacatccctgcaatgtccacagtcgcgattacagtggagcgatgaggctcgtcgccgaagacagagacgcacgctaggagcctgcagacggaaagcaacaagcggacttcgctgacaacacgaggcagacccaaaagactgtccgcgcacatctctataaccttaaacctggataagccgatcgctgagttgacaaacccattgtaggtcccggtcgaatgtacacgatatcgcttggaatagcccccccaccggatgggaaagctttaggcgcaaaactcccggtaaggacaccaaaggtgtaccagcactatgaggatcggtagcatctcccttggacgatagttagccttagatacctgtggcacttgatacgttcttgaacatgtgcccccatcgcccagaaaaatttctttggttgaggacacatatggcccaaaacgggtcatcctgagtggagacgatgcggggaatgagacccggggcattgttgtgccgactgccccattgggcggtgattgtgaaaccggcttacaccagaacttgacggttaacccaccacatgttactttgcaaccctggatggactctcagggctacccttttccttgaggcgcctgcaagcattgcgagacgcgattgttattccccatgttcctgtggcatgcgctcttccagtggcttgtgcccgcgagtgcggcaaatcgtgggggaaacatccttgccgaacctcggtcgtgactccgaggggttgctcttgcaccctgttctggggccccattgcctttctggggacatcccccgagggtatgcccactggtgtggttgccagaagggtccacgcatttccca

SEQ ID NO: 418746 - DNA, 859 bp, Homo Sapiens
  misc_feature (314)..(314): n is a, c, g, or t
tgtgccccggggctttaaatgtgagacgtaaaattttccatagagtgacttaacggatgagaaaggggtgacctattatgatgaacaagtacctaagggtcttattaaagcaacttgagttgtcttagcccctaaatttacccgggttaaaaccgtgttaacacttaacccgtgaagtttgtgggtgaactaacgtggtccttataccttattggcagaattgttggccaacgaaaagtgccccattccagggggtggaacgggggaagcctagtgaaagtgcactaaattccctccttgccaggtgttatacngcttctcaagggattgtgtattagggatattccgctcttcacatcttatcttgtccccccacagttgccgccaattatacttatatttgtggcaccaccttgtgggtgttaagaccctgtgacttccccggtgttggggacatattttatattcacccagagacccattaagaccttcatctcaagtctgtgaacaatttttcccgtgtgaagtggttatttaccctcgagcgaagctgtggtcctctgggaaccttaaagtgttcccccctagaatttgtttttacagaaaatcagggcgataatgattgagttggcatgtgagaccaagaaaaatttccattatgatcgggggggaatatatgcgtgtgtgtaaccatactcccgatataccccacaagccttgtggcgtgaggaagattcttagccccttataaacacggtgggatatgcccccctttaaacacccagaatttgaattgaaacccccttggaggaaaaatgggccgtgacatttggggccccttgttggccttagaaaacgg

SEQ ID NO: 418747 - DNA, 1143 bp, Homo Sapiens
  misc_feature (338)..(338): n is a, c, g, or t
  misc_feature (624)..(624): n is a, c, g, or t
agcggagatgaccgcttgccgaaaccccctggagatagcaaatggttatgtggagcactgtgttccgataccagtgtaacgaacctactacagactgcgctcagaaggcagactggagatagtacaccgtctagaagtgataagaagcattgcgagtataataagggctggctggacgattaacatcttctctgagattgtgaatgcaagctagtgtggagagagccacgagagaatgccggcagaaccacacgctgtgagcaggagtccctgggttggacacctgggtatgcccaaagggctggtccttgtcccgtggccagggctatatgactggnttatcccgacgcgatatagtctctacctcaccagcggtcgtccacagcttgcattcaagtggagaacaaactgggacatgcatgaaccgagcgggggtacacaaaagtgcgtgcttccctgggaaacccatgtccaggaatacatgctgatcagttgcacataggacattggtccccattaactagtggatacactactaaatgctgagggaatagaaaaggtcgacgcttgctagagcagagattggagaaagcgtgggctctccttaccaaccccttgaacatnatcatgccatgcggtatgattaccttcgggggatcattcacagacttcactaaccaggaaggctgacgtagagagagtgagtagcagttgcactgccccattcctcgtctctatcccctgcaatagcacacttatgccaagaaaagctgagggtgggctgtgcgcgtttaacggtggtgtgggggctggggtcgtagcaaagaaagttgagcatatctttcaaaaaatcttcatcgtagatcccaattcttgaaaagctatggctcacttgcgtagtcccttgtagggtctgtacccaacagggaccgaatttgccatttagcttgcactttatggaagggggcaaaggaccactgtccccgcaggaaatgggcgcaggggagacccccgaacattaagccgcttggaagggggaaattgggaagtcctaagtaacgtgggaaatcggaatcgaagacccggtggctcggtggtaccgagacagtaggccttaaaggtgaacccatggggaaaggaccc

SEQ ID NO: 418748 - DNA, 1264 bp, Homo Sapiens
  misc_feature (232)..(232): n is a, c, g, or t
  misc_feature (546)..(546): n is a, c, g, or t
agcgggatgccgcgccggggcggggattgcggctgtgcgatccgtctcgtacgtgctcgtctgcggcgtcgccgcgaggacgagcgcgttcctgaggaccaccatgacgtctggttggaccggtccgggacgtgctcgaatggcctatctcatgattggcagcttgctcgctggtttcagctaggacgggagaaagacaagggcttggtggcagcttcgctggtctcactgngcccgcgattacgatcaacacccaaagttcggcgactcgctttaccgcggaacggtcacggtcggagcatgagccgctgctaccgctagaccgggacggtgtggcggcgctcgcgttggacgccctgtccgtcgtgccttacccttggacgaaatggggctccagatcctcgacgtacagcgcattcacagctctttcgcaagcaggcgtacgaaaaggtgcgctagatgttagcgagaccacggttatgactcgaagagatgggattggaaagccgcgagccctcttctgagaccggagcaagcgtcgggagncctgtgctggactgcggcgcggatctctgcgtcatgggagggcaggatgtacagcagacgtaacaagcgatgcgtggcacatgggaggatctcctatccatgcaagcgatggatgaagtctcgacaggtcaccgtgaccggagagcttcctttgctttggtccgaagcgtagccttggttggttacttatcccctttgaaggattggtggcgggatccctgattggtgagctcctctgagcggtccaggtgttggcgctactgatgtctgcttgtgccctgcccacgtgacatgcgtccagtgggccttgtggcggtattcacgtgctggtaccgtgctgacccgtggatggctgttaggttggtcatgggcaaccgaggggcattgggagtcttcgccgagtggctccgtagggagagattgcgctagcacggagaatccacgactgcagaattcgttcggggggccttcggggcatcgatgttacccgagttgtaaaaaaatgcggggaccgcaggttggagggaagtggtgctttctagacgcctttgcaaccttggatttatccacggttccaggagggcacatgggcgcaggttacaatccgggagagtctgtcttgggaccgctgggagaacccccgcggtggctgaacggcaatcccagagggactcgcggagagcccgagaggatgtgcggatttgtcgggcatggtcaa

SEQ ID NO: 418749 - DNA, 453 bp, Homo Sapiens
  misc_feature (321)..(384): n is a, c, g, or t
cgctaacgggaagataccttgcgatggctggaaaaaaatcgccccttccacactatgaatatagagcagatcctagtcgcgattgtggcctctggtcaccatgtcagcccagagatctgagtaaggagcagcataatgcgcgataacgacgccagacatggcgagcatacagctgacaagcggcatggatgacaaacgccaaagcgagactcaagagcccgggaacaacgcccgggaaattgccaaacggaaagaagtacacgaccatggacacaaaagagagaaagcaacaacgacaccaaaagaagcagaacgagtacnnnnnnnnnnnnnnnnnnnnnnnnnnnnnnnnnnnnnnnnnnnnnnnnnnnnnnnnnnnnnnnnaaggagacgagccgagaaatgagacacacacatagaacacctagactgaccagaacacgaaagaaacac

SEQ ID NO: 418750 - DNA, 1064 bp, Homo Sapiens
agcggggctgtttggtagcagaattttcagtttccctatcctttccaggtcaaagggaatgatatgtgcaaccatgggcccagtcgctgaggtcagttccctgagccctgtgcgtaaatgtgggctctgtgtgcaggtctttatcctgccagtcccttgatgtgcaggggattgctcctgcacctcctgagccttcagcttctttctttccaagtgctgggcattcatttcgtcttcctcttcaatgaagtctttttctctttctctttcaagaaatgtgcccttgtgtcctctgtgctagtgaagctagaaccatcatttgcactgactacaaggtttagaagtctcaaccttgtctagcttgctgtttatgtgggtcctataggactttggagtcatcctccggaaacaagaactagaccatcctgggtcttgatgtgaaatcagccatttagagagacccctatctattcttccaagggcagggttgagcaacagcagcctctgtctgagaaagcttaggctgctggatgttattctgaacgatgatatttaatcgctcacccccagcaaagaataagagttaccacagaagacaggatggcaaaattgggcagtctcccagctccaggtcaaggcttctatgaggctgatgtgaagcaattgcgacattctcagcgcatcagaaagacacagttctaaattggaaggtacccagaacttacatttccccaagggccacatacttagcgttttattaatcatgtcacagcacttgcgatgcaattggacacgcgtgctccatatcaatggcgcacggggcatcaacaccacaaaagcggggacatagatacaggaacatatctacacaatacaggacaccagtgagacgagcaaatggggatcacacccgtggcgcgtacgaagagacaacagaacaagaaatagtagcgagggcaccaaagtaactgaagacaacacaaaaccaacgcgtgagagaccaaaggacaccacacgcgacaaaacaacacaagcaaagagaccacatggaacaacacagagca

SEQ ID NO: 418751 - DNA, 630 bp, Homo Sapiens
ccgatctgctggaacaccgaggaaaggcaagtagacagcaggacagaacagcataacagagacctcgtcggacataggagcctagagattagagaaccagtaccgcgtgtggaagacgacagacgagactacggaggtgataggagaaacaccgttggactcacaacacgcagcaacctaatatgaagtagggggcaccagaagaatgataagaggagctagaagggagcacatcggctgcctgctgatcagacatcaccaatgctgaaacaacacagggacaacaataaaaaccagaggcaacgagcttctcgcaagaatgactaagacgaaccaacagagaataacaaatgcgtgagggagaagaaggattatcacaaacataagaagcgaaaacgggagcaaccatccatacaagaacaacaaacaacacacaatacaagagggccaatacattagagaagaaagagaagaagcaggacaacaaagaacaaccaacaaagagatgggggagacaataccacccccacctggatatctcgaggagagcacaggggcagaacctcctgaaaacaaggaagcacggacgaatgacgaacaggactaaagacaaaagagagagaaaaaacc

SEQ ID NO: 418752 - DNA, 1029 bp, Homo Sapiens
  misc_feature (666)..(666): n is a, c, g, or t
agcggactttggtgcgccgcgggtgttccgggcaggagaccggttggtgcaggaaatccgatagttgataagggctccactggagctgataggagcgcatcggccagtaccagtgggcagcctcggtatgtgggccgagggccagaacacacggtacgtaggtaggttgcagcctcgagtgcgtctgccgctcatgcatcgcatgcttgcttcatcaccggtggactcgtgcggtcgccaggagccttctccggtagcggattgtgattctgcaggagagcactaaaacgaatagactcatgtgtacagtagttgtgcatgatatgagaacgattgttctgctctttgtgcgtagcaacctctattcgaaggtctttggtcgtggaactatccactgatttgacccgtcgatcttgtctcgactcgcgcttttccgcgtattgtaaaattagccgacttcgtgactgctgcttggggtgagatctgtttgtggtggagatcgtatttgacggccgccttgcacttcaattcgggcgcttgttaccggtttagcctctgtggtggagagatccaccttgcatactctgggggcagtatgtcccaactcggtgcatgtcttgtcctgccctgccctggcatgtgagaaggaacgaagtgagaccggcngaagactcggtacctaggagctgtcggaagcaaagcgctcaatgctgtgtagcgtgcgaggcagagagccgggtttaacgcggtagcgaagtgaacccgtaatagtgcaagcaggaattggaaggaccttagcgaaccaattgggccgatgatcttcttgcattacaaaaactcatgggggccctggtgatacaacgttacggaaaagacccacgttatttcgtaggaatatttcgtaaatatctaaactatataaggctgcgaccaagttacccttttgggtacgcctcaacggtgttccgtatagagcggtgcgacgacgtcccctggtagcccagagctcacggctggtgcccaccactg

SEQ ID NO: 418753 - DNA, 976 bp, Homo Sapiens
  misc_feature (107)..(125): n is a, c, g, or t
  misc_feature (150)..(265): n is a, c, g, or t
  misc_feature (276)..(299): n is a, c, g, or t
agcggagaaaaaactcagattaaacgtcataatttaatatgaatatagttcttagtttcttataaacagtttcttatctgtctgacttaatgttgggaatctttaannnnnnnnnnnnnnnnnnnaagagacgggtttggcttggtaatnnnnnnnnnnnnnnnnnnnnnnnnnnnnnnnnnnnnnnnnnnnnnnnnnnnnnnnnnnnnnnnnnnnnnnnnnnnnnnnnnnnnnnnnnnnnnnnnnnnnnnnnnnnnnnnnnnnntctggtctaannnnnnnnnnnnnnnnnnnnnnnnggcagagacagggtctcactatgtttaccaggccggtcttgaatttcgggcctcaagcgatcctcccacctgtggcttcccaaagtgctaggattaaagtgtgagccaccatgcccagcaaatgtctggaatctttaatagagggtcattctctactaagagctttagaaagattaagctttcccctatcaatttttctgggcaattaatacttacactcaaactatttttcccagaatctcctccggttttcttcccacggcgggcattaacaactttgtcactaagtgaccttttcaacaatctggggttagaaaaccaagatttaataacatcagtataatatctggggaaactccttttaacatacacattagagcaaatcctggggaacccagggcttacacagatgtttggggtactaaatgtgtcacagatcaccgggtggtgtatcttcacaggacggtgtaatataaggaggcttgactatattcccctaaagcattcctccatgtgtcgaattaaacatcctttatgggaacaaacggtcaaaagatgtgtgcaatttcccagggtatctgccttatacccgtagtccatattaccttgaattctgagaaactttacgttccaaacaggaaacatgtgttcactagggacacggttatcccttcccg

SEQ ID NO: 418754 - DNA, 825 bp, Homo Sapiens
  misc_feature (384)..(384): n is a, c, g, or t
agcggattgggtagtagaacctccgggaggtcccgctgttgccctttccttactttcttgcctgccaggaggtcgagcacgagttggcgagcaggcagaggagcccggagagatcagcagacttctccgcggacgacgcgccagggtcctgaaggccgcggcggcgcgctgcagcttgcgcgcgccccaccttcccgcgttgcccgcgagcgcagccctgcacctggtccgcacggtggcgcgtatccagcgcagccactgcttcccgtgtaccggcgtggctggagcaccgctgtgagcgggtgtgctacacttccgcgcgtgatgagcgtcgcctgtgtaccgcccgcacgtacgctgagtgctcgcctacttttcgtgctncgcacatgtacctacgctccaaacggaatgtctcgcgtttacttcattggcagcgttgtgcgatctgactcggtttcgcgagtcgagcccaccggcgtatgcagacacacacggtgcgatacccgacatttttggaggcatagggaggagtagggaacgcgcaaacttctatgtgccaggtagcgatcggcggggacgttcgaggaaattccgcagattttgcatcgccgtcgcgcttagggcagaatagtggcgtgcgcgcggagcttcggctgtgtgggggtttccccgctgggtggcccaaagggcagtttatacgtcccgggtggacctgttctttagcacctgaactattgcggcgtgagcggtgtcctatggtcacacatccatggtatcgtgccaggtgggatgcctggccagacgccgggcgctgtttgttcg

SEQ ID NO: 418755 - DNA, 374 bp, Homo Sapiens
gcttggatgatttaatactctcacccttcctgttaaattttcaaagtccctaaatacttcttgactgtggtgtggaggctcccacaatgctctggggagctggtcagtctgccctgggtgtttttctcagaagggcctgggaattcccagctcagatcctgccctgctgggaggcaccttaccccttgcaggatgccgatcatcagtctcacaagacctaaacaaattctctccctctccccgaaggctgcctgggtttgcacaacacaccgtttggggcctaggaaggccatctcttgggcccttagattcagatttgggggttcctatggtttattccctcttccctctaccttttacaaggaggtagtgtc

SEQ ID NO: 418756 - DNA, 796 bp, Homo Sapiens
agcggatttccgcgccctcgtgtagtggcttctgagcgcggcctgggtgatgccctgtctggatgcagattgtccggatcctgctcaacatgtccgtcctcgagtctacaagctccatcgcagtggacgtcgaccgccatcgtacccggcaatcaatgcagattccttcccatggctgaagtgaagagacactgagggtgcgatgaggtcacctctgtcgagacgatcaagtgtgaacggcagtgacttctgtgtgtgcgtagagacctgagagtcaggtgtgttgcggctaggtgacacataggcaaagacgtctcgtactgaactgtgtggcccaggtccatcggtgcagagatggcttgatggaggaggacttcctggtgtgataccgatgcaggtgtgaatgcaccggagatacgggtgtgcaggcgagcatcgtatcaacaaaccaagccactgagtgctgacgcttctgggctcgtgcactctactcaagtttcgcagtacatgcttgcacggagtcagctcccggtagtcgtcagaaactcgaacattcacgattcccctcagagctctttccactagcatcctattgtatggcctcagatcctgtgagttctccctgtcacgagcgtggttcccgtagacgggccatcccacgcatctcaccctggtcagctaccctcggggtccttttgaacaattttttctctggtacttgatggggcgttgcatcgattcagcgttacccgaagttgggcctctggcccctgtgctgcggaaggttgagctcatg

SEQ ID NO: 418757 - DNA, 551 bp, Homo Sapiens
  misc_feature (248)..(248): n is a, c, g, or t
  misc_feature (442)..(442): n is a, c, g, or t
  misc_feature (465)..(465): n is a, c, g, or t
agcgggggctgtgctcgcggcgcgcgtgcgaccgcgcgcgggcaggttcggcttgtccgcccgtatggccgcgcgtgcgtccgcggctcggtcggctcgcctcgttgcagctgctgatgggctgggagcgtcctgcgcctagcatagtgggttgcttggatgcggaagcttagcagggcggacgactcgaggcgtcgctgaccatccactgcgattcacgctgtgtaacacctccgtgggaagtaccntacagttcagcaccatctgagcggcagagtccctcgtgcctcgcatacgttcggagtgctagttcatcacttcgcgtaggtatttgagagagacagagtcgattcgctacccattggtaggcaaaagctcttgattggctagggtccctttgttccaacagcaactagcgttcgcgttggcgtgcgacatcatngagaaccttgctgacctgtatgnctttgagcgcagacgaagcaacgtgtggtagaccgcggcgtaaccctcgagtgatcaggtctagctcgattcagaaaggagcgaac

SEQ ID NO: 418758 - DNA, 1153 bp, Homo Sapiens
  misc_feature (36)..(36): n is a, c, g, or t
  misc_feature (808)..(808): n is a, c, g, or t
agcgggcgctctgcattgtggggtggcgcgcggcgngcgggctaccgaggcggggccgggcgggtgagcgttcgcggggacgagggccatgggttactgggaggcggggctatcggccagaggtagtcggacgtactgttcccctaggcgacgtgactgtctaccgtctggggtcgtactgcgggtaactgcagctcgtgctgccgcatcgcatctgggacagtgtgggcgctctataacccttgtacagatacaggtgaatgactcaggggactcgtcactaggagccgacggcaatgcgtggaaggaaggctcgcaaacatatgatgtcgtagcgaagacctggtcatgagttcgaagagcgatgttcgtccctctcagtacgcacatattagacggctcgcacgactcctctgacaaaattgactagaccgtttccaaatccatctcaagccaagggaaggtttgctcgaccatcattactgttggacaattatcgtaaggccctcatggagcgtgggcacggatgtctcgcacaagggtgcaacatgatcgatcgaggtgcagtgggaaggctccacaactcgggtactttcgcgaacctacactggggtacttgcaatcggcatgctatggactgagagggtgtagcgatttgttggctgttttgggagtcaaatattaacatatcatgggttattgattcaccacggtgggcgtgaaattcattttcaagaaaaccagctttcacgcctggaggttgcacccaattgcaaggacacaacagatgctttttcatggaacggancgtagaaatggtgagacacaggagacgtttccaaatacggatagagaggagacgcacatcaccttccactgggaaacgtttgacgttctcctaggctcaacccaaaggaattatgtcccgatgaggaggaaggaacgaaactgtttgtgggaagcctcctgtgaggtcggaaagcgccgggtcgagccactattcaggggttaaaacaggggtttcgggcaacaagggtattcagtcttaaacggcccacgcggcgcaaatgcggtgggccgttggcactctaatcgaatggttaaacgcgcgcttccacaattgttcgttgaaagcaacgcataggagggatag

SEQ ID NO: 418759 - DNA, 893 bp, Homo Sapiens
  misc_feature (139)..(139): n is a, c, g, or t
agcgagggagacagcgccgtagtgccggtacatcggggattctggctcttcctcttcgccttaagatacgggtgtctgtatatgaataatcaatagcagtcaacgagccaacggctaatcaggaccagcgttgtgaacnaactagaaaaagacgatgacacacgagatgacgcgctttgagcccgtagctcaggtgttcaagcgactgtattacttgcaaggcgttaaactgaaaccggtactgatttggaagcagtagctgagagtctctcgttgatggcttctgtgagtcataaagaacgtatggatgtaccgtgcgagtaatgtcagaagagaacaccttcgtgttggaccacttgcgtgtgtgggctgggtcggcaatgctggcaccccaggtggctatcgactgggcagcaatgatcatgagtagcggtatcgacgaatgtcgtagcgatgttttgcaggcccaagaagatctacgagaccatgcagatgcatttgctcaggttttatacatcaacgttaatcgacggcggctacaaatacctggagaaaggtcttgaagatgaagtgataaagagcatagctggcgtgttcttgagaaagggttaatcagagtcggaggaggaacaatgctagctatgtgtgactgtgggttcttctgggctaattggagacacgttaatgcgatcctatgtcttaatagccttttgataatgaaaattgggttaaagaaggagttacaatcagcatgtagctggtgaaagctctttacatcattggatacatgacataaagatatcaaatgcacgtaagctgcaatgtcttcggaaaagtcagcatgggataacaggactggatggaactcctttcctggcaaattagcgaagggt

SEQ ID NO: 418760 - DNA, 624 bp, Homo Sapiens
acgaattggacacttgatgaagggacaggacacggagcagatgacaaacgcagactggcatgcagtctgttttcacgggtgggcaagaacaacagtggaatgtccttcacgttcttacaaacatatggtggcagtttgtaactctctgagtttattgtactttggcctacaaagggggtctctttcacggcaaacacagaatggaacccttcagcagacatgtctacagttgtaaaacaatatacggatacgatacggcattcgcggaaggtcgtgcaaatggttcccgctcaaagaacttggcggtaacagttgaccgcaggactcggcattcatgagcacggacttctcatcacgcttctctcatgcagacgttttacggcctattcggcactcgagcgacatgcactttggcacggtaccgtcgagggagcagttcccctcgactggagcgccactcagatggcctgcactcccatgccacttgggctgcatggtactgacgttccattcagcagaaacttcttcgtccaagtttttcataggaacgctgcaggtgaacgtggagtgaaacgacgactgcggattgaagggtgaaccccttccagccccaatcccaatcca

SEQ ID NO: 418761 - DNA, 737 bp, Homo Sapiens
  misc_feature (338)..(347): n is a, c, g, or t
agcggaatgtttcttgacctagagtggacttaatacttcccagattgatgagggaggtgttttcttttctgttgaatcttttatgttttattactcgtgagtgacttgtcagcaatcctaacttagattatgaagtccttgatcttggagtacatttaaaatatctgttgaaatgttccctctctattcatgttattctacgagctgcattaaatttcagtgttgttggagaatattattttatatgctttatttaatctttcttttaatacaattcattcagacccgattttttatcagtatcttaatattgcagtgtccctctgctgtcttaaaannnnnnnnnnctctctccatagtctgaaatgtaatgacatctaatgttagcttctggcacgatgctagtcacttttggctagcacccttctgtgcaatgctaatctgacattctgaattttaagctgtatatctctatatatcctgtcttttcacacagatcagtagccaagccttttatctgagccttatattacaaaaaggatgcaaaatcagaagatgtcaatggagtaatcattttaacgaaataagatacaaaattaattgggtccaaatgtaactggtgatcaaggacctttctgcataattatttcctaagttattgggtctgttttactccttaggttaagatctactcagtcattgattaatttgcatgtcattctagcatattaatctac

SEQ ID NO: 418762 - DNA, 1457 bp, Homo Sapiens
agcggggcctgtaatcttgcccctgagaggcggagtcctcgaggtccgtcatgcaagcatgtcccaccaatgactactatcgttggactgtgatcgcccgtgttagataatcttctcatcctgctctcagattccttgcgtgcgcctcatcgtcttttggcactacatagacactctcgacgtgtggtgccctcaccacggtatcggagcgcttgcccgcatcttggttcactaggcgatgtactgatagtacatgacctagtttatgccacatactcgcggattctctgcgaagtgtaagtagtgtaggataggaagtggagataggttcttgcgggcgtaaacagtatgtctctgcgtcgatcgtagggacagcttttccaactattaagacgcatctcatgcatttgcgcgaatccattgccattttcggatttatgatggcaatccagacttgcatcgggggttatggcccagcgactgcgtaagcaatgccgatctcccttaaagggaacaagctgggtcaggagtgtagtagtttctattcatctcccgggtaagccatggtgtcattcttccaaatggggcatgaggggtccgtaagataaaaccttaattgcctacactgtgattgcgtctggaggtaggcacgagtcgtgggtccccttcagggcaagacctttgcggcctgttctttcttgggaagcgaattgggacttacactttggacttcccaacaaacctttgatcgagtctcccattgtggcgttttagttattctttcgttggccccacacatacacgcccagatcgtattccactcgacggtttgggtggcggtcggtaatgccaattctggctgttaacagtgaggcggccaaagcgttgactgccagttggttgggactcccgaatgcgtccaccggtgggtggggtgggttgccggaaggtttgcagaattgtgtctgcgggcatggggtcccgctgttgatctccggttgtctcacgatcctgagttgcgggaaaaaaccggtgggaaggaaaaaaaagttgggagattggcggtgagataatccgatcccggaagattacaaacgggcgccgaatacaggtcgcaataattgtggggaccaccaaaggccgtgaacttgcgcttctgtctttaagatttcaatccgtgttaagatgaattcccccagtgaaggttattttagagagatctttcgacataatgagcgagcgctttgtaacgcgcgattccgcactgtcacgggatttgtccgttgggacgtttttctttcaccacaccgagaggtatgagagaaaccccaaattgcggagcccagatgatatctgtggcttagagaaccccggttaggatgccgctctcgtgcgtgtggaccccacatcaatagtgtgtgggttgcacgtcgggaaccttggcgagaacacattcc

SEQ ID NO: 418763 - DNA, 979 bp, Homo Sapiens
agcggtgcctcgtcctcgtccacgtcacgttggtgcctattactgtggaacctggtctcctttgcggacccaccggaaactgcgcccgtgcgcccgggaacgggatgcgtggcgcagcgcggcgcgcccccagtgtacgacggcgtgttctgtgaccgcgggcttgtctcgagttccgctctaatgagtcgactgaacggaagtgagtgtagacaagcttgaaggcgcagtgcttcttccgctgcgtcgagatggcccccgtccaactggagcgaacagagttgtcgagagtcgcgtgggcgtggaaacttgctcggagacgctggtgtgcaacggcctagcgtctcagcagagcgtgcgggatatgaagcagtccttgtcaggtcattctggttgcacttcatttgggcagtaaagggacgcgcccactttcggtacgggaggcttggctaggcgagcccttttcgttcgctcgccttgctgtgaccaatggcgcgcggacgtagaacggcgcagtgggggctggcgtcctttccccccttggccgatggccctcggggttcgccagtcgcgccctgcgcgtggcagtcgtagggagccgcggcgatcctgcccgtttggcagggttcgaagtggggtgatctggcggtggcctccctgcgaacctagtgcgacgttcttgaggccgctgcgaagttgcctcgcgtgagcaagcgcgggtgatcgcgctcggaggaccgtgtgctccgcctcgcgcgctatagcagagacagagagacgtgttgacgggatcagcgccgcacgaagtgagtcgcgcatctatcggtaccattcgagaagtgctccttaacgcgtgtcactaaaccgacattcccgttacgacgaaacgggttaaagcattagggaccagcggcaaggaatgttgccccatatcactgcttcaggcctgcaattgttcgagccaggagactcccgtggg

SEQ ID NO: 418764 - DNA, 905 bp, Homo Sapiens
agcgggactctctgctcctcctgttagcgaatgctcagtccggcgaatcttcattatagaccgttctgctcatggtccgatgacctatcagtaacgcctgcacgtagcaaccacatggaggaagagagctggaagcgtacgataaactcggaaaccggatttcttgagaactgtaatcgtgaggtcgttcctgagatcattccagtgaaacttagtcttatttaaacgtcgtaggttatatgggtgagaaatcataggaaatgtcccatcaaaatagtgcatccatatctataatgaccctgctaacttcaccaggtgtggatttataaaccatggatatcctaattttatgaattcactaccctcgcatgtggagcaatcaatcccaattgggactacgcaggcgaaagtgccatggggcaggaaaattgagtgatacagcttatatgttcggatccaagaatgggtacaagacaccacttcgaactaattacgtttccctaaggaatcacgagggaattcctctatcccaatgaaactaaggtggggagcacgaagttgccctgagagaagcctggacgttaccggttcccgtcatgatcccaaccctaggactggttcattttcacactattcgactgttgattcgaaaggtgcagtagcggaggccattcaatttgcggccatgggcttgaggtcgaagccctaatccatgggtgcttccatttcaactacgtaacgttgtctcctcaccccttactttggcattcgtaattgtgccccccccaaatagattgtcggcactaaattgcgcgggttggttgaaacaccttggagaatttaacacgttaaatagaatcatacctaagaccatctaagccagtccaatcaagaacaaattgccc

SEQ ID NO: 418765 - DNA, 690 bp, Homo Sapiens
agcggagagaattggcagttttaactatttttttcaaagttgagtctttatgtaaaaaagtacacaataagaggctccaagttggctaactaggggcattttatacttgcttcctccactaagaagaacaaaaatagcaagtagataatcacactttaaatagatcatccaagagaaaacactggaattcaacatataagtgacaggcaatacctaaagcaaggaaggagaaagaagcaaggcagcctacttggctggcttagctgggagctgagagagactccccaatatgggggaaagagtgagagaccctcagcagtccacattctcaccctggactccagtcctagccatggaagaacccctcaaccctcacaggccctgaaactaatgtagggagctgacaaggaattgtaccacaagcactgtgccagggaggaaagcttgtgctgggtccctcacattctttgagacctaagcagcaatggcaaggtgccattttagaattccatccccaacaggctgcacactatcctgaagcccagcagcgctgaggctgaggtgcaagaaaagagctggcttaggcatgagtaactgcaggctaccacacccaggtctgaggcatgagtggtatgcacactccccacctgccagtctaggttgccatcactgaagatagcactggccccc

SEQ ID NO: 418766 - DNA, 1153 bp, Homo Sapiens
agcgggctgcgaatctctggtgattgctagttcgtatcggcccttgcgtacgcgcgatacgagcactcctggtccgattccgccctggtctcactgagctcccgaacagtgctgtcacgagctcgaggcgccgatacgcggtggccgaccgggagcagagacctccgtcacaagacattcgggcatagcgattgatgccgtgcgtaactgtcctgttaccatcatgaacaatgtcgttctcgtccagaaaagcgctggtgagctctctacaaggaaatgctccgttaaaatgccattctcctccatctcaacggcggatccgcacctatacaacaaactagtgtgaactttgaagccttcgaatctcacgaaaagacacgagacaaagcaacgtagcagaggaagatgcccagcgcacgtcagcgcatggttgccccgccgaaacagtatgggcaggccctagcagagcctgttcctccctttgacctagtagaccttgcttcccgatggaaccaacctcggcggtctccgatacaattgccccctatgaagacttcgaggtaattacgcgaggttaggtcccacggtaggacatgaatctttggccctttcagcgaaggaccaacatggtttggctagcggtgccaatttattcgtcttcgatcgtccttcgactcatggcgcatgttggagagattcacattacctgacactgttctcagcaatcgcgatcaggtaccggtatgatcccacagaaggggttgccactccctttaaacttacagagttggcagtggggcactcactgggtcctttgcaaaagcgtttggacatctttggtcgccgagtcaacagagccggagctgactttctagaagggttagatcgtagacttcgcataaccacgtagcaggttcaggctcacaatacacagagcagcagacataacagcaagaagttaagtagcgtccagagacccgtaacgatgtagtgccaggagcagaagatcaggttgcagacgggagggtagacatgtggcgtatatagggacaggagtccatacttactcggtatcaggatgcgtgaattattacaccacacgttgtcggttaacgacgcacactcttgtccggtccgtcccgccgtaaatctg

SEQ ID NO: 418767 - DNA, 820 bp, Homo Sapiens
aacatcccagcccccacctacgacgagggcggggtgctacaggctcacgtcaccaacctcgacgcctccccctatcttggccgtctagccctgtgccgtgtcgtctccggtgaactcaccaagggacagacggtggcctggtgcaagcgcgacggctcggtccaaaacgtcaagctctccgaactactcatgaccgaggccctggaacgcgtccccgctgagaaagctggccccggtgacatcgtcgctatcgctggtatccccgagatcaccatcggcgagaccctctcagatcccgagaacccggtccctttgccgctcatccacgtcgatgaaccgtcgatgtcgatgacgatcggtatcaatacctcaccgctgtcaggtcggtccggtgacaagctcaccgctcgtcttctcaaggctcgtctcgatcaagaactcatcggaaacgtgtcgatcaaagtggctgacaccgaccgccccgacatgtgggaagtgcaaggccgcggcgaattgcagctggccgtcctcgtcgagcagatgcgccgcgagggattcgaactcaccgttggcaaaccgcaggtcgtcaccaaaaccattgacggcaagctgcacgaacctttcgagcgcgtcaccattgatgccccagaagagttcatgggccccgtcacccagatgatgggcctacgcaagggccagatgatgcacatggtcaaccacggctccggctgggtgcgcatggagtcgtcgtcccagcccgtggccttatcggcttccgcacgaggttcctcacccagacccgcggtcaggccatctgaac

SEQ ID NO: 418768 - DNA, 1258 bp, Homo Sapiens
  misc_feature (171)..(171): n is a, c, g, or t
  misc_feature (323)..(323): n is a, c, g, or t
  misc_feature (341)..(341): n is a, c, g, or t
agcggcggttgccggtctggcggcagccatcaggatatgccaagatgggtgcattacaatgctacatccatggagtctatcgagaaagaagcatctctgatgtcatgcgctttcttcgttgagggtcctgatgcatggctcgcttccgcgcaatgcatctcgtgctctccnacgatgggctccccgcccctaccctggcctgcataaggctgcgcctgactcggcgctcacgtagggcgcaagctcaaggttagcgttagtatctacggattccgtggtacgcgccgtgtgtggccagacaaagaaccgcccaatgttgcctnaaaggtcgcaacactttngacctggctatagccgtggctcctatcgatggttgtttaacgcaagctcaacatacgttatggcctcccgcagagccaacctttcagatcgcacgtttgcctatgtagcgtagcagcagcctatgcgactgccataacctagttgggggagctactcggagagcttcccttgaaattcttttacattgggttcgtgttgaagaattccgacagtacccaaacttgtgttcgcatggttaatccctcgatttgattcccactatcgcataagaagtcgtaatcgaagcagatgcaatactcccttgtacaaccccaggttgcgatcagcctaaaaacccagggtcctaccacacgacatcagtgggagcaatcgcgctatggcgacttgcatcactccttgccagagaccgcaaagaaggccgtgtggcctctgggaaggggggccccacatagcttcccactcaacacttactgtgggttcggtcttctccgcccggtgcctcagttcttgagcagcaaactggcgccaaagtaaacatcttctcgccttccccacacagtttacccggcgtaatctaataaggttaagaacggttcttggtacccaacttgcacttacgtggtacattaaaccaccaatttttagcgacccaggcccaactgaattcaagaaaccaaattgttccctcccaggtgcatgtgaatttcccgcgcactattaaagggggcgcatgaatccctttccccggcgtggggggccccccctggttgtccccagcctttttggcttccccgcttgtccgtgagcagagggttgagattcctccgccacctttggggggtagaagccaggtgggccaatacagcactggttttccccggggttgtgtaaccatcttctgattcccgggcccaaa

SEQ ID NO: 418769 - DNA, 360 bp, Homo Sapiens
  misc_feature (99)..(172): n is a, c, g, or t
accatacattaatgcactgctggagagaattaaaagaaaagttatgaacaccagaacagaggaacctgatcgggatgaacgtctcacaaaagagaagcnnnnnnnnnnnnnnnnnnnnnnnnnnnnnnnnnnnnnnnnnnnnnnnnnnnnnnnnnnnnnnnnnnnnnnnnnnggaatgaccgggaacacatgaaagaagctcgttgacaattaaaatataatatacaaaaggtgtgttttactcttgtagggatattatcccctattgtgtgtggagggtgtcaccacattctcacgcgctgtgtgcgcacctgtgtaccgcgcgagagtatctgtgagacacgccgttattaaacacag

SEQ ID NO: 418770 - DNA, 999 bp, Homo Sapiens
  misc_feature (21)..(21): n is a, c, g, or t
tgtacagtaccccgggcgtanaatctcagtttgacattacttctaggtgtcgggaagcaattctttttcttctgaacgcttagagcttcctccctaccaacaatgcaaagattttccttctctggattcccagactctaggcagactcatagatgcaggttagctttccttaagtaacaaggtcatgatgtaacaattgagacattgatccccctatgccatactcttcttggacccttcaacagcttttatcagaggtagtctacacaggccttccttccagaagagctacctaaggctatcttccgtctcggattacatggccctaaccccattctccgtaaccttgtacacacgttctcgaacactcagcatgcacatgtctctaggaattccgcaacctagggttgcgtcttgcagtcgagctaaaagccctcgcttatcccggatacgatgcaaaggcaagccacacattatcgtggcacacgcactgttcccatggccatggttcgcaaccactcacgctccaacggccaaagctggccgagcttctttcttctcatgacgcggggcggcggcaacacgcgcctacatacaaggagggcagacacatagcagccatccctataccacgagagcaccccacgacgcacgaaaaccgtcgcaaaaggaaagacgcccacattcaaagtcccaaaagaaacacaccatcgacttgaaagaacccatatccagtggcgttattccgtaagaacacttggtgaacaaaaccatcgatatctatggaatataaccacaaggaggacaatatacaaggcgcagcattgtaaggttgacaccgtattgaaatcaaacacgccgttggaagtggtatgaccgcgcacaagcgaaccatttgacgagagcaataatcaaagtaataatgatagagcaacaacaaaatgaggataaatggggcccgttttgtcagctgcgcaaaaggcgacatgcacaggaaaa

SEQ ID NO: 418771 - DNA, 1302 bp, Homo Sapiens
ggtctcggctggtactgtacttcgcggcgcggtccgccggcgcgattgtcgtctttggtcggtcgcaatggactaagagcatcggctggctgtttcattggatcgatggctccggaatgtgcgaatctcgtgttttgctgcgcgtgacgacgcgtccccgtagctcgtgcttctccgttccatcgtcggcgcgcacacctagacaacgcagggcctgctccactgtggtgggcatgtgcgccatgagcgagacgtccctacgtgcggacgagtgaatgctcgcaagatgccgacatgcgtgcgaaattcctgtagccctgcaaatctaccaccagttgacgccacttggcgatcgtgcgccaagctgagaggaccgaacagtggacgcaacgaatctcgcggcgaccaccatcattcctaatgaagcggagcgtgcagacgctgagtccccagcgagggaggcgagcccagaatgtctcgcgtgacgcagatgggcccctcgggccatgaataccacgctatagggacccagatctacgaagaaacgccacgtactcgtaactccaaagaactcttattgcttgtgttggaaaggaccgctttcaaattcaccgcgccccaggcgcaatggttaactgtgggccacgaatttgcgaagggctcgtggtgccattggttctccccttcctatcggacgccttcctgggggagggcagacaaccacgacccttgggacatttttggtgccactagtgaaaccgtcctttgaggaaagaacgagagaggtggatccgacacttcaacgaacagaggttgctcgcggactctttatcgagaacgcggcgtaaccgggcgctctttctcgcactcggatcaggcacgaggatcacgttcgcagaggttcattggcgaacctctttgcgtcttgtgctcgggagggaaaccccttagaacacatgaatgtagcccctacaatgggagatggaatcccatcaactttaggaagctagaaggctggtaacaatgcctatttcaagccccaaaaccaactgggggcccacgaatgccgtggggacaattacctcggctggcgggcaagaacaactcttgaccgcggatagggacaaggctttcgctggtcttcaccgtggtcccggccccacttgggaccatctccgtagagacaatggggacgcattgggaacccatcccggccacaagtaagaatccttattcctatcccttgcaatacttgggtaggaagcaagtcgttaacagaatgtctgggcgccagaatgtttg

SEQ ID NO: 418772 - DNA, 935 bp, Homo Sapiens
  misc_feature (183)..(305): n is a, c, g, or t
  misc_feature (645)..(691): n is a, c, g, or t
ggggttaaaagatggttgtagcttttaaaagggaaaatttcctcctgggttggctagttatctggggtgtattctcgtgttaagttgtagcctcaaataggtcatcatgaagggttaaaaaagcgaggtgggccagtgttatgcgtgggtggtataaggccagcgcctctccaaccaccgtgnnnnnnnnnnnnnnnnnnnnnnnnnnnnnnnnnnnnnnnnnnnnnnnnnnnnnnnnnnnnnnnnnnnnnnnnnnnnnnnnnnnnnnnnnnnnnnnnnnnnnnnnnnnnnnnnnnnnnnnnnnntggaggcatgacttaatggcttttaagaaagcattttggggactccttcagcacaggaaatttcctcaaaaccgtgagttattttttaaataatataggaagtgtccaccatgtgaaactttgaatacgttccggtgtgtgtctcccagaagtgcgtgctcatatagtcataatagtggtctcttccaaaaaaactgtgaatgtgaattccctattgggggagaacaggcgggggggtataaaactagagccgagaaacaaatattcgggagaaatatcactattaacacaagcgctttttggcccaggggaaacactatcacgagagaggaatgggccnnnnnnnnnnnnnnnnnnnnnnnnnnnnnnnnnnnnnnnnnnnnnnncaaatgggtgggagataaataggaaagttcaacctggggttggacaccaaggaacattacaccttgtggggaccaataaatttttcctcattctacattaatctcacaccttctggcacaggcctcaaactggggtacccataaattccttgcacagcacattgggctgctttgtgggtcaccactaacatttaacaaggcttggaaggtgtgcaacttccttgcaacagacaaacaaacagca

SEQ ID NO: 418773 - DNA, 1196 bp, Homo Sapiens
  misc_feature (877)..(877): n is a, c, g, or t
ggcattagttgcagagtagactggtcattaagtggttgtacatccctggtgtctggcgcccacagcaggagcgtattgagttatctcgttcccctggtgcgacagactctgtaaatcctttcgtctcgtgtgtcggattcttggagctcattctgcatatcgatcgtctgggcctttgtcttgcaccgttatcctctcttctggatcgagccttgccgattgcattggtgtgtagtcgtattgtcttcgaccatcttggaggcgcacgtctcatagtcctacgcgcagtgacgcgcgctgaagccgtagggttcgactgttctaccagtttggcctccgtgtgtgggtccgtgtcgatcgagaagcgaaagtctctcaccgagtgagacgtaagcagaatcacgtggtgtccatgctccgatcatgatccttagcctcgtgagtaactctcgagaaaccccctgatcactattcttcagaatgagtctgcactgtgcttgcgacgttgagccggttgtcgtgaccaaactccaattctaatgtcactcggtccccaaagaggtcttaagaggtcgtatctgtagtttggcacgcgacttcaggaagtttccctttgaggagtcaccgtaggttcaatcgcaaaggcgcgacacggaggttagctccatctccttcatgtattagcacgaacgttggttgtacatcgaacttcaagatgaggagtggctacttcccttgtgttccattgcctgttgacaacacccaaggggcaatcgcaacaaataggggtcccccactccccagtgcgtacaggattgcgtgcgcactgcggattgaactggccaagggggaatgtgtacgtgtccagctgttgtcnattactgtcgccaggcgtgtgaagttgaggacggagcgccacgttggttcccgacccttggagatcgtcttggggttgtagacactgtcgttccacagtctgaggtgacctttgacgagcacttggaggctagagtttctcagaacagggtggcaccaggattaacccacaaggtaaattagagcgcgccctcctattccaactctgaatttccacaaagccgcgttattttcccaaggttgtctttaggaaggtgaaacgtcgtacgctcctaaggtctaagcgcccttacgaaacccccaaggtgaaggacctcagg

SEQ ID NO: 418774 - DNA, 206 bp, Homo Sapiens
tgctgagaggtggtggcggggggcgcatagtgaggaggaggagcggtgaggagtgcgtgtgctgatggggagcgacagtgatgctggttggtgttgctgcttgctgatagcatgagaagaagaggtagttgtcgctagtggtaggctgcgcgcggctagttagtggtactcttactagcttgcttgctagtaacgcagacgacgac

SEQ ID NO: 418775 - DNA, 1492 bp, Homo Sapiens
ggttgtcaccaaattaccttgactgcctgtgtgcgttgtctagtcagcaactagaacccgtcacctggtactagagacgaacgcaccgtttggtcgaccttccctaagtttgaaaaatggtctgtctagctaaatctcatccatgtcaatgaattcaataccacgaagtcctgtagtacaaactgagattcgccagcaccgacgtgcatatctctatatgaagcacagccctgttgcgtagtacgatgtgttgtaccatcgtatgatgtaaccaatcattgtctatgagactaattatcagcaggtcagagagatggataagcaagcgcctggtcaaggcctattgtccagaaaactgggttctttcgaccatgggttgacgaagtgacggttacctgagacgatcaacttaattccgtggaaagtactaagcagaagtactcctctgttggtacaatcaccaaaaatgcatgcatgatctaccatacaagcctcgctgcttcaagatttatcataaggctagtatgtttggcgaggagaatgcgcgataggcagtccgtacaggatggttactccctagactaatgctaccatacttagcatgcttgccttgcagtaaaattccgaaagtttctaaggtgaaagcttgtctccaacgccatttcaagaggaaaagacacactaggaactctctagacgttgtacacactgaaggcacgagtcgaacgatggaacgagcgcaaggggttcccccagtggacatcacccaacgtttgcttctccacaccgttttacacgggaacccatgtacgcataattgggcaacccaatttgctccaaccaggagactaaagaattgccttggtacagaaagcagccaacaatttgcacaggatcccactgacaacccggccttgagcagtagacaacacacaggtaaactcggagttacatttgatcaaatcgccgagaaattgtttgtcctcctaaaagcccaagtgggtaaatcccattacatgactaacgtccacgctgatttcactttgcatagggttattccatatacgggaaatttaacttggccaacgcccctagagttttcgaaaattggtcgcgctgcaatgtttggacctacattcccttcaggagtaaaaacatgttgtcatcgcgactggtgcaatggtaaagcgaacagggcaccaacaggaccactcataaccaataacaatcccagttacccgagaaacctgaatttcacacagttgtgtattgccacataccaccgcagcgccatgctatgcatacaattacactagtatgtgatttacagcacccccgattagtctatgtcctggagcccgcaaataggtttacgagcgttaccatatcccgcgagacaacactggggacagtacctcacactatatagccgtaaaactcacatactaatcttccgtgtatcagtctccatatagaaacccgccatcacaca

SEQ ID NO: 418776 - DNA, 856 bp, Homo Sapiens
tacaaggagacgcagacgattgtgcagaccgagaccgtcgacgtagcacgagtggagaggacagcgatgatgagtgatagtccgcttgcgtgggttttgtcggccggcgtgcgtcggcctcactcgcgctggtaatatgccagttgtccttactagttcccatgtctggtcgctttgccgacgcgacgtcgatagctggttacgccgctgtggccagccttcatgcctgccgtgtcagggatgatggcgcttcgcgcatgggctttcgtggtaatccctgaatttcaacaacggttgattgacctagtctatcatggccagttcgtcgaaacgagaagagaaccgttctcccaatgtcggatttaattgtctgactgagagccaatcaagttgaggagcaagaggttgtggtgttcctttgtcccaagacccaagcactggcatgacattgcagtctgtgtccggaatgttgagcaccaggttgattggcgttgctagatggaaacggaaggagacgagaaaaggctgtgatgcagtcgtacgtttctggatgaatactgtgtacatgagtgagtaagattcggcatgacatagagaggttgatacagaaaataaacttttaagtttaattatggtggtatgatccatcagagcacatcgccgtgaacgatgcagcagatgaatgtcgaaatcatacctgggtgaataacgtattatccacatagtgacatgtaccaaattagacgtgacaacaaagtgtacaaaaggacataacactggcgacagtctcatccaaaggatataacgtgtcgaccggaactccctgcagcaccacatcgaccaccccagagagtga

SEQ ID NO: 418777 - DNA, 929 bp, Homo Sapiens
gtgctatggtaagttggggatgcgcatcgtgcactggcatagcagtcgtgtagtggagagggatgtatctcaagtagctgattgatgaatcgggacgtgagttacaaatggaaggttttgtggaggtaggacataggcaggtacacggtgggcgcagacgatagtattctgtccggatgctttgcgatgtatgcttcgagagaaggttagcaaatgaagggggaaatgtcgagtttgtgggaatcgtgttgtcataagggaggtaatgtacatggcttcccctagggggattctatgggaggaatgatagaaaaggcggaatgtgtgggataacattggttggtcctcctagaaagacagtgtggtttatgaatgacaggtacaagggaaagataatgggcgtaataatggggtggattccaatgggattagaagccgatgaggtgatgagagatggggaaagttacgtcatgaggagaggtatgacaatggacgtaccctattaggaaaggtagagatgaacggaattaggacgtaaattcttcaaaagattccgagcataggaaggaagaaggaaattgatgaatcgttggatggcatgggtcgaataatacgggtagagagaagaaaccaggtaggacgaaatggggaaatgaagggagatacgttggcgtgaaagcaatagttccgttcaaagaaaacgagtgcgatggatgatgaggttgtgaagaaccaagagaaattgtgagtggtaaaaataacgtcgaatgaaagttgtagtcaagtacagtatacaaagaaaatagaatgagcgagataggaaattgttatgtggaaacgcgagggagggaaagagagaaaaagatggaaggatggcaccagtatagataacactggagacagcatggagaaggaaggagaaaaaagtg

SEQ ID NO: 418778 - DNA, 1267 bp, Homo Sapiens
gggctgccccagaagtctaggtaaggagttggttcccgtgtgtgcggagagtgtcaaggtccagatccggaaatctagctaggtaaagtggcgtcttggttgtatagacaacgacgttcgtcctgcttcctcggcgatgtgggggcgtcctgggagcggtatgtggcccagaacatacccttgggtagacttggcacaacatcactatcgcaggtaggctctagcagtatcagagggcatacatcttacgaagttacggatccagaaactacgcagtcaagacatccttggacggcgaagacccgtggactttagggatcatgcattagtttaaggatagctggatcatctccagcataggactcatgcctgaagatggttgatgctatgccagatcgggaggcaagattgagacgtgatgggtctgatgctaggaaaggtgggtggttgtatgcaggagtgaggaaggacaggatgggagttgccattgtgatagaggctcatggaagcaggatggtatggtgtggttacgtggtggtgtgtgataggtagaattactgtgggatggaatacattagaaaatgcaaaaagaggttatggacgaacttggaagaattgcaaaatcgggaatggatagtcaatagagccacactgagaagtaattgggcatgcttgagacttttgaattggggagtatgcatgttgagggtacatcaagaatggctcaaaaatacacgtgaaggattaccaagggagaacgattgtggtacggcaggagagttgagttgaaagtccagagaaggaaggcaatatatacagacaggggaaaagttgaaatcgttggaggccatttaagggaacagtaaaccaaaggggcgtagcacagactttctgtgaattggaagaggaagactttctggatggtaccagaatttattacccaagttaagtaagcatagaaagattatgggggatgtaagccacgtggcgaaaaacagaacactttcacttggcgcgttaagaacagtcataaaaaacattaacgcaacagtcccatactatagtaaaatcggcacaaaattggctctgaacgacatgcatggtatggcagagaagtacaatacctgggggtgtaaaactcaggagtggaagaaatgagaacgaaaggcgacgacgtgaacaaagtacgacaaacaaacagaacacaaacgttgaacgagagacgacgagaaaagagaagcagacagcaaaaagaggaaggagaccc

SEQ ID NO: 418779 - DNA, 637 bp, Homo Sapiens
  misc_feature (143)..(187): n is a, c, g, or t
  misc_feature (284)..(363): n is a, c, g, or t
tatgtggggttgtttttgatgttgtgatgtgtgtgagggtggagctggattgacattagagaccaacatagtgtcgctctcgtctggtcttcttgcttcttctcgacacggttcgcatagatatatgtattagtagtattgtnnnnnnnnnnnnnnnnnnnnnnnnnnnnnnnnnnnnnnnnnnnnntagtgtactactatactatagacattagtagtagtactataagtagcgactaggactaactatagagacagtaagaaggtcgtctacctacttcttnnnnnnnnnnnnnnnnnnnnnnnnnnnnnnnnnnnnnnnnnnnnnnnnnnnnnnnnnnnnnnnnnnnnnnnnnnnnnnnncgttgtggtagtatgttttggttgagatattgtagatactgtgtgctgtggttatatttcatttgacggatgtcgtgggctacggcagctgctttagtgtgagtaaggagtctttccgtcgttgtaggtttacttgaatagtgggaggcagagggcgctggcttgagtagtgtgaagcatgcggctgccgcatgatccagatgctgattaggctggcgtatgctgaatggtgctgtcgggtagcatgctgatttgatgattggtggagatcaat

SEQ ID NO: 418780 - DNA, 949 bp, Homo Sapiens
gaggcgtgtagcgttggcgttactccgaggagataccagtctggtagaggagaagtcgaggttagagggaattgggagtgcattttggttgtttgaatcgaagttgagggtgtcaaaatgcatgagtaattaaaacttttaacttggagaagcaaaatcatatctcctaaagaaagcatcactcaacgagtcaccaccaggcagcagacaccatcagccagcacacggcagcagccgccaacaccgccaatacctgcataatgggccacaggaccagctagccaacaatgaggggcttgaatattgagctgaagaatttcagaaaagcaggagagaagaccttcatcctaacgtaatgacgtcggttatatgtgggaaatcttcctccctgactatcactgaggaagaattatgaggaaactatttgatacatatggcagaagggaggcgaactcttcattcataaccgataacaggatcgggctgtaatccgcgtggaattgcctgcaggacctactcggagcatcgccgcaagtggagcctggaccaatcatgccaagtacacgttggtaaccgccatactgagttgttggactatagcgctgcccgatattttgccatctcctttacaagcgtcgtaataccttccttctagtaatgtgtcccaacgaacgtgctggaaggaagccgttcactgtgattgtgggcaggtagaagagggctgtcgatcatgtgtggaatgatcgcacgggaagggtaccttcaggaaaaagggcatttgttagaagttgctcaggggaaggcgagatgaattcggaaaaggtctgggacaagatgcatgtgaatagatcccttgtctgcataagcaatatttccttcgagcgatgttgaatgttggaagccatgggagccagttagactgatgaaagaagggaatagcaggagaagg

SEQ ID NO: 418781 - DNA, 1288 bp, Homo Sapiens
  misc_feature (335)..(335): n is a, c, g, or t
ggcagacaccgagggctgtcatggtggtcatggggcacaagggactctcgtacgtgggcgaagtatgcggctagtagccacgcgtggcgtcctgtacccctggaagtaccccgttgatgcagtggtgagtcgtctccaaggtggcgatagaccgtggcagaaatattcgtggcacctaaggtctatcatacaacgtatgctgcgcgtggcccctggaggcacgtatccatgtgcgtgcgtgaatccgagggctcccccatggaatccctagcggacatactagaggaggtactagtgacgtacacagttgagtgtcaggagtacccctatcagantacgcaccggtgcgcagtggtactctggccgcattcctgaggcacggtgcgtcgtcccgtcataacgcctgtcgtgtcggcggcagcgacgtggcctgttgtgtcagtgagacctcatggaacagcgggggctcattccgacaatcggtatggcaccgatacttaacgaaaggcgcgacttaagaggacgccctagccgacgccattgctcgctatttctcgtgacgcttgcgtggtgaaccccttgcgagcttgtgcctgcggcgagacccttgtggaactcgcaatagtttactctaacagtgataccagtatgctctatcagcatggagacacggtagggccttgaacagatctttactatacgagcaccaagcgtggtgcccagaaacttgaggaggaataagttcgggtgggctgaccgcaagcaaattacaggacggcaaggacacgcgttggttggccattatcggttcccgccccccttgggggaaccattcttccgaacgcacacggcggagggaattggggcactatacaccggcttccgggcaggtgcctcttccccttgccttattccttccttggtgacggaaaactgaaggcataatcggtaagacctatgacccgcagaagttggtggcacgcaagggaggatcccactttcaaccgcaatttttgagttcacacattggaaggggcctggggtgttcccccggcgattggctaccccttgaggacatggagtcacggccctaggctgtacgccaaagtcacattttgccctttttccccattggggggttacattggggagacttcgatttggcctgtgggcaattcacaagcaggaaagaaaggcaactccgttttcaaatgcttcccagttcaatttgacatggttggtagactggttgggaaccgaatcccgggcacacactatggacgccttg

SEQ ID NO: 418782 - DNA, 611 bp, Homo Sapiens
  misc_feature (398)..(398): n is a, c, g, or t
  misc_feature (541)..(541): n is a, c, g, or t
ggggaaaacctttttttgggcccgggctttccttgttaacctttgaccggggttgaagctgtgtaattttttcaaaagacagataaagaccgtggtttccctcctataacactattttccctgtgggtggatagtaacgagactcgagggggtctccaaaacacacactctcgctgtaaccaatgtgggttccctttatggaacccgcgctaattagagggaggcaacactctgtggtaaacacatagccacgagtggtctctccgcggtgtgttccccagcgtggctctccaccccaactatgtgaattatcagcagaagtgtgccaccagaaacaatataacaacttcttctatttattcaaagaacatctcgtgtgctgtgcacgccacagaganactcgaagagagaggtgtgtggtcgaacctgtgtgcaacacactctccgaagagagagagtccagagggtggtcgccctgtggcgacagacagtggtgcgggcgtttctctctccccaagagaggcgtctctcccccaaaganacacacaatatcttctctcctctctgtgagtaattcccgtgtgggtgagcaccaagtgtgtgtgcgaaca

SEQ ID NO: 418783 - DNA, 1298 bp, Homo Sapiens
  misc_feature (294)..(294): n is a, c, g, or t
ggtgtgaattgggacctccagatcccattgtgccagtcactgaatcctttatcagggacacctgactttcctacatattaatctcggtagcttggttgccctaccgaggcattgattaagcggagaagacgcctctagctgtgtcttgtccctgagtcagatactcgtgtaggacaggatcgcttccatgatttgcctggtaaaatcttgcggacaagggagatcagcctggctcgctacttggtggcgcacctggtggcattgcataggttgatgcgatgggcactctggagncaactagcccttggcgtgaaatccaggcagaccaggtctatgcaggaatgggtggccgtggtatagtcgaccttgtggtcagtacccatcttttcatggtaaccatgggggactcttgtacaggggaagatccggtccactcacgttgtcttcgtgccgacagaccctttgtaagcccgctttcgaaggcacggatatatgtttcctatttgcttgtaccgaaaaaacctagagcccttaggggttgaaacacccccaacgaaacatctcaccagtgcttctacgaggcggtaaattgcctccggcgcctatttgaccacggttcctccacccagaatgtggatatcaggtccggagctgaattttgatttggaaccaccgcaccaaaaagggaccaatttaaggcccaagtggctttctcttaagaaaccttttttcacaagcccaaaaggggacaggacttaggttgggtgacaggcgacacttcctttctaccaaacagtcgacactttgaacacaaacgcaagacacaatgcattgctaagtttattccttaatacatattgcttctgcaatttgactccgtatggggggcacaccaaacaaaattacccccccaaaacggaggggaaaggttgtggcaacccccccggacgggattccccggggaaaacgcaaatctgtggggaaacgggaaacacgttagggcgagcaaaacaaaaggatgggcgttggcaacactgcaaaacaacaacgccggcaacattccattccgtgtttggaccgtattatcattttgtgacaccatgttgaggggccctaagcctcataagtgttgccttgttgggaccccaagagtgggggtcgcattgggctggaagtcaccagggggaacttgccccttatgtgcggccatggatggcgcggccccaactatttccacttccggaaaaaccacacgggggcagttttatatatgcacacgtgggtacctctctgacgca

SEQ ID NO: 418784 - DNA, 1567 bp, Homo Sapiens
  misc_feature (459)..(459): n is a, c, g, or t
  misc_feature (692)..(692): n is a, c, g, or t
gctcatgccagtcctgcttggatcgacaggctcgtggaacgtggatcctgtccgactcagtgtgcttttgggccagatgttataccagtggtgcttagtactttgctctgatccagggccgtatgatatctgggtggtgtaccctacatgggccattgacaagtagtaggagcggccaacgcattctggcttcgcattctgtgtccatgcgactcagtggtagacgtggaagggcacggcaatgcagatcatcagctagacttagtcgttggcgtagtagcatcccgagtgtgacgctgactctagtagttggaagtgaaggcgacgtctagagcgctcatgtgtagcccttggggacacggtcctctctatctatgtcgtacctttacaaacattccgattagagcgcaatgttagccctttgtaactgttagcaatcggagtcgaataatagagcgntatcgagccattggtagtcactagttccctgatcgacgcaccaaaagtaggtttggttcctttcaagcggagccacggggagcggaactccgtacaggcgccattgtaatggagctgacccgagggcgcgttaccttgctgcggtacaaaggagctcacaacgctaagagaagcgtcatgcaacgtagcacctcacgtttttgcatagtagagcagagcggacgtattagagncacctactggatgcaccacaccagaaccggtgtggcccgttgcgtaagtagcacactacgttgcatggacgttatttcccaggcatattgtgcctgcgacaagggattctttggttgaccaaacaggcgccaagagtggcagtaattgcccggcaggtaactgccactaggcataagagctaatcgcgttcttttttcattttcgaatgctcggatgccctattgaggaaggttcgaggtagggtaccaactcgggagagcgagagttgccccccttctcaagagtgtgtgcagctcctttgttggaacagcagggctgtaccaaacgttgggacttgggaatctcttggagcgggaccaaatcggtttatgtgccacagggtacaaagaacagaataaaggtcttacgcacattttaagccctaggttgggtacgctaccttacgttctgtgcgatttttgtatgtagcacccgtccgtgggcattttttggagaccacacttgtgtttcgcaatatctatatggagcctgaataggggcactatagcgctcaggggacgaagggctgttaatttccagaaggggagtccgctacaagtataagaatagttcggaagcggatggcaattttacacgcacctatgaacgaaagtcgctccgggtctcggaaacatcgctcgagaagggattagccgccttagacatttggtcgcctttggggccgtttgccttgacaccgctctcttgtgtcgagcgttcgagctagattttaggccatcaaagcctcggtagagggcaatgtcggttagaacagttggtccctagatgggagctacacgtttgtaggttcgtatactcataatatggaacttag

SEQ ID NO: 418785 - DNA, 457 bp, Homo Sapiens
ggagagaactagtttcgagtttttctatcatttaccacactagagtaaacccagttataactggaactgcaattacaccttcaccaacaaacaattacaaaaagtctggaccaattgtggggtggggtgttggggagcggggcaaatgcccctcaggacgccaggaccctcggacaagcaaaccctggagaaccagggcacgcgagacgggacgaatacaggccgtccaatctacgggagaaccaagatacacacaagtacacactccccactgaaagcaagaaagatcctcaacaaataaattccaagaccagcgctataaccacacactatacgattatatcactcttctccccacgggaataaaaaccatagttctcaacatatatgtacagaaaaagacgcccgggggttgcgcatggaacccctggggcgattgagaaagagcacaagaggt

SEQ ID NO: 418786 - DNA, 815 bp, Homo Sapiens
ggtcatggcggctgtgtgctgcacgctggaaccatgtgtgggtcggacaccgagactgggatctttgacaggggtaaatcttcacacgaaaacaggcggcgaactacacggccgggagtgacagccgtcggctgcgaggcaggcagtagtaggcgccctgttgattcggggcactcgtgccgggcgagcacccgatgatggcgtagtgtagggactgctgtccggacacggacgtgtgaaggcacttccagactagccgcaggagtggcatattccagggtcacgagacacatgcccgggcggggaagggcatgttccgtggactcgcccaggccgacggaaccctcatcacagtgtgtggatatcgggagacttctcaagagtctgagcatgagaaggacaaaggacatcgatccgtctgagccactctctggaactgagagtgggccctggggtgtgtagagatgcgcctaagaccgcaggagatccgccatgatgggtttagccaacagggtgtgggagagagatatgcttttcgcacagcatatgggggtaccctgcacgaggctctagtgagggactcgtgctgatccatcggccgacgtatcagttgacgtgaccttggattgaatctgggactggtggggcgtttcccagtctggggaaccagggtagactactgggatgctcgccaagggatcgagcacgaagctggatgaagcctggggcacgggaaacccacacagggtccggtggtatatggatccagattccccccaggcgcccgggcaagccttagagaacactatggagat

SEQ ID NO: 418787 - DNA, 890 bp, Homo Sapiens
gcccaaccccagtgtccaagtcaagaaggacactcagccactatctccccaccgtagccagctcagccgggcagggctgggagggagtgggacagattctgggagtgcagcgtgggacggagtcccggctggtgctgagcgcagggagctgcttggcgagtgccagagcccagtgccccagagccctgctggcagaggagtgcacgactgatggcacgcagtgccccgccagcaggctgcaagcagggcagatgtcagagctgctacacggcagctggagaacgcacgtccacttgtcctggctggaaacacttgtacaaagtatgtgtctaacgtacacgcctggtcaagaacaagcatcagcaagagcagacttccgcgagcatgctccagcaaagagctgaacccacactgctgtcggacacagggacaccgcccaaggctgcgcgactaagctcactccagcaaccctggatgccacatcaatgactggcgcgcactcaagcttcgccatgagctactggcacctcgctcacgcggccatcacgcggacccactcgccaaacatcattccatgcagccccgcagagcaacgccaacgatgacacggccacgcctagaagcaccaccaaaatggacaaccacacattaccacggcaacatggcccgtagagagcgcccggcgcatagcgtgctctccccccagtgccgacccgttcactcacggccatccctgcacccaccccgacgagggccccctacaacaccacctttccctccgcttcccagcagacgtctccctagctgaaccccctagggcatgaaccatggggcaaccccctatgtatcaccgtgctctcacagactaccacggcaaccgtcgcccaccg

SEQ ID NO: 418788 - DNA, 327 bp, Homo Sapiens
ggctgtcccagatgcagacgcatgtatctgagatgctcagttggtcctctccatggacaagaacctgcaccctgtgacctggatagcatcatacgctgaggtcaaggcccagtatagaggagattgcacaacctgcagacggacctgaagactgagtcctggtatcagaccaatgtatgagtgagctgtctcagacatgctgcacggcatggctgatgaccatccgacaagaccaatgcatgacaatactctgacgatgacaccgtgatagatccgaagaaggcaatgaagagaccagaagtagtttgagaaatgtatgtatagagg

SEQ ID NO: 418789 - DNA, 545 bp, Homo Sapiens
gcgattctgggagagagaagtggatctggcagaacagccgatcgtgtgtgatgtaaggaacagacacttgcgccgtttgcccctgtggatcgcgagaatgcccctgaggaggatcctggtgagtgtgtggggcacaacagggaatgagagggccttcccgggagtggcggcgagggttgcctggcgcacgcaggaacggcctgacacggagcgagggggcacgggtcacgcgacggggcacgccagtccgtaaatcatgcggggtcaccaagggatgcccagcgtacgtgcagcaccgcccgagggccccttggccctagggaaaacaccgatcagcgcctggggcaagtgggagtatcgtgacggagacaaacaccccaaaggagatggccccactgacgcctccgagaagtcggcccatgcgagaacgaccggagagaatgactcaggtcagagaccgcacacaagaacacgggagcgcactagatacggcctccaacacacacgagaacaacagaagccggactcacagtagccagggacaa

SEQ ID NO: 418790 - DNA, 1412 bp, Homo Sapiens
  misc_feature (785)..(785): n is a, c, g, or t
  misc_feature (1122)..(1122): n is a, c, g, or t
ggaaccccgcttgtgcggacagaggggcagctttgcacaccatgttcgtgacatcttccacgtcgttgcattgccagccaggcatgtatagatgagtggccagtcacttgccactaggtgcctcagtttgggacgacatatttctggaccatccatacgcgtaggtcagaaggtgacgacggattatatgctttagggtaggcctgtggattgcgaaggaggagttggctgcacacggtgccgctagagagcgacaaatcaggcctattggtgcgatcgtcgtagatgctcgatgttgccgttgtctccatattaggatcctatgtaaactactctttatccgaggtacaatactgatatatagactcgttcatggaaataggaatctttttagcttggaatcgagatttcgacgccggtgagtctcgcctaagcgagcccccacagaggggggtttgatcgagagagtgaagctcttgagcatgtgccatcaatttaaattgctacgtcatcgggacccttaagctaccggcacagagacgatgaagaagcgcctttgacaggctctcttttatatggacgtccgtaggagagagaccctccctgggcctcatgaccgtcttccctctgtacacgctattcacacccctcagtgttgcatttaccccctacccattacctggggctgggtggtccccccgtcctcatacgttcaccgtgcgatgcttgccatttcctgtgtgccccatctatgtttggcattcgacatgaaataatgtggacgnggtgcccacttatgttccgaaaggattggccctttttgcgcacgtggttggttctcccccgtggcaaacctttccaactccgggtagtaaccagggagtttaacccttggaggaaccttttggttcttttccccttttattgcgcttgtggcagtaaagacctttataggtatccacacacactttggaactttcgtgcttgggattaaaactccatttctatgcaataaaaacaggacacggcgaacttggactgtggtgctaagaaggtcttagaaccccctgtgagggaacttaagggggcccacgccccaaaagtcatgctgttgggaatttntccccctttttcactaagctggggccctcggtgggcgcatttggcttcgctgggggcggcctagcaccaagttgtcccccagtcagactccttgtttgggccgggagatttgttgggagacacacccacagggggttagggtatgactttctacccccccaagactagtttttctggcctttggccagtgcggcaatttttggggctcttggggtcctttccccttttgcgcccccggttgtgcccttaggcctccagtttcgttgggggccttaaatatatccccagaa

SEQ ID NO: 418791 - DNA, 677 bp, Homo Sapiens
cgatgggcgtcgtctctaccggtgcacaggtgcaggccgtgtgcttcgcgtgctgattgtcgcggatcatagccttgagctcatgcagctcgcgtgagagtgcacgtgatagaaaagtccacatgctctttgatctggtcgaggggttcaacattgagcatgagtacggacttgggctgaatatcgctcatgtcttccagctggtatgctacgccattcgacgggtccttgatatacatgtctggaaagtctgacttgccgcgtcgaatacgaaaactggtcaagaaaaagcatacgtagcatagcaagattcaggccacggtcgggctgtgcatggtccacgggcagtgtcaccttgcgagtctgtcgattcacctgcaagtacaccactaaaaggctcgtcatggctgtacgcactcgagacctcggtttgctctcacctgtatccgcttcgggcaaagacgtcaatagtgtatgggaagcatgatttgcttcgtctggtgagggcacctcaaggtcggtgccgcccacttgtttgaccactacggagcctgactctgcggcgtaccgggctccgtatatgaatgcagcgatgtggccgtgtagcccaccgatgacatgcgtccagcgccaatcttgtgaatgtgtacggcactgaaacgctttgctcgtcgccg

SEQ ID NO: 418792 - DNA, 574 bp, Homo Sapiens
ggtctcatcctgttgcgttcgactctggtcaggtcgatctggaggttcttagtccttgttgccttcttgccacgactgggactggtctcagatgtggtcgcgtcgcagggaagctagggtcgtgccctctcgtggtcgatagcacagtggtcgacgtcctcgagcgaagtctgaagttgtactgagccaaccctggtaccagttacggctttagtagctattgtagatttagtctaccccaggagaagcaacgggacgtgctgagaggagcgttgagcacatcaagaggccttcctgtgtagtgaggcaaatgagatacctgggtgaatacggagttcatggtagtgtgagatagaatcgcgatatggcagtgaaccttgctgtgatggtagtgaacggaagcgggggggtaaaagaaggaggactgggggtgtacgttagttgtaagagtcacctgtgaggtacaggggaattttgatgctatagttttgcaggatagagagacgtttgtacttaagtgacgggcgtacccttagatgccttgggagaaccagtagaaatgtttcgtgctgcg

SEQ ID NO: 418793 - DNA, 1401 bp, Homo Sapiens
gcctgcctggacggaggcggctggagatcgctataccactgcgatcagccacgtgacagcgaatggccgtctgagaagagagcatcggtcgtcttgtgacgacatgacgtatgatagacgtcgtctgcacatacgctgaacgtgcctcggacttctgaggatccgtgattggcatctgatctgaagtgctgttaattccactaaaaccaatacaatcgttccgacagttactctgaacggattgaaggacagacgagtgaacggggcgatgtacgttccgtgactgcgcgggtgcctatgagagggggctcttcaatgctaagaggcagtagcaatggtgcgtatgccgagggataaccggcattgtcttgattactggttctgtgctcagaggacttccgtataagactagactcgcacgattctcttggttcacacgcaagtggcctcgcataatgagtgtggactatcgggacttcgtgctacaaccgaaggaggttcgtggaacattctctggaccagaggttctttaggttgttcgttgagagcgtactcgtagccaggtttccattcgaaggacagaatttcatgcacttacttcccctggcgggagtatatacccatcgatctctggtccaaattgcacctaagaggcgagcggcttaactagttttcgccaaaggcgttggtgtaaccttctagaatgcgaaggcgcttgtgcagcttagcgagtagagtagagcaggtcaatttaaccgaagggagcgtttgcgaagtacacctcgagaccggatacgtgaggacgctctctagaaagcgtaaagtcgctcatctagcggaaagagggataacttcgcgaagggaagcgagccggaatagattggcccagggaaattcggtctcaacccacaagggtcgaccccggggtaacctagcgcagaagaggcatcatccgtataggtaggggaagcctgagcggtacaaagagtcctttggccggttagatgcgtccaccaagttgcttcacgattcggatttttttacacgcagcacaaaaggggtggccctaactccccggacggactaacacccgaaacttaaaagttgtactcaggggtgttaaacacttggtggccacactgggttgggggtccacgggataagcaacagaggtaattccagagaaaccaaatcgttgttcctttcgacattgtggtgccttacttcactccatattggaaagttggttcttcttaagagggagatgccagtatgataaggagagatgccgtttttgaaggagggaagcagagtacggggtttgggttggagttaaagcgcgttttgatggagttggtgaagatgaccagttagtgtgacgttttgtggccatgtggggta

SEQ ID NO: 418794 - DNA, 1267 bp, Homo Sapiens
  misc_feature (848)..(891): n is a, c, g, or t
gggggtttttccaaagtgtttacttttatttacaaagaattatcagggttttccatggagtaaatgcccgcggataatcctctgaaggaagaagcatttagtccaacttaatggaaaccggatatcctatcgcgtactggacggaaacactgggcgggcacatatcggaggccatattctccgggatcagacccgtgccgggttggacacagacacgacaagagctgagaacccgggccgaattccgcggggtgggctccatgtacagctggttgggtagacccatctccgccgttccagcctgtcgcctgtttctctggccggtgtcggacaatgggaaagaaagaagatcggccgccgctgggtcattggacaatgggttccgggctttggtcgcaaagctggtgttatcggcctggggagacagagtgcctcccacgaagccgggggttcccccgtatcacattcgtcggaggcgcgccccaaggaccaccaggggcgtggtcactgggcgggcgcattgggcgccaagaagggactcccttacgtggggcgcaaataaaggcccaaaaaggccaaaacgcttgtgggcatatcctgggcacctctgagaaattttcaccccccctatggggcagcggctattgtgcgctatccttggtccaacccaaatctgggggggcaccagcatctttgtgggaaacacatagaattctgggggccaactcaaacaactctgttcttaacaacaatggatcgctttgcggccgcttttgtgtgcccctccgggacaagggggaaggcccacccccacaatgtggggcttttgtatgtagaaccacaggggnnnnnnnnnnnnnnnnnnnnnnnnnnnnnnnnnnnnnnnnnnnnaaaccacttgcaacgacagcacacagtattagggacctcacaaagggactcaaaatgtggtcgcggggaaagaaaccctgtcgacaaaacgaacgcccccggtgacgccactatgatacacctgtgtgtgagccaccatcccccaaaggcggacccccggataggctagttggagccccccactacatagaaagggcgccttctggtgggggaagcgccacaccaacatctgcggcgcatatatgggcaccaattgtcggcaacattccgtcgcgacagaaacgagggcagggatcacagcgacaacgactgaggagttggccccaacagactcaacagcaaggcggattagaaaggagccacgtctagcactcca

SEQ ID NO: 418795 - DNA, 1588 bp, Homo Sapiens
  misc_feature (1423)..(1423): n is a, c, g, or t
  misc_feature (1478)..(1532): n is a, c, g, or t
gatcagatcgatgtgttgtgacatttgtaggtgtgctggatctttggggtcatgaatgcccgtatatcttcataggctgcgactaagaatcggaagaggatgctcgggagcttcgtcacgaggcgcggatgtctagtgagtcccagcaggcaatgtcgtagcttctgtggcagggcaagcaggaggtgcaccgagggtagctaaccctttgagagcttactaggtatgcatactttcatcaaccaatcgtaagcaacctgactcatctaacgagtcttgcaggaagctagagaggaagtagcttgcaccagataccattactggaatcctgtgctacacactcggccaccgaacttgggaccattctggacgtggtacgttacccgaagaccacgaaaggcaaatgacaagcatctaagaacgttattggagatccccttgacggtctacgtaggactgtagtggcgtctacgccgcgtgacctactacgaggtttagtgcccatgatgggcgaacgcttggcctggaaagaacacgcaatgcaccgcgtcatgggacctgcatcacgcacctggaagcgccaagtggcatggtgaaatcgctcacgcggcaacctgcatcgcaccgtccgctgtgaccgtgcgcatccgacacaccgcggtggcaacttgccctaaagtggacgtaacgggaataccccagtggacgccgccagcggaacgcgcagcgagacacgaacctgcccggcaccaaagggtcccccctggtactgcaaccctgtacatagcgacgcaggcacaagcatggccgtctgcacacacggccacctcgccgaacttggcccctagcccaatgggctgggcacggaacggacgacaccgggagtacgggacacggacatcgctacccaacgaacgacacatgcatcccaaccccaagcgccttcaaccaccgcccgaatcgcctacagcggcaaactgccaacagggcagccgtccccaccacatagagacacaacggctccccgcgggcgacatcggccacacccaaccgctacaccacgcacacgcatcggctccaatcaccccctaggcacgcttcgcgcacataaccgccaaacagtgtaaccccctagccccacacgcacagcagccacaccacgctacataacatggaccccacacctcgcaaacagcgcgcccacacaccacacgagggccaactaaaggcatcccggagcacgctagatcaccccacatagcgcgctcaggtttcctacggcaagtcggcacacacagcccacaaaaccaccccgacgcccccactcgctacaatccacgcgcaccctggccacaaacccgaaatccacaccaccgacacacaccagcaggacacttcagccacgggcatccacacatcccantgagcgccactcaccgcctccatcgcgcaccgcacacacagcaccgacgactctnnnnnnnnnnnnnnnnnnnnnnnnnnnnnnnnnnnnnnnnnnnnnnnnnnnnnnngaccgccgagacccacaacccacaccaacgcgtacaccaccacacaagcacaaagt

SEQ ID NO: 418796 - DNA, 1439 bp, Homo Sapiens
ggttacttcgggtctctgcatttggctgtagtgtgcagaccaactggtagtcccggtagtgcacgcgtacagcttcgacgacggagacctcggagctgtgcaagtcacgtgttgttgaaacattggtcgtgatcgcagggatcatgctggaactgacgatgtgctgaaagcgtttgtgatgacgtgggacctctagccacagatcgggagacatgcgcacactgatagagagacctcacagagagaacctctgtgtatgcctggccgatacagctgacgacagaccagtctggatacctatgagacgcctgagtgagaacatggcgtcctggtcacgacctcgatgcgaaccgcaaagcacgacgaggaaaccatgggcttgcgaaactcttcgcgtgtaatgggccgtaatttgtttgtcacggcacggcatccaggtcattctaccacccacaaggaagtgtcaccacctggaggctatggcacattgcgtaccggtccgagtagctagattgctcggtgacccgcaggaagccaatcccaatggcgaccatggtcgccggagcactgtgtagcgcatcggaaaccatgcaccttgcttgcgatacctgcatgttctgttcttgcatagaggacgcaatcgccactgcaagtacgttccttacgacccaatgcaaaagaggtaccccgtaatgccttcgcgacccatgattacctccgaaggccgcaaacacaactttgctacctccacgcgaattgtccaacgacctatgatgccttgccacacctggacagaagagacccccttgcgtttggggctcgaccacggaactgcaacacgcaactccgctccgacaccgagcctgggacgcaaactccccactcagttggcgcttcccacgaggctcaaagatccctgttgttcctctgccggaataccaacgccccattcatcataccatggagtaccatccagcgacagcaacttaccttctcacttggacaacctgcaacctttcgggggacatttggaacatcgttcctaatcgctccttcacagcccggatctcaagttccttggtcagccttccccaccacgacatctatccattgcgggaacggaacggtttcgaacaactggaaagtcagccaacctcgagtatccatgctctcaccttatggttacaacacagcggaatgaggacccatgactgtgtgggccactgtgctgtggtctttctcaactgtggcacccaccttgcctgatgaactatcatagactcccaactccggttagggatttaccaggtacacattcccattcatcacaacacttccccgtaagagcaccaaacggtcactcattcattatctgcgtcccccaaaagatgcacaacgcccaccacattctatctatggcttcacaccatactactacc

SEQ ID NO: 418797 - DNA, 1334 bp, Homo Sapiens
  misc_feature (195)..(195): n is a, c, g, or t
  misc_feature (568)..(568): n is a, c, g, or t
ggtggctgcggcaggaggcaggtgcgccgcgggggagcttggaggaccggatcgcccagggccagaggagcatacgcagcgtcatggctcaattcgaaagtttcgtcttggccagagggctgtagggcatgctcgagtatacggtcgtagtgatgaagagcatcacggagggtccggagtagaggtatccaatgntctcagtgcgtggccctcagaacagaggagctcgttcttggctcgcgtcaattggtgccccacaggacgtgcatacgatggaggagaccgtgtcccgcgcatccatgttcgctgcccgtgttcggtgcatccgcttgcgaaggttccatgctcagatagtgttagccagtgtaagcatcgcgctgggaaagcatggtggtgcaaggaagaccctggaagggaaggtctcatagggtccgccaagtatccttatcgctaatcacacggaaagccctggagtccgctggggccttctgcgaagggtaaaccacgttcaatgtagggttgtttcgcaaccggagaaggcgcaacacgctcggtggagttgctgcanagctggggccattttgaggcaccgatggaaaagggtggcaccccccagtggactttgaggttggttcctgcacgaagcacgtatggacaaacaccccttgctggagcactaaatgttgaggcgattggtccgaccagatcgctatgggactccagtcgtcggaggttcacccgtcccataaaccgtccttgcttgggtcggcctggacacccctagtattgggcccacctttggaatgcgagtgtggaacaatgcttggggaaccagaactggttgcgcactcgaggacgcggccaattaggtggaggcccacgaaatacgaattccgacgtgggacgtggaccgggaccacgtcttcacagggagcgacacggggacggcgaaggcgaagcgggggggcatcccttgtggccatgggacaccgaaagggaagccttgtggaggtcggacaccgggatggccatcctcttgccagcggaggtgcccctgtcgagggttggccttggataggacgactccccccaacgggggaatcataggaagagcgccaagacggcgcaagcccaggacaggcgggcggggataagactcgggggttgagcaaccggtgaaacaagtgcacaccaggcggcaagagcacaggccccattgcgccggggataacacagggtacagggacgccggtttgcgagaaccctttaccgtaacgcgcaacgtgggaggccaattgggaccctcagacggcacacggaagggataccgtaac

SEQ ID NO: 418798 - DNA, 1333 bp, Homo Sapiens
  misc_feature (1276)..(1276): n is a, c, g, or t
ggtcggccgtatttccgatagcgtcttgagccagagctggactcggtcagtagaccactggtggacgggtgcagggtctgtgaggatcaatcgggacttcaggtgcagaaacttggagcagaccgtgaggtcaccctatggggcatggactattggaatcgtacttgggataagatggatcgtgccttactttggtgtggtcgcgagtactaagtgaacccacgcgtatactatcaggacgccatgcacaacttatcacttgcgttccatcaccgacataggtgtccccaggacgtactggcaatattcacgagtgcggcaagtagaggccagacagtttcacaagtggaggccaacgcgtggtcaaagtgggcttgtgcatagaaacggggtgcacatgctttttgtccgacgcaagacttggagaaacaatcccgctgatctacgcgaatcaccatgtgaccacaatagctgaacatgcgctcgacggggaacatatcgccccttacctccatgatgaagcacctcacaataaagggatctggtagggtgggcacgacgatctcctcatctggaggacaagcgcctcctgtaagagctgacccctggtgtaccaggtgagttgaaacacatgtccaccatcctttggggggacaggatgaccatttgtcagaaaccgcctaaagcgtcaaataatgaaggcggacagcatgcaccaacttgtggccacttaggcggatgagcggcaaatttcggaaggaatactacttaagacccaagcgtaggacaggcggaagggacggctgaaaatgtgggcataagtagaaccaattgagtagagggttccgaacgttaccaatgtgcacacattacacatttggcaggcaccaccccccaccagtttccatgattttgaaccctagttggacacatttagcccgagccggcacactgccagaaagacattgcggaggttgtcccacgagttggtcaccaaacctgtgtggcagacagtgcacttggacatttgcgaaagtgaacgcccaccccgagcagactcggatacacgcgctgaaaccactggcaacttcaagagtgattcggacaaaacggcgatcaaaccgcgaaaacatggtaggccaaccgctcttacacaggagtagaggggcagaaacgtgttgcccccacatgtgtttcaccccaacgaggagacgagagaaagagatagtttggcaagcaccaccaccaatgtttacaccgacgccgggttggggangactcaaaagccaccgctgtgaacaccacgcccaaacgaagagggcgacatatgtgc

SEQ ID NO: 418799 - DNA, 1303 bp, Homo Sapiens
  misc_feature (1020)..(1055): n is a, c, g, or t
gctctggccattatcatcgccgtcctgaggctagcaagcggagacgtgctcctggaccccagagtacgaatgtaagtgctacccctgaccctattccgacgaccctacaagccatcgcctaatccgacctcttctgtcaaccccaacgtggcaaggcgcacgagtcgagctttaaaagcacaagaagatctcgggcggactccgacttcatcggcgagagacattgttgtcaaggaagcccaccaaccggaggaatagatcgttcatcccagatcactttgtgtgcattgtctatcaggacatccacttctgtgtgttctagagctggtgcctaggaccgaacgacaaccttgggccttgtggtacactcgatttcaactggcacttacgctcgtcggtacttactcagcgtacaccgtaaccattagtcgaattgcgctacaccatgataccgtctgacattagcaaactgccagcttgtgtcctcgaccatagtagcaaaacgataatctccacttgaggcccgcgcaccgggaacgagcagacgcccggccttcgtctagtctaactgaactcgttctatgcagcgtagtgtgcccattggccgctcaaaccttggaagcgggttgccttggcccacaaagaccataacccggcacacaagcaaccctaccgagcgcgatcgccttgggcacagaggtgctaaatgtctacacttggctcgctctcagggcctaagcccaggcttttgggaactcccccgaactcggtttacaccgcaacacccccatattcactataacatcgttggtcaccttataggcccttctcgattgtttgccccttcccggaacacccatggacggcaccgacgcaaaccgccttggtggcgcaaagcgaagcatcaaatcccttagggggtcccccctggcgcgccaacagcgggagcgattgtgggtccccagttccccctttcgttggaacatcctgcagactgaaccggcattgcggttgaaatgnnnnnnnnnnnnnnnnnnnnnnnnnnnnnnnnnnnngttcaaacacaagccgcgtatcgtgaaagcattatccgttgcgtcggaaacaatggcgctccctaaagcttctctcctaagcgttgggcccccacggtcaatgctttacgcccccctatgggtaagtccccagcgaatgggaaccatcgccacggagccacgggcacaggcccctatcaatgttcgtagggcacacaccaccgagcacgcatatccatcagccagcgacccatcggtggggctctccc

SEQ ID NO: 418800 - DNA, 1379 bp, Homo Sapiens
ggcaaacgcgagggctcactgtatacccatcccactaatccgatcgggcgtctagtctgcgctgtcagtccatgaatctctattgtgcataccccttctttctctttctgctccatgacgtcggccatgcctccctgaacttattaggatgcatcacatcgtaggaagctactgaggctgtgcatgcgactgcggaggacagcgcacctatcacagcacttgtgtcacgcgctcggactattgctagccgatgcaattccatcatgcccgtcaggactgatgagcctcagtatgttcccgagccagtgatctcttcgtgtgtcctcgtagttaacatatctaacccgatctattcattagaaaccccgatgtctggcacatgggcgattcatatgcaatttccgctcttacagtcccgggtgatacgcctctgtaagggtgaacagggcgaaaggacttgcgctttgggcggatcgtctgacccctgaggtgcgcccaaggcgtcactttacttgcccattccgaacctctgtcgccgacaaggtttgacccctttgaaacccatacagtgagagccctctgtgcaaatttcctgggaggtaactccctgtcaattgcaatcaatgttttcctgacatcatgttctggtcgatatccccacatggttgcacttgtagagtcttttcactaaggggcacccttaacttggtggaccttacggatttccgaaacgaggcaagaggactaatttcctagcggtagctacagccggcgcctaaggtggcacgagctttccatttgagacggcaccagagtttgggaaaacgccatattgttgaaatttctcccgcaaatcaggtattacatcattggcgcaagaaacgctttagtccacccagaggttatactccttttccagaccccgcccttgatgagccactcccccggatggaaagcgaccactccgaggaaggagtacacatttgggataacttacaccagaactccgcggttttgagagttccccttttcaaatacgagattcagcgacggtagttatcccatccggtaagcagataatcggcaacgcaatttttcccaagcaataactaggacttggtttgcgacaaagcgggtttgcgtatctttacccagtaggggggttaacacatcccattagcagagaattacccgcacgcccaaaaggacaatagacgaaactcttcggcaggcgacattataacactctatctctattattttcgctttatagtgcgagacgagccagcttttttagaagacagacggctacctatattcactcataccctttcactttacttcatatatcatacaaagtcatacatgtgtccgaccag

SEQ ID NO: 418801 - DNA, 1143 bp, Homo Sapiens
  misc_feature (267)..(304): n is a, c, g, or t
  misc_feature (329)..(344): n is a, c, g, or t
  misc_feature (712)..(765): n is a, c, g, or t
  misc_feature (820)..(861): n is a, c, g, or t
ctctttaacccttttcaacggggctcctacaaaattcggtggccaaactttggggctcacagttggtttccccttaacaaacagttccggatttcaaacaacccctacattacccttaacaacgtgcccaccacccaaaaaacaacaacacacccccaaaggtgtgtccccacaacacaacattctcctcctttctccttctcgtgaagagggttttacaccgaaagtgcccatgtgtgtcttatactcttatctcaaccccgcagnnnnnnnnnnnnnnnnnnnnnnnnnnnnnnnnnnnnnnacacagtgcgcccccacattgtggnnnnnnnnnnnnnnnngaggctgccgcgtgacaacacaccccgtatctctctctctcacacccccaatgtgtacaatctcacacgaaagtagtgggagtgtatgggccagagagtatatactacagaggggctcctcctcacacaactaatccctcaatataaacaccaccctcatcactactcacttagaaaccacatcttctcacaacgtaataggggctccatcatcacaacacctgattagatgccagtaatccgcactccaccttgtttgtcgccaccccccaatcttctcacttcccacaacacgcactcgctaaccccctatctatcaacttcaaagtcataccacacacactgctgcgactcatattatacgaaannnnnnnnnnnnnnnnnnnnnnnnnnnnnnnnnnnnnnnnnnnnnnnnnnnnnncacatcttagcccctccaagcagtaccacctacccataccacccatcaacatatnnnnnnnnnnnnnnnnnnnnnnnnnnnnnnnnnnnnnnnnnnggagcgcacccaacaccccccccaaaaacacgcacgagcagcagaggcaacaaatactcacacatactacctccgcttcaccacccaacaaataacaacacttccttcagctcaccatacaacaaactaccacacacatcccacaatgttgatgagcagacaactacattacacatacaccacacacgatacgacaaaccacaccctcatataattcactctaaccaccacaccacaaaccattcatttcatcacacaccacattaattcatcctaccatcc

SEQ ID NO: 418802 - DNA, 1078 bp, Homo Sapiens
  misc_feature (297)..(297): n is a, c, g, or t
ggtgacgaggactcgtcgccatggctcgtgtcatcaattggactcgaagtacgggcggcgaggtctgtgttccgcgcgcatcgtgatcatattcggtgaaggctgctgtggctcctttgacccgtctgtgatagttcctccgtgagcgggctactcgggaaccattcaaggagcatcgggtacatggcaccagtcagtctcgatggacccggtcccagcgtttccgctgccccttctgctcaacggctggatctttcccagcggatgtctctgtagctctccgtatcaagaacatgncgagacccggtagcctatgggcgtttcgttcgtccagtggggggtcaatgcgccataccgtgttcctgagttccgtgggtatatcgcaggccaatgaaagggccccaggcttcctcaacccatagtggggcgagactgatcgccttcctcggtgagtggggtcttatccaattgcactctgagaggcggtgtacacacattcggtctgatcgcatgtgccctgtggagcgtaacgacagtcacattggtgaaatatcggaagagtaaaagaatttgagaccccgaagaggtggttcttaggtcggcataacccctacattgctccaaaccgagttttaggtctataccccattatacatcccaccctgtacataagcccatacgggatagggttcgccccgttcgttagaaacggggtttgtccgcaatcctccgagggaacacattaccgcaataggggtttcaatcttgtcggttgctacgcaacacattttgaacacaacgttgatgttctttgcgacggctgggcttgttacattgccggtcgtttgcttggccgaatattttgctggggcaaagcttaacccctctcgaacagaaagtcctagggcaacgcgttggcagcctcttaacgtggggtctattccctggaccagaacactcccttgcgaagcgcacttgtcgctcccagtccttgaaaccccaaactttagggagaccgacgcttttaagttggccgccaaatccttgtaaagcccaatgcgaaacaaccctcgcctga

SEQ ID NO: 418803 - DNA, 557 bp, Homo Sapiens
ccgtctgaccttgaaccggccaaaactgtgagcgatagaggacgcgaccatcattccccagtttgcgtccatgctcgcactcgtagtgaaaggtgaagagatgacaatcatcgtggccgagtgtcccgaagcccattgtcgtcttggagccattcgtgaggagaaagtcgctctcctggcctctgaggcagtgcctcgtttacatcgtcggtaattgatggacgtgtaatacgccacctacatttggcgcccccgagatgtgccctccccaggcattgacaccacagtataacttttgtagggccaaaggtttggtaacgccagacattgccgatgatgggcctttccgactcacattctggaggaactttgcaccatggcagggctcgatggtagttaaacccccaacgtgattgacatccttacgccctattatagacgccactggtagtattgatccacttcggtgaacacgcggaccaacgatggtgtgaggtttcgcacgatgtatggtactaagggtcatcaactcgcgtgcagctatcatagaccaccta

SEQ ID NO: 418804 - DNA, 514 bp, Homo Sapiens
  misc_feature (333)..(393): n is a, c, g, or t
gagaacattaggtgttaactttctatgcctggcttatttcccttaacataatgtcctccagtgccatccatgttgccacaataacaggatttcattcttttttatggctgaatagtatcccattgagcatatacatcacattttcttcattcatctgttgttagacacctaggttgattccatatcttggctgttctgaatagtgctgcagtaaacacgggggtgcagatgtctcttcagtagaatgatttcctttccttcggataaattcttagttgtgcaattgctggatcatatagtagtttttttgtctgtttgtttgttctgttttgnnnnnnnnnnnnnnnnnnnnnnnnnnnnnnnnnnnnnnnnnnnnnnnnnnnnnnnnnnnnngcagcctccgcctcccgggttcaaagccattctcctaccatcagcctcccgagaagctcgggattacaggcgcctgccaccacacctggctaattttgtatttttagtcagaaatggagta

SEQ ID NO: 418805 - DNA, 408 bp, Homo Sapiens
  misc_feature (347)..(347): n is a, c, g, or t
  misc_feature (354)..(354): n is a, c, g, or t
gtggcctctcgcactctgttcttccgccggctccgcgtcgccgtttctctgccggtcgcatggaagagaatcgcccgggctggtcatgccaatggctcggcttgtcaaggctgtttggctggggaaaagtcccggacggtgttcttcatcgtcgggggccccagacacagtggtgtcatggtgggcatgggccagaaggatctagtgggcgagaggccagcagcaagcggtggatctgacctgaagtacccattgagcatggcatcgtcacaactgggacgacatggagaagattggcacacactttacaacgagctggcgtggccggaggagcaccagtgtgtganccgaggncccctgaaacccacagggcacacagagagcaagatgagtccagccaatttcatg

SEQ ID NO: 418806 - DNA, 850 bp, Homo Sapiens
  misc_feature (789)..(806): n is a, c, g, or t
ggtattacttgcttctactgctctagtgtttaacactctgctcgagtgtcgtgctcgatcgtactgttaaacgcgatggtgcactcatgagtcgccactccatccactgcgaaagatggcctaccatgcacgcctatggcggctgtgtgcttcagctcgtcaacgtcattccatgttccgctgtcgttcatcctacatctgtaaggtcgcaggatagctccttcctggtgtccgcgtggcctcttcgagcgaggccgtggggttgatgtagagcctctagtgtgctaggagtcgcagtttttttagctgcccttcttgggccttttggggcccggcaccagaggccgtccacttggcctcttcgggcctttgttggtttggccttctccaaaggttttgcgacttctttcgctatttccgtggtggagagcgtgtcggcgaatccgcgtggcgcccctttcaagttctggggcgcggttgtgttatcgcgtccagttccaagagacgccttcggtgggccgctgttggatttcagtagtttgacgccttggatggtggctaaggggactggccccggcgtagacaggggttggaagggagttctctcggttgctattcttttggggggcccggacgtttggtttgggcgagcctccgggggtcccactacttggggggcttttttttcgcgaagccttttgggcccgtttcggtggaacggggtttagggtggcttttggaactttgggtctcgccctttctcgtttggtgggcgaaccctgtgaaacnnnnnnnnnnnnnnnnnncccccggcatttcgcggttcgctatgtcccccagacctctggat

SEQ ID NO: 418807 - DNA, 1256 bp, Homo Sapiens
gcttagcaagggaccagcaatttgaggacaagcgaggaggtccggcgggatctggaaccgacgcaatagcgtactctggtgagctgactgatcaggaggagtgttcagactggactgactacaatgttgtggcctataaccacatggtttagcagatacacacaactcaatgacgtattcagatgatgcgatcatctgcgcaccttgctctgcacgtcttgttctctccgctctggtttactacaccctggtgtggcttcgaggacttacgatggccttgaacgctctcgtacgatgactacacactgccatgggcggtgattggacgctgcagctaccgacggaaacccacatacttcccctgagcccagatgccataactcactagatctgctatgaagcattaccacgtgcattagttcgatcgacgatgctcgacgtaggtacttgacgacgtcgatcgagctatgacaaagaccatgtgccacttggacaccgaggtccaccggcggcttgcctaacccctatactctaaccccgacggaacgaaacctgacttacacccccctgacctatacatccacttaccttggccacagtttccccggctggcaatctgatactgcctaggtctggaggcgattgaccctatccggctcccctggcgcaaagaccgacacaaagatcggtgaatgccacatgacaaagaacttggaacacccccaaaaccgacgtgccatacatcgtggagtcgccagcacaccgcaggcgagggaaagccaagtctacaggcgccccccgaatagcaccccttttgggacaggagggacccttggaaaacacggtggaaggtggctattataaacagtaccctttagtggtaccgcggttaagttcgccaatataccggttaaaccctagggcccctatgttccccttatatgccgccagtaggggaaacaccaaagattggtccgaccaattcccggagaaattaactaatactacccacggcgacgacaagccaatgttcgcgaaggcccatacagctgacatggtgagtttggccctttacacatgcgagacggaacacacgtaacgggacgccacaaacacttcagattagggaccagcacgtaaacctatcccaactgcactattcagtgcaccattatccgtggacattacgtgagcaggtatgcatctgcacgatcaatattccaaacgagaaaaaccccatcacctagaatgttccg

SEQ ID NO: 418808 - DNA, 1191 bp, Homo Sapiens
gatccatccctttcttgtgctgatatgcaatcacacgtggtgtaacctcagcacacctctgttcatgacaaagcaggctgctgagtgaggggtgagtgaatccgcttcgttccgccgaccatgtcctaaggacatgtgcggacatgtccagatggtctatcctacgctgattacatgagaattgtatccagcgttgcgatggacctgcgtcccgtccatttaccggattgcacaggcctagctcatgccaaaccatctatggatgtgcggtgagtcaagatgcctgccaaataggggacttagaaccgaacgttttccaacctagagggtccatcggcagacagacgatcatttaggggataaccctcaagctattcacttttaaagctagagtataccaacggagacgtttcgatcgcacgcgagggatcgtacgaaacagcccaaaggaaggacagtacaaagcacagggaagggcccataggttgtggggcccctcttggcaagaaccggatcgaacactcgataatggggagtttggtatagattcaaaacgagggagttaagtgggtccccgaaagcgggcataagggaattgaagccccacttcgatagatccccgttttcgggaccggtccaagagcggaagttatagatttcataacgacgagaaataaatcctctgagccatactcgttagtgcacactggcacgctcaacttgcaaacagagacatacaaagggcaataactagttagagctgagaatttatggccattaaatatgaaaccacgcatcggcattaatatccccctctaggtttcaggaattaagccatcgtgggacttagaaccctacttccttcagggcaagattgcatcccaacgtctcagagtcctggcccactaaaaggggagagaaaggtaccaccaaatgaaggatttgacccattctgaaattcccatacgcagacgatagaaacgtcgatcaacaggcaattcgttagtttgtgacccgccgtaccataaatgtttataccccattatgtagtaagaacaacgcattaaaatggtcgagcctctcaatccggtgcatatctaactcgggcagtgcgaccagaattcaaggaaggatagcaatcactacaacgcggcacaaacagaaacacgaggagcatatctgacaaatata

SEQ ID NO: 418809 - DNA, 1515 bp, Homo Sapiens
gatcatataggatctaggggaatgggggtcgtccgccttcttctagcgacctgagtggactgatggatcctgcgctcaggcaactactctgggatgcacttctgtctgtgtgctatgaagctaaacagtgtctcgaatcctgtagctgataactttatgagattcactatagtggatgatttcctctctggtgcggccctaagataggatgcacactctaaagcatatctactagatgtgagagttgcatgagcatagtagactacatcgagtggaatatcgggcatacactacacagtgtgggggtagtcagaaggtagctgtcaagacgagcactggtggagctgtcaccatgaggggtgggcgaccgtaaagaagggagttcaagtgcattagtgcgaaaagtacaagtcgtgagtcgtgagtcgtcggtgatgcaatacgagttgcacgtaagatcctcgttgcccatttgagcatccagagtaatcctaattctccatgccaatcgtgctgacagatcatgggtggccaatgagaacaaggcccccagcaaggtagtggactccaaaaggaggcaatgtccataggacccaggcgggaggcaccagaaatcgattcgtggaacatatctgtggcatgggtatacctgtcgaacccagggaacagttgcctcgaccaagcgttcttctctgggtggaacctgtgtataaccccttttgcaaggtggggatcggatgtttgggggcccccaagtggtgctctatggtgaaacgtgagctggggaaaactggcactggggggacctcgagcggcaagtggctacaaggtaaatctacaagtagtcaatcgccgattcgcgtataccgacattgtcgccccgtgatacgaattacccaatggcgctctatctatctcgcaaattgtgccgccgcgacagcggtgttctcagaagtaactttcagccagcgagtagacaacgaaccgtggaacaattaagtgcagtacggtatacctttcgcgtggaatttcagcaggttgccataggggctactagctatgttacgagaaagaactgtggattcggagacgcagacacgctccgagagagtgggttgggacgcaagcgttttcacccccctttgatttgagcacctattggtgtaagttcggttcgctcggtacaacaccgttacagccgcagaaaatttatacgcctgtataagtactcaaaatgcaaccacattattttactacaccacagtaattggggtgagctccacggaaatatcagaatcattaggtctaacctttacatctcacctagtactccattgtgctccatttatacaaaagcgtggacacaactcattggtactaggacagcacacttatagagctggtcgcaatagatactatggttgccaccctacatatttacggttatgctcattattagcactagttcatatgcaacatccagcaggactagacttaatggtgaacactattgac

SEQ ID NO: 418810 - DNA, 1344 bp, Homo Sapiens
ggtgaacgctatctctggaacttcctgtcccttcactctagcgctctgggtccaaatgctgacacgtgacgtctgcgtgttagggtagcttgctcatctgcacattcgcgtgcgtattccagacgagcacgaagcgttgcttgtcatagtgcgcatttctcgccagaatcatagctgggaccatggtgcgtttactctggtgagcatactatggagcaactcgcattagactgctcgggaagagagtgcttcgccaggatgttatcggctgcaggtggtgatggaacagaaactttagctgaagatgatgtgctatgcggaggtccgggatgtgtccatcgtggcttgctatgtactgctcgtgcccatcctagatggttgacctgaatagatgttagtcagagagcatgcttgaggcagatcctccctcgtagtttggggccaggttaccttggggaagcacgaggtcgattggaccatagatgttgggatcgtgcgtatgggcatgcacaatttattggcacagggggggtcatactttatggtcttttcccttggggacatggacccgcgagaatagggggagttcactgactcggtgcaagcgctagcaccagagcgagcaagagcgcattcagactggaggtggtgacacttggggtcaatttgtatagtcccttgggtctcggcgtgacgctttacttgtgccaccccaaggcgtctgacattgggccgtatcgccatggaaaaggggaagcaggagggcacataacttgtggtggaggcacgcgcctcatgcgcacacatgtggcccttcgagagtggaacctagacaagtccctgtgggctggggggaaggattaccaccccgtgggggcaggcttgtgctttggggggcattgtgcgccagggtccattggctgaagcataggaagaggatcaagccgtaagcccaccgggaaatgtgaccttttgggcattacacgacgaaaagttcaacgagaccttaattaggggccttggtgtacctgcgacaaatccaatgtttaccccccatgaaaggtctacatacgcgcgaacacagtacctttattgggggtgctaccaaaacgcaagaaaagactgcctttgggtgtgtgaataaaatctgtgggccccatgcactcttaggggggcaatattaacctacgagggtaggcgaactaacaccctagctgtgtttccgatgggcgcgcatgcgagataggctagggcccaagtcgggagaatcgaccctatccaagcactttgaggcacacagacgcgaataataaaacggtggaaaggaccgttgcatggagcagg

SEQ ID NO: 418811 - DNA, 1385 bp, Homo Sapiens
gcactactgggtcttggaggactgtgtgttgtttccatctacttcgccaatgcagtattgtctgcctactgttgttcgagtagtgcacgcaagagggcaagtcattctgacatacaaagtgttgatctttgcccgtgactcgtagttgcaaggtgccgtcactatttccgacacacgatatttgtcaatcatctgtgcactagtcatacctgtgagcaagacattatcaacatcacgatgctcctagtgtctcgtcagggtgagacttgacgcggatgggtcggtctatcagcgtaagtggcttcgaggtcctttggcggggtagctgtgctaggaggcttggtggtggcgtctaatagttcacgcacggaggattccgtaccgtattgggatggtgtgacgtcgagccttcctcttgagttgccatatgctgactttagtgagcaaaactagttgttggtcagtcgtgtacgggccagacactgtttttgcgatcgccataggctagcatagccattggcggccttgatttgggctatttcgggtaaggaaggtggagaacacggaaacctcgaggaataaactgggaattataccggcccgcatgcgttggtgtaccgttgcgccttaggggcgtgtgccccttcgaaggcccttaaacacgaaggcgacatagggtccgaattgttcggtcaaagcactgtggttccaatccgggtcatattatggacggggtagatgtttcccccttgtagacctttacgcgtatatggcggtacaggttgcggaaatgcgataaacgcgcggttgtcggacactgttgccttaaccgaaaagtggacagacggaatcccgataacgtggcacatcgccatcggcatcttctggcgtccccgtgtttaaaccgcgacactgagccttctcaacacaacggccccagttcgtgcgacgactttggcacttaatttccacgcggaacactactgttgttccgtaagtttggcccgttacgttccaaggactgtacactttgacaccaaagtccttagcgccaacagcagtggtgcgacgagacgtttggacgcgaaaaaacacctggtcatggccagtgttaattcacctaggtacggtccaaagggagagcccccaggctggcaaatccaaattccgtatatacaacagttgcaccgcgcactaaacgtaggggtaaattccacttcgacagggtagcccctatacagcaaagtacctatttcgccctggcgaacgatttagactcgcattggacctgacatgttgagtagacggacgaaacgcattcgaaaacgactttatatgcaaagcctattagtcgtccatagggttgtgggaccactggatggcga

SEQ ID NO: 418812 - DNA, 1205 bp, Homo Sapiens
  misc_feature (1032)..(1032): n is a, c, g, or t
gcgcagcttctagagaccaggattgtcctccgatcagtactccgatctcgccataagacttccatacagactattcgccagtctgtcggctcactgtcgtaccttcgataggcctgtggctggcaggactccgtgcgttgttgggccgcggggtcagtcttttctggcgctgcccatgcgactcattggtgggcatccgtgggcggactgctgcgacgtatcctgtgtcgctcctgccacgacttggttgtcctcgatcctccatcaggggggctctatcgggacggacggtatatcggctgggagttcctagacgctgcgatcctgaccggcgcatgtcatagggcggagacagaacgcagcaacgcgataagcacaatggcaggacagggcgtgcaaccgacaccgaccgtgcgaccgtaccgtagaccgtgtgacacaggtgtcgcagcgcaccgtgtgaacgggcgagcccaaccgcgcggaggccgtaggagtgattgacagaactcccagccgaacgtgagatactcgatagcaagcccacgcgcgtggcctagggagcacactacccagacgaacttacaagggcgacttgacgtaacaagcgacatcaatccaagagagtcgtgcgagcaggactagaagaatgtcgtatgcgttagactacccagatgtgcagcaacgtctcaaggagtggtcacgtgcaatgaatctgacaaagatgccgcgatcatgggctagcacgcatgaccgttcctgaaagccaaggatatgagcaccggagacatggtcgtctgccggcatgatgcgtggcacgagcgcgacatatcaaactgggcatgcgcaggggtggctggactgagcgtgacccgtgggccagtgaccgaacctggaagatgcagaatcgacaggcctgcaagggaagagctgggctacctgaacgaaaaaccgatgacggcggaaatcagaacgcatgaggggccaaagtgggaggccaggtcagtgtagaaaaggggaaaacccgcaacnggggcaccggaatctcggccaacgaatgcgtgaagtggacaatgcgaaaggccaaagaagaaagatcatgggccgagcatgatacccggaaaggtggtggaaagcctggctcaccaagccggaatgacagacattgacacgggagggtagaagaggcacaacggaacaaggtc

SEQ ID NO: 418813 - DNA, 1263 bp, Homo Sapiens
gggaaactgttgagagaacggaacctactggtgtcagaggtgagggctcacgtgagaaccatccgcggtagacccgatccaccgctggtcaccatgtatccacattgtgcaaagcattcgtctcctgtcaatcagcggacagaactccacaactacagagatggctcgaaggaggagcagagaagtgtgctatgctggtggggtgacccctataaggcctgcttcctcccggatgatcgcagccgatgtatccagccatcacgccagcagaaggaccatccgatgcgctgacgcatgttggatcctggtccgctgttacaacaaccctctttcatgaacaaccttgcttgcctggcgcttcatatcgcattcagcggatacatccgttgaatgtctaagggacacgcgcaaggatggttatgggcgatagtgacctggggcccatggccttatgccatcacaccggacaaagtgcctgtaacatcatgggcccatgattcttgcggcatctatcatgcaacatttctggctcagtcatcaatccccagtgtttgggtcgtcacagtgcccaggctgataagatacaggaaggcatcattgatgtgccacggatgctctgcacctgtgaacctgtatcccacagtaactctatacttccattcctcgccactggcgcccagaggccaggagctcatgcccgttgaactgtaataccacttactccagcttccatttcctcggacctgataccccacgaggcgagtcctgcagtcagggcctatatacctcaacaacgcttttcgtacgaatgggattttcaagtaagacggtgttcttcctggtaaactggggaggaaaagacgaagaattagacaaaacatttggaaggggaatttaaattgagaggggagtggggagaaaaagagtagggattaagcaatagtgggacatatggttcaaaagatagtatattcgtaggagcacaaggagtagtttgataacgaggtggtgtaaaagttcgcgggcgctcccgcagaggggaaggggcgtatacaagtcacagaaaccccggaggtgaaaccctggtttagtgtactggccaggcaggcggggtgcagtgtctactaactggagcggtatagagggcgcaagtagagcagcagtaaacacgtagtgatcacgccaacttaggctgacactcacacgtatctacaaccttcatttgtctaggcatcattcgtacacctcacgaagaccgtggcg

SEQ ID NO: 418814 - DNA, 727 bp, Homo Sapiens
ggagagagaactagtctcgagtatttataaatattgtgtgaaataaaatttatttgtgtggctctgattatgtccccttgaaatggcctggcgtggccggccgggctcacatggtttggtaccaactaaatacatacttgtggtggctggtttactaccgagaagctcgtaaatgtgccatctgccactggtatacagtccagattcctgggttaccacagattacatggtggtgcccttgtgccacctatacctactacggtcgcgtatggtgcctcacatattacccagcctagcacggatgctctatcggggctatacatttcacgtgggcacaagatttcaaagcatcttaggacccttgtgtacacgacttgtgctacatgttctacagaatgcgctcctaccccatgttttgtactgtaccaacccacccaatagatagtattagggccctactgggcatgagagagatgcttcagggaagaccctgttgcaactgcaactgggggtgataccgtgagacagtggggggtttcggacaccacagatgtggtatctcgcaattggcacactttatgggcgccaactccctccaaagtatatatatacgttccttcgtggtgcacagagcacgggagtagataacccgggatacggtaatggggttgggacaccctgtggaggcaacgctattgtgtgtccatgttgcaacatagcccagttg

SEQ ID NO: 418815 - DNA, 374 bp, Homo Sapiens
gctgagatcctttgccgaggactggtgacttggcctgatggacgggcgactggcatggatgtcgcggtgtggcctcagtcggatgcagatctggatgggtctctgaggacctagagtatagggcgttgaactggtgtgagaggcgatgtcactatggagctatcggtgtgggtcattcgtttgaagaccggcatgtagtgggtgccgtacctgacaccagaggatagatccgtggcaaccccaaggtagtagccttctgtccccgaattaagcatcgacttccttacgctaagttgtgtcagtaggagtgtagagactgaccggagttggatggggcaacgtgcattttggtccagcaggctgctgtgctcttg

SEQ ID NO: 418816 - DNA, 1271 bp, Homo Sapiens
ggtcggtactacgcctttgatcgaggtcttctcggtggcctggtctccagatggtccatggacgtgtcatagcagtcatggagggtccatctataggcccatgtggaggaatggaggacctcataccgtgagagacactgactccattaggaacagagtcgtctgaattggagtggggtcgtctaccggtggagacccgagtcgcaggagtgtagccgttgatgagggaagtgactacgtagtgggaccatcgctggcgcgggtggatgcaggattcgtggatgacatcagggtgcagtcgagtgatctgagttctgtggaagcgagtggatgcaacgatgtagttgcgggcgttgaattgagattgatttcgagtgcgtgttcaaagcagcgttggttggttcgagagattgtagtggcctggtgggagagtcaaatgtatatgcaggtggattgacgcggtggcttgaaggtttggattgtgtcgagtacgttttacatggcatgagcgtttgtggactggaaaagttttcgggaagcgcgccagtgtgattcgcgtaaggttagcgagtcggattcttgcaaggggcatgtccgggagagagaaaggggggataaatacaagtctagaaagtttggggtgcatcgggagattgcaaggcggtaaggaatacctttgggaagacgcattagtgggcgccttggggatatcggataggcttttgcgctagttggcatgtggagacccgacacgacgacaatgggcggaatagcccgcacaaattgaacacgttacgcagatcctttggaaaaccgcagttggattcggtaacagtcgtggtaacggcgggcgacatgacaatagggtgtccacgtggtgcacaatgacagggtcatgcaacgaacggaatggtgatacaattgacacgcgttcagttccatctgacggttgttctcccactgttaaagatcacaaaggccagccaaaagggccagcgtgaaggggaacgcaacctagcagagaggccgtaccggggccgcacagtattagcgcgcacgtaaccgggggcaccattggggcacgtgaagagggcacgcgcaattcgacacgccaaaagagtggggcccgaacgcgcattgtatcgcacgtccccccccgcgttggcaagagcgcaagtcctatccaaggcgtagcaacatccgtcgaaggcggccaggccaataaccctatggggccccatgacctaaccatggtcacccatcaacactct

SEQ ID NO: 418817 - DNA, 689 bp, Homo Sapiens
gggatggctctatggaccaccaaagactcgggcccaagtgattactggattaatagggggcctgtgtctggaatagtcctgcggatatcagtggagctggatctggctggtggtctacactggtggatgaatgcgaccaccaccatataatcgaccctgccgtgtggtgtgcgcattatgctgtcttgcactgtgtggccatcactgacctagcatctggtattatagtgccgctgccctcagtttgagttgacgctgtgatacattttagcaaggctgggacttggagtcgcctgttcactggggactgttcggccttatttggattgccgtaagtatgatgcagcgttcgctagaagggagcgtactccccgtcagtcaggttctgacttagtcagaacactatctccctgaccctgtaggacttggtgcggactgtccaaagtggtcttgctgcagtctgaactgggcttttactgtgcgtctcccctgaagtgcactgtgcgagggtcgcggaacgcttcctgtcaccaatgcttcacttcttgatccccttctataacactgctcactactgctgatgccctgtgacttcgccccactctctggtacaccctcagtaccgaggaacggtctgcaggattacttgcattctatgccccacactcacccgcgtgctgcactgagca

SEQ ID NO: 418818 - DNA, 920 bp, Homo Sapiens
ggtcgccgtgtgcgacaggagccagccggcatgtctgctggcatatgcaatggatggtcgtgcggaactgctccagattctcctgatcaataggaataacgcagacctacagtcactgagcccaataacttgacagggcccggcaattccttccggtacaagggaactagcatacacctgcaagactgtgcggcgtgtgagacctggcagctccgatcgtggaaaggtagtcgctgcgctcggatcattcaagcaggaggatcacaggtccagtcggaagcctgcccacctccgtatgtgccgggaccaagtcagtcatgcaagaagtgaatacggcgaccaggcagtcagagcaggcatcagaacgagcaatgaatccgcaaagaacaaggtaccggacccggatctgcggcatgttgctagttccaatgccgcagggaccagtcgcccaatctctgcgggcacgtcccagggaaagccttgatgaatgcgtgacacgacggacacgccgggaaccgcggagccgcaatacaaatgatgctcgcatggaatcccacacgtgccaccacaggagccgaactaaaacagtcacggcatcggcgatttcacgttcaagaagcagatccagacaaaagaaaaaatatcgtcatcagacaattatattatttatcaaaggtatgtgtccgggcacgaaaagctacatgagtaaaaatcacaacaagcggctcgcaacaactcgagcgatcagcaacagtgcctaggtgatcacacgggcaccgacgaaagcggtataatggcgcatacagaaatttgtagtcaatactatttcgcagaggttctctccccacatctagtaatgcacgccctcgtatttcaatatgagtatagcaacccaccaggaggacactcccattagatgt

SEQ ID NO: 418819 - DNA, 844 bp, Homo Sapiens
  misc_feature (70)..(124): n is a, c, g, or t
  misc_feature (631)..(696): n is a, c, g, or t
cactcgtgcgtattatggcacgtagtgtgggcgtgggatgtcgtatagtagagttgtaggcttatatagnnnnnnnnnnnnnnnnnnnnnnnnnnnnnnnnnnnnnnnnnnnnnnnnnnnnnnntgctgtgaatatcggcgtcgtctctcgtcattgttgatcgacgatgacaatatcatgtgtagtgcgaaatctcatcacgcgactgtcgtgtgtctctagtagtcgtgagatgatagtgctgcgctgcgtgttgggtgggagggaccgtccgtgtgcatgatgtgtgttgatagtctagtggtgttcgtgtgcgcacatgtgatgagaaagacgcacactacttgtgcgtcgtggcggcgaagttctcacatgacctcttacgattaacaacggatctcatgtggctacgtcgtcttctaggggcataagaatgaagtagcttggaagggggatccatatcaagtataagtaagtatacggtgtgtggttttgcttgctgagtaagtagtaggaaggatgtatggtgtggttgttagtgtgttcgtgggtgacagcgttttcttgctgccgtcctgtgtttgttggactggcgactgtagttctgtgtggtggtgggctagcggagtnnnnnnnnnnnnnnnnnnnnnnnnnnnnnnnnnnnnnnnnnnnnnnnnnnnnnnnnnnnnnnnnnnttgaggcggctttcttctcttggttcttgttggatgagggggtgcgtgtgtagggtgagtcgagtaggatgcaggtgtgttgggggtgatgtggagtaggtctttgcggtgtagttgttgtgtgggagagtgacagtgtgttggtggg

SEQ ID NO: 418820 - DNA, 847 bp, Homo Sapiens
ggcaacatgttgcaaacagtcgggtgccacgttgctcacggttcacggtaccgtcgacgcgacgtgcaacacaagagggctctcacgtgttcggctgcacgcgtccgtggtgagcgctagtccagtgccttgtcgctgaatggccttctggacccactcccgtggtctgatattgccgttaacgcgagaaacattccattctggcattaccagaagaaactgtagtacgctgttggcctacacgtagacagtgcgctgtgcgagtgacggtcttagtagccgccgaaggagccagtcatgaatcataccacctgaacctgttacgattggccggatgtccgacttaggacagtcgtagttgaacgcttcgcgccagagttggatgtaatacttgtgaatcatgcagttgctgttggaaaggcacacccctgtggcctcgctcttaggttgtctaacggtacccggagtgtcactcagcgtcttcttgacataccactagtgagtttagccaaacattcgcgctttgacatgttgtaggaggcacaggagaaaggttgaggcggaaaagaggtgagaggctagttccatatggggtagaaagagaacacctagtgcacgtgggctacttctgccgttggttgtgttagaagcgcaatggatcgcttgacacggctagcgaacgtcgtcctaaggagaaggtgatgactaatttccaaaggggccatgtagaacgcgtagagtgcagaaggagaccgcaacgagagcgacgtggacattagtgaacccgtgtaccaactttgggacatcctacggccgaagtcaacctttagacagtgccttgaccacg

SEQ ID NO: 418821 - DNA, 984 bp, Homo Sapiens
gactcaccatgcgtggcgtaagcagcgccgcaaagcatgtgcgtgactagagatgagactccgttagtttacagaaaaaacacaaagcgatctttcattaccgagcgccgccggaacacacagcggtgacgtgcaatcacgggccacactgggttctttacaccgtttcgtcatcaaccacaagaaggtccctgacacgcaggcgctggcgaacagtactgcgtccgtgtcactcggacaatagtggacacccgcgcatctcagacagacttcctaccgtagtgactgcacacaggagggaacttacgcgcgggacgataagaacttacatagtcgcccgaacaagatgaggtcaggacgagcggaacctagcggacgaatggtcgcgacaactaatgaggcagctgacgaagcacgcccctgacgatgtacaatacaacgcagaacagacagaacacacatgcggacagcaaccgaggctgcacgccgctaaaataccagaagcacaaggggcagcacacacactaaagggagatctaaaccaacagacagtaggaaagaaagcaacaaacagccaccgtggagaaacgacacagaaccacgactcacgacacgatgcaccatctcagcgtagcatctaaacaggagagtcggacagaaacagacagccgatgcaagtatcgacgatagcatggcaagggcaagataatagtaacctacacgagacaattgcctgcaaccacctactaagcatggaagcgacatgggaagcagcaaccagtggactagtaaagagcctgacaagcacaaccgtgaaggactgtggcatcagatggcgacacgacaggagaggacgcaatacaaacgatcgcaatacacggggcaccgacatatcacatatgctgccaaaactcgagacgaggaggagtgggcctgactgagctacaagagcgagcaagataggtgaagaggttgtcaacgcgg

SEQ ID NO: 418822 - DNA, 1615 bp, Homo Sapiens
  misc_feature (164)..(236): n is a, c, g, or t
  misc_feature (964)..(1022): n is a, c, g, or t
aacgatgacgagcgagcaggagggctgggggagtccggcgagcgcagagcaggcacgagaggggcgagggagcagagagaagagggacgacagggcgcgagagggagacaacgagcgaaagagagactgagggacgggaaggggcggaggaagaaacataggannnnnnnnnnnnnnnnnnnnnnnnnnnnnnnnnnnnnnnnnnnnnnnnnnnnnnnnnnnnnnnnnnnnnnnnncaccacacagcagtccgagacaccgagcgtgtgatgcactcgtacggtacgcatgccgaggcccgtacaagcgctgaaagctacgtgcagtacacaagccagcaacgcagtacggagcggagccaactgaagccaactgagggagaccaaacacagggaggaagccaacccggcacaacggacgaacgagacggaaaagagaagcaagaaagcccacgtgctcagtgaagtacatgctaaaaggccaggacaacggccacgcacggccacagacgcacagtagacgcagcgagacacgagccacgcccgcgccagaaccgaagcaagaacgctcacaaagcgagagagcgacaacagggcccatccgacgcacaggacagagggacgccagccagcacacgcgcacaagcgaggcagcgaagaaccatccaagagagacgaggaggcccacgcagcccaggcaagcgggcagcccggacacaagacaaacacgcaggcatcgacggacaagcaaagagaagaacaaagaagacaaatacaacagacgaacacaagcgacgataaacagcgacagagagaaaacagatcaacgaacacgaaagagagcgcagcccacacaaacgacacaagacaagcgagagcgacgcaggccaaggaaacgagaggaccgacagcgaaaacatgcgaaaaggcaaggagacaccaggacacgaaaggacggacagcannnnnnnnnnnnnnnnnnnnnnnnnnnnnnnnnnnnnnnnnnnnnnnnnnnnnnnnnnncagccatgacaaacgattgaagaaacggcgaggaccgtgatacacatagcgacgaaagcaagagcacaggagaagatcgacgagtagtaagactagaacagaaggcggacacgagtaagagacctagcggagagaggacaaaaatcaggcaaaagcgaggagaaaagcagacagaagagaagaagcgacagaaaaacataggacacgagaaggagagacgaggagaggacgatagagagatcgaggatgagcggagaacgtaggagaccgacgcgaggacacgtagcagagtacgcactgagcgtacagaaggagctactactgagctcgtgctaaggacccagggtgctgcgacgagcgacggagagtagaggaccgcacagtacgaggttctcggcgtgggagcgtggaggcgacccgagcgagatgagggtctcgccgtgagcagtcggagcggtcgacagacgtacacgaaagctgactaggtgagagagctcacgacgatagcccaccggaacgtctacagagaggagcgcgactctaaactgagtagctgactgcgccacagagaagatcgcacgcgcgacggctaa

SEQ ID NO: 418823 - DNA, 399 bp, Homo Sapiens
ggtggctccgggcccagctgtacgtgacagaagctcgagtgctcagacacatgtgctgaatacccctgatatgtgcaaagggccatactgaagtttagcgcgattggcacatgcacatccagcccgaaagagagcatcttgacccgactttgctgactatggtcgccgacctatatcaggattgacagcgggcagtagagccagtcctctatcatacgagctgataagttgcttcccattgcctgaggtatgaccccagtgattcaacgccaaagtgcctcgtcggacatcgagtcctcagacaatgaatacttcgaggccgtgctttgaaagcgtgggcgccttctaatgtgtacatgactcagggagaacactacgcacttgacgattgacaggacg

SEQ ID NO: 418824 - DNA, 1650 bp, Homo Sapiens
gctacatccgcgatagcttgctagctgcgactgggttcccaaatgggtcagtcgtgattctccacgcagtaccgcgagtgtggaccgtgaacgcagtgcaggggtagaacgattgatgcacaagcaaagctgccacgtggcgacgctaccatgggatccagacacaggatgcaaggactctatgtgacggcagcgaggtcgaatcgacgtctaggcagcagaaatgcacagcatgaatgacctatgcttgaggagcgtgcgtcttgggacgctgttggcctcgccaatcggtcccctcccgagaaacgctagtccactcgaatccccggagcaagcaccggaattgaccaggacggagggagtagtgcgcaccaatgtatccatgccacatccgaaggggtgccattgtcctagctcgatcgacatttgaaggggatacgcctgcgtcagtatgccctcggactggagcgtcgtacgttcgcgacatgcttataaaattatcgctaatgcgtgcgccgtctccccctagcgctaggacattagcaggaaagtttcaggcggaacgctacgcattcgcacgtacgcctgagtcgagacgcaacgcgaatgcgatccgcaagtacaagcgaagccgcgatgggaaaaacctaaaagagggtagtcgcggtggcccggtacgcggaacagggggtgcaaccgggcacgtccccgcgcgataacgtaaccaccggggtgggaagtaccaggggcgtaacaccgccaatcaagacagcaggtcgcgaagacgcaggccttagaacagaggcagaaggggtgaagcgcaagcaagttcccccggaatcccacacaaagccaggacggaacgacatgaaggccgcatcgcaaaggaccacgggggatagggtcccatggccgcggcggccaaatgaaacaagctccacgaggtcaggtaatgaggcacccgtcgaggcagttggaccgcaaacggtagagagacacaacccggaggctacggacaaagtcacggccgaacagggagcacgctacgacgagccgcacaaggacttaagcgcacagcataaggggccatacccaagggacgaaggagggaacgccaaccgggatagttaccacaacaacagagaacgggtaagatgcgcacgggacacgattggtcccaggataagggagtggccccccaatggggcacccacggggtcagaggggggagaactcgggacgaaacaacacatgtcgcaacacggcaaaggaccaaacgagggccatacgaagaccacaggcggggaacaagcgaaggtggacaaggcgagcaacaccagagggagggtcgaaaaggcccgtataagctaggacgacaccaaaaagggtagccacacggtgcgagcgaggaccaaacccgcgcacaacaccacgagtggcacaaggcataggtagaaccgcacataaatcgaccaatagacacacaggggcacgaaaacaggacagaaccgcaaagggaggccacccacaagaaagactacaggacacgcaagcaaaagcaacagaagacctagtctaggccacccaaacaagagagcgccgaaagagcgccacagagaccacgaccgacactagagagcacacgagaag

SEQ ID NO: 418825 - DNA, 980 bp, Homo Sapiens
  misc_feature (132)..(132): n is a, c, g, or t
  misc_feature (183)..(183): n is a, c, g, or t
  misc_feature (238)..(238): n is a, c, g, or t
  misc_feature (515)..(515): n is a, c, g, or t
gcgcaggaggcttatgtctgtaccgtggtcttggtgctgatctgaacattggagtgttcgtgctggacacgattttcatgacacggacttagtgcgaggcgtggcgtctgtgggccgagtgtggtctcagcncagcctgggccggatggcgcatccggctgtcatcgtaccgggctctggaantccgcgattgtggtgctcctcgggagttcagtcaccgttgcggcgcgcgtatcgnggggtccgcgactctcggagcctcgattcggttgtcgcgtgcgcccgaggcgttgtctgaggttagcgactatcgagagggtgcggctgctcggagccggtcgggcttcaggcgcgtggaagtgatgcgtcgaggtggagtgcgtccgggacgagttcaccataggaaggggtggcctcgggaccagtcggcatttgtcttgatggtatccggagggtaggcggagagagcagaggtccaccgtgaagttcccatgctgaaggaccaactgatgccngtccgagcatgacaggaagctaaccgcgtcctaggaacttccatccctctttccccacaaggtagagccgctcgtggcccccgaagacaaggcgacgacgagttcgtgcgttgaaagaacttgagaagctgggcacccttaggctgaccaggaccaggtcatgcctcggtccgggaacgtctatacagaaggagaaagagctctgagggtcatcatctgagggacagagaacgaagtttcaacacgcctttcgactagtctccggtatggtcccggtgaccaatcgcccgggctcttgcgtgcatacgggcagaatagagccaatggaagccgcaagaatcagggatgtcgaagaagacaaaaactatgggccctcctggtgactgtggacagtcaccgggtgcttggatgagacttcaggggggagtctaataacgggactcgggagaaggcagggtacgggag

SEQ ID NO: 418826 - DNA, 1165 bp, Homo Sapiens
  misc_feature (299)..(299): n is a, c, g, or t
  misc_feature (905)..(905): n is a, c, g, or t
tctacgtgtggcaacgtggtgaggaggggagatccaggtgtgtggtgtgggggacgtgagtgtgtgtggcggggaacctcccccagcgagtgtggagggtctctctctctcctctgggtgtctctgcgtgggtgcgtggtgtggctccaagtgagtctctatacctcctttgtgagggccatgtgtgtgggcgcccatgtagaggtctccaccaaccgcttgtgtgtgctttgttagccccacaaatttctcgctgtgtctccactcacccgagggaaaagtgaaccttgtgacaccanagagtgtgcgctcgttgagaggagggcaagagtgtcccgacgccccaaggcgttacaaagagtggtggaagggaagttgtgggtttgtctccgctgtgttgtgaaagagtctcgaagagagagagaagacacccccactctgtgtgtgttgcctccagaagttttgtttgacgcccccagaggagtgtttggcccctttgtgaagagggagggggccccgctctcgcgaagaaagcccttgtgtgttttcacacacacacccttcttctgtgtgagagtgtttccactccatataattagtgggggcaagaggggttttattcccactagaacaagggcgcaagagagtcttcagtggctcacacccccaatcttagacccacacgttttttcgcgcagtgttgcgggtgaggaaccacgtggaggaaagggtcacaatatgtcgcccaaaggtgataagcacagctatcatccccgcgatggatcaacaaagcctcatccaagcgggagaatgttagaacctcttttgttggcgccccaaacaaagcctcttttgtggtggcagcgcgcgcacatggagggggcaacttctatatagtggacagngagggtggtggcaggagaacacaaacaagaaagggctaacagagaaagtgggcggcccaccagttggtgcacaaataaagcgtggagttacgcctgtagaccgcacaagagatttacgtggttatcaccacaaagtggttgggtaaagaacactctcgtcgcgggggatacctccccatataataggtagaacagcccaaacaataaaaatgccgcaaataaaaaccccccgaggtttatacccgccgggcgatttaaag

SEQ ID NO: 418827 - DNA, 1259 bp, Homo Sapiens
  misc_feature (222)..(222): n is a, c, g, or t
  misc_feature (529)..(529): n is a, c, g, or t
gctccaaagcgtggcatggctatgtcttggggaacacgggcgaagctgacgctggcgtgcaactcacgtccgctacatacctggcgctaccgagctctgccgtcatccctgaagttgagttcgtcccccggagtcgttgggaccgaccaggggctggtgaggattgtcgcagtacgcgacacatggaacgcgcacctgccctgtgtcacccatgtccactanttacgtgtctgatatcatgccgccgctcggtgtgaacgcctcggcccggtcaccaactgtgctagggcgcgtctcgtgcgggccggtgcacagttggtccttcagggtggcatatggtgcctgcgttcatgtcatgtctgtggatgaacctcgtggctcccacgtgtgtgccgctcacccatgccatgctgacgtcatactgctgctgaggtattcctggatcaatctgtctgctctcggctcttgcaccgtttggggggcgctcaacgctggcagacaaagctcgctcgcgggaagttacacatcntcggttggagctggatgcgggattgtcccggcgatggtggctagcggttagagggaaatttcgtggaagccaaaccaggtgcggattgtgcaaggatgtcaggggcaagagtatggaacggtttccaaccttttcgattggacacccgcggtggaaatttccccctaggttcccttatcagatttcgaccaagccgcaatcagaccaacgaagcgctaacgcaattactgtgcacccggaacctttggcaccttcgccgtgaacctaggcggtggtcagaacgtactggactggcagcggcaccctctcgccggcagcccaccttcttccgccgccaatcccacagcagccctccgccacctgcggcatccaccccatgtttgcaacgggtaccacagttgcgtgtcgacctgacgctccagaaccccaaccatagggcaaagcaacacccactccaaggagcgctccaatttggcaaccggcaatctacacgcgtagttcactattcgttaggtaccaaagcgtcaacctgacccccctggccactctggcccccgctattatcaggtgggcaggcaccaatacggggcaaatgagcccaacgtgcttcatgttgaacgcgccgggcgccgcccttggatgggctcgtggctccaaatagatactgggctctgctcgttcacacccagaaaatggtggtgtttggcatgtgatctacgcgcaatgttgc

SEQ ID NO: 418828 - DNA, 912 bp, Homo Sapiens
gctggcacaggcaaatcctacctggccaagagccgtgtcaactagagtgccaactaatctccaccttcttctgctgtgtcctcctcagcatcgtcgatgtccgacgtcggctgcgagggcagcagtgcaacaatgctggtccacaagcaaccctgtttcgagctgggcccaaggcagcaactaagcccgtccgatctatcgttccatccgcatgcaggtggcattccgcgtctagcgggctcccggcaaagatgcaaaccagtgcagcagttgtatggtcatgtcccttggagcgaatcgagaaacttggtagatttctctttgcgtctcgagcatcagcagggagagtcgggcggtaatcaaacgaaatttgatagagagcaatttcatagtggtatcaaagtgtcgattgccctagacaaaaaacgaatcttcgggcaataggcgcatcgatatggacgagattgtacaggaccacctacaaagcgacgccgaagcgactgtctcgaccgagcataccctggacagtactcgctacttactttcccaccggttgcctcactccccacgccgttcaccgccttctgatccacacgtccgtgtctcacaatgaaggtgcatctccgcaggcgagatccgcgcgagcttccttacggcgtcgcaacgtcgcaacctttctctcgcccatggcgaaacccctcgttccaatccgaggaccttgccccacacacacccaacttccaaaactaggaccttcctctgtggccaccacagctgcacacatgaaacccgtggacacaggcgccgtcacctctcctgggcggcgccccacagaaaccacagtcctacggcgtacttccagcttccggctacaacgctgcgtaaccagtccatgccttccaccttgcacca

SEQ ID NO: 418829 - DNA, 840 bp, Homo Sapiens
gctcgtgagctggtcctgatgcatactgggtcttaggctgccctgtacgctggtcggaccggcgctctcacaagtcgcgcttcgggtacctgactgccgctgcatgcctctacgtaccagaagatgctcactcacgcaacacctctgttagttgcgcaccatgtccgtatgcgccgcactgtcacctgccacgcgtgctgcgtggatcgaacgaatgctcatagcgactaggaggacatataccggaggttaggactcatgtctaactatccgcatgtatgttcgcaacactgttgctcctccctcttagcgactcttgtctcgtcgcagatgtaggccctatcgacgcagtctagtgccctaccgctgttggagttggtcttcgtgtgcaccgtcaggcccctcggagatgtcactgtacttgcccagagacgcgcatacgttggattcgccaaggttcatttatcatccccaggcattcaaaggtaggagaggctcgtaaaggtgcctctgcttcgtttggacgcgtcataggttgtcggcgctcgtactcccgaaagatgctcccccgtgcggcgagttcggggacttattagccctggccagggatcgagggcactacgcgtcactggaatggaactaccacgtcaagaagcgaacaccccatgccgccccaaatagtaacgtactcattcgcctaccccatcccggcaactactagtggcaacgccaggtccccctttgggcacacgcctattttcgaatttccccaagcagccgcacctgtatcgaagctacccttcgccctcaagtggtcggcacgcagaccggggaagcagg

SEQ ID NO: 418830 - DNA, 399 bp, Homo Sapiens
  misc_feature (326)..(352): n is a, c, g, or t
gccagataaagtaagagttaaccctgcacctcaggtgtgatagtggggtcagtggtatgtgatccaggctggggagccagaggggagcaggtgccaactccacatccttctcctgtttctaggccctctcctcccttgtcggtttttggcggggaagctcagccttcgctgtggagggacgagagcacagagctcttcctcctggtggcctctgacccctgacggcctgtggcatcctccctagtcccctctgcccatccatccctctgttccaattctccactgctcccagcatgatctggggcatcttggcttctggtttcttnnnnnnnnnnnnnnnnnnnnnnnnnnngtattcctgtccttcacttttttcctccttagttcctgaaagtaaac

SEQ ID NO: 418831 - DNA, 767 bp, Homo Sapiens
gtgagggtggacaatagtgttgttaagcggaatggggcgaatggtaaggtgggagagggcatgattggaagagttgacatcatggagataaagatgtgtttgtacttatgatataggcggctatgggtttaatgtcgagcgtcgtcgtggagataggacatgatacacgtggcgtcgtctggaggacaccgtctaagaactgttgggtagttgtgaatcgcgctgttgatgcaggaggtaatagtgatgagttcaagagcaatcgataagggctacaccgtaggtaaagtgacttcaacgagccagtgaggaggctataatgagtacactaacgtgtaggaatagggaatcacgtttgaggggatgcatggatcgtctacatgaaatatcacttgtggatgccttggatcgtacttagaagaatccgggaaatgaagtatcgaatattctatttggagccatcgggaaacctgaggaatttgctctaagatattcgctattgggtaagacgagtgtgacccaatggttaacgcgaacttctgaaaatgactattcgagaacagaatactagtccttgcgatggtcgtccaaagactctcgtcgttaggaagaaaatgggaataatcacagcgagtggaatgagctatgaatgtagtgggtactggtaaataacgaacgtattgaagagccaggtgtttaaacgctttctacatctttgtcccagggaaaagttcagggacccctatgttttaaagtataccatatgg

SEQ ID NO: 418832 - DNA, 1462 bp, Homo Sapiens
  misc_feature (633)..(633): n is a, c, g, or t
  misc_feature (1369)..(1369): n is a, c, g, or t
gggatggtcgcgtgatactgccagtatcttcttgttgtgtgcccctgcgtcatggctatttcggactacctctgcgagccagtgcctcgatggatcccggcgtgtggctcagtgacacgaggcgcattggaccgcaggagcgttggaagtaggcgtaggccgtgcccgctgcgcgtctcgccgcgcatgtcccgcttgcgtgcgctgaatgtcgcttgtctccctcgttgccttgactgcctctgggcaggcgctcgtccgtggtgggctccggcgtgtgcgaagttacctttgtaggtctcctttgctttgattcagtgggatgcagcgtttgtggaccacctctgtggcccgaatgtgttgacccatgcgcgctgaagtagtatccgattgggcaagacgtgctcgcaacaggtcctaggggagacctagcgtgtcattcgcatggccttgggctcactgttgttactacacatgcatgcttttttccacgaccagacgttacgtactgctccgctctgagggagtgcgaacatgaccttcacaaacaaactcaatcgcgatggctgcggaattcacacgtagttgcgacgctcgtcttaagaagtaccggttttgacctttggcagcgancatacatatggcggtaggacggctccaggttgtggcaggaggccccgctacgctgtgaacgaattgtgtggctattggcaattcttagccgcgaatttcattcgcgcgcatacaatgggcaacgccacgaggcgaagatcaaagggttcgagtaggtcccctaatgagagcacgcccatgggcgcgcgcatgtcgtcgtatgcacaccctgtataaaaccttcatttatagttcacccatcgggttttggaccacacacgtttcgcataagaaaggcactcgttcagacggagcaagctaccagggcggtaggcccttcggagtaaaaataggggcaaacttttagggatagccttgtggcgatacagttcattgggagccgccctatatggtcgccccgagagcgccatttgcctatgaagagtcggaattgctgacagcttatccagcgtttaaataaacgagcatatggcacacaaattcgtgggagagagtggcaccgcctgcccagtacgagtataagagcttcgaatccgcaataatgtcagaatcgcacctatgtccgattcgaggagcgtataacactcgcgaggcagactggattatataagcccacatatggtgtaagcactatccgttgtggctcaataatccacccgtatcttgatatgtcacaggttttatgaagagtggagcacaaggggcatgccgtgcatgtgaaagttagagatgcacncctagggaagatgctcactttctgcgtttggcaagtgcgtgccccaggcgacgtgccagagaggggcgtgttgtcgagaaattgcgttacaaa

SEQ ID NO: 418833 - DNA, 1304 bp, Homo Sapiens
ggtcggaactgcgccacggcagatgtcaagaggagcaggtgtgggcgaacctgtagcaggcctctgagtcacagccgaggcatggacgactggaccacgttctgcttgcaggtggagatacacgatggagacgccattgaagccaacctaaggacgtgcggcgccatgcgagggattcgcccagtcgtccagcgtgtaacgcgggagaagcgtcgcgtgacacggggcagagaggagagtgacgaggagcgtcgaatgcgtaggaaaggcacgattgggcagccagctccaagttctcctcatggtatctcaaccatacgccgaagtcgcttttacacgtcctaggaataactgcgacacggcagccaagatgaagactagtgcggcgagagagcccctcggacgtgactttgctactctgagactgtgctgggcacgtcgtgggtgatatggtgctattactggcgtagggtttagcccatttcgcgcacacgtataccataaacgtacgcgagacagttgagctggggcgcattgtctcgtggtaatccgatgcgtcgatgcgcatctatgctagatgggagaggatgcttgcgggagtctagacaatgctagatgcgagcgttggcgaacgtcgtgagcctcgcccgttcgatagagtgctttctgaacccgatttcgcaaggaccgttaattcgcttacatcgcaagcggcgatacaaagttctatcgcaacatgacaggacacagtgcgcttatcgcttcatactggccaagtggggtactccacgactctccaagacaccaagtagtaacacccacaacatgggtttccgcaacctttttttccattcttcgggcttcttcgcaaaggagttcgccccaccaagaaacaacgtagggcttcaccccttgtggcctttttgatggcacatgactttgcaacaaggcgtccaaaatgagaactttccttacatgccctatttgggatttcctagtgcactctgtggggccccccagagaacgatgttgccaagttcttcagcgattctctagatacaccccaacaaacagtagttctccacaattggacaccacacacatttacacccctttcgcccgcttgtggcccaccgcgataggacatgtgggcttcccatttatacccccaacatcaggacgtcgccctcgacgtttcttccccccaaggtgggtcgcgaacaacagtcattactacccaatttctccattacctttctgaaaaaatgcaaagggacccctcgaggaggagaaagccgcgacaa

SEQ ID NO: 418834 - DNA, 1203 bp, Homo Sapiens
  misc_feature (742)..(742): n is a, c, g, or t
  misc_feature (856)..(856): n is a, c, g, or t
  misc_feature (862)..(862): n is a, c, g, or t
  misc_feature (1020)..(1020): n is a, c, g, or t
  misc_feature (1022)..(1022): n is a, c, g, or t
  misc_feature (1036)..(1036): n is a, c, g, or t
  misc_feature (1147)..(1147): n is a, c, g, or t
gtgtacgagctggtcgctgatctcctgatcactacccgttctacggatcagatgaatgctgaccttgagctccggagtttgcaccatatgcagccatggcacgagacgtgtctcacccacgtatcgctccggctgcctggagtgcgataattgtaactatttcacctggtgtgccttgccgtagcggttgtcttgcataggccttcgcacgcgttgcttaagtggacgtgtggtagtgaagatggtacatgcgtccacagtcgctagaaagccttgaggtctttggagcgagtgcaagagtgaggcggcttcgcaattggtcatagatagcgtggcgcccttgaagaatgatgacctacctatcgtttaccaatcttagtagtgtaaagagacaagggactctcgtctgcgatatcagtggactaggtgcaaggcgcatcggttacacttcggagcctatcaatcaaatcgacccgatcgacttcgaagcgttgtcccatcgcaatagcgtaaggcgcacgcaatgttattggccggcaattggagacccctgagcgcctcttaatttgagaccccatatgtgtttgccattaccaaaaccaaagtccggaggttcgcacaaggctcctggtctcaagtggcttccatactcgttcggatttgccggttgggcattccactcctttggttgacgttttgtggcctatgaagttggcacgccacccgcggacatggacgggtntggggtattttgggccctaacccgggttggccgggttaaggccgcgagaaggcgcaacccgttcgaaaatctgaagctcccggccacccgccctttggatttgttggttacccncgcctntgggttgctcgggcggcaatccggtccggtcggggcggatcccgccaccgagctttttccacttcgggggggccaccggttagggtggagatttatcgtattgtagccgaggcccacccccgcgcaccagaaggaatgcgaaccccgtatggtaccgnanattcggttcttgtngcgagacactcggcgcgtcaacctgtgtcgggaattgtgctataagcgcgttcttctggcgttacccatgtgcgcggcgcgcactctctttgtctaccatcatatcctcangcgttttagaaaaacgcgttgctctgttgtggcgaccgcgcggctttgtgctcccc

SEQ ID NO: 418835 - DNA, 1213 bp, Homo Sapiens
gatgatacatatatccagtcagaatagagaaaggacttcgggtgtgtcgagggatgtctcggagagatcaggtccatgctgtgcaccaagcgcacctgttcgtgcgtgcgaggccccatcttagcaaccaaggaacgccagtctcatcgcacagccattcgacgctatcactcgtgagtcgcgagacgatgagaccaacaagatctccagacgtctctagagtagatcagtgtagatccaatcgtgccgtatgcgttcgtagacccgagagagatcctggaggttgccatctagtctccaatcgaggagcggcgtctacctcgcctcgaggacgcttcgcgacaggtagagcgtagaccgcctgttgttcaatccactgttcatcacaatgtgtggcctgtaccgtggatgccctagcatcggatcggcggctttctccccaggtcggacgcctcccccatacatgccttcatgtatgtcacggagtgcctcgaaggttgaagcacgtccgtgcacccctgacagaaaggcgttgcttggagtgtgcgccctcctgatggagtccaaagtccgcggaaggcccctttgagttacttccatcccgctagatgaggtctagcgtccagcatgcccctaaggttgaaatttgtgtttgccccccggcgtagttgtttggccccaaataatggtagccctttgtgtccatcgcttgtgattccccccgcgccctcgaagagtctattcccgggagagtagctagctaattattcccgttagcccaatttaccgcctggccacggttaggagctcaaccgaaattcgccaaaaggccattccaagcaattccattgatactttaggttccataatccggccttccaggatttggctcggtaccgagcttggcggcctttgtgctgcctttggccccatatggcattccctttgcggctctagcgtagctcccgtgacagctcccccaggtacgccttaacaggaaccactccagcgaggccatttcatcggccacagtaatggtccttgctttgccacatttgcctcagcccaatggttccgtttggccttaaagagttagattgggattggcttagttggccaaaggaccaattaaaccgcccacatggtaggaagctcccccttaatttccccttggcaacaattttctttgctcaaacaaatgttattcctcgcg

SEQ ID NO: 418836 - DNA, 224 bp, Homo Sapiens
ggcttgacttactcgctgctatccttggtgtgattatatgggtctgggactctatctgacaggacatattcgatctctcaaatcattatgatcgagtatattcatgaacaaagtaccctaatctcataacttcagtcgccatggctacatgttgtgtgcaactgactatggcgccaggaccaaaatagccatcagtatgatgcctacggatggttgcgtattgc

SEQ ID NO: 418837 - DNA, 1294 bp, Homo Sapiens
  misc_feature (322)..(322): n is a, c, g, or t
  misc_feature (342)..(342): n is a, c, g, or t
  misc_feature (349)..(349): n is a, c, g, or t
  misc_feature (454)..(454): n is a, c, g, or t
  misc_feature (543)..(543): n is a, c, g, or t
  misc_feature (590)..(590): n is a, c, g, or t
  misc_feature (594)..(595): n is a, c, g, or t
  misc_feature (620)..(620): n is a, c, g, or t
  misc_feature (622)..(622): n is a, c, g, or t
  misc_feature (635)..(635): n is a, c, g, or t
  misc_feature (638)..(638): n is a, c, g, or t
  misc_feature (646)..(646): n is a, c, g, or t
  misc_feature (661)..(661): n is a, c, g, or t
  misc_feature (671)..(671): n is a, c, g, or t
  misc_feature (678)..(678): n is a, c, g, or t
  misc_feature (681)..(681): n is a, c, g, or t
  misc_feature (683)..(683): n is a, c, g, or t
  misc_feature (686)..(686): n is a, c, g, or t
  misc_feature (691)..(691): n is a, c, g, or t
  misc_feature (694)..(694): n is a, c, g, or t
  misc_feature (699)..(699): n is a, c, g, or t
  misc_feature (701)..(701): n is a, c, g, or t
  misc_feature (708)..(708): n is a, c, g, or t
  misc_feature (716)..(716): n is a, c, g, or t
  misc_feature (731)..(731): n is a, c, g, or t
  misc_feature (740)..(740): n is a, c, g, or t
  misc_feature (753)..(753): n is a, c, g, or t
  misc_feature (763)..(763): n is a, c, g, or t
  misc_feature (777)..(777): n is a, c, g, or t
  misc_feature (780)..(781): n is a, c, g, or t
  misc_feature (783)..(783): n is a, c, g, or t
  misc_feature (789)..(789): n is a, c, g, or t
  misc_feature (792)..(792): n is a, c, g, or t
  misc_feature (794)..(794): n is a, c, g, or t
  misc_feature (796)..(796): n is a, c, g, or t
  misc_feature (798)..(798): n is a, c, g, or t
  misc_feature (809)..(809): n is a, c, g, or t
  misc_feature (814)..(814): n is a, c, g, or t
  misc_feature (816)..(816): n is a, c, g, or t
  misc_feature (831)..(831): n is a, c, g, or t
  misc_feature (835)..(835): n is a, c, g, or t
  misc_feature (844)..(844): n is a, c, g, or t
  misc_feature (847)..(847): n is a, c, g, or t
  misc_feature (852)..(852): n is a, c, g, or t
  misc_feature (855)..(855): n is a, c, g, or t
  misc_feature (857)..(858): n is a, c, g, or t
  misc_feature (869)..(869): n is a, c, g, or t
  misc_feature (872)..(872): n is a, c, g, or t
  misc_feature (874)..(875): n is a, c, g, or t
  misc_feature (880)..(880): n is a, c, g, or t
  misc_feature (887)..(887): n is a, c, g, or t
  misc_feature (893)..(893): n is a, c, g, or t
  misc_feature (912)..(912): n is a, c, g, or t
  misc_feature (916)..(916): n is a, c, g, or t
  misc_feature (921)..(921): n is a, c, g, or t
  misc_feature (923)..(923): n is a, c, g, or t
  misc_feature (930)..(930): n is a, c, g, or t
  misc_feature (933)..(933): n is a, c, g, or t
  misc_feature (935)..(935): n is a, c, g, or t
  misc_feature (942)..(942): n is a, c, g, or t
  misc_feature (944)..(944): n is a, c, g, or t
  misc_feature (946)..(946): n is a, c, g, or t
  misc_feature (948)..(948): n is a, c, g, or t
  misc_feature (950)..(950): n is a, c, g, or t
  misc_feature (952)..(952): n is a, c, g, or t
  misc_feature (954)..(954): n is a, c, g, or t
  misc_feature (960)..(960): n is a, c, g, or t
  misc_feature (977)..(977): n is a, c, g, or t
  misc_feature (986)..(986): n is a, c, g, or t
  misc_feature (1002)..(1002): n is a, c, g, or t
  misc_feature (1012)..(1012): n is a, c, g, or t
  misc_feature (1049)..(1049): n is a, c, g, or t
  misc_feature (1053)..(1053): n is a, c, g, or t
  misc_feature (1060)..(1060): n is a, c, g, or t
  misc_feature (1063)..(1063): n is a, c, g, or t
  misc_feature (1083)..(1083): n is a, c, g, or t
  misc_feature (1097)..(1097): n is a, c, g, or t
  misc_feature (1183)..(1183): n is a, c, g, or t
  misc_feature (1194)..(1194): n is a, c, g, or t
  misc_feature (1211)..(1211): n is a, c, g, or t
  misc_feature (1213)..(1213): n is a, c, g, or t
  misc_feature (1215)..(1215): n is a, c, g, or t
  misc_feature (1229)..(1229): n is a, c, g, or t
  misc_feature (1258)..(1258): n is a, c, g, or t
  misc_feature (1265)..(1265): n is a, c, g, or t
ggtctcacctcgtgagacctggaaagcggcgcgagctctcgtgctcgtgtcgcgactctgcagtgccctgagccttccagccagccatgtggaggtacgctcatcggatatccaagcgccccgaactaatgatatcttgttctgcacttccagactcgtggatgcgccgctcagtcaatctaattgttcgcatcgatgaacgcgacggactcagtagacagacgtagtggttctacaggactcgaaggtcgcatagagactatatacaatccttgctagtgatctgtgacgatcggcgtgagaatgagcacgtgtagcatgntgtttgacacgaaatattanttcgacngaatagataccgctcggcaagcgtgtctatagacgactagctgaaaaataggagatattcgaaggtctcggtccttacccaatctggccattgccaagcttcaancattttcagacagcaggcactgatacatcccattgtgtcctcgtatgccttgatgcctatgcccgtggaagttccgcgtaactcgccgnaattatttacaacttagctcagaacatcgccattccacttgcctctnttgnngacattacgcgtctgtcagttgaantntgtcaagtcgcanttngacacagngtgtagacacgaatngactggactntgtggtncantntgnatcgnatntgtgngnagcttgntagcactntgtgcgtcgcatgtnctgcattantgctggtcgccgnagtattgggntcgcctctccgttnctnntntgtgtncanangncnccccggaacgngaagntncggttatattgtgcnggtnagtcccctnttncttcntcntnngaagctttccnatncnncacgnataaatntctcgntgcctgttaacccggtaantgancatanancataccnacncngaaagcntnantncntncnacgcgnatgacagtcaagcgtgncgcgaaganttgtgacaacatcgtnctcctgtttnagccgacagacgagtggatcgtggagcagctgacagncttncgcgatnaanaccaccgactgtgcgattcnccggaacactgctnggcgcaaagctcctttcaagctcgattgtccgcataagtacattgtgggcatcaccagacgacgacttgtgcctattcctacttgnaactcttgtgncattgaaatccactttntncncctttacgcgcccnatagagcaaagggggttcttcctcttatnaccattnctaattgtgcctttcacccttctcactaa

SEQ ID NO: 418838 - DNA, 1246 bp, Homo Sapiens
  misc_feature (363)..(363): n is a, c, g, or t
  misc_feature (997)..(997): n is a, c, g, or t
ggtagcggggcgtggatatggcagtggaagtatcaggaagtaggaatgtagtggcggattggaatcttcaaccgtgtgctgaatgagttgcttactctgtggaggctgcgctgacacgatgagtgtacgtctggatgttgaagtgagatcttagagttgaagccatggacagtccataattatcttagcccatgcaggaaggaccagaatgtccttgtccgagaaaggtctggtggactgcgggacctgagtgcatgatacctccaggaagcagcgtttccgagccgtttctcgagagggtgctggcgttgaggacgtctttaatgtctgatcacatcgtgccgcaacgcaatataggtctgncgtccgccacttgccccagagcagcatgtactctgccagttacagacatctccatattcacagggctttggctcgttcctggtagtgcgctcgtgccatatccggtccttggcatgagcggtctccatctcatgttgtgaccatgtgtgggtcgctcatagacagggcgtaacacaggccgcgtcgctagaggcgtgttcgctggggagaaaacccttctgggcaactggacgcgcggaagggcgtcgctacagagcatcccatggttgaaaggccctctgcccgctggggcacttgggacgcctccgcagctccaactcaccttatcgacggaacccgcgtagggcacacccgcgttagcgtctagacccattagcgattaagccacgcctttgggaggccaattccctcgatctattgtcctgaccggcgcctcgcacccctctgtgtcttgccattcaacacaacgaattaggcgccaaggtcttcgcccctcgtagcggccacaggttcataagcggggtaaaaacacccacatcgagccttggcgccgtggtcgccccattggtgcctaacccgccataggccgttagagggttagccaacaaattggggacgcaccgcgaataaaggncaccacgcccgcgcccggcttctctcgcatggaaccctcagcgggttcgcatgtgccactttcggttagcggctcagctcctcaccgacacagcgtctctcggacgcctcgtgagcactaggcggcccctgagcgagagatgccccccgcgcacctccgttcgaagcccacaacccttggcaaacgtgccgcctctagccgcacagatccgccaacgcaaatgcggcccgcgtcgctggcgctcgcatg

SEQ ID NO: 418839 - DNA, 1141 bp, Homo Sapiens
  misc_feature (756)..(756): n is a, c, g, or t
ggtgacgggcagctccctaagcgtttggcggatatcgccgcaaggaaggagactcgatagtaggcagaaaggatcgagagctgtgtgtacaccccgaagaggaatggtgctcgccgacgctatttcctgaaagtagtttgcgctcgtgtagaacctaccgtggtagcgtagcgaccaagtgatcatcgtcgggcatcaccagcggtggacgctaagtgccgtggagagagtctgcatgggcagctgatcccagtagcagatgggcagtgcggagtcacggacggtacatcccgtcagacgcatgcatcgcgatgtgcattgggctttgtccgtcggacaatggtggctcagaagagtgtaatgcacgagagtagtgcacgtacttggactacgtaactgcacccatcgcgaacagcgagtcggatcgtaggatggtggactctcggctagtgaagtcccctgacagaaggcctgatgagacaatgccgggtagcggcactcgtcgaaggacgagagatctcagggttgcgggcatctagtggcacgggaaaatttcgcgtagattcgtagggcttgaagtacgggtagagtggcactctgaagacgagagtctcggggtaaaatctgcgcaggattagggcacagtgcggggtacgaaaggggtcgaagcattggaattacgggaatggccgagaacagtggtgtagttcggagaacgacccacacccggttcgagacaatgcactttacatcgangacgctcgaccctacctaccacagagcgctatcttatgagagcaactattcggctccccccgcttgcgctgggctcactaggcgcgcgccttttcgcgatccgagaattgaggcctacagagctcctttacccgcaaaaaggcagactcattcgcgcactccgatcgccgccgtgacgggaactccccaactattggtcaacggacccacagcacggcggcccgccgtggccccatctccttcatggccgcgcaacgggccggttccacttgccacacgtgtggcaggcctggaattgggaggcccattggtggcgccgccccacgcgcacgcgggtcgcccgggcatgcgaccacgggtcgccccccacgagaacctctggctc

SEQ ID NO: 418840 - DNA, 1501 bp, Homo Sapiens
gatgtcacacaggctagtcgtttctctgaacggtgaatagagatcctactagacagaacattgaagagctccgggtcgagatgctgacagtgacgcaatgtgtaaaacagcctgggttcatcattggagcattgaaaaatgaccatggcgtaggagtggtggtacgtagttcaaggattcaaggttatgatataatgtagctggtccttgtagtgcaagtagagatggcagagccgtgagatcaaatgagattgacagccgaggatgatggtgatgagacatctgctctgtgtctagaagatcatgagactggtagaatgtgcatgattcggggtagggcatgaattggaaaagcttacgtcgctagactgaaggaaatgaatatcctagtgaaaagaagagatgatgaacggtaacttctaagcgaaatgcaggcgatggctccgtggcactggttccagctgggttggggaagattgcgaatgccctaatcgcctgaggccagtacgaatggcctgtacgcccgagcgttgccttgggccagacatgcatgaaagcgagactacacggcaccgatcgacatctggcgacaagcagataggggaatgcaggcagcgtgacagttgccgttgaagtgaacagtggcgctttccatcgggtgccagcccgaagctgtctacagcaagtccgtggagttgcacaatgtgcatcggtcttgctttttacaccgagccaccacacctggggcccaactggaaactcccggaacggagccacgaggtcactaggcccacgtctgatggcatttcgaaccggggcattggccgttcccaaccgttgcccgtcgacccagccattccccctaaacgggaccgccactggggcttcggaacgtatttgtaagccccataggggacatcgctccaccctcaggctgcgtggtcattgccagccctttggataccaacgccggtcagctctgtttgggggaagcaaaatatccaactggagatggaggcgtagtgcatagcaaccgcaggcgagacttgtgcggcggtgcacattgcatagtccacatcgttgattgcgagagccgttgggcgaaaaacacgcgacgttccctaagtggggtgaaggctcctggagttccacagaagtcaaggcttgaatttcgcgtcagagggctcccctcaacttccttagcaaagccgtcgcagaggtctattcacccgtgcaagcaatgagaacacactgggggaagtttgggcccaagcgtaaatgccctgcacgaaagcgtatacctatcatgtgacttagccatggtccctagagccaactcaatcttctatggtcgaatcaatcggtgaccccttggtgaggtcccaatgggcgatgaacatctcggtgcgcaacgctgatataaccggcgccataccccagctggtccactggtcaagggtaccccaccttgtgatatgaggcgccacacggcacgtgatat

SEQ ID NO: 418841 - DNA, 1162 bp, Homo Sapiens
gggagtggtgcgtgcgtggccgcggcagctgaacaaagtgagcagtgtgctgcctgcgcatggacccgccaccacctcccggggccggcagtggctctcgtctactgccaccatgacctgccaactggcacagccgacggcggtgcagatccagttcggcctcatcaacttgcggcaacaagtaccttgactggccgaggcgtcggggtccacggtgaactgctgtccgccagcacgcctgaagaacgaagcagatctggactgctggagcaggcccctgacgagtgctgtggcagcgctggcccgtgtgcctgcgctagccaccttgggcctgctacctggcgtgcggacaagggccggcaacgtgacctgcgagcctccgatcggtgccctggtcccagactgccgtttccctcatcgcttcgcgcacgaccgacggtcgcttggtcagctgcagtccgaggcgcaccggccgcatacttcggcggccacctgatgtaccgcctgtcccttgcttctccgcccgactcttgttcccccccgccgatcacagttgtgcgcgctgctccatttgtccattgcttccccttcagggctcacccattccttacatgccgttcaccgcgtaaagcggcttacgctcccccaccttgagctcgctgcgttgtctgtccgtatctgacaatcctccgctggacccggcggacgtggcctctgtgggcccgttcgatcatccgcctccctttaacaccttcccgcctttcccacgggacccacgtcgctactaagcccgtggcacgacccctgtctgaaagccaccgccttcccttgcctcccccccgtcaatctggccctgcccttgtcttggtctcccacgctccccaggtatgctccgcgtgaacactatttggtcctaacagcctgctctttgaaacctttacacagctttcctgtgcctacactggcacgtcgccccattctccggcaggacacgttgctcaacggagccccgtagtaaccctatttggtggccccggtctagctgggaccccctaacgcaggtgcaccagcccctccacagtgtttggtgtcaacactgggccactccaaacagagtcatgggtgccaacctgtaacataaacaaccactttctggctaccg

SEQ ID NO: 418842 - DNA, 731 bp, Homo Sapiens
  misc_feature (298)..(298): n is a, c, g, or t
ggtccccatgacactagctggatttggcatgactgagtatagtaaaccaagatgtgatagaaaaaaaggtgactcgttggcttgacttccatcaggtactggtggtttcactgttagatgatgctatccgtggtggagtgaagttcatgtcatgtggaaggtaggtaatatgtttactagttcctatttgatcctagaagcatattgtcaatgtatatcagagggggttgagctagtggcgcatgacaagaagttgatagggaataaagtactgctagagaaattggattgcccgtcnatgcgagggacagcgagtgcttcgtcgggatgtccaaacttgtggacgcactaacaatgaacgattcttcgaggcagttgtttcaacattaaggcgaacgtgattctcaattatggcaaataaaatatgggcgagatagaaagctgaggaaagctgttatgccttgtagcttttggtcagatttggcttgtgttgactatggatgtcagaatggacttgtgtctgccaaagtcgatctccagggcgtcaccttaaagcacaacactccagagcgcttcaaaaagtctggggcatacgtgcgcgacaattgggacattcggggaatctccaacgtcgactcacatgggattcccacgtccttcctcaaggtgcttgccccctttctgatctcacttatggacgtttctagtaaggattcatagcatctcgatac

SEQ ID NO: 418843 - DNA, 1415 bp, Homo Sapiens
gatcatactagcgtttattgatctcaaggtatcattagagatagactattatagtctgctcatagcgctcaatatcgcgtccgctaactatgcctaggaaggaatgattagtaatcggctgtgtgctattgatgaagcttagcgtctgcatgaacaccctcaagaactccacgtcgcgcgttcttgacgtcgcaatattggtagcctatgggcacatattgagtactttagcatggctgatgaacgcagtggtgggtccctagcactctgacgtaggtctcgaatccatccaccaacaatatggtgcctgatggactactgtagcctagaatcgtaaagcatcataacttgctcaagaatgcatcagaaaacataaagtacagtacactctaatccaattaatgatatgacttgaccaacattgtacaactgcacttctatccaatataagacacaacaataaaattattggaaattgcgaaactaacaaacgcaacccctacaaagcgcataacattcatctgagacaatccaatcacgcttagctaagctaatttgttattgaaccgcaaaagtgtcagagacaaagcgaagcctaattattaggacctgatatgccaccaagaacctatttgtcacttcccgaaaccaccgctaaagacaaataaccccactccccttaacttactaagacataacctggaacactctctataactcccactatcgacagacattcgagatgggtcccaatgacccaaaacagtcccagcaatataaatcgcaagtcgagtaaaccccgaacaataacttcgacggcaaaacataacacacgatcattaccgcatatccatctttaactatcgataaaatgttcttgcgcccttatcgagaatcattccttcgcatttaaaagtttaattaaaccccactttttctacgagatgatcaccaaggcgaaggaaacaacgtttatagctccacaggtacattctcatccacagttaactccgttgtaccgtagtccggaagagaccccaaagcaaacattataagttcgcccccaagcgccgtgtgaggcagtaagttctgagctacgaacgccccggaaattgtgaaagggggacacaagtcacccatgggcccaaggaaagacccggccctttgaaatagcagggcctaggtgtcaacgaaatgttaccggtatcccgataaagtttatcggtaaagaagaggcccaccgataagggattaagaggggcactcacccacgtgtatcagcaaccctataaagtgttccacaatacggacgaccgtgggtacttgtatgaccaaacattccaacgaagaaagaatccccctaaaagaggtcttccagccgttacacaaacatttccttagaggataatcgatcc

SEQ ID NO: 418844 - DNA, 1544 bp, Homo Sapiens
gggctcgttggtccggaagcaagcatctgaagactgcgtggcagctacgcaaacgccattggatgctcgggataaacatgtgagccgagtgtgctttcgctcactcgtacacatcacacgcgggtccccactaagattgcacgtacaagctgtctccgcacgcatctagtcagtatctggccatgagagagatcagcaggtagacaagttagttgcgcgcctggacaaggggagggagtcgagaggtagacatgaaaggagtaatggaacagtggccaggcggctggcactataacaatcgggactgtggcaaggggtcgcgaacatctggagtataaagcgctaggccatggcctggaattcattggattgttcactcacgcgcaatgtgcgagcaaatggagcgcggagaagaggagataatcccagttctgacatcgtgatgaatagccaaaaaggtgtacggccgttttgcgtgctatccagttcgattaatatcaacaatcctcgtagaagagaagggggccgaacggatagcgacacgatgtggtggcgaaaatggtcgaaggatacaaggaattcttctctcgtggggcgcaacctagaagacacgcgagaatactcgcgtgcacttcgttgtgttcgaacgtactactaggaagggaccccggtgggaacgcgaatcacaggcagtacctccatgtaagtacacccgcgtactacgtacgaaagggctcgaagagttgacatttacccgactgacgagggaatcgggccactcctataaggcaaggccaagttgtgcacacagggacaattttccacctggtaagtgttcattaccaaatcgcatgagggatttccgatggccaacctggccgtaacacacgtgggtgtgtcaatggtgattgcaaacttggcgccaagagggctgagcttaatgcacacattaacgcaaaaagcggacgactctcgcgcgtcggatgccagttgtcgacccctgatcacttctggccaagcgacacggaaggcgggcagagaccatgcgtcgggggaagtttcccttaatccctgtgaggcagcattgagggggtccacctacatgggggttgcaacaatatcgtaacatgtgccccgacagattgttgcccaacgagccactgtgccatgtttgggggcccccatgcggactggaacctggtgtttttcgccgcaccacaaatgtcataatcccgtggcccatcaccttggaggggacacaacagtagggtggccggaccccccgcgaaaaaccacgacctgcgggaagttgtgtaccgttcctgttccttgccgccccagttgacgaggttgaacaccagcgaggagctacacctcaccaggttccgtttgcccagagcccacctgtgtgggtctctgagacaaagccaagcacacgtgacgtgaacccaacaaccacagccaaccgtggcactcgtgacctcaccccacagtggcacgacaaaatgcacaacggtgtgtggcgcgttggacacaacactgtg

SEQ ID NO: 418845 - DNA, 1145 bp, Homo Sapiens
gcttctgtgtcctgctgacggctctgtgctctcgagtagcctcccaaaccactagttgcctggttctcttgctccatgcagtgaacaatggccacgcatgtctcgtcgcaggtcaagtgtgtcccttccggaacggcggggggcgagatcgatagtcgttctaggctagcctgacatctgctcagtctacccccgctctggttctcccgcagccagtcgttcggtcctctcgttgttgccgtgctccgggggttggccggtgagctggtggtcttcggttggggtcagacttgtgaggtgtttgtggcgtgggtgtctataggtgaccgagacggctctgataatcttgggcgtcgctccaaggaggaattactccatcagcacctacatgggatgtgctagctttcgagggaaccgtggtgcgcgagctgtctagtctcggtaggcgctggggtactgggcattgggcgaagagtgcgtagccagtgtaaagcttggcattgtgtcgccttttgcgtgtggtgagtgaggctggttgccatgcttgtacaaggaacatccgacatgacaacacgaacggcggagccttgtccagggtaggttttcctcagggcttgaagggctttgtcaagattagtaataacccaaggtatcgtctgccacagacgcgatacgcatggataagaaaggctattttccctttgtatgtcccactttgcaacaccacggggccacgtgacgaaacgcacgatagtcttactgggatcggctccgcagggttagcctttgggctaatggtttgaccaagtaatccaaggcagcaatttctatgtgaaaaccccttttcaaggggtgacacttgtgtacagttccataaattagaagagggtaccaactgtggaaacgcctggccattagatccacccgttcccctttagttaaaacacttggggttagggaaacccccttcttttggcgtggtaggtagccaacggggcggcgcattccatggtagatataagggaaaattggaccagagaaagacaccgccccgttctataagtacaagtaccggggccacacgggttgccttcgctttaagcggcctcaatggcaaagacacgaaacgttatccacagacaccg

SEQ ID NO: 418846 - DNA, 1400 bp, Homo Sapiens
  misc_feature (198)..(198): n is a, c, g, or t
  misc_feature (365)..(365): n is a, c, g, or t
ggtgacacagctgcctgtactactcagactaaatgcgtgtatgttgaagaaaagtagttggatcgcagaaacgtggaggttacaccggagcatacgatcatgccacctgtgactccagtcgtgggtcaatcagagaggtagtactatctcgtcccctcaatggagtaaaggacgagactcatcccgtttgagtcgctngctgtggaaaatctgaggactacgctctctaatagaagtgctacgagcatgtggggactgaattatagtacatgttcccttgctgcgtggtgtactaggactcactggcaacggtgtgctgcgctggcgtgctgttcctcttgcgtggcatcgcgacaacgtgagcntcctagaatctatcttggtagataccccgacgaacttcagactaggatactagtcgcgtgtcgagcttgtaccgtgtcgaaaagggagcttggcactattaagtcattggcgatggggtccgtaaatgacccttttcaaagagttgagcagtgaaagtcggcaaaaagaacgcatccggcaaagggactaggactgaaaccatgtactgtttgtggacccatctagcaggaaacttgaggaattaaaacccagtatgaacgtggtccagtccgtggcctttatgtccaggagcactctagggcgtttgctgtggaccgacggttctccctgggctttgaacacgcaagcaagaacgtacactcatgttcaagatgttcaatcatccaaaactagaactattaatccaatagggacattgctttatggtaaggacagactttttcttcgcacccgtgcgaagggctccttttccacgggtagaatcgatcattcgttttttaaaggcgcacagttaagcccccaatttggcgcaagacaacggttttttaccttggttctttacaaacgcgtcgtcttttccttgaagaatcctaaattcccagaacggacgtttctcccaacaagcttaaggtgaagatggccttcacacacacaatatacgcgtgaatgcctttgtgggaccacggaaaccacgaggtaatttcactccttgctgtttaaagacgcaaaatttcccttggggctttcggggttccctccaaccaaacattttttcgttattgggccaaggtcgtcccccattttaatggtccccctaaggttaaattggcccttaattgcgcaaaaagaacaacacaagaacaggacacatctctgcgcagagttttatttgtaagatatgaagcatagtaggaagagtatcagattggtaacggagcaggtagcaaaaacaaggaaggagtttactgacacaacaggagatgcgcagcaccacacgagcgtagtgattgcgtaagatactgcaactaagagaa

SEQ ID NO: 418847 - DNA, 1510 bp, Homo Sapiens
ggaacacatgagtgatccgtgaaaactacccctgagatagagcctataccatgaggagaccccgaataacatgcacatctactatcaacggtttggtcggtcatctgcgcaaacgataaactttcggcgagctacacgatccgatcaactagctgaccaatcatgaatctataaagtagcgagtgcggcaatcgacgatacaagaaaccattagacaatcctgtgagcaagggagtgctcgtctgtaggatgggaaatgggctcctctcgacagtatgcctgaggactcggtataagatctgatacgctgatcgtgaacggtgctatcaaccatggatatctccttggtgcatgattcgagtatcatgcatagataactagtgtcgacgttatcatgggatgccgcctaggacgacaggagaacgttttatcaagaagatcaatgaatttgcagtggacattcgtcacagcgtgacgatgttgctgaccctgatcttgatctgcctgctggttggtgagggtcgaagtatttggaaaggcttcgtgtagtttctcccctaaggaatatcgcgagacgaagagcccaacgcaaggagacaagtggcttccgttacttggggcgtttacccatccaacgtcgtgctggttcgagagaacgatagctaaaataaggtccgggggagctgaaacaacaaagacatcgtgtatttgcgccaagcgtgaagtccccaacgcctttacaagccacaaggacaagaaaactattagcaacgagagaccctcttgtataccagggcacatgtcccaggacaaaccttcacgaattcataggcactacaatttgtgtccttagcataacgcacaccgcaaacaacgagataaatcgactctaatgtttgacctagatcctcctcgtgatttagtggcagactagtggttgcaaccccttctagtgacttgtggacaacgccacgggtggtgcattaaactacttcgactcgtcagggcatgcaacagcaggggaaattcgtaccttggcgtaccaccaccctggtaggtgggcatcgcgttcaacatttgtctccacttgtagcgcgacaaccccaatcggacgggggcttaagaagaaagctccctggtgcaacagtgagggttcccctaaaggcgacgcaaaacacatcacgttttctccatatgcatagtataaaccagtcgtcgtgcggcggccctcgagcccttctacccgagggcaattcgtctcccccaagaaattagttcgttcccaaatgctgtttacggtgaatacctgtggatagcgctcgcaacttggcagggactttgggcgcgtgcgccgaggaccccaccgggaattcgatttgagacacaccggtttggctcccaggctcaagcggtagaaaacaacgagacactttgacagtattgttcgaaaaacggggtcctgtgacacagatttaccagggggcagaagcttccccggggggtggacaca

SEQ ID NO: 418848 - DNA, 1109 bp, Homo Sapiens
ggccagctggcgctgtagcaccatgaccgtgtgggcccgcttgtccgagacgtgagacctcgcccggcgtgtacgtgggtcgcaagacaagaaccccgccggggactactggagtaaaattccctggcagcgtgtcgtgtattcagcaggtgactgcgtcagatgacgctgtggaggtctgtgggccctactcgctgggtaccatccgtccaactggcatgacaaggacggtttcagcgcacgtccgtcagcgggactccagcaagatgcgatcccaggctgccatgactcaccctgatgtactctgtgcagagacgaagtggcgcagagtcatcttggagcggagccctggttcgaagatcaacgcaggggagggagcccggacggtctgtgggtggtgcaccagtgggctatcggagtgactccctggtggactgcgctgtgctcaaacacttgatcgcaggacagcctctgggccaggtctggacccggacacgttacttatcatcgtatggtcgggttgactagtctcgtttgccaggaagacccacaggcgtccaacccggtgggcatggcgttgattgccttgcatgcaagtggagccctccctaagactcagggacagttgagcagacgtggcaccggcgtgacgattgcactccggattaccccacgtgctgccgtcctggtctcatccacgagatagctccaggccttgtgttgcgtggagagtgggtctccgagaggcctcccaggaaccaagggtagccgggccaaggtggttatggccagagacctcctttccacaattacgtacaggcccccaaggtgggccaggactgggaggcacaagcaggtgtctcaggttcgttcttgacaagcggagggggaatggtgctcacagttggcttggcgctttggtgccccagtcaatagagggggggatggtaccccccaaggagagaaggagagtttgaagaagcaaatttccaattgccaagacggctcctgggccagggaaacagtaggggcgggtgcttcgagaagtcagaggacgctggtcccaggccctggagaggaaccccagccgacaactgagggccgacaac

SEQ ID NO: 418849 - DNA, 1119 bp, Homo Sapiens
  misc_feature (257)..(257): n is a, c, g, or t
gcgcgacgtcgcgggttaaagcggcgtttctggtgcctgcgataagccctggactaagggcaactttgagctcgagagccggcgtataggcagcgatggaatggttcctcgtggaacctggtgagtgcgctcagacgagtggatgcgtcgtggtggctgcacgtgtctaaccatcatcatgcctcgtaccgtttggcctgcccgcaaatgcacctcacatgcgttcctgggtggcgtactggaatcgttctaaccangggattgtgaacttacctggcgcagcatgctggaaggccgttcgtcggccaaccgtgcttccaagacaaccaatgttcagtggcggcgctttgtaccatcgaacgtcgcacatcgctcgattgatcggaagaatgcaccacgcatcggaaccgacgtagtctaccagtgattgatagactcaagtcgacagctgtgacccttgaccacaatggaggcctggccgaccctaacttacccacgttgtcgccacttttccgtggtgatatacgatccaagctcatcgagttcgaggcgatccaggtgcagcaccattcggcttaccatttgttgcaagcacgaacattggttggacatgtcatttgtgtcgacctacagacttggctggtggtggcaggagagaccatcaatctaaagtggctgggcgcccacatactttggcgccgatgtttagggccctacagtgggcggaacgtgaagcttccgcgagaagaaccggggactcacaatacgggactcaggcaaagaggcttgtcttggctgtccccaaagttgcaggacacgttgactcggcaaacgcttttttgcactggggactctcgcgtcgttggactagcccccaagttgctggaggaccacccaataagttgtggttggatttggcgagtcagggacaccgaggaaggtagaggggtatggtaagaagagggtccgcaagcgtgacccaatggcggttagccggaagtaggactcaaggcggcgggagtttgagaacccttgggacggatatttctaaacatttccccagggaaaatgcgaaaagttatatttcaccctgcgccttgcggagacaacagaacatcg

SEQ ID NO: 418850 - DNA, 792 bp, Homo Sapiens
tgctccgggcaggagctcgcctctgcgcacaagacgatgtctggcgccgttcggggacgggcaggtggcgcgaggcgtcaaaatacacgcacgcgacgacatgtgcgcagggcagtacctgcgatacatcggaggacggcatggatggcggcagcacatccattggcccgatgatgaactccctattagcatgggcgacagttgatggtatgttccctcttcgtgacacgccagtaccacattccgatccttcacgagtgcgggcatggatgtactcccagaccatatccgtcccataatgacagaccgttgtggcgcaatttgcagctgtaccctagtcgtgcatagtacctatcagttgggatcactcgggacaaaacgcgctgtggcatcaccgggtgagtcggacacaacacgagtatcgcatggctagcttcccgggcattccggtatagccaagaacgtcctccggtaggtcaccggcgatagcttggctagagaccgcgtgggcgacagactggatagccccattacttcgtggacccagtcgttacgcttcactccgacaacttatgatcccaacctttgagcctcttttccacccttccgattggtgttggagaaacctagtagacggcgactacgagtcgacggcaacagcctatacgtacgattctgtcgttcggacggttagatatattccatcctgcggtcccaccattctcagcgtggcacttatggccttttggtacttatacaaggcggccgcggccctgcgtcagcaccacgagg

SEQ ID NO: 418851 - DNA, 722 bp, Homo Sapiens
ggcgtgcgtgcagaacgcgatgcgcacgacagtctactcggcaggagacccatgtacgaagcggtgtgtgacactccatgcagcggagaacgcagcgcaagcagccggaagattcacttgtgagtacggtgtcagttgcagatcagtgttgcacagaaggtattgatcacccagaaggacaagcgactttcgtcggcgcaccgacagcgtgttaacagctcacgacatcttccgagcacataaggatatctactgagttggtgatcctggcgtggtactcagcatgaatcttgctgacgcatggataacggccggtgggattatccccacgaaatggaacgatcagcagggcgcctgacacagatgacggtctatacaaggaaatcaaagagaaactaggatctacagtcaagccttgcgtcgcaggcacggtcatgatgcgggtaatgggcggatctacaagagtcttcgtggaatcaaggcaggattcgcttaaggaaccattccttgcgtgaacccgaggtatttatacacatttacacgggggctatggtaaacaccgttccccattttcgcggctggcatctacaagggagaagagggaaagacacccacttggagtgcgcgcagcagcgtgggccgtggacaggttaaaggctgccacgaattcccaagagtttgccaaactgcaaagcacaagggtgatcactgtactaggcctg

SEQ ID NO: 418852 - DNA, 1639 bp, Homo Sapiens
  misc_feature (868)..(868): n is a, c, g, or t
  misc_feature (1027)..(1027): n is a, c, g, or t
ggcgagttttttgttgtgtcatggtcggccccagcaggagcactttgcggtgtgctttatgtggcgcctccaagccgtagaggctctcacacggccactcccgccggggagatggaaagaggtatatgggatggtccatcgtggccaggtgaccacgttgtgagtcgcggacgcaagggcgatggacattcgatgattagacagccctgtgctcgcccagagcgcgcacggcccccgttggccctgctcgaagaggctgcatttgctgacgctcctcagatacgtaaatagccatgaatggcatgtgcataacttcgagagattgtggcacgagcccatgggtgcgttccacgttgatctctcgccaacaaagtgatcattgggccacgaagtctagggcggtaattgagaggggttcacgaggcgctgagagttggtaccatgagcgagtctagtccagagaggatcgtcgtatgtcaatgtcattcctcgtagaggcatatcggtgtccagctctcgaaaacagccacgggatctttgtcagtggttgtaccctactgtgtagtcttcgcatgcgcagagcgtcccaaaccttggggcgttcttggctgtgaagaaacgcgtgtttggacattagcgttgtcgcccgcgcgatgaatagaccaattagtgcgcgaatcgttgggtagcgccagacgagcgtgtacacgggtcctatactctctctagatcgatacgcgcttaggaaaacccccttagggcacatctgtgggcggaatccaacacccatgagagtgtgcatcgcccaagagcaataatccacagttcggtgtgtagcacgtttagcgattatgcgacagagcgtacncgtcgcaatgggcaggtgttagaacccgtttggtacgtttcttttgtgacacatgtgcgcgaaacccctaaaccagacaatagtgggctcccttaagaggggattctgtgcaatcgagaaggatgagctatacggccacgagagggtgcgggttcgacncgttaagaggttcagaggacagtaggcgagcattcaggagtggaaaacacaacaggatggttgacttaactctatcaaaaaactttctgtggtggagactcccgcgggggattagcaccccatatgggctgttggaaaacggtgagttggtgcacaccaccccccggagcgaagcgagacacacatttagatcagcgagccgccatatagaatgcgttgatggaagagtaactgattcccatacacaatcaccaatgtaataagaggcacgccgagcctgatgcctcccacattcattattaataaggagtgtacccacaaggctatgatgaggtacaaaagagagggcagcgcaaggaataattacgccagatatacctcacgagtccatatagtggatagggctatggggaccaatattcaccatatcaatgagcaggtgatgtaatataaggaaaggagagaggtcccattatcacgaaaagagaagaagagagattcaccacctcaaagacgacaacacatacttatagggatattatatggaggcgacataaacgaggggcgccggccttatggggcctttatgtggccattaatgtattcgcccag

SEQ ID NO: 418853 - DNA, 1464 bp, Homo Sapiens
  misc_feature (209)..(209): n is a, c, g, or t
ggagcgccggtcactatatagggtggggctctgtgcgcgcgtgctggatgtccggcttcggtcgcgtctcggccagggcgactcgctctgtatgtggcgtaacttcttgcaaggggcctagagtcagccacagcgagcgacattgcttcgttcggatgcgtggaacgtggcaggcatgctgtgtcgagaacgtattcgctggctaggcntctgagctcagtgggttccagtgaggtgctcaatgagtccggccatgcagggatacgagtaattagacgattcacattgcagatgcttacctaagacgtgaactacatagctgtgagcatacaaaggaccacatcgacagttccatagtagacaacgagaactatgtagcggcacgacgcaagcagggggccccctactagggccatcgtagcccttggctagaacagtcgatacgctaaggcccgtggagtgcagcgttgcacatttcggggaccataaggacttagtccattgcgaggccctcctaaggccaaagatgaaatagccccggctagggggccccgttctgcgcggccttgcaatggaatttgcaaccaccctatgcgcgttggggtagtgtagcctacaagacgcgtgcttagcttgtggactgggggaaacactttccaagcagaaagcttgtaggggcccatttaaggttcgacagtgtgctagaattcgatggacaagccgtagtacccggaagaccagggtcggcctaagggggcccattcagtgtggctgtatcacccaatgttgagtccgtggtgccaagactgcttttgtcttcactaacattgattggaagtgagagaaaacctctacgcgctaacatggaagacgcacatactttcccaaggggcatttcatcgaccaaagcccaagggtcaccggaaagtccagacaatgcttcagagtggaaggattccaggggaattccccccgtgatcttgcccaataacatagtaacgtagctttttagaagcctccagtgacgatggttgcccttcggccaagggtatgggctcggtttggaaccgcatccttgatgggtaacgacgaccgatttcaaggccctttgggttgaagtgtcagaggagcacccaagtggtttcccacgtggtagtgcagaagcacatattccgtggtagaatcaagccccctaatatagatagcactcttacgggcatgtgtccatggacatgggccaggtagtaaccccacgaaaatttgcacgcaatgaactacataaggatcttcaagggaatggaaccccatacaaacaagtgactgttaccacaaaggtgggtcttgcagcttatcacatttggatgaaccctgatatggcgtgacttacacacccctgagcaatgctaccagtctatcgatgttaatcccggatcgtggtatcctaattaggttgcgagagaaata

SEQ ID NO: 418854 - DNA, 953 bp, Homo Sapiens
ggtgcctgtctgtagaacagatcctaagagcatacatcgtaggatgtctgttgacatacaggaggcggttcgcctccacaggcgtgcgttgcacggtgtccggaaatggacaagtgtctaggttgattccgtgccgtggagagagctctcccttctaatacacgcgagggcagcagatgccgttcgcactgctttcattagacctatggcatggggatgggactcacaagtatcaagaggggttcgttgacatcgctcacaactgccgcctgtccccttgatctctggcgtgatggaggagacctgactctctgccccattgcgccgtgctgtcaaacttcggtgcatgtctccccgtctgttgcgctgacccttgtgtgttcccaattttcgtccgtttccacgttcgtagccgtgagggggtcacccttgtgggcttgtctgatatcacatggggaccgggcgtgatgtatgctccctttaccacctttcgtcggccggtgacgccaggactcgacagtcgctgggcacttgcggccttgctaggattgggctctcccccattacacagctccacccaatccacggcacaacaaacgccccaccgttggaactacgtgacaaccgagaacatggagagccaaaagttgccagtcctgagccagagcatggtcaactcgtggatattgatcccacctgggtcatgcgagcatcaccatgtcatataacaaaagtacggaggtgcaactgtacaggttcaagcctcgcgggagcctcgttcacaccaatggtgcccagtcacgactcactgtcgagctgctcgtctctcatgcaccatggagcccaagaaatggccgccaatccccaagccctatggaccatggctggtgcgatcagtagccaagggttagataccacgggcgctgacgctgagactcaaatggtgcgtccag

SEQ ID NO: 418855 - DNA, 1375 bp, Homo Sapiens
ggctgttgactcctctaactgggatcggcgcttgagtgtggtccagtgaggcaatggctagatgattcatggatcgatgatgaacgtcctgtaggagaccgttctcaggctactagatgatagctcgagattacggaggaccgtcttctaataaagatgtggcgatcgccttgcaagaaagacctcatggccaggctacatcaagtgagcaagatgataagcggagagacccatgtacatgcggtgtctcgttgctagcgcctccttgtttctacatgtccctcgacctcgcggacacgatagcgagtgctcgcgagtgacgaatcttgcgacaacggtacacctgtcatagaatggaccagagtcaggtcaagaagcaaccacaatgatggtttctaccgtacgactcgcaggtctccggtctatccagatgattgctacacagcgaagacacgtgtgaattgacgcacttgcgcatcctagtccttggctagcccgaaacaatcccccgtctcgactcgcgacgcgattgcgtcgcatgcaagatgatgttgccctgtggcctattgggcccaacacaaggaacgtgaagcagcgccccaggagaaaccaccccgcaatgtagagcaggggactaactcaacacctcgacgcgactagcagcaacttacgacaccgccggacacccgtgactcgcacccagagtggctcggccggacacgcgctaccccgacccacccagctagtgctcggcctcgaggcccgcggaaccttccccgaacacattgcgcgccactgggtacctgccccaacccgaggccccagctacgcgaactatggccaggggatcctccgacgcgacgtcgacccgcctagggccagaacaaccaacccctagcgcgcacaccccgggccttgcacccactgcacgtgccgccacaatacaccgccctcgcaccgaactgaaggccagaaaccacccgaacgcccatcacaaactgcaatggaagcacacaaagacaaggctaacgcgccatacgtccaccgcaattccgaccaggacgctgggccccaagagcttacgcagccaaccccgaagctcggcgcgcagacttagaccgacacactcccacgtcacacccgagaccaaaccgccaggtaaaacggcaatccacacgcggagagaggcccaccacgtgccctcgccagccaaagaaacacgaaacacaccgcggagacgctctccaacccgtaggccacacacacacgccaccacgcacggacatcccgctcaaaaacacagcgcccagcggctgaaaccaggccaaccacccgcgcaacaccgacactgtcagcccacccacgacccatgacc

SEQ ID NO: 418856 - DNA, 653 bp, Homo Sapiens
ccgagggtagacgagtagagcacgagtatagagcgcgcacactccctcccttgtgacgtcgtgcctacgacgactacgtatcatttcacacttgttgtcgcgacgcgagatgagaccgggccgtgttatattcatcggagagagacttgtgtattggatcatcctctgagtggatcccgggtagtgtatgtaatatttctctcatgtccagatcagagcgtgccggctgtgtgccgtgatcctattattggtctattgccaggacttgcagatcgaggaccaagaagttggagcaagtggcgttcgctaggtgtcggatgcacgcgaagagattgagtcatgattccatctgtgcagtgagcctgattgacgcatgtcgatggacgattctacaatacgtagtaggtccctccattcgattgattttttgatcagtacgctcgatggagtgtttgtgagcgtgcctcgattccatccattgatcccttttgtcagtccgtgggtgggctcgttacttggtaccttcttccatcgagccaggtcggactaggtcttcatttcacgataatcgagagtggagggtactatgttggagagtgcttggccccatgaagtacattgagcagtttgtgggcatatccattccagacatg

SEQ ID NO: 418857 - DNA, 506 bp, Homo Sapiens
  misc_feature (70)..(347): n is a, c, g, or t
aagggtaaataccctcttatagctgagtccaaaacttgggatattaaattacggtccctaaaaagagtannnnnnnnnnnnnnnnnnnnnnnnnnnnnnnnnnnnnnnnnnnnnnnnnnnnnnnnnnnnnnnnnnnnnnnnnnnnnnnnnnnnnnnnnnnnnnnnnnnnnnnnnnnnnnnnnnnnnnnnnnnnnnnnnnnnnnnnnnnnnnnnnnnnnnnnnnnnnnnnnnnnnnnnnnnnnnnnnnnnnnnnnnnnnnnnnnnnnnnnnnnnnnnnnnnnnnnnnnnnnnnnnnnnnnnnnnnnnnnnnnnnnnnnnnnnnnnnnnnnnnnnnnnnnnnnnnnnnnagacacgatgtaaacgggtaactatgcccaagcggatggggcgaacaaggtggctcccagggcttaaaacatcaggagcgactgcgagcaggacccggaccgggcaggcgcactcactctggacaacggctagagtcaacctgacattgcaagaaacgc

SEQ ID NO: 418858 - DNA, 1298 bp, Homo Sapiens
gggatgacgccgttgcagcgggggggaccccggaggccctggctgtgccctgggatgtggaaccgcggtggtttccggggaggtttctggcatgttgtgtagttcgcggttgcctggggtcggcggccgttggaacggggcccggtggggccagtaggccagcggtagctcgcggagggcaaggtccgaagggagtaacggcagtggcatgcccagttaccgaacgcttgaggcccgctatgcgttcaaaggcacatagaaggaatcacagtctccctgcgagagagatcgtactcgtctatcctctccgtgcctcactctaaggacatcagagttatcattttgaattctccttttcaatgcgcgcggcgctcctctccaaggtgatgacagggtctttggacatggatttagttgcccacgcctgtcacgtaaggacaacgcaaccctcggttgacaccgcgccgctaggtcagactaagccgctaggagctctccaaaagggacaactgtaaggttctagacgtgacttccgggggggaacttaacatagtaggccacaactgctctggttcctaggcgatgggttcaacgatgactcccgatagtgatgggtgtgctcgagccgctcattcacgtgggggcacaatgcgatgcccgtggcctcgaatggctgctcgcatcggtcaccgcgttgggcgacagagcgcctacttggggtgggaaaccaaggatcgggcaaagccccaacactggtccctatggcaatggtggacagggcctggattgcggggccttcgtgttgcctagggtacagcgcttcaatccgcttgcaaccccagggcggccacttgggcatcggtactccgacaaccctgttgcgcttaaagaaaggcttgctctattgaattgggcgtgggtaatcggaatgaacttgtatacaacccatcaaggcccggggtggccttgcaaccttggacacgccttggggcaaacgttccgccaagtgcccacctttttggatggcattttctaaagaacctaagaaggctaccttgaaaccccccggaaccttctggaacaggacgaactgttatttcaaccaaagttcttcccctaatccaggaagttcaacgtggacccaactttcggttcaaagaacccaacaacgagaaggtctccggtgcacagcgcggacattcaggggcttccaggcttgttgggttacaaaccataaggggttttattattaccacagacaacacatacaaggtgaatttaaggcgtggaacaaaaaa

SEQ ID NO: 418859 - DNA, 902 bp, Homo Sapiens
  misc_feature (216)..(216): n is a, c, g, or t
gggctccagcggtggtttatggacttacgggtaggctctatagcaacgggccgggaggtgctgcatagggggggaaaagggaaggtggaggggtggaaggtggttggcgtgcgaggaacaccgtgaaggtgggagggtgtggggcacgagggtgcaaactgggaagagaggcctaaagaagcatagaagaacagccaagtctagagggccgagggnccagaagtctcggcttcacaagtggacacaaccagcccgagtgtgcccctagaggcccctaaacctctggagtggcgtgtacccgtgagaacccccaaaagccccgaggggttgggggaagctccctgcgtggggtacactcacgatatatgtgaccgataaagaggaaacgtggacacaaagaaggtaccacacgagagagaagagaggaaaaggcgtgctcacacccttctgtgtgccaactcgtgggcctccgaggggggccccacacgaattccaaggactatatactctacatatattgtatcacctctgtaagtatgtggtgtgtgggggcgcccacacttagtgatgtgggtggaaacgcacaagtgggctttcctggagagtttgtgtcaccctatctaaaagacaggcgagcgctgggcagacacaaccagacgcactactgtgtctcacaccacggtgaagaagggacagtagagcacatctgatctctcccaccctctggttgtgtgttccaccaacaaagctctacaactcaagggaggcgcaccagctggtaacaccagggggccacaagagatgtgagaggttctcatacaaaccaacagagctggttatgcggcatgggggccactacactacggtgtataggggagccggggagaagaacaaaagggggg

SEQ ID NO: 418860 - DNA, 1117 bp, Homo Sapiens
  misc_feature (373)..(373): n is a, c, g, or t
  misc_feature (708)..(708): n is a, c, g, or t
  misc_feature (857)..(857): n is a, c, g, or t
  misc_feature (868)..(868): n is a, c, g, or t
  misc_feature (989)..(989): n is a, c, g, or t
gggctcgcggagtcgggactgtggttgggtgctggaatgagcctggggccggtggttgacgatgcgacgactaggcttgttgctgaggccgcgctctcgtcggcctgatgtgggggccaaccaggatgagcaaggtgcccagggagcgtgacccgatgaattggatgcgcagacttgcctgccggtggacgtctccctgggactccttacagtgtgtactcactaggactatgagctcgtctccttcagaaccatccgttcctgtgcgtcatgagtaatgcagacaggtgcacagtacgtcttgagtggtccaggcagtaccatacgtgtctcattcgctcgagccgttcggacgcttggcgtcgtatcatcntcctcgtgtcttcatggagatcagtcggacactagagatacgctaaccatcgagcggcgattccccgctaacgaatcgttgggatcgcatggacgcatcaatccagagatacgaggaccatttagaagaccttgccgtatctatcgggacagtcgattcggtacccttggtcgcgttgcttcgctggcgttcttcctgtgcatctgacatccgtatgtggcatcattgacccgttggcttggcgtgcattccggaggcagcatgagttggggtttgactttgtcggatcgacagaacgacgttggttgtttccatggtgcgatttctcatcaatntggtcgacagggatcgagtccgtcttcttagaagcgtcgcatcgacgctaacacgcggggtcagttatggggctaaccgttgcgtacctcacgatctggtcatactattctagtcgcgtccggctcttgcggtttgcgatgaacccatngaggtttcacntattggagcatatctaagaggttcactaacgccacgagcgacacgctttgagacgaagcgacggcagaatggcctaagttctctgggcctgcgcccagtgttttgtcatggttgccaccgntgagagccaccatgtctagatgtctaccagggtggcatcgtgtacccgcagggtgagcaggttcctaattccagcacgccaggaattccttttgccaggggctctggacaagatgacatcaggatgag

SEQ ID NO: 418861 - DNA, 1525 bp, Homo Sapiens
gatatgccgtgtctattatagcgtcgtcaggccgatgcacatggtcggcatccagagccgcatgggtgaaagaggagcggtcgacagtcgaacggaattcgcgctacggtattgaggcggcctgggatcagcatcgggcgtgtctataacaagcgtagtgagtaagggctgggataatatgtgggcaatccattgcaaccctgtcagatggacacacttggaactacgatggcttccaccatcgctgtccatacttattgatctccagccgaagagcaaaaaatgcacagtgggcaaccagtgtaagcgctgatgaaagcagtgtgagatcgtctcgtcccaactgacatgggcatagatcgcgctgtctgagctgtcgtatcctacgtcatcggaagaagctctcatcgcaagatcatccagagactgagtggactggcatagcatagggccgtccctcgctgtctgacagtctgcctgtccagataccacacaattgagtctgtgtcattgcgcaccggacatcattcgcgcatgcaaacgggcttgagggtgcgcactcaaattctttggcacctgccgtggcgcgcgtaagcggcaaaaacaaaccgggcagtacctaatgctaagtccttttccaatacgcacaactccccttgcgtggccatatggaatgggcacccccactcatatgttttgcaagtccgctttcgcgtgcttgttgcgcaccacgcctatctcgaagcaaatgtcgtcgaccacaagtaagggcaccgaacgataggagagactcctgccaaggccgaccaattgattctttcgcattggctagacgcccaccaacaaaaattcctctgcctttgtccaaaggcattcaccgctcaatggttgggtctaagagggagctgccattgcacccaatcgcaactttacaaacatttctagcggctcaattgcccgatccgatggaccattggggacccctacacaaggtaaggacacattccaggccaattggtggccccacctcgacaacctactaactaccctgtggttcctatccgtccaaagaaaaaggtgaaggtttcccggtcgagactccagaggaaccgcgtttaccttcgcgaagaagacaaggttctttccaagtgtccgttgcgaacaccgcggcgagcagggagaaggggtctcccttcaccgattgtaggaacaagttcacaactcttcaggaattcggggcttaccttaaagaatgtggagcgtgcggtaggtcacatatgaggtcaatggctgtggggctatacagggttcggactctcaacctttggagaacggtccgaaatctggagatagttcgaacttaacatttgcgcaattgtagggacactcttcacgggttgggtaccgcgcgcaatgttggctcggaagcaaggtagctcatagagcgggtgtggggaaacccctgtgaacccatggccctgaacgtttagggcacacaaagacgcccttggccaacacaaatcct

SEQ ID NO: 418862 - DNA, 946 bp, Homo Sapiens
ggcgttgcgtcaccatcgatgtcaccgtgccatcatctgtcttgctacaagctcgtcggcataaatagacgttggatagcatatcatcatggtcagagcaaagggagcgcgttgccagagtcttgctcatgaacctgattgtacacgccccagaaagatatcgaataccgtcctcgtgaagatggaactgcctggctctctcaaggttagccagatggcagcagtatggtgtgtgttgctgagtactgcggtgttcaagagctgtgtgcttgcagtacagagcaaactagagcctgcggccagggcaaactggccaagagaaggcaatcatcagccctgctgcctagactggatcgcaccccaaagaatagcgaccccgcagcaccatgcaataggaagccgtagcaaagccataggcaggcacgcagatgggtacgcgtcctagcgcgacgcagattaaaccaaggcgcacagtccggggagaaagaaaggcggatagaaaccggtcaaatcaaatagatatgcaaaccactcagtgggtcccgaaagtgggaccgaccaaggactgcgctcaacccaactgagggggcaaaaaccaaatcaaattgagattccgaagtaacctagatgacaatcgcgttaaaaacgtgggttgggatttaaagtgggtcataagcgcaattccaagacgagtcttgcagggtccgattccacgcgcctgggaacgtacacgtgtgacggctcggacacaagtgggacttggatgaggaccactaaggtcgccaggtcccgccaccaaccgggggcgacgacgagctccacaaaggctaaagcgcaggggcccaatggccaccgaaggcggcgagcggctccataaggaacacaacctaagacgaggaacacaccgtatcgcaaaaacaacggccaggaagcgagacgagcacca

SEQ ID NO: 418863 - DNA, 1288 bp, Homo Sapiens
ggtgccgctgggtgggacaccgtgagacggggacagaagatgttgagactaatcaactcgagtggatccatgtggtgaacacaaggagctgtgagcaacctgttgagccccacgttggaagatggtggatcatggaaccaggagtctcgtcgatctgtctgaactgtgcctccgctgggactccaaggattcggtgtgaatgcactctcacaatcgactgtgcttggagaataactatgtggatggctgccaagggtcgagatgccgccaatgcgtgccgagtcgatggtctgccgagactgtacattctgaactaactcgtggaagatcaagcagttcccgaggggcctcgcactccctgaacgacctggtcgatgcgcacctgttcggtggtaattcttgtgagaaatcacgtcaagactgggcgacacgagttggggagcatcgacgtgacgagtctcgcggatcgggagccaggatagctacggtttcctttgctttgcctgacgggcaccggggtagtgaacgggaagcggtagactcgagaagaggttgatagcgaaaactcgagcgcatcggaagtcgcaccgggtaggcgctaagagagaaagactttgaacccgcatatttccaccgcgcaatttccaacaccgtaatgttgtaaccgtggaccggccagacctagggagacggttccctttgggacggcctacaaggcaaagggatacctcgaatcctgggaggaggataaacaatgtcgaacgaaggtggagcatttgacttgggccccaattggggtccagggtaacttgggttcaccgctttgggcgagggggctataggctagggcacagacattgaagtgacccctacggggcccgggggacacattcggactgccaacgaatcatacctttttgcacttgcccctaggagcttctcaacgcccttatttggaagcaacctatgcaacttcgccaggaaggtcgcgataggcccatatggaggacgtggacagcggacactatggacgttttaaggcgggaaagcagggttgtcaatttggccatgtgggaacccccctcctggatatgggtttccccagttgtccacgcaacgcatgtgtactcctaatggaaagaataagctcgtgttccatcaagcagtgggtgtggttgggaggatattatccaccataaatagaaaagttgtaacatcgcctccatgtttaccgcaacaattttgtccttcaatgcggtgacttgcccgttgtagacacccttccaca

SEQ ID NO: 418864 - DNA, 941 bp, Homo Sapiens
  misc_feature (327)..(327): n is a, c, g, or t
  misc_feature (332)..(332): n is a, c, g, or t
  misc_feature (402)..(402): n is a, c, g, or t
gctgttaagtcaagcgggatgatggatgaatcggatcgctactctgaactgtgagtacatgactggctggcaatcacacatcactccaggtcgataaacggcgaatccatgccagggttctgcgaggcaggccaatcgaggagtgcagtgctccaaggcacggcccgatctcgcatccgcctctccctgagccgagagaggttccatgcgcagagaccgccgagccaccgtacagaacgcaggctgacgtcgtgtggttgtgacttccttcgcaacttgtcacgtcctcgcagcgtagcctgatagaataagcggggacgcgtgatncgacnggaaggcgctcttggccagttggcctgagaaagagttgggaaaaatagcttgaagaaaggtaggtagatngaggagtgagagaggtatgagagcgttgattttgaatagagctgtggggcttggatagagtattgactgagataagatggggaagcgtcacaacctgagaatgtgcgcaaagcgtgcaaaaagaaatgcatacacagcagcatatagccacggacacgaggagcacgactagggaacgtaccttgaaccgagggatcggcgtgcggtacatgtctgctgaaatcagatggcccagggacgaccgtatggcataaggagcagtagagagaaatacccggagaatcggtaggatcatggcccagtaaaggatcacgccgaggtagcctcggcatggaaaggcaattgcgaaattggacagcccaagcatatttaccaccttagccatttgcaaacggcaacccaaaatccgaaggaagacctcgttgtcattgcgaaacatcgaactggaaatttacctacacacaaagacgccaaccctacctggcaaacaaaaaggacacgaaatgaatcccctttttctgggcaaggaataagtgcca

SEQ ID NO: 418865 - DNA, 381 bp, Homo Sapiens
gatcattggaatagttatgtgacgccgtcgatcttgccccgggacagcacagtacccgatctaggtgacacgtagatgggacgcagccattctttaacctcgaagcaagcgcggggtcccattgcattggagcgaacgcgggccgcgacgcccgctgcatagctctagattcttggcgcgaatccaggcgttgggccagatgacggccggaaggcaagacgtccagagggcagtgagacaggcgacgaagcagagccaagcgcaaggagcggcccgagctcactaggcgcccccccggcgatagccacgcagaagacaagacgcgcatacgctcgcgagagaacacccatgggggcacacggccgacaacacgagcggggc

SEQ ID NO: 418866 - DNA, 1573 bp, Homo Sapiens
  misc_feature (692)..(692): n is a, c, g, or t
  misc_feature (1340)..(1340): n is a, c, g, or t
ggctagttgctctaatccatccaggtgtccgtcctcttttctatgcggtcgcacgctacgctctcttgcgacgcctactgtaattgaatatatcagccttcgatggccacacctgcgacaggtgccagctagagcgagtctgtgcgatagaccgccatcattcggcatacataacgccacgtcgaggctgccccggggagcagtgagtccattctcacgttgcttctgcgcagatagaagaaacattgcatcactgttggagaaacatgagccatggcgatgacgaacaacctatggacatgccaacgagcgggttgcatcgtgcgggggagttcaacatcacccgaccatgtagttctacgcttggagtggctgcgatataagtcttcggctcccatggaatttgcgccacggatgatttttggcccccccattcgtaacgatcggtcttcctcgttggtgcgaaactgggggaaaaccccttcgtgacctgccccattcgttgtggggccaattccctttctaacggagagcggggagagcgatcaccaaccctaaccggtaagcggctgaaagtaattgccagggggtccacccaatttaccgcaatccgtgggcattcggattgcctttgggaaaggctagatgggggacgcgttaataatacccattcccttgaaaacgaaaatacnccgcgttcgggaggcaattctcggcttaacctccgtttgagtaacgttctttcaccgcatggatatcttagggaatatcccacatagttttcaggacacagggcaacttcacaatttttgtgccacacactttttgagctccaccacgtgggccgtcgcttgttcggcatggggtttgtctcactaacctaatgagcgacggataggttttcaccatatgcggacaagttgcaaggtcagggggacctcatctttgccacagcaaagaactgtggctggggatgggcttcgctttggcgattgcgtttaccccggcgcgcttttttcactcgtcggccacaccaaaattcaaagggtacacaggtcctagacaaacagctccctttaaaatttcacacatttcggcgatctgttatcccccttgggtattgagagccctttggcggggaaacgcacaacgtgccgctgtgagcattccacacaggggggtttcacttgctggtagaatcacaccctggggtgcggttaaaacacttagtgcaacaacagctgcttgtgtaaacatgaagatgccagaaaccgcgccacagccacttttttggttgcggcgcccaattccatgacacaagcggggcggactgtcaacgntacttgtcagacaagaggcgcgcacacgtgcgagtatgcgacacgcatggttgggagtattatcattttgccacacgaggcagattgtgcggggagttccccccgttatcatatggatggggcgcatgtttctccttttgccgatagctgtgcgccaacctctgggagatatgtgggccccacagttgggcagcccacatcaggatgtctataacaaccgtgggcgggagaat

SEQ ID NO: 418867 - DNA, 1093 bp, Homo Sapiens
  misc_feature (201)..(201): n is a, c, g, or t
  misc_feature (220)..(220): n is a, c, g, or t
ggccccacgcgctggtgccatgcaggtaagtggctcccgacggccccacttgaatttcgatcccagacctgggtcctggctgccctccgtgggcccaatgcttagcgctggtgctgcatgtgtggtgcctgcctgacccaaatgctgaaacctgaaagcccctgctggagtggttgacctgactgacgtttccctgggacntggaagtgggtgatgtccntgcgatgagactaagtgttgtgccagtgaaactgtgtaatgtgccctgcaaatgatggctgtgtgcaggacgtgctggctagaggaagctcgctcaaggttacgtggaaccttgggagtcccctctccgtttccagatgctggtgtgcttgacacttgccggacaaaactctggcctttcttccaggtgccttggcctatacagggttgaaagctcaaatgggacggaacttggagggaacacttgggacactaatttcaaacgcccccgatggaaggcgagaggatagcagtttccaatgtggaacccgaatgtggaaagcgctcgcggttcgcgaagccgagtccaagttagggccgtctatattggcggtggataagcggtgcggtgacccaaggtgttacacaggtgttttccccttgggggccaacagtgtggggcatttctccaagggccagcgattccaaactttccaggaagcaggaggaccacacgagaaagaaaccgtggtgggtaaacggaatgggacgccaccgccggtgtgacgcccctgttccccaggggggtgagttttgcgagacaggaggctggggttaccagtgaggagtttccctttcccgagacccccatgggcagaaggagaccacccaaatggggcgctttgggaggagagcacatttatctccgcccagaagtggagagcccaaagaaaggagagtttcccgggagtagaagtctaggcattttggtgaggaaaaggggagaaacccgccccatttaagaaaggttagagagggagattaggagaggagcatttggggcggcgcgacactcttcccttttcggcggagagagaaggagaccgaaaaacag

SEQ ID NO: 418868 - DNA, 591 bp, Homo Sapiens
  misc_feature (328)..(328): n is a, c, g, or t
ggctgacgcagcttgtgtgcagaagggtggaatgcaaatgtgtcaaataggggcctatgttgtgagcacttcaagcacttcggccctgtatgattcctggaatgtgaagtgcgtccatgcattctatcgcagtagagaagatagatgagacacatggttcacagaagatgatgcctctgagtgacaaagtaaattctggtgtgtcgacaattcttcgtgataggtaatggtgcctgcaagaccaggaatagtagagctgatgtaccaagtcacccagatgactgccaaactcttcgaaggcccgttgtgtctcattggatcgtgcatnatgtagtgtatgtacgagagcgcactaatctaatctactgtctgagtgaaaccaaagacaggcttgattgactcagactaaggcctcccccgctgagaggcctgaaggtgctgcccaggtggtccggggcctagaccaaggggactgccgagtgccacttgaatttcggagctaattggactggcactcacggcaggtatccgccctgtgcaaagtctttcttaagttcgaaacaggttctcccaacaaccgagataggtagg

SEQ ID NO: 418869 - DNA, 1145 bp, Homo Sapiens
gcgccaaagtgagcagacagccaatcatgtcagggtgcgcagtcatattacaaaagccgcagggcgatgacaaacgcagaggaagaacagagaagagaaccgttgagaagcgaagctgggagcctcatccaatattccacggaagcagatcagtttgcattattagtagcgttgatgcctcccaaggctcatgtttgaatctcagcagctgaagcatgcagttagacgaccgttcttgcacatggagcatccaggtgtcatccgaaagtgctgtacatcagtaaagaatcgatacagcacggtgactcgagatcctccttgtgcttcgtgagtgttcgtactgagtacccagagtaaaacgaccaacagaacttcatgtgagactcttcaccaccaaatacttgatacccgatcgtataccgaaggcgcgttggactagactcgcaagggttgcctacacatacagacattcctcaagcacggcttttgaacccaaagtcttacagcgggtgcgccatgcacgtgtgaactacaaatagaaccggtattcacaacggatccacttgacttgtgcggccacggggaatcgttgcaccgtaacattcagcctcccagtggcaaacgcttgcattggtgggggatcatgttggcccaaaccattcatctatacagctgactggtctcgaacgtttcaaaaagccattgcacgctccattaacacgacgggacttcattggcgttagttataccagccaaaatatggaaagggaccacaaacccgccacgattagtgacgacactggcacccatcggtggcccaaaaaaggctgcgacagcactgggctgccccaagtgaaaccaaacaagccacggggttggaatccttacctggaatgaaattacaaagggagcaaattctattcccctttgggacctttcggaaatgggccaacccgttggacagggacaaacaacctggtgggggcgccttataggaccaataatacccttgggtttctctaccacggacgaatcattcaattccaggcattcgggccaaggacggaattggcaggggaaccctacaagggggttcaacctatatggaggcgacaatccaaagggcgcaggccttacgacaccgc

SEQ ID NO: 418870 - DNA, 683 bp, Homo Sapiens
  misc_feature (469)..(621): n is a, c, g, or t
gagatgttgctgggaagggcatggctgtgcctcacaatggcagagaagtctgggagaatgttctagaagtctgcccttgggtgccagggaaagctgtcatggaacagtgtctgattagaggcacacctatttgtgggggcactaggagaagctgctagttgccaagtgctactgaccaccatcctctgcaggattcctgttctggaaaagttgcctgcactgcgggagggtgatgttggagaagctgtgagctctgtgctgttaagatgagcccagcacaaccagaaaggaaggcctcttcctcctccaatgtctctagctccccctcctgacagagcctagcattgcaccaactaccaaaagaaaaatatttaaagggccagctccatttttgaagagcaggcgatgaacagtaaatttggggtccagagtaataactgaatgtcattctaccattatcgaggggccnnnnnnnnnnnnnnnnnnnnnnnnnnnnnnnnnnnnnnnnnnnnnnnnnnnnnnnnnnnnnnnnnnnnnnnnnnnnnnnnnnnnnnnnnnnnnnnnnnnnnnnnnnnnnnnnnnnnnnnnnnnnnnnnnnnnnnnnnnnnnnnnnnnnnnnnntctaaccttgtagggttattgtgctgattgggttgatatgtatgaagcacttggaagaggag

SEQ ID NO: 418871 - DNA, 1520 bp, Homo Sapiens
  misc_feature (303)..(303): n is a, c, g, or t
  misc_feature (1072)..(1102): n is a, c, g, or t
ggctactgtcgtactgcatgagacatcatgctgacatctaccgagaactggacaccatactaatggcatgtctctcttgttgcatgcccgaagctgagctatatttatcgcttcctcaagaggtagtgcttaacggtctgcattgtggaggtccgggaagcatttccatggcgctctcgtaggaatgatacccgcaacgtagtcatcccgaagctgtcttgtcacacataccgtctgtcccgtaatctggcgtttggacgctgtatgcgatggcatgtcaggctagagtatgcgagttcatgntgttgatcgcatttggtagggacggttgaccgttgcacttgatgggcagaccctgtcgaccttcatggcatgttcgtggtcgtgggcactccccctactggagtaatgcggtcagctagatcagtcgcatggcgacttggctgtcaatgacaagtcgtgtcatagcgttgtcgttgtgaaggaaagggtagcgactatgtgttactgggggctttctggtaaacgcgatgcgttcgccaccggcgattacgtagacgtagtatctgcgttgtttgccgcgactggaatagcgaaaagcttgcgttgcgatcgcaactaagaagaacctcgtgaagggtccgtgagctatccagtggacattgttgactggtggttacaatacaaggcctggcgggacttgggcgccttttccctggtattctaacacgaagtccatgtgcccaagggatcaatttcccaaggacaggctgttgcgatgcttgggaccccaacaagtgtggacaccggttgaaacaccatgtacacagttggccacccattgacacaagtgtccgtttccccaagaaccacacgggtgtcccaccacaactgtttgcacacacacaacaaacagaaggggggcagtttcggccaggaagagttaaacgttggacagccggaaaggggccgacactagacatggatccccttttcgcatggtgactggaaccttcatttgagaaaccaacacacgtgttggggaaacggaatccatggccaagcggtgggnnnnnnnnnnnnnnnnnnnnnnnnnnnnnnnttccattgcaaactgcacgcaggggcactcatcgttggtgcagcacaggtggaacagttgggaaaccccacattgcgctccctgtcgaggcacccaatgggtgcccacttttggcgaacgacggccggcacagcaacgtgcccccacaggggcaccaagaaagggtacagaggaccagagagggcttggaccactatacactcgggagacgctatggggacccagacccgaggggtctgcaaaggcaaaagtgtccccggaacgaaaccgtccgttggccacacaagacaggggtgccttgcaccagagaagcaattcaaggccaaagcagcaccacagacccgaactcaacagcgcaaccagaagcagtgcaagcgccattggagaatccagaccacacgagattagagcaaatccg

SEQ ID NO: 418872 - DNA, 321 bp, Homo Sapiens
ggcctggtcgtacggacgtcttgcactgtcgctggatggagcaggtccggagctactccatggaaggtggctgcggcgacgaagtgaagatatacgtgggcaacagtctgacggtggcggatacgacttctcgtgatggtaccctggtctagctccttcttatgcgccctacaggcacggctcatgatgcgtgcgccagtcaagtgaaacgagcttcagcctttctgtgcacatgcgctgagatacgcgggcagcgcatgcgacgccattctgaagcccttgcaactgggcgcacagaggctagcgtgcactggggtgccg

SEQ ID NO: 418873 - DNA, 1311 bp, Homo Sapiens
gggcagcttgcttgacgggaagtgagtgaaccagtgagaagaagagtatggcgggccctgatattggcgtccaagcatggctgtgggtgtttaaatcgtggctgaactcacccgtggtgctggatgcagggggctgtagagagctatgtggtagtcggagagaggacaatacgagggccggaagagagagaaacctcgaccgccggtctccgtagaaatcgaggccctgggttgtgctcagatgattcgtatcggagtgcggcagatgtcattccctcatatcttcacacagggatcgcaaaccttccggtctctgtcgttgtacagccctggttccaactcgcatggcactttagaggttcgcagctaaacacatctgtaacattcatgccttgacttgacgcactagggcttgctacacagcgtaacagcactcccagatgcatataacggtcgacggaggaacagaacgtgacgtacgacttgcttggggacccgaagtgtctacggcatgaaaaggataccggactgtgtggtgcccacagacgcgcggtaacatgttctcctacacagatgttgagggatttcggacccgtagagttctatctacgtacaggcaagggatcgtatatacggaactcagactttaggccgaacgcaatttggtgctgtcacgaataggaatggtaaagacgttggcccaaggcgggggcgtttgggggtgaaagtctggccatccattgaagacttgtttcgtatacctctcggcgatgtctaatgcatgggaaatttgggtctcccatttccttctagaaacaccttaggtccccacattgaattgcgttcacgcctagagaagaacatcgcgtgtgggaattgcgccaacttcttaaccatgtggtctttgtacgatacaccagagcgagaggcacattacgggcacagaacgcaacccattggtggaaccgtttggcttggagattgcacccagcacgggggaacacgtaatcccattggggaaaggcttccattggttcgcgccgccattttccaaagaacccagaaggtttgcaggatctttccgccgcaaaggcaaacgcacacaggaggtcggtcgttgtctggggattgttcgacttgctttgggattgtcggaatagccctaataccaaggggaagcgccgaaattttttacgcaagatgtgtaactcaggaatagcggaagtgcgaaggagattcccggtccggaggtcgaccttgcgggggcgctgtgtggccacacttgtttgccatggggagtgtctcttaaag

SEQ ID NO: 418874 - DNA, 994 bp, Homo Sapiens
ggattctagatcactcagttggctgggcggtaggcttgggtttggtccatcgtagatgatgatctcttgtatgatcgatgtacactcgtcggtgcgagtgtccatagagtgactctgtgtgggcgatcgaggtacgtgacatcgtggggtgtgctctgaagtgggagtttggcctgcgattgcgtgcgccggtggtggtctctgtgcgcgccctcgagtgatcctacgtagtgtgcgtgctgctttcgtctacactgcccttctgcggctttctcgctcgtggcaggtcaggccgctagcgtagctggggcgtggacgagtctactgggactagtgagtctatcatctgtgcaagacattcacgacacgagttgtgaggagatgggctacgaggcgagaagagatgatgggtcgttcgtacccagggggataacggtaggtagactggtgcctgggtgaggcaacagctgtgtggagtggtgggccaaaagaacattgtgattgtgttgggatgtaccgtgtctgtgggctgtccatccacaatcgcaccgcttggccctttccgctgcttggccagacaacgttgttcgttcatgtacccagatgacttcctcacacctctttctataacttctttcagcttcctattgctctgagggacctcctgagacgttgtagcatcaaacaaccattaccctctttttgggccagggacccccttttgaaccgatggcaaggccctttgactggaaaaggaccgttgcggcattggaacattgaggctagagcaggccccgttacaactatcccacgttggctggcaagccccactggtttaagcaaggaacagggcagcatacaaacgaatgcaagaattccttgaagttccctgcgagagtatgagccaggggaatactccgagtgcttaattgtcttccaaagcaaaggaggactcaattgttgaaaccaacatggggaccacaattatcagatc

SEQ ID NO: 418875 - DNA, 1459 bp, Homo Sapiens
  misc_feature (888)..(888): n is a, c, g, or t
ggtagatgcgatgatggcggaccgcaatagacaaggtggctcacctggagaccagctggggaacagaatccgcaggtgctctgtgcttcgctatgtgttggggccagtgcactgactcaggatcaaccagaatgccttaagctctcgctggctgctgtagaccacgtggtggtggtcattacgcgtcttaggatgtcacggctgtgggcgtcataggagatcgcatatatgtctcgcatggcacagtaggagagcatgcttatccacatgtaccgtatccctcgcccttctgctaggacgtacttccgttacattactgtccaaagctagctcggtgtcctttgcacgtgggagagtgtcctttcatctggggcatctaacaggtgagtcatcccactgacgtaagtgataggtcacgatcgcaagtggcactcgcatcaggcagacagaggggagactccgtcaaggcagcgatgtaagcgggtgccagcgcttgtttcctgaaccagatggcaggccagcagggcacagtcatcttgcggtttgtctctctatggggtctatatcctactttggcaggttccggccaatagtgggtacatgccattttttgcgcgagccaatatacactgctcttctattgaggtacgcctcgcccttgggcagcgcaacgggtgcagcccagccacatgcgcaggcacccattcgtggttacaggcgctggcaaccttggcattgagctcgtacacgtttatcgaaattgggagccaaagcaagccccccatgtcgcagacatttgtcacccctatgatagtgttcttctaccgcccatggcagagcctctgttggttcacaccctctttgtggtggcagtgagcgcaatggtcncagtactgtacagaatgaacccgacacttctacccttgttcggcactcccaacatttacaaatcctgtagcgggaatgggaacggggcatcttggttgacatgcgacagctcttatgacacaagccatgtcaggaggcgaagtctcctactgttttgtcaaacgaggacccccgcagaacctcacatgattctctcacatgttacttttgacaaccatttgtccctcagtggggggcgcacacaagcacgggggctacccgaattaccaccgcgctggatacatgtaggtatatgtcgacgcagtcatgagcagaatgggggacgccgaagcacacacaatcaagtcgctgggccctattccgttgaccgcggtggatgggggtctacccttgcaagtcctcgaatatggtcgtatagcacggtcaatcgttacccagaggtcttgtgggacctcttgacccattttctcatgcttagccatatatgtgcgttaggcctcgagaactctgggagggcgcgacacctagtcttgttgccactaatatgccaaggtggccgtatgcgtgagtc

SEQ ID NO: 418876 - DNA, 939 bp, Homo Sapiens
  misc_feature (875)..(884): n is a, c, g, or t
caaactaagccaaatttcactggaatgagtctctgggctcacctggttaccctcaaagttcctatgctaggggccctatccccctcagccttccccctttcctttgtccttctccgtctttcctggcagaggctccagggaaccataagagtccggtgggctggaccctgcagccctgggccaccatccggtcaggtgagggtgtgacaaagctgtcacctgggggcgccaagccctagtcgggctaacaagagtacctgggttcagaggaagtcacgggaggcaccacccagaagggtccagggtgttcgggcctctgcataatcgggacccccagaaacccccacccaaccgactgggacccttgccagggcctcccggctatctcaagcgctgcaaggcgaccaggcacctcgaaggccggcacatggctggccccaagaaggcctaacagcgctccgtgactcccagcccttcagcgcaccttatccattaacaccacttcccaactcgccccacaggcttcccgcggacgcccaccgacagggcacgaccacgcctggcagcacgcgccggaacataacacgctgcacgcccagagcccgcacggagaatcgcccccaggaacgaaccccaccgcctccacgcccctgcccatctcactacacgtcgcccacaaaagggcagcaaaccgccgacggtatgcgcacacggcactgccacaatagaacagccgacgccactgcgcccgccccccaacacaggaccccagggccacacacagccatgatcacccactacaacgacgacacaccccccggcagcaaaccgtcgtccccatacacccgcgggcgaccaggcccacatgacgtcgnnnnnnnnnngagacgtacacacacccgcggagacacctggcagaaccaccacccccatgacccg

SEQ ID NO: 418877 - DNA, 133 bp, Homo Sapiens
ggagagagaggtttctgactgtatgagcagaggacttcctgggctgcgcgcttcgtgtgaccaattaccagctcaatggtcgtgtgtccagatccgcagacccaggagtcccgtgtgcgattctcgaggcggg

SEQ ID NO: 418878 - DNA, 1139 bp, Homo Sapiens
gctccgggaagtggtcccccgctccagtcggacagaaaatcctcccctccctggtgtgcatgagctgctgtgctccctctgacacacagtgggacgaagactgctgtctggagagagcccagagattcaacactggagccttgcaccaaatgtgagactcttagtacctcctggtgccggcgcccgtgttcttgcatgggccatgtgagtgactcctattcgccagtcgccgtcaggaagttactttttgaggcgacgtgtgaccgataccccacttacttgattcccacaaacgccgtttaagaccgcaaacatagcttttgcaagagcacaagcaaccttggtgaatccacaaggtcggcccaacaggggaagaccacgggcttgacacgcctctgatctctccgaagcaacggttgaaaccgtgagagcgcccctgtctgtcaaaggtgcctggcgtacgttaaatgcacttgactggattcagaggcaaatcctcatgggctagcaatgacgtgagaaaagcccgtgcgcggcaagcgccttccatgtgtgtgggccacaaactggggcttatcatcgccacacatgggtggtacacatagacagacactcggggaggaaaaaacagtaaacggggtcacagtatattaaatggagttgccgcaatacggggggagaacagggaagagaatattgtccctgggacgttgggaggacctatgtcgcgaggcagtaagtgtaacattatattaccctgaaaagagaatgtgaggaaacatgggggtgaacacgagttcaagtaggttcccttaccaaacagtggagccttattccactaggtgcccataactttaacacagaatgaccagttgtttggagcaacccacatggactgtcaacacgttggattgcacgataacccagtagaaggccacagaaccccaacgggggaaacagcaaagggaaattcccccacaaaggaacgccgacagtatcggacaacagagagccccttagaatgggatacaaaaagacgttaaaacagactagggcaacggccataactaaacagaggagaagcgttggctcacggacaacagcgttggggcaactcgaaaacccgatccgaagggcac

SEQ ID NO: 418879 - DNA, 966 bp, Homo Sapiens
  misc_feature (523)..(523): n is a, c, g, or t
  misc_feature (558)..(558): n is a, c, g, or t
ggtggtcggagacatgcacactgtgactgcggtcgatggtgccgggtccggctgaatgccctggatgctcccaggccatctggggacgtcccaggccccaggttctgtgtgtgacctgggcttggcctgcggctgtccatcttgtgatactgacgtgcagatggtgggacttcagtcttaccaaggcgcgaggtgccgagagtgggcagcagggggctgcgtcctctgccgtttctcccgtcgtgcgctgttctagagaccgtcgtctgggctctcgcagcatttcgtgcgtctggaggtggcttgaggaggcgtgtcatccttggccgtgtatgcgtggtctgaccacggtggcctcgtgccagggacttgcgtggagcggtggctaccctccttgtcccactactcgcctacgcatcgaggtcatccacttcgcttgttggcgggtcttggcagggggcgtagttgcctcgcgagcatttgctcgtgcccatggtgggccttcgcgcgcctatcagaagancacacttggtgctctgctcgggggtacctattgcncaccggacccttggacaacacgacggaccccgatggctggtagggctgtcgccccatctgtgccccttggctgggagacggagaacgggaccatggggtgtcccctccctttggattgccccgggcggcccctctgttggtccattaggctcgcgctatcgccggtggcccgagttttgcgcgagtgttcacccccccttattaatagcgcacgctaagcgtaggaatatacgccccgcgaaagagctagcgcgttatcccgagcccgttttctccctgcccatttattggcaaccatggtgcgtggatatacgttcccattgacccatacccaagggtagaagaacctacttgaacacttattcgtcgcaagcagagcgccttcccctaagagtggtgctccccccg

SEQ ID NO: 418880 - DNA, 1009 bp, Homo Sapiens
ggtgcaggcagcggattgccttgattcggatgaatccggtgtgacacgacgacacgtgcgctgagatcattgtcgttggcagccgactgtgtgcagagctggcgatataggtgtcatgcaccgcatgagagcccgtgaatacttggtatcatcgtgtagcatatgtcccaggtttccgaatcagatggtcgatcgctacgaacgcgcaggagtgccagtgagggtcgtcggcacatgactgatggtgtcgcttgaggcgaatcccgtcaatgggaatctacaagaagctagcacagtgacggcgtagtaccaattgacggactgatgcggccaattagaaccacaggggcacagctttggtcgttacttggacgcgccaatcacatcgtaccaggctccagaaaagtctgggtgaaatgtctgcagtcacccttgttgaggaggaccctgtgagccattgccagaggactaaggaagccgcagttgacatgcgccctggcgaggaacgaagaggcccctagggtaggaccgggtttggagcagaagagggtggaggccccgaggtctacctcaaagagtgtcaaaccgtcaatgtgccatcacagggttctccaatcacttctactgcgcggcaaacacggctgtttgaaaccaagccaggaaggacaaatccatctgcgtgttgattgtgagaagacttttgacccacaggtcacggggatcttttggcaagaggaggggggttgaaatcaatcgctgttgagagaacccaaacaagaaaaaacgccatgggtgaggcgacaggtgacggtggcgctgtgacgtgggcaagtcggtgcgcacacggatgcacacggacacggaaacaacgcagcaatggaccctgaacaatacccgcattgggatgacgacagcgggcaaagtacgacgcaaaacaatggataggcgaggcgaccaaggcggggccacccagcgaagggcgccagaagacccacggccctgcggggcc

SEQ ID NO: 418881 - DNA, 1471 bp, Homo Sapiens
  misc_feature (616)..(616): n is a, c, g, or t
  misc_feature (1241)..(1241): n is a, c, g, or t
  misc_feature (1277)..(1277): n is a, c, g, or t
atttggaaaagctctgccaaaaatttttaggcgtgtgccatgggtccctgtgccaaatctccgcaccaggtgtttggcccggtgtggtacgccaggacaaacagagatgttccgtgccatacagcaagaccagggccaggggaggtgtgcgcactggggtgtgtgtagctgcgcctatcgctggctgggtacctgagataacatcttctcggtcttacatgttccattctaccaatgagattctatccctcttctaaatccccaaaattttaggatcgcttggggcggcgtttggaaggcacaccacgcccaggataccgcgggtaagggcgctagaacccaacagtggtgctgtagagatagatgtgtcccccaccaatcttacgcggtggtacaaggtgttgtttgggccatctcggtagagaagactccccatatacaacttggcgcccatgggcacatcctttgggccctctccgagaaagagccacgagagaggggacagtccccatctgtgggagaaaaagaaacaagttcccgcgcgtgtggttcccaagaaaaatagccgcgtgtgtgtgtggcccccaatgtggtggtctgtgggttcttactaaanttattgcacagtatttaaggccgagtgtttctcccaatcaccctttggacacccgaagtttttgttgttcacccgagcgccacaatcgcggggacacacccagaatcgagcaacaggggggtaagcgcatgaagctgagttaggtgcgacagaaagaagcgcgggggaccacccaaaagagaaaaaccccaacttctctgggatgtgggcggctacaaaccaatccccgtgggggaccccgggggcgtatattatcgcggcaagccaagccccccaaggggggggttaatcccaccaaagaacgcatggagaacggggggatacacaaaactcacggcaaacagactcctccagaaagagaaagccaaatttcctcacgccccgggatttgtgcccacagacaggagaaaaaagtgggcccaccaccatcacgaaggaaaacattccccctttgtgtgagtataatggggcgcccccaaaagaaggactgcgcggctcctcaggtgaggatggggtggtgccgcccctggatgtgaggcgagaagacaccccccggaagagagcgcaccaggggatgtcaccaaaaccaccacaagggaagtaccgcgcggagacgggcggccanacacggctgcgcccactatgaggagggagaacaatngaacaccccacttttacgaattaacaacacaggggtgcggggaggtggtgcacgcccgggacgaagacacacactctggggtgagaacattcccccaacaagtgttgctgctagctcacacgccatcggggtctccgtatcttcccacctactgtgaaatgaacagtggggcatcctaaatcattccgacaagg

SEQ ID NO: 418882 - DNA, 1331 bp, Homo Sapiens
  misc_feature (340)..(340): n is a, c, g, or t
gccggcggcgaagctcatcgtggcgagatccagcgtagtggtaccagcaagcagaggggcgtgggccccaccccgcggactaccgccagaagtagacgactaatctaggagcgtgccgaggcatgacgattctgaggagtcgagccactcgagcagacatccaggatgtgttccctgctagcatcgacgattgcccggatctgtgcctgctgcactgtgacgtgtctcgagaccatgggtgtagatgtacgtgaatgcgaggctcatgcgctgtgaatcgttggaggaccgacggtctcacgtgcctgtgctacgtggctgctgcgatcgtaagctgacnccatgtggcctatcggataccgcaactaggccgtagtggcgaaatcaagtaagcgctctggtagacgtgcaaatgcagactggccataccgttgacacggaacgagatcgatgcagcgatcgcacaatctatgcacgccttgcaccgtgggcgaccgtggaggagggccagggctacaagtcgtgtggcatgcgctggaggtaaccggaactaccgagtgttatacacgaacatacatacgaaccgaacgtaactaccttgaaaatgtatcagtagacgacaaaggtactagcttgtacaccgcggtacaatgggggacggtgccaaaaaaactcgaggacagggttacttggccttggagaggggccagaggcattttcaaccccagagccagcggggggaccctggcacctgtaccttttgtggcaattgcgcgaggtgcgagggttttccaaacgtgtgcccgccaagcaaccgagggaagtgttggaggtccgcacaaaggccaagtgaaatgagcccgttgaattgcccggacgtgagttaagagcgtgggaaccgcgtgacgcgtgtgtgtggacgagtcccccttattcacgtgggagttgccataatgacaagttacattgtgggacgcccttggcaaaggatgccggccaaagactttgaaaggtccccttgaggcgtatggtcgtggtgcctttcggggccacccagaaatcgatcaaacattgggaccgaggttagaataccgagggtaggggcggccggggttattcgtgcgcaaggaccccaccaaggaccatagggaccgcaaattaattaccacaggggccgggcggtggaacttctacagccgggggatacattgtgggacaggcgcgcgccaacgaacattgggggggcggaagatggttggacagaaaggcgcttggacaattagggttgcaaagccgggggcgcaaggaaaaactcccacggggaagggttc

SEQ ID NO: 418883 - DNA, 1081 bp, Homo Sapiens
gcactactcttcactcatggcaaggagtgcgctcgcttcgaactgtctcctctgcagcatagacaagctcgtgaggtgacagttgatcgtgctctcagctccagtgaatggggcatccgtgtggcgcctcggagggcgagaatctggcgggctggtgttccagccgccacttgtccctccgttcctggccagtcacggtagtctgtgaccgcagctgccaagcggctagggaggccgcgacgtggtctgatttcgactgcttcctcggatgcctccttctggggggagctctaggggctgttggggaccgcgtctactagcgtgagatgcgccttcctggcgacggcacgtcaggctagaacctcttgtgggcagtgcgtctaaggcgtgggagcgagtatgagtgaaggaccacgtccgtgtacatggatacttgatcgatggagtgagggaagatggacgatggatgagtcgaggggacttggagcatctcatgggctgaggtgccaaggtcgaggaaggcatagacccgagtaggcaggacacacttgcccatgggacacctgggcatagagccgttcggcaaacgctggggaacaacggtgccgtctgtagtgctccaggtgacgtgacggggccagattgaggcccgtacccatgtgaaatggggacaggtactcccacaggaacggaacattggggatagagcgcatgtagggagcaacgggggggacactgtagggataggagtgacctttcaaacaagacgacgttaagacccgtggaaacccccctttttaagatatgcaaaggacacactccaatttcgggaggggggacccctgttgcaggtggaaaatacgaaccatgtaaatagtgcattcccaaggattgttcggaaaggatataatggggagcaatagatcgttcccccaatggtggtgtgcccatggttcagtggaagaagaaacctgtggaacccacaatttgacgcggccgaattacattgtgccccgggacggggtagatgaaaacattatccacggtcgacccacaaacggtctcagtgtgagagaatatc

SEQ ID NO: 418884 - DNA, 634 bp, Homo Sapiens
ggccaccgatgtagcctgggcaagctctcgcctgtgggctgggtgttcagtacacaggaaaagaggcggactgactgccgtacatgatcagacagaccacctcggggacttccgccacaccatgtcatgtgggccgtggcggggatgtctgcggggacacgtctcttcctcagcaagcactggtggcagctccgtggagcacgcctagtcgttcaccccgcagtttcctggccaagaagctgtcccgtcatggtgcgtgagggtgggggcgccaccacctcgaagtatgatggaatctcccacgctgcaaccgtctcacgaggattcttggacacgaattcaccgtataatcctgatcgcctgctttgcttgacggctcgtacatatccaagggctcagatctcatgcaaaagacatgttgccaggtacaccatcaccctctcgaccagtagtgccaagtgtagtatcccacgtacgtggcagatccgagactaccgtgactcgtcatcttgggcgtgcttaggaaccagtctctcgcctgaccctgctcgggaagcagccagtgtgcacctgacacggcgatgatctgcctgttggcgctgttgagacgtcgtcggttgcaatgggttcatga

SEQ ID NO: 418885 - DNA, 1055 bp, Homo Sapiens
  misc_feature (777)..(785): n is a, c, g, or t
gacagtgcatagtggtgaccaagctttggaaaggccccagggtgttccaaagccaaaattaagggttgatatatacagcaagaaggacgttctgtccctcaaaggtggcctggccaccctccccactcttggccaaggttccgtgcaacagaggttgtgtcctcacgggggtgacccttctgggccgcccacagtatagacttccggcgaaagaggcacgcatgtccatgcgtgttggcacaagtcatttgggccagctcctcagcacacgcgatttggcgcatttggtccttgaggtagcgccgccttatctggcacattcaaacttgatgttccacgccagtcataaaatggggacgtccattatcaggaagctctagcaagccaatatgttgtcgccggggccaaacacaaagggacccacgcagtgtccttgacttcggcttgttagaagttggggagacattccgcaccgagaaaaacagaagcctcttagaccctggatggttggtagcactgggctcccaagtatgggctggggcaaacggctgacgtgtgcacacaaaaatggtcccctataggtgtgcagaaaaacctcggccggacatggtctcaaggaaagcacacttagaatccagaggaaccacagagccaataagtggcgttgagccaccatcgaagaggtggccccatatgaacgggcaggcccgccccagaagaagacccccgttataagcgacggatacaccagtgcaggcaccccgttatgaggcaaannnnnnnnntaaccacatttccaggtgcacaagggagcatagaaggggcccccaggggggacccacaaatggcgtaagagtcagcggccacaaaacgggtgcacccccggagagaagcagcggagggataacatccaacagcagggggacaaaaggtggcatctaaactgagtaagcaagacacgcaatactgagaaagtgttgtgcgatgaaacccaatactgagcataaatgtatggcccccgcagaaaaaaactgcgtgaagtcacacaaatccgg

SEQ ID NO: 418886 - DNA, 758 bp, Homo Sapiens
ggacccgcagccacaggcactgaaactgagtaaatacgctctgcgtgcgcagagataaggagaacgacgaggatgtgagtaaccagagccaccagtaaaacccctggtacgcactccgctgattcgtgaacgacgatggttttgacgtccgcgggcgaaagcagcgatgacctgctcacggattccgtgcgccagagattgaattgacagagaatctcccggccaaggcctctgtctcggcacacgctaggggagctctctctgtggatcacgatactagccttgtgagttaatacttttacgagacccttggaatcatatagacccggcctcagaatttgcgcgactttcgacctcccgctggccaatcattatagtggtcgttggcacaaggccccctggacgcacccaagacgacagccactcctcggcacaatagggactactcgcggggaggcacagcaaaaatggtgctgaaccgtggcttacccagtgcagatgaataggatcgaccatcgggaagaggagaagaatttcgctcgagaggactcggggatgcaaaagtttggagtccttgcccaaattgcatatcggaaaactaaatagccaagcctggggatttcttcctccaaaaaaagtcccatcccaaagatttaccctttgaccagatcccctggccgcctacaaactcttggccgttccttcgaggctctcgcacttagggaggactcggcctacccttggtcccacaattacgg

SEQ ID NO: 418887 - DNA, 1014 bp, Homo Sapiens
  misc_feature (332)..(364): n is a, c, g, or t
gaaacagagtctcgctctgtcacccaggctggagtgcataccaggatctgggctcactggcaagctccgcctcccgggtttcgtggccattctcgttgcctcagcctccgtgggtagctgggactacaggcgcttgccaccacgcccggctaaattttggatattttatagtagagacagggttttcaccgtatttagccaggattggtctcaatcttccgtgacctcggtgatctgcccgccttcgaacttcccaaaggtgctgggattacaggttgtgacgccgcacagtgccgtggccagcactgtgtatttaaaaggcctccctctcnnnnnnnnnnnnnnnnnnnnnnnnnnnnnnnnngttgtctcaaaccatcttgaggtgaccttcagccctagttgccacaccttgggctgtgtaacacttctcgggatgggcctatccagccttcacacccaattaaaaaaccaaatgctgttaactaggagagtactcttgtgtgccagggtctggttgctcagaattgcgttaaataacgctgtaaaaacccttcttaaagaggtcccccggagggtaagagcaggaattcatcttccccatttaccacgaagagggaaacacacggcagggctggaggaaaggcgtgtaatcagacagaattctagtgccaagtttagcagaaaggtgggagagagggattaaatgctttgtgggaaccttgaatcacgtgtgactctaaagtggtgccaccagagtccctttaaacggtgaccacttgtaaccccatggttgtcgacgtggttctccatttgttggggccactttgggtaacatcttgttattcgtccgtggtttcccaagaaggaccccagagggcgtttcggcagaaacaaattactgcttgatagtccccaccctaagtggtagattaaagcgggtgtacgatagagacgtcgtaagagtcatcttgtatggagatgtgatgagtcccccccctatacgttgagaca

SEQ ID NO: 418888 - DNA, 871 bp, Homo Sapiens
ggttctatctgcgtctgggtctcaatcctggacccaccgatgagtctctgtctgcagaactcctctggcaatctatggtggtggttcctgtgtgtggtacttgaccgaatctgaggtaataagcgtgcgcttggcttgtcatctatccttctttcaacgtctaatcccagtcgatcgttggtggcgcactcagacgtggtggagtctatgagtatgcgctgggcgatgtagactgtttggcttttagagtgacatgtgtgctgagccaatggacatatgcacagaggcctctaccggtggacatagtgggtcggccaatctggaacggtgcgtccttggatgtagctgagacgttattctcgcgagagtctactggctcgagtcgtgagcccgtagcgatgtaaacgagctgcctttgacaagcagtgtcaggttgctctctctacaacaagtccttccgtatgaataatcacacgctacatgacggaaggtacctatctatcgtagatacaagatttgtcacctcagtagcgcagttggtataggaggagagcatgcctcagctccattccgtaacacccggtgtccgagtcttggcctcgattggctttagagcgggtagttttgaataagggcactagcttaggagcatagttcgacttaggttcgttgaaacccgcagaagaagtcctcacagtcgttaagggaactctaggagagtaggtcggtaaccaaggtatgaccctctccataaacggaaccaaaagcagcacaagttatggaagagcaatcgcagtcgcggggctcacaaaacggactgcgcagtggtagccggtccacacaccgcagggtgggagaaagaggcagagcg

SEQ ID NO: 418889 - DNA, 1363 bp, Homo Sapiens
ggtgagaacgtcgatgatctgtactttctctcgttcagaccgctgtagctatcgtcggtgcgggtgcagacgtccgtgacacaggagactcagcgcagacgtcggctcgatatagattcactggatcacgggctgtgatgtctgaagcatggagtttttgcataggagagtaaatgacatcctccccaggaaggcaacgaggtcgccttcttcgagtggaccgggcgcgcttaaataccagtgccccgctccctcgtaagggtccatcgtgggtgctagttagtcgcatgtcggtaaagctggcgcgcaacgtagtgcaccgaagagctaaaggctcggtgatcactttgcacccctgacaatgtgacaccactcatagggacggcatggacaatacagattcaacacaacagtgagatacatgacaacttggggatcaaaggatcagtcgtggtgacccaacagaacagttcattgaaatgacggtagcttgggggccgtcgagcacctcgtcatggaatccaaggccaagattcctcgactggaaatcgcatcggcgcccccccaggtgtaaaatacacactaaaagggggccagcagcagagaggtaggcaccacgtaattgcaacatgcatcaatactaactagctatatggaaagaaagactaatgggattggggccccacaaaaggctcgagtagttgaacgtgttgggacacgattccccaacgagactccggatggcttggctccacacatttcgtaaccgaaccacctgtttggtgtgatgactacgttggagccttgggtaaagtctgggttcaggttgggcaagccttcttggagcaggaatcggagcagaggtaccagaacctacgaacgaccttggtggttggctcagcttaaatatcgatattcgagaaaggcgcggtaacatggctccgcaataccactctcctctatatgggcgcagttcactttaggccgttccattgggcacacaataggcgtttgttgcgggcaagatggatcgcgttgggaggccggtataataactccatttccacttggaaaagcggcaactccccattgcgagcgatgaaagcccggcagaggacttgacccagttcatttctaccccgaggccaaccgaagtttgcggcaagactgaggggcaaaacattcagtttggacggacggaacaatccgacagggcacggaacacgcctggtgtgccataaacccggatacgagccccacattgaggaaccatgtccgagaaaaccaaatgggcacgaattgggtggtcgcacgcggaaacgccaattgccttgccgtaccttacattgttggacaaggagac

SEQ ID NO: 418890 - DNA, 1461 bp, Homo Sapiens
gagcacgtgtgcgccttgacctgactactctaaagtccgtgtggacgcattgcgcggaccgaacagtactctgagataggacgggggagctagagaagtgcagaaagcagattcggttgacggccgggatagcgtggcatattcgtgcctggcacgtcttgtgtaggaggcactccttacacacatgcgagtcacgtctgggccgagggcatctctgcggtgcgtccgatgtcgccctgcatggacggcctgggcatgcggacggtttccgtgtgacgggaatcggccaggggcggcatgcatcgggcggcctacccagtacggccctcgggccgccgaagggaaggtcgcactcgacaagagtccaactcgacgctctccacagccgacgcactgacagccacagagccaggcgaggtggaaaggccaacgagaagaccgagcgtcggaagaagcggcttggcactggactgaaaacggatcgatgtgagtcgctctcgagagcgacgagggagcgaatggtggcctctctcggtcacatgagatctaactcaacaggacaaactgtgtgtgtgccagggttccctcgcagagtcaacacattgtcgaaacgcccaacggcagctccacgatgtgagcaccaccgccaccttttggagcgatatcgaacttcggaactcttaacgcggatcaactggagatgtatgatccgggggggactttaatcatacccaattagtgaagaaatttgtcaacccggttcttgctgccttcagtggtgaagaatgcctggggacgcaggattcgcccgacggccccataattgtgcagaatgagttcgattccccttcgcccaatagttagagcccgccaaatcataaactgtgggggtttcttcacaagcggggcgtggacgccccagtatagttatgggtgcgccgccatataacgttggtagaggaagcagtggctcgcgccgaggggtgcggagtccggaaactgatccctacaggcagaacaaatgaggcaattacggggggggaacccagtgaggggaacgctgttaggacggagaggccaaaggcagagaaggttagccccacccttaatgaggccggtatacacagagcggaggacaagagccaaaagggactgacgccccaggggaggtgccacaacagcgttccaaatatacggccaccagaagagtggggtggtaggataaatccatacccgtttagtcggggccgcccttggaaaaagaagagccaaagtaacgggcgcacaacaacagagaaagggtaaagtagccctaaacaggtagattatgggacagccttgacagaaagaaaaatacgtcggatatttggacggaggaaaaccaacgcaaaagtagggcaggcagcaaacgattagtgggcacgcggcgccccttagtatagagcacgcaaccattcggga

SEQ ID NO: 418891 - DNA, 1052 bp, Homo Sapiens
  misc_feature (583)..(583): n is a, c, g, or t
ccacattttccgcaaaaacaacttcggagggtgcaaccggggtttaattcccaccttatacctattactaacgcgggaattggtcgctcaaatctaacatagagggaaactacttctgataaatatacaccattcctccctcatttagtagggcaccgctccgagggcaacacacaagagaggtgacagtgttcagcgcctctccgagggcgcacccaagcgcgctatagggggagaaacaccgcagggctggcggaggagctgtgggatgcgaaggagccccgggccagcacccaccagggcgccaggaggcgccctgtggttccccccgggcccacaccacaggacaggccaccacaagtgtggagcaacaaccatgtgcatatatcctctgggtgctccccaggtctcagcgaaagaccctccttttcatcagacagaggaaaggtgtgaagagaggtgtggaggggggacaacagccaacatctcccgcgagaaaaacaaccaccgcaggacatacagagggcccacagaggaggggctctctcctcacccgagacactgcgagggggggagcacccantgagacccacgcggcgacagcccacccccaaaggaccccgcggaaggaacgacccccactccttagccacaccagcgcttttcccaagaaaagggagtccccacaacacgagggggtgggcgaccaccacaaacgacgatgtaccccaccctgagaggacacaggaggtgaccatggtgcgacaacaacgcagcacaggagcgtgcgaccgagcggggagcgtatgccgctacctgtgagcagaccccccttaagtgagcactacggtaaagtgcgagcataccatgccagggcggcaccggagagaggggggcccatctcctgagaggcagcagcacccactacaacagaaagcagacacgacccaacgcagacaggcgtgagagatacaacgtcgggaaaacacaacgaggccggccttgagcgacacaggctggactctcccgtggagaagcaccactcccaccgg

SEQ ID NO: 418892 - DNA, 1188 bp, Homo Sapiens
  misc_feature (695)..(695): n is a, c, g, or t
gatgacatgtgcgcctcccgtcacactctaacgcgatgtgccgcgttcgacgcgcggtactcggcatagtactgggactgaaatcaaggcaattcgtgagcggcggctgtgggaaacgggtgcgagacttcgtggagtgagactctgacacaatcgtattagattctgcgccgagagagaccggaggtggctgtactgtgcccgccaatgagtcctgggtgtgacggttccgtgtaaccggacgccgcgtagcgattgacctgtgctcatgatctggcctggagcccgaggagctgcttgacataagtcgtcactgagccttcagagcatagtcaccagccacgatcgggacattcagcgtgcagctgcacaacgtaggacatgcgctttcacgtgcatagatacacccatggggctcgtccagcgcatgggccctggcactttcgtcgaatgctgtcctacaggtgcgttctagatgattcctcatggcatccatgggcaaccaagttctcacttgtggtcctccactctgaggtatccgaagtgcttcttaatacttccctgcggcagagtagacacgttatttcctcgtatctcgcatggtctcccaaggagcactgggggtgcgcgacacccaagtgagttcgagccccgcaatggccggtaattggatcaggtgcgaccgtttcctggcnccacaaataggatgatgccccgagagttggttctggaagggcatgggtaacctggtcttgggtcatggtgtgccctgggtagggggcccagctgcagagcactttctcattccagtgggattgcagctatgccctgcataatatacccatagcaatcaacctcggtctgcgctcgaaaaccttttcgtggacccaaggttcccagttggcctgcccttgcacaatttgacccttgttcccattacccttggtaccccgcgttttcccatccggtgttaagtcggcgtaaattcgccctagcagagaaaatatcccttcgccaatacggctggctgactaccagatagggccactgcttaatggagccttacaggcgtatcactatctttagccaccgagtttacaatgccagtcggacccttggcctgggatgcaccagccagagtgacgcgtggcaaggatccccacaaaaaattctccgaggtgtacggac

SEQ ID NO: 418893 - DNA, 781 bp, Homo Sapiens
ggggatccgtgggcagaggtggcggcggctgtgtgggtgaccccgatgtggaccgctgtgctggcagcccttactcaaggaccaccgtatctctacacttcgaagaatctgggcaccgtgtcgttgcgagaggctgcgactcgtgcatccccgtgtaggcgcgatggaccggaggtctgtgcgttcgactccgacgtgtcgcccatctggagatacgagactcagagttggagccaggtgtttcttctgtcttcaaggagactggaaggctggtgacgccaggatgcacgacccccataggaggaaccgatacaaacatgccattcgtccggttagcgctttcctttctgtccagagaatgccatgttggcaagaattcaacccttggtgaatttgctgaaacactggacagcagcaaagagccattgaacgcaaagattgcgaaaaggataacctaacaagtaaagaagcacaacgaatttagcgaggataacgtgctggacaggaaacgtggcgcctgtgcctatcaggagccacgcttggcttgcccatggcatttgaggcctctagtgccggagcttgccctggtcccatggagtggcgtgcatccaactttccaggggtttaattcccactgggttgccaactcaggccgttccttgtggtgccccgttaggccaaattgtcttatggacacacggattgactcaaacacttttcaagacttaagatggtttcgaactgtgctctttggtttttgtccttgacaaggtgtgcacca

SEQ ID NO: 418894 - DNA, 1188 bp, Homo Sapiens
agtcacgattatggttgctgctgtgcagaagaacgatcgtcgtcagggtgagtgagtggctgtgctgctgcaaccaccaggaggcaaagaggccacacctacgtaggatggatgactgattcgtgcatgcctgaatgaaccaaccacagtggtgcaatcgcatcgacgcatcctcgctgggtcagccatcatcgctgcgaggactttcattcattcgttcgcacgcatggattgaacgtcagcaccaagcgaggatggctggcatgcttgctcgcatcggtcagtggagtgcaatgtcactcgtctcactcactcactgcgaagcgcacgaactgcctgtcctgtacgtaccgttcattcattcacgtccgtcatgcgcggacgaccgatcattcaaccgaaccaatcccatcgcattcagttccagtccaattcgggtcgcgctcacattcgattcgacgtgtaaccgtcgtcccaactggagcgcatatcacatcactatgcctttgctttcgttggcctggtccagcgtaacccatcaaggagatggtatacgtcagctccttgccttcgcatccgtaagtcgtacgcctctcctcgcacctgacctgtccatcctatgtccttttactggcctttgacttctgccttgtccggctccttcccctcaggcggttcgcgttcccggattcgcattcacttcgcatgtccctgtgtccgcgtcctgcatccccaagtgcgttgcggctcagggccccgcctgcccttcgtcgcttgcttgcgcatcaataactttgcgctggcgcgtcggagtgcctgggcaccggttatcgcgcacttgccgtgcgcgttcccgtccctctccacttcggccctgtaccttcccagtcccccgtaccacaaacatggggacgcagcaacttgtcatatatcactacgttcccctgtgttaccagtatcatggacacaggacagccgacaacagtgaggccctcagttcctgaactttaggaacgcacgactcggcgatttgacatctgcatcgacaatggcaagggacaaagtatacaccatctaccgcattcctactccttaccccgctcaactggcactacccacacggcgcactgaccctgtgacctaagcccccattagtgcatgtgcatcgtgcactgtctataagcttcg

SEQ ID NO: 418895 - DNA, 1406 bp, Homo Sapiens
  misc_feature (744)..(744): n is a, c, g, or t
gggccactcaaatttactatttcgaacacaagctctcaatcgtgttttgcaacacatagacgtcgccgtccggcctagctccttgctgacagatatggagatggcgttgcttggggcaggcgtctatgccaatatgggaggtaacgcgttctggctggtgttctgccagtatgcatggttcaagcatcgttcactctcgtgcttctcgggcggtagtcccgtgtaggaggtgctagtcggaagcgtcgaggggatcgccgtgctgagcgtgggcggcgctggcacgcggctggacacgatggactcagtggagaagtggcatgatgagatggaactttgtggccctcctagataagcgattgtcttcatcgactgatgcttcgtggctatcagttgcgtggttgtgcctctctcgcgcggtcagagaggtagccaaaacgtggatactgctgagcaatttagattccccaatgtcttatgggcagcctgtagtagcatggagattggccttgggaaacttagtggacttcaagtgctcttacgtaaatcatacctctcggacaaagacaaaccagtcatcggtgacaacccgtgcaggtcgtcagtccagcaaaggacactatgcgagagaagaaagagagaaagacagtcacgtccacatgcagtcgacaatcgaaaaacgccgcaaagggaccgtgagaacccagtgagagatggcgtcgtaaaacggcaaacctggagaantacctcggaacggagaccaaggtaaacgccggcatccaatggggcctgagccaatagattcccccattggaaagacccgaggcccacgttagtcaagggccgacacagttaccgttcaaacggacaacgaaacacaaagttgtcgcaagaagaaagggcctaccccacgcgggaataataggaattgcgcatcgaatcccgcccctaacacgaaatgtgggcaaataggatcagccgatcctgcgagggccaaattccccattgagcgcgaaatttatgaaagcctaaaggaagttccaagggcaattagagcacctcggatggcggggagccttaatctgtgacacaaagacgcttccactattggctccatcaatgacacattctaagggcctcccaggcacattgcacgggccacacggagaggcaggtaggaaagggggtccgtgacaacaccccatcgagcaggcattagacgtcgacagcgcgttcgttttcgcgcattcgattggctccccttgtcgcttgtccacctactacgaaatctttgcgccccgttggagatagaactcgttccacaattgtcccgtattgaaaggacaccttagggtcattggagacacgtacgcataaggtcgcgaacccatctgaccgcatagaat

SEQ ID NO: 418896 - DNA, 1274 bp, Homo Sapiens
  misc_feature (287)..(287): n is a, c, g, or t
  misc_feature (373)..(373): n is a, c, g, or t
  misc_feature (397)..(397): n is a, c, g, or t
ggtgagaagctcggaccggagatgtgtctcgcgagctcgtgtacaatgcggcgcggctagtttcatgcctgggaatctaccgcatcgtcgccgggagtatctgtatatagtattggaagattagccagaatcaaagcgtctgatggaaatgctctagatcccctcgaggaaaggacccaagcgcttctcatcgggagctaccggacaaggctttatagatcgctacatcttcccgccctctcaataaatacgtcgacgatagtcgttgtcgcaatgcgagagggacnggttaagccatgttgtgcacagaagtggcttagtgggcctgtctggggagtactcgccgcccgatcaatgggaccatgcggcatgntgcatggagatcagacagtccatncagaacacactcacgacacaatctggttcttctgacagtcctcgggctatcgaacaggtatggaatgacgggttctctggacgcatcaagcagtctgcgtgtggtcagagggcaggaattgcccaacgcaactccatcgagggctgatgttctcatcactgatggcagggcaaagcttggcgcatataccactggcatcaacagcacttagacgtaagagagcggtgcgtgtgggaaccgactggtgggatgtgtacgggctgaaacgtccagcatactcacaatgctttccagacactggtacacgcaaaggggtcgttcttaatggctctggaggcgtcgctaacggcgtgaatgtggggtacaaccgggtgtaaatgcatctgcacccacggtacgctgtacttggaagccgtgtggtggatacgtaggatccacgtttccaacacactatgtggctggattccacaccttggtccgtgtgggaatggattggcatttatgctcgttacaaaaggcacaccataacgttgggtcacaggaaactggattgctcgggagcttggccttgttaattgaattactttccagaggaaggccaaccccaagtggtgggttgccagaggaccccaccccagaagcggtgcgccttaaattactttctatacgggggcgaagccaattttttgcaaagcatttccacacacattgtttcggttaacatgtgtgaggcgccaagacttttcaggagaggaggcacatctcttcgatcggcaacacgcacgccaaaagaaacaaacggttcggagagaagcgagggaatataatagagatacttctacgaggagagtggtctcggggtgagcgaaatacacgc

SEQ ID NO: 418897 - DNA, 1140 bp, Homo Sapiens
gctgtgaacatactccagggacggtggacgggaaccagcgctctactagaggcggcgatacagggaggccaacgaagacaagtgtgtcgctccatatcataccaatagataggtaggatgtgacaagccagctgcctcatgtactaatatcagcaaatatcgggccgacgctccgttcccacagaggatcgcaaggggtagatcgatggtatggcatgtgtagtggtgcatcaacgggtcgctgttgtcttgaatgatgatgtctctgctgagtgagctagcaagtggaatgatagctcgcagtagtgacaacaagtctccaaggcttggattggcacgttggagaggtagtaggtccaagggcttgaactacaccgtaggtccttgggatgtacacctctacgccactaggccactcgggagtgcttgtttcccccgctagactatagagaagtgattgctattcgccaatgccatcaaaacaaaaaactaggggccacgaactagaatggaattgggcaaagacgtgcaagcggatacgtagtaggtgcagagaatctcatcgcgggagtgggtctagcgtatggctttcagttctggaatgcatcgtacgtgacggttttcacgtgatagagagacaagcagcagaacgatgtacaagaatgaagccggaaagatccttcatttatggtcttcgagaccacctagaacaagggttcctgctcaataaatgcccaggggatagaaagcgatgcacttgtgcataattccaggtgcaacgcgccgaattgtaagggctgccaatgaaccaaaaaatcggacgttggtgaaccacggaacaagggtcgtggtccacttttaagctcttagtggaactttccacaagtggtaacccaggggcgactttgtgcgtcacatatagaggaaccaggtagggatagacaagaggtttgtgtggctcgaacgtacatgaatttggtgactccccatctttccgaattgaacttgatcctatacggtttagccaagaaagggttacacaaaatcgtcattggaaaggagaagcccccagaccgattgtggaaaattgggggggaagagaggtcttcacttggggagccgtagcaaatggggttgaaa

SEQ ID NO: 418898 - DNA, 1187 bp, Homo Sapiens
  misc_feature (469)..(469): n is a, c, g, or t
ggatggtcgattactgtgacgcagagaagtactctctgtgtcacgcacatgggtcgctcggtgtacccgcgctcgtaccacgccgtggggcctgcggatggatggtcaaggtgataaggttcccctaggagatgtgcgcaatctcgaggcctggttcacgactgtctagcgacgctctttaccttgtcgcatacagacggacgtgcgtactgaaattgagatctctgactggcgcagaggtcgcatctcgcgtcacgtcgaatcggagaccggttggatgcacatacagtgcaccgggatggtgctaggctgctctgcggttgatacgtagactccgaccccttttggatcgcgctgtgatgggacgccatagtgtagcgtcctcaagtagagcaacatcctcttagggattgcccatgcgctgggtagcatttcgcaacggagttgagtcttgctcgcctaggacgtngcaaatcgcacttggaatagaacactgcgacatcacgattggttgcgtaactcacacgtagagtttgcgagcatatttgatctattcccaaatgaagtggtgccccctggacagcgaacttgatgttcgccggggcaaagagtagaccattggacttgaacggtagtcgtgcaaacgaaaatggcgacgtttcgggaacgcacacgcgacttgggcgagtgccaagggaactccgctagggaaaggtttaacctaggccctgacggtgcgacttcccggggatgccttgggcaacctgggatcccgagattattgctggcgctgggaaaagccatttctagtgaacggacacaaagctaagacgcccacaaaatggtagcattgggtgggatcacccaggggttgtcaaccagcgtgagcgctaccttggtagggaggccgcataaaaggctggaggagttgagccgcccgacgaatgacaagacctgggcattctcccaaggcacacgggggctggtacaccgggtcgactcagggcacgggcatctatcaatgcacaaagatccgtcattcgcaggctggatccattggaggggccacaggccttcaggattcggccgttgaggggtttctggcagaggttgcacagattgaacagattccccctttgcaaagaagacccttcctcgccttgccttttggaaagcatcaagggtgg

SEQ ID NO: 418899 - DNA, 516 bp, Homo Sapiens
ggctacggggcacaaggaaaagccatgttgcggaactgttaaagtgcgtgaagaaaagtgcatcccgaggatcagagcacaaaaccgatacagtggcgagggggtggacccgacagcgcatctgaagaaataccccagggcgacacgaacagaaaagcaaggcgctgaggggatagagaagagcaaaagagggcgcggaaacaagagagatgccacgcctagaactcacacaggacgaaaagcgcccactgaggactgataaaaagacacccacataaggacagacgggccagtggacgaagacccgaccatcaccttaacggggacacacataagctgaccacagttggtcggaacaatcttaaacacgcgggaaaccaccgagaggagccacagtggtggcagcgcgggcgtggacacaacagacatgagagcagcagcccccaatatctaaaagacactgactgaggcacaacacgagattatcaccctccggacaccaggtgggaatacaca

SEQ ID NO: 418900 - DNA, 1378 bp, Homo Sapiens
ggttagcggcgaagtagcagtgatcgcgcatcgcccctcccacatggcggggctcactggggatgacctgagcgtcttgtacagatgccactttgtcaacggcacgtgtgcatagtaggttagggcatgaaggcctgtccacctgacgtatcatggagcctgagaaggctcctcgtcgatcagcaggctgcaatagagttccgggatgctcgaccaagtacgcattctacgaagagtgcgcatcgtacgtcttcagccagcgtctgctcacttgtctcgttacgtataacttaatgcagacgctttcaccgctcttctgctgggaatgcttagagggtagttccactactgacacttgccatctggggctctaggtcaccgagcattgccagtagagggatgctttgcttggcgcttgccgttatcagagaacgcgcttgcgcacggcaatggctttcttgaacaacatgacctttgactgcaggctaggcttgtggtgcgcgagccttgtccaggatggtccttgtgtgggacctctgggcgttgcgaggtgtgctgaggctaccgaaagcagcatctcttgctttccttgggtaattcgccggcgtttcgcgagagggcgggttcacctttgttcgccgacgaactcttgaatccaacctcgggcacttccccctcgggctttcgcgccatgtgtcacacgaaaggcatcccttgtacacctgtgttcactaggggattttccgcagagggtggccattttgcattgggggaggaagcattgtcccattgacgcaatatacgggcgcgttccaactaccatttcgcctgccgtatttggatcaccaggtttcgacgccgttgcaattataaaccccgaagagtattaccgtactccaaggtccacttaaggtgtaatctgaaacagcattagccatttcattcctctgggtagcaagggtcccctcttgggatacagtgtgttatgctgcacacagcatggtttgtgggagcgtataaaaatccagaactctgtagttacacataaacggcccgttgattcgttaacacaagaggccaagaaaccgatctaaagatcgccccgagacgaagtaaggcccgttgggggccagtcgaagaggagcgagcccgcgccaggggcggtgccttccgttggggcgacaattaccttctcttcattgagtgggaacaccctttggcgtggcgatcgggcatataaggcgggttactggagcgttggaaaatctttagacgaacgcgtttggaaacagttcagttaaggaacatacggcgattagcgtggacatcatgggttaacgtgatgtaaccccgagaatcttatcacagaggaagcacc

SEQ ID NO: 418901 - DNA, 1187 bp, Homo Sapiens
ggggtggcggtgtgacggtggcattggcctcgagatgtcctggcagatctggtctccgtcgcctgtggttcgatacgcgctttgacagatgaggccatcgtctggtaacacttattcggcactagaatagactaaagcagtcgcgggcacccgtggcatgcatggtgcatggtggtgcgcgaagcgcgctcggttatttgacgtcgactagtaactagaagcggacgagaaaggtctacctacgtactatgtgggtcgatgagtatcaggatcttcttgactgagaccctggtcatcgtttatgtggacggagccgaccatggtatgtgttgggaaaccagcaggacgtgtgtgagcagttgtgtggaaacatggtcatgctttgaatatactgagagttacatgatgtaaccatgggaagaataaagagacttttgcacaaacctggtaaccttaagaggaccgacatattcatagctgggaacgggaatttggggtgtatactgcctcattagagaggtcaaggaattttgtaaaacgttttttataatgcgctaggtgacacggacgtatgtgcaaggcgagtaaattcatgtatttgcgccctagaaataggggactccttctgcgagacaagttcaagattggcaacctaaaggtgcgccactaatacaggggttggagtgcgtgctttcgccaattgtaaggaatttggtagtgcgattgatagttatgaatttcggttgggagtggggaaactacaggggaatacccataagaaagaggcaatgtacgtggaggagtaccattgatggtgggcttgaaaacgttacggttcgcccaagaagcacagtccgtagatgtctgttcggaggggggcacaatctggtctaccgtgcagtacgttcactgaacattgtcagttccttccttcgaacgaattaaaatccgttccctgtgagttcctaggttgagcggcaccccaattgaagggccatgtgccttggagtgagcccggggaccataagcattcacacgccaacgcggttgccatttacatccattgagccttatcaggacaggatggcaattgggtgtaggaagcgagaacggccaccttgacgttagaccgtggttagacactgccaaacttgggacggccgtaggaagataggttcggttggaca

SEQ ID NO: 418902 - DNA, 1147 bp, Homo Sapiens
ggctctcagttctcggcgcactgcgggccagtgttatcttgtagcatagcaactacgtgattgcatctctactcgcggcagagttgccctgcttggttgagcaccttggcgcttcaggaagttttctttcgagaaatggtcgtgaactgttcacgataatcctgtgcaatgcttcaggttatgcgacggtgttgaagtcactctacaaccaccctaatgtgcatagtggtgtcttgtccaagatgccgtatacgtaagcgttgtgagtgcttcgacgcagggcatgcttctgaagcgttgtacgacatcaggtccactcagaggatcgcacatacgtggtgtggcactgacaggtctactcactatggtcagagcagtggttttgaccacaaacgcgactagtcacagttgccagcagatgaacaggggagtactcttgcctccttcggcacctacgcatgacggagaggcaccaataaaaagggaaagctttgcaatcgagcatctgagcagatcaggaccgttagtctgggtggcactctggacgaacggatgaagttgtacggggaccgtagtttgagacgaacaggcctgtctccaggtaaatgaccggctgttcttgaaggcgtaacaaggcttttcccactgaaacggggggctggggaaacccctgacacgaaggggaccttcatacgttcaagtatgcacgcgactccattcgattgaccttcacagggaacagcccacaacgccatggcacggcgttggcaggtgacaacctttacacgcacagtaggttcataaccacaggggaaacaattggttacacaaagaaacgtggatttcctgggcaatcagagggaccatctgagtttcgcgcgaacgacaattcttgggtggaaccttttcccgcgcgagcacggccttggaatgtggggtatggcccccattgggccacagagggggcggtaaggcacaacgcacgccaaggacaggcacattgggcgttcttgggtcgactttggacgttacttgaacagcgtggcatttggaccacaaaggaatggcatcggggaagttcttcactatgcaccggcttggacaggtgacacgcacgggagcacggaccacgtggattggtagccaa

SEQ ID NO: 418903 - DNA, 1115 bp, Homo Sapiens
  misc_feature (914)..(914): n is a, c, g, or t
aacccttcccttatgagcatgcctgtgtggggttgacaagtgagggtaataatgacttgtgggtttgatggtaaaatatgggcgctgttaatttgtcagtcacagtgtttaaactctgaccgcaggcttactgcggagagaagaatgtttccagtgttacttatactaacattagtccttctatagggtgatacgatgggcccaatgggcgttgtagaggatgttcagtatatcattgttgcggagacttctttaaggagctagtgcggtggtaagacgctttgacacgcctttctcatctaactgcgcgatcggctcgctattaaagcgcccctacaatatgggctgtccaaaacttttataaacctctcctacttaacaagaagggtattatgatccccaataattgtgtttcccagagtagagcacttggttacccctccatgtgaggaactcttacaagtagtttctcacaccctttctgacccacagcaggggacaatctctacagcagcgtgcgctcccgttgtgtgcgggccaccaaaaattttgtaaacacggctttttgacaacacctataaaagagaagtctcggataatctcctgttgtgtgtgaaccaaaaaccgccgaggggcatattatgcttccatcgccagcgagtcatcttcatggggcataaaggagggttatgtatgctccgcggccccctcgtctctataagcgctgatatatgtaagtaactcatcctgtgtcacccacgcgatgatattttttgatggagtgcgcaataacccaaactttaagacaaaagcaggctgcgctgtggtattgcacccatcctccataataataataaagccgcgcttgtctcctccaatgatgaaagggagactgacagcccactgtacccatnatataggaaggtggatttatcatcctgcggaggagaagtaccatcccatgtagtaagccacgctgttatagtgttggacatcacacctcctccccagtgtttgcaacgaacaaacgagacatcaatactctctctcacaatagagtgcgtcatataaagacgatgtaccacatatactaacatcgtcccaagtggaacaga

SEQ ID NO: 418904 - DNA, 1419 bp, Homo Sapiens
ggtggaggtgaagatgcactgtactggtactctacgcgcacgcccaatccggctgagattgcgattcacggtgcacactgacctcttgagacacatgtagaggaagcatcggcgagatcatccgattcagtggacacagaaccattcattgcgaccgagacgtgccgtggtcagtcgtgagatcatctcagagaacgtgccaggggtgtccgtgtggaaggaggtttcaagagctgaatggctatgtcgagaatctcgagcatgtgccacgtgacaggccagaggtcagctcgacggactgaagaatgcatacaagggtgtgactcccggaagatctcgtgagtatgggacgccgtgaatcccctgagaggaagggcactggacgctggcgtaggtactgtctacgtagtacgaggggggcacacatgcatatgtgacaggaaggtctagttccgtactacctgtataccacacagacatcacagcgcacactacgagagtattgacacttgacagactggcaagtcaaagctccacaagaaagtggagcccagtgcatctcacgtgatcggagagggactgggttgagcactgagagacggacaacgcacacacggtgtgctgggtggggtgaactcactgttaatgcccggaggggctgaacatgggtgcggagccagtcactgggagcggggctagccgaggcttcagggaagggcgcccaaacgttccccgccgtccatgaacaagttatccggcgtgtttcagcggcgcagttaaggttgcggaaatgttgtcgcggtcgcggatgtacacaatcctccccagggccctctaggtggcaccatagccagcgggacaacgggcttggggcagaaaccacaacgcatgccaaggggttcgcggcaacgtaacgcgcaaggacgagaagatgttaccacatgtagagaggtccccttatggggagacagaaaacttggtcgcactgggggttaggaatacacaaatcgaacacaaaataggtgcacagcgaaccggagggcaaattgcgcgaagggggaagccccattgtgttaagcccacagcgagaagctttttgcaagagtgggttccttacgcaggtttgacgaaggagttgccaaattccaattcagagtgccttagcggcagagaagaccggtgccacactttagagtaatccgagaaggacagagctagggtaagcatggaactcaggcggtgagctccgacacaaaggggcccaattggcctttggcccccggcagaaaagacactccccaaaaaggatagagaccatccgagctacaggagttcggggtacgcagttagaaaagcgtcgggccaattgcaattgccggtctggcaaagaatacccggatagtagccggaccacagttg

SEQ ID NO: 418905 - DNA, 1285 bp, Homo Sapiens
  misc_feature (150)..(150): n is a, c, g, or t
  misc_feature (1038)..(1038): n is a, c, g, or t
gggttgctcttgtggccgcagatgaacctcttgtgtgagcgtgtcccggtctcctgaactggtgtcttccgtggtaacggagtggcgcattgagtgcccagtgcgcgaatgaagggatgaccatgtggcgacgaggcctaacacagcttnagggggtcacactgctcttacacgtaccgtatgacttgtcccgcagaatgctgtgcatcttagtagctcatggtggtactcgtctgtttggatctctatgtgcctctaagtaacaaagatctaaggggtttaaagtccaggattaatgaggtgctaagctttctacctataggcttccacagaggtctcctcctgagagctctctcgtagcatatggtcgacgccgcgtgggagacgaccctatcgcggagcttagactggatcgctgcacgcgtcattaaactcaccaggtattaacgggaaggtaggacttgtacggggccccacggcgtggaatcgccaccctcgtacggtgctttttccattgctccccgcgttggcatcaaaccgtgtgccaggctgaaattgcgcctagggggcgctcttggagggtagttgacctgcgactttgaccttgggagcacagaatggcttgtaggaaaaggcttggggtggaacgcgacccaattaaagcgttagagttagccatacggaaggtgggcggcgacattttgtaagcacgtatgaatgagcgcagccaagagggaaaagactcgaaattaacttaagttttccaactttatgtcttgtcattgggccaattatattggcccaggtcaaggaacaaggggaagttccctgggtggcccccaggtgaaaaacggccaaaaaggacacccctttggtatggcatcggaaattaaccgaatggaccacgcacttggtttcttatgaaccgagaatgggcccccaaaaagaccaaaggtgccttttagccgagatttggtgcaaaaaattttcaagagaaaagagatagggattcctacaggggggccattggatcccaanttccccaaggaaggaaaaaccacttgggacgggcattaagaaggctttggcattaccggcatggccgtttcaaaggcataagttcccgcccaaaaggtgggaccaacaagcgaagttccgttggctttccggtatcccgttgggattttccacgggagcaacacttcttgtgcaacagcagacgagctggaaaacggacacgccgcacatccaggcaaaaacaaaactcccggttttagacgccata

SEQ ID NO: 418906 - DNA, 981 bp, Homo Sapiens
ggcacgctgtctgtggagggcaccctgctgcggccgcagggacatacgccgtgcgcacatggaccaaggggatctatcaccgcgcatgtgctcagatgtcctccacgggctccacgctggcgttggtccttgacaaatacatgcagagatcacgcgagctgatacatggggatgacacgcacagcagagcagcagtgacggatcggctcagacagtccacagtcacataggtcagccagagccacagggctctgcattccacacgtgacgggtccagccatggccattgagcgtgctcagtacgttcgttgcaggtaacgcctaccagggcatgcccatgagtagtccatcgagaggaccatccaggcattctcagaccattgaacgggacaggacaggaagctcagctgagacaggatgagcagacgtagaacccacgacacggttggcatggctacctctgaaaggaccgcatactcagtcctccatcccggactgtaggcagttgatgacggctgggagtcacgacaatgtccattcaggcagtgaccttccacagatacgtgcatccgggggacctcggccagaagccgcagcgttacaggcagagtccacagtagccggagtcatcccagcatcggggactgaacggctgaacgtggtgcagcgaggcggctcggccagcacaggagacgcggctactcattcgactgaaggagcgtcctagcctgttcgatagactggctgaccaggcacggcttgactgactgttctgactgaagcagcgcgggtaggaagacgacagactatccccctagagcactcagggaaataccaccaagcgggacacaggggaacccaagtcgctcctgagataccagcctagaagtcactcactcaacttgacgctaggcactcgcagtcccaaggacctcgcccggggtctagccctatgcgaccaaggtccaccagccaagaacc

SEQ ID NO: 418907 - DNA, 723 bp, Homo Sapiens
gcagtgcactgtgcccctattcgagttacgtgctgactttgcagacataagcacacagaccagagagagactaccagaccggtatgcgtcagcataacgtcaacgctatgacggacacccttgtcgacccaatctcagtccgagctcagtctaacattccctgcctgtgccgaccacatggccccacgccggtgacacatgagatagcatccacgctgacatttggcataatcgctgtggaaccgttgtgttgagtgcaattggagaccaagccaaacatatacctagagccaaaaggttagcaagtcaccaaaccaacatggttgggaaattggttcaggacagaaagcgtatcttcacaggaaagtttacgaatacactgacataccgatcgtggccacgaagtgccaattggacaccaaagtggaacgcacacttacgaccaaaggcaaaggggaaaacgtagcccccagggtagaaccacaccaagaagaaataacaaatccggacacacgatgaggaccaacatgaaacagccaatagggaacacttggaccattagggcactatacccaaaaagaaggtcacagaacgaaacccatccaaaccgcctatggcaatttggcacatgacagggacacaaatgtgggaacaaagcacatttcccacaacggaaccttaggcgatggagggaccaccccagaacaccaccccttaggcaaa

SEQ ID NO: 418908 - DNA, 1021 bp, Homo Sapiens
ggcgaagagaagggacacatatctgcatgaggcgatcatctgggacatcgtagatgctgggcacgtactagacagataatgaccatctgatctataagatgcgagtgagcattgagaaggatcaaccaatcagactacattggatgcaaggcaggctgtcatgccgaatgggcgcaagagggtctccgttccccgctatgacctgtgggtcatgatgaatacacactgagggagagctgaggcgctaaaccgtggatatacacctactagtatactcatccgtgatggacccagttctggcgacgctagacaaagatacgtacgttgcactaatgcgatgagactgcccccctagcgagcggccagtaggcaatattaaactacactacggattcgggtgccacccccgtgtagaaccttaagaggacgacaaagaaggaggaacacacagcgaaacacacattcgaaaaacttccataagtggatcccgacacgaagattagctaccgagtcaatcggtgacccaacgcgtggctgccagttgacagatcgcctaaccgcaggaatgatacttcgtgcgaacgttgtagagtcccccgatggaatgatagcgcaatggacctcccttggcaggcgattccttgcccccccgttggaacacgaattcgtcaccctgtgaagggcagacagtagactgtccccaggcgccaacagacagtaccaaactgcaaatcgtttcgcaacacacgggatggaagcactccgggactaaaggaccacaagcacctggtggtgtgaatacaatcacaacggagttgccccctctgaaagggccgtccttgtgcttccttggcatggccctggggcccagtgacaatggacacggaacagcgcacggggacagttttacggcagcaatggacacacactttgcctaaagcatgcaggcgccccagctctccactcggtaaacgcacaaccgtgctctggcagaaggacatctgggggaccgcgttcacca

SEQ ID NO: 418909 - DNA, 1554 bp, Homo Sapiens
gatccgtgtgtatgagggcgctctccccgtggcgaagttaccatgttatctgccacaatcagtacgggagcccgactggctatccatccgtgtcccgtacgggctaccgcagcgatgctctacgccgccatagatcagcacactcgttaggagcattccatgtgccattgctgttcccacaggaccaaggacacataccacgcttacgaatcgatcgtctcgcgtatcatacgtgccgtcaggatcagcagaacgcacgtactgccccccatgggaggtcacgagaccaaggagcgtctggactatggacctgcgacgaggggccctgtgagatgcacctccctggcaaaacgctgacgagcttgccacaacggaagcctgacaaaggagcgctaatgctcgcgctgccgagccattgtgttagtccccaaaaaccctgtcccaccgacccaccatagccggtcctgacgagtaaaaatggatccaagtcgtaaggcaaccccatggagggcagaaaccagaaagccctaggcacgagcccacactaggatacccagcgatgaaaccagcaccgctccacaggccattgggtccagacgcccccgccgcaacgccacatcctcaggccggcagcgcaacccccacgcaccggacaccagacaccaccgagcaccccatggacacaacgcccgtgaccgcccgcccaaagaggttctcaccgatggacaccacccacaggcaggctgcagacagacgacactccgcgcatccaccacgagaccaacagcacacgacgaggacagcaggccgggacaacaagacagcattcccgcaagcacggccatcacccaacggcctcgccccgacattccctcataccacgagccgccaacggtccacgcagacagcgaagcacagagtcctcgggggccacaaatcgcccgaggcaagacaaacacgatcatgcacttgggcacaccaccgaacatgaaccaattaacacatcgcgcgtacccttccccagaacgtacaacgtggcatcactctaccaggaacatgtcgagcaatagcaccacaaacaggacccaataaggacagcactcaccatcgcaaaagacacccgccagcacatatcaaacactcgtgaacgcactctctcaatcacgtcgaacagctcagcaatagacacgcattgcacaacaagagtatacgccgtcctcgccggagacgaaaactacagtcgtacacggcgacacaccctactgcgaacaccacaacaacaaacgcccatcgacgagacccgcgcagcacccccacgggctcaacgtacacctagctagtggccccgctgtcacgcggacacgagagccacataagcagtacacgcccattacatgctcggtctacacagcccaaccacctacgctacacggcgttccgcacacgcaagtgcaaacgccagcctccacgaccgacgcgccaccacggcaagtcacacacaaacaccgaaggctaccaccctccaccagaacagacactcgcagcaagcgccct

SEQ ID NO: 418910 - DNA, 599 bp, Homo Sapiens
cgacgcgccgacgagagcagcgactctgcgagtatgtggagcggtctatcctttgtcttctcgtccattccatactctttctgatatatgttgtgttcttcttcttctctgtgctctcattttactccaactgattcctaatattattcgcttgatctgctatctgtgctgctgattcccgtctctcttgccggccgctgcaagtccacgtcgtagagtcccagctggtgcgtgctggagcaggaggtgcttgctggtgctgctgctcctacgtcttagtatatttgcttcttgctgtgatgttagtcctcgctgccgcaggtagtcgatgctgttgtgtgctgtgtcatctctgcatggtctgttgccatcgtcgacgtctgctgtgctcgttgcgcgcatgttgttggttcgctagctacgtcgtttcggtgcgttccatcgcacttccccccttttgatcactagcggttcgagcgggcattttgctttattgttttcttcctcctatcctagccgtctaatgcgtcgtcttgccctcccccatactacccaggcagggtagcagtagtaacgcagcttttttctattattgctac

SEQ ID NO: 418911 - DNA, 999 bp, Homo Sapiens
ggagcctgagggccagtaggcagcagtggcgcgccaggcggaaatggatggtcttgaggccccacttcctacaacggacacttgtcaggcgtgcgctgtgtgtatgtgtgtatcaaggcatgcctggtccggctaaggagtccaggatgactttattgggcctctgtgtaaagccaatggtggcgccagcattcggtgctccggtgcctgctgcgtctggtggttcacgatccaggccacactctgtgcagctttgcgcacctacgggggctcgcgtaccgatactgaagaggtgtgctacgctgaggctgcgggacttacaaagctttgtgcagcgaagcttccacgtcggtgtgtgcctgtgctcgttgcagccaactgacttgccgtgtgccctgggactgctacttcagagcattctacgtggttggcgactacccgctggaccgtgggcttgtcgacacccaatgtgtacccacagtgggtgttccccttgggcaattccaacctgtctccacaagtgttggaacaggatttgacctggttgtgccaatacccttcaatcacttcattcgctcccctctggtgatacaggcctcttccggtgctcccctgaactataacgcggggcactggactcgcatcttcgtggttggacaacgatacacctttgtcatatagcttgggccacatccacaatgggatggagcacggtgatcctggttgtcatttgcgcctggatcctggatgcccggttgcttacttactccactgggcacgcagctggctgccccagtccatgacgatcgttgcacggccttgacggcccgcgaatgtcctagagcgccctgtcggatcagtcgccttcccgggcattcgtgcacaggtgccgtggagagccgcagcgggtcctccacgtggcctaacggtggccgcaacgagggatacactacagtgtaacaggccctggcattcaacactgcgcattcggtagacaga

SEQ ID NO: 418912 - DNA, 1430 bp, Homo Sapiens
  misc_feature (1164)..(1164): n is a, c, g, or t
  misc_feature (1211)..(1211): n is a, c, g, or t
ggagagatagaactagtctcgcgcttcgtcccgtggcctctgatacccacagtctcctggtgtcccgagtgaggtatgtgaccgggaagaacctgagattctacggagacaccatccttgtatcctctcgtgttacagaggatctttctgatggctcgtgaacgctctacatgtatgatggtgaatacgcaaggtgaaagcacgaacagagccacgagaatacattgatcttagagcttgtgtagaacgtcatgacaaagtgcgggtatatgcacacaatggtgagtgtctggaggtatggaactccacaagcgtaccaggaagcactgcatgtgatctcgcgacgctcgactggacgggacgcctcgcgcaaaaagagggtgacggtcgcgggaaatattacccgcgcgcgaatgtgcatgtttcacaacgaatgcgcaccgtgggttcgtcggttcctgaagtagtgcataacccgttttatacaacttgatggggtcgtgaacacgttcctcacacaagtgtgtgagactgcgacagtacggtgtgccagaagtgagtttggtggatataatctggcatctcgaagtgtgtgactctagtgagagacacgcgcgatttctctctacaggcgcgttccatatggtgcatgtcaagtacgtttcacactgtgctgtgagccttccaggtgcagtgcgtgtcttgggttggcgctcttcgttatgcccaaaaagatgacctttgtgtttgcggctttggttgtttcgaggattgccctgcctacaaacttatctctctagcgaaaggagggccacgatgatcacagaggaggagctcacttttacggaacgcactatgggcggctctccgggcggatgaaccagcgaaggtgccgtacgcacaaaaagaaaacgagttgtggagcttccaaacacaattctggccagatggaaaaggggggtatattacacgaggggagggaagcaatttgtgttgggacgtaataggaggacggcgcgttggaacaacgtgggtatgtgataacaggaggacaatgttaagagggcaagcatcatgttaggtcgaatttgcaggagcgctatgctgagagaaaactttggtcgcgatggtgaaccgcccaacaagcggcggtctcccggaggncgctctatttattgggaacggttgaggcagcaacagacaaaacggcnttctcggaggcgagcgtggcggggtagtcctctacccccagttcaaaggaggaacctcggagtcgtagtaaatttggcccgccctctttccttctctcccaacgggcgggaggccaatgtgacagcggcggagaagaccaccacacactgtgtgtttgtgactaacattactttcacacattggtggagcggaagcgccccattggattacgccgtaag

SEQ ID NO: 418913 - DNA, 956 bp, Homo Sapiens
  misc_feature (382)..(382): n is a, c, g, or t
gtgacaggcgcccttcagtgaagaggtatgtgtgcggcgttgtcctaccatgagtgaccgcagttctttgtcggtgctctactggacagctcgatcgttcgaatgtggaacgtactccaatcccatggtgcagtagacccatcataacagtctgactatgcaaatgcttctccgggaagtaccaaagaccatacccactgtgtctcatgaggattggtgattcgcgtcaatctgcgagatatgtgtctaacgagcacaccagtggtccatgggatccgtagtcagggcacgctttaatagactcgatgttactgcacttacatgaatttgactgctgatgaatactacttaggtatgagacaccgacccaagacagtgtgtnccattcgcgcaacaggggctatgcaggtcagcagtcgtaggacttgagtgactggagttcgttggatttgggaagagaaacggccttgtgggaagatagctcctctcgtctgaatagggagaaagcgcacatatgggggaagggccgatagttgattaagatcatggttacaccatagttctggacgggacccatccacaggatcgcccgtcgttataatctgatcctcaactagaactccacgtgctgcaagatggcaagcgttccaaggaagagatggcaagattgtttagttcgcgagacgttgagcgattcaaggacgcgaacgagcaggttacctttaagcgtgtacgtactccgtagacagaagagcgctctggacgaagcttggagctccagaccggcttttcccgtggcgccccccacagggaaacagagtttatggagctaaaagggattttatctccaaacaggttaagggggcaagtgggtttccgacagtatctagagagaccccgtccttgtaacggtggccggcttgcccatggtggatggtttcatacgtcttacgtaa

SEQ ID NO: 418914 - DNA, 1107 bp, Homo Sapiens
  misc_feature (531)..(532): n is a, c, g, or t
  misc_feature (650)..(650): n is a, c, g, or t
  misc_feature (873)..(873): n is a, c, g, or t
caaagggagcaaaggcagctgccttaatggggggccaggggcgggctgattctcagtcaagggccacacttttgatcttgaagtcaccgtcagcttgccagtgtagttgatggcctccaggtttgaggcggtgggggaactgtgaatttcgatatccatcgtggcagcatgtaacggtcaggtgtggccgtggctcgaaggtgatgcacacctcttgacaacattctccaggcgtggaagggaaaaaacagcctcccgtgtgctctcggttcccccgaggccccggccgtcctttgcgtggtgtgacacacgaagtggtgttgggcagttcgaccgtgtgggcgtttgaaagcaaggggtttaaagtgtgcaggccacaggtgtgtggtgagcggtgtctctatgtgtgccccagagggttccaggccacagaaaaaggctactcttatagggcgtttcagagggagacgccaacactctggcgcctttcgggcaactgctcgaaagagaggcgactactcgctctcgagnnggtgtgtgaggaaatttcgaggggtgtgagcgtgagggcgacaacccgaagacacccaaacaagaagcccgaggtgaagtgtgagaggtctccccgagagcagagaggaaagtgtgtnctcccgcgagtgaaagaggaggcgccaaaccccgagagcgtggttacagagaaaagagggggggctcctaaacagaagcggaacactgggccccggaactgtgggtgccctgttgaacaagagcccaatggtgtgttccatctaatgaagtgataaaaacttcccgtctgtgtgaaaaacaagagaaggtgttgctcccacccaggcggcaatattaaatttntggtggaggggcggagaaatgttattaaccccttatcaaaagaaaacaccaccagtaaacatgttgccgaagatgtgtgggtggcgccgcggctgtgggggaaaaacaggatgatgaggccgcctccttgttgtgggagccaccactattcaccgaatcgttggtcgccaccatcttataaacaaagggggggtagtgcgtcttggggtcggcccgccggaagagacaatcttc

SEQ ID NO: 418915 - DNA, 767 bp, Homo Sapiens
gcgcattggctttctcgtgactcaggctggtggccgggggccagattgtctcggcacatctggattgcctggaagacgactttctcctattgctctgttagaccatcaggtcaggcagtagctagtgactgtatccgagagccaaagaagactctcgacgggtactgtcctctcgctcggattcgtgcggcgacgacacggaaggaccatccaggggtcagttggagtgagctaggggctagttgtcattcagcctaaggcaggttccagatcgctcgagtgcgcaaggaggagctggagcatcattgctatcggcgagtacataacctgtacacaggaagcccactctagcatgcgcagagtgccgtgtccgaccgcgactttgcgagtactacacagacaagtgcaggcacatgcatgcctggggccgggcaaagaaggcgatcgcatacgcaaaagcgacaaggccgccagacagaaccacgctagtgggcgccccgcaagggctagggtgaaaagaccaggcggccgaaccagagggaagtaggcgtggggaacgcccgcaggggtgacacagacacacaccggtgtaaacaagtcgccacgaaccagtatgccccgaaaaagagcgaaacggaaagggaaagagtgaagggtaggatcgccattcccaatagaactatacaggtgatacataggaggggacaggcaaatatacgcagaacctgaacacacctccggaggggacacatgcgaaacacaggatg

SEQ ID NO: 418916 - DNA, 1025 bp, Homo Sapiens
ggatggatagagtatggtgtccacggcacttagagatacctatactcccagctggatgagcatgagagacatagaggtgcttgctgcctggctgagcctcacctcaatggactatgcgagataccgaccacaggccataatggcgtgagatgacagagtgtggaaacctagtggagccatggccactgactagtcaggctgagtagcgcagtggcgtcatgaccactgagagactgtattggagccaggaccgggctactaggcatcctatctttcatcgagaacaaggcgctccccgacatggaggtatgacttaccttacctacgcaaaccgttgccgcacgcaccacgggctatcagcgagatcgaggtcctgggttcctagggggctgacttgggcaaccgtagcggtggcctttagtggagttaccaagcgcaacgtgcttaaccagctcaatcgacctagcccggagggaccgtgcatatctgcaaagcttgcaggatcgtggcaagtattggggcagctctaagcgcatggcttctaatccaccggctgaatgagaggcagggcaagcccatgggaagcctcgacgtgactaccctgatcggataagcgcggcatggaaatgggaaacccacagagactccccactaggagaagctccagttgcctaacaccctgctagatgctaaagccacgaagagaggcgattataggcaaccccagagccacagccccgtgagagtattactgggcaacaggaaaggtcatagctgatcgaaagtcttagtccaccgcgagggtttgaccccgtggggagaaagcccgtaagcctccgcgaaaatgcccatgaagggcaaggttacaaacctggggggaaacccttcgcaaattgcccttaacccctttcgctttaaccatgcccatgaatttgcccgttctgttaccatcatgggcgccgtaaccctcaagatttgaagttggatcttctgagacagcacacgaagtttgtgaagcgttcgta

SEQ ID NO: 418917 - DNA, 1530 bp, Homo Sapiens
  misc_feature (65)..(73): n is a, c, g, or t
  misc_feature (143)..(449): n is a, c, g, or t
  misc_feature (514)..(576): n is a, c, g, or t
  misc_feature (920)..(936): n is a, c, g, or t
  misc_feature (1070)..(1079): n is a, c, g, or t
  misc_feature (1231)..(1241): n is a, c, g, or t
atcgatatttctctccctatcgtaatcacgaatcacctccaactttccttgcaccctatatgatnnnnnnnnnactgcttcttctctcacatttcttctactatcagcccccttcttctcccttccatttgccctcgccttannnnnnnnnnnnnnnnnnnnnnnnnnnnnnnnnnnnnnnnnnnnnnnnnnnnnnnnnnnnnnnnnnnnnnnnnnnnnnnnnnnnnnnnnnnnnnnnnnnnnnnnnnnnnnnnnnnnnnnnnnnnnnnnnnnnnnnnnnnnnnnnnnnnnnnnnnnnnnnnnnnnnnnnnnnnnnnnnnnnnnnnnnnnnnnnnnnnnnnnnnnnnnnnnnnnnnnnnnnnnnnnnnnnnnnnnnnnnnnnnnnnnnnnnnnnnnnnnnnnnnnnnnnnnnnnnnnnnnnnnnnnnnnnnnnnnnnnnnnnnnnnnnncacctctctttgttttccttctcctaaccttttccgtttttttctccacatctccagtgttcccnnnnnnnnnnnnnnnnnnnnnnnnnnnnnnnnnnnnnnnnnnnnnnnnnnnnnnnnnnnnnnntacccatccttacctatcgttgaatatcccgcgcacattactcgtcttccgtttccaccccctctatattatcaccatttttctcactctctattatccacccctctacacaccgtatttatttctacttccaccataattaatcccttccactcacattttattatttaccgctttatatttccaatactaataccagattaggagatttattatttccgctctatttttccctccacccaccattgtgacctcctatttgttcattcatccccaccctttctcttatccccctcacctttattttctctcccccccgccccatttctacacaatacccatannnnnnnnnnnnnnnnngactctcccacttatttatttctccccccactgtcactttgtgatatcacactttctcagctctcaccccttaacatctattcctttcgtacaccgctccgcccgccttttttatctccgatcccattgtcatnnnnnnnnnnaacgatgtgttaacgccccgccaaactcttatactaaaagatatctttattctctcctcagtgcttcccgcgctaccctcgctgatatctctttgatttctgccccctctctattttttccgctcccccccgccctcttctcatattctctnnnnnnnnnnnttctactctatccacccaccctcccttcattacacgcacactttcccatctacccacgctttatgcccatgtccccctacacaccgcatacacgcaccccttgatattatcttttacggccccgctacactcacacagcctctacacgttgcgcgagcccggtatccgccccatagtctggccccacacccttgtctgtgttctctgacgtcgccgatgttctttactaatattttgcccccaccgctcctgtatttccccgccttttacccaccccccccttctctgt

SEQ ID NO: 418918 - DNA, 1676 bp, Homo Sapiens
  misc_feature (61)..(255): n is a, c, g, or t
  misc_feature (341)..(351): n is a, c, g, or t
  misc_feature (374)..(396): n is a, c, g, or t
  misc_feature (577)..(631): n is a, c, g, or t
  misc_feature (1253)..(1253): n is a, c, g, or t
  misc_feature (1455)..(1455): n is a, c, g, or t
  misc_feature (1500)..(1500): n is a, c, g, or t
agaagagaggcctcctccatcacggtcgatccattttaggtacgagggctgggtggcgatnnnnnnnnnnnnnnnnnnnnnnnnnnnnnnnnnnnnnnnnnnnnnnnnnnnnnnnnnnnnnnnnnnnnnnnnnnnnnnnnnnnnnnnnnnnnnnnnnnnnnnnnnnnnnnnnnnnnnnnnnnnnnnnnnnnnnnnnnnnnnnnnnnnnnnnnnnnnnnnnnnnnnnnnnnnnnnnnnnnnnnnnnnnnnnnnnnnaaggtttcccggcaaatggacctgccgcaacagcatcccctccctggactggacccaaccacccacggcacaacccccgaagcccnnnnnnnnnnncggcccaggacgaaccaccaagnnnnnnnnnnnnnnnnnnnnnnnataacagggacagcggggaagaggccaaccccaaacgcacagacaactagctcccgccccccccgcgccacggacgcagacctaaaacccagtatagaaccccaaccactcagcccactttccgccttggtgacgccggcccccgcgcgggagcccgcggcagccgttcgcccgataaaannnnnnnnnnnnnnnnnnnnnnnnnnnnnnnnnnnnnnnnnnnnnnnnnnnnnnntagcctccgcgtgccatctattcaactctagagctgctgacccgacggaagtggacaccaataccgcgcgacagagaatggtcacaaccgaacgtaccgaaagcggacccaaaatgaggtaattgagagaaggaactcacgccaccaaacctgccgtcgtgagacgtccgagcctccctgcgtcgccacccaacacctccatacccggacaaccaccaacagctcgaagtacgccataaaagccaccaacacaattaaaaaaatgacaagagaagggagtagtccgcgcatacaaaaacaccagaaccggtgaccagcatgtagcgcaataccgctaactaacggcacgcgcctccgaggtggaattaggccgcgatgcatgcggcacgactcggcgtgagcgcggagcggacgcctcacgactcgccgcacccagaggtcagtaccaggtgaagacagaacccgcgagaagacgcgccgcaggaccactccagcagacgcatacctcaccgctcgccgccgcggacggcgagcgccggccccccggggacccgtcccacagagcaaacagaaaatatcaacgaactaacccacgctggaacagcgggccacaacttatctnccaaaccaacaccatcgctcatacctatcttgtgtcactcgaacggtagtcgtaccgaggggttgtttgagaggcaagcctcctccggcacccaccgcaccccccggacttttcaccgcacaaataaaggggtggctacaaagacgaaacgcgtacacctacgtgcgtccgtacccgcgccctttacgacggccccacggcnttacgggcactacttccggttggtgtgggctgtacctaaacaggncctgggcgaaggaacctgatctatcgacataggcaatcctccgggaagccttacgcgaggtggcggaaacaatatttttcccctcatgaactccccttcgcaaatttcccacatgattatggggcgggccgaattcaaaagaagataagtggagggccccccagttcgacgcataa

SEQ ID NO: 418919 - DNA, 1481 bp, Homo Sapiens
  misc_feature (19)..(19): n is a, c, g, or t
  misc_feature (102)..(156): n is a, c, g, or t
  misc_feature (351)..(766): n is a, c, g, or t
  misc_feature (769)..(938): n is a, c, g, or t
  misc_feature (1143)..(1143): n is a, c, g, or t
  misc_feature (1151)..(1241): n is a, c, g, or t
  misc_feature (1251)..(1251): n is a, c, g, or t
  misc_feature (1281)..(1320): n is a, c, g, or t
  misc_feature (1374)..(1374): n is a, c, g, or t
ggcctgggtggcgatccgngacgaggccgggagggcgggggtagcccgcggctcgcgcccgccccgccccgccccgcgtctgcctcagaggggcccgagccnnnnnnnnnnnnnnnnnnnnnnnnnnnnnnnnnnnnnnnnnnnnnnnnnnnnnnnagccgagccgggccggagcggcgggcgcggtcttttctgtatggtaccactagtcgctgctgcaggagcggtcgcccgcctataatctggatgtcggttcattgctactactcgtgtgtctcgcattgttactgtgtcttccctgtatgtgcttctttacttcgttctacccctacttcattatttgtatattcnnnnnnnnnnnnnnnnnnnnnnnnnnnnnnnnnnnnnnnnnnnnnnnnnnnnnnnnnnnnnnnnnnnnnnnnnnnnnnnnnnnnnnnnnnnnnnnnnnnnnnnnnnnnnnnnnnnnnnnnnnnnnnnnnnnnnnnnnnnnnnnnnnnnnnnnnnnnnnnnnnnnnnnnnnnnnnnnnnnnnnnnnnnnnnnnnnnnnnnnnnnnnnnnnnnnnnnnnnnnnnnnnnnnnnnnnnnnnnnnnnnnnnnnnnnnnnnnnnnnnnnnnnnnnnnnnnnnnnnnnnnnnnnnnnnnnnnnnnnnnnnnnnnnnnnnnnnnnnnnnnnnnnnnnnnnnnnnnnnnnnnnnnnnnnnnnnnnnnnnnnnnnnnnnnnnnnnnnnnnnnnnnnnnnnnnnnnnnnnnnnnnnnnnnnnnnnnnatnnnnnnnnnnnnnnnnnnnnnnnnnnnnnnnnnnnnnnnnnnnnnnnnnnnnnnnnnnnnnnnnnnnnnnnnnnnnnnnnnnnnnnnnnnnnnnnnnnnnnnnnnnnnnnnnnnnnnnnnnnnnnnnnnnnnnnnnnnnnnnnnnnnnnnnnnnnnnnnnnnnnnnnnnngtttgaattctcttattctatatataattatatcttttactcaatttatagattacttgactcatctcattatatcttccttttattttattagatgtacgaaatatttcatctattacattatctctctcttatttgaccactactatctatgttatcttctttctttgatattatctaatgttcttttcatattatattattntctctaannnnnnnnnnnnnnnnnnnnnnnnnnnnnnnnnnnnnnnnnnnnnnnnnnnnnnnnnnnnnnnnnnnnnnnnnnnnnnnnnnnnnnnnnnnatcgtctttntcctttctctatttttgcttctgtttctannnnnnnnnnnnnnnnnnnnnnnnnnnnnnnnnnnnnnnnatgtcctttatccatctaaatcttgtcatagatattttcttttctttctaaaantttatagataattttttatatctttatatattattaatatactatcatcacgtttattttgtatctctctatttgtgtacgtacttacacgaggatatacttaatat

SEQ ID NO: 418920 - DNA, 490 bp, Homo Sapiens
  misc_feature (406)..(406): n is a, c, g, or t
cccttgttgcccttttgcctcgcttggaggtgccccctctcgtggcctcctggggcccgcgccttccggcgcttccgcctggggggcggtcgttggccttgggcgtcgcgcgtttcggtgtccgcgcaccggcgcgtgcgccgccgcttgtcgggcgttgtgcggcgggttctctcacctttgtgtaagtacccaccaaagcaaaagtcatttcgtccagctttgtatctgcgacagtcacccacaacaataccgagcgagagacacacaacacaacactgtccgggggacagccatcacaaatgtagagccgtggtgtccatgacaatcagggcgtacctgaagacttggccgcccgcgccacacccaacgtaccacgctaacataggacttcgacacaacgagngacggggcacaaaccgcctgtggacacaccgggcgagacgacagctcggaaccccgctcgcgacactcttcgagactacaacct

SEQ ID NO: 418921 - DNA, 1004 bp, Homo Sapiens
  misc_feature (513)..(574): n is a, c, g, or t
  misc_feature (631)..(648): n is a, c, g, or t
  misc_feature (655)..(672): n is a, c, g, or t
tagcgaggcctgggtggcgttttcggcacgaggccctatctccccctcctcctaccttttctgcttttgtgattccattgttcctatctcattgaggctttcccaggcattcgaatttagtaggtcatttctaatctctgggccttgtcttttctctctccgttcccctccttccctaccacatattttttgtttattctgaggtggtttgtttctgaaagttaatctaggtcaccttctatatcctgtgctttctagttggctttagacatcttgttctagcaacaatgatggtagcagctctctccctgaccttgccccatgtgctctccttctgtcaaggccatttgtgtgtgtactgcggcaggtgtgtgtgtggggggatgcgcccagactgttctcacaatgtcctcagtttttcaggttgtctgacagctttatgtacagcgtatttttagaaaaacttaaatatacttctttatttaaggttttattctgatgagcaagtttgtnnnnnnnnnnnnnnnnnnnnnnnnnnnnnnnnnnnnnnnnnnnnnnnnnnnnnnnnnnnnnncagtttttgtactatcatttaaaataaaaatgtttctcaataaaatgtcaaagccgnnnnnnnnnnnnnnnnnnctcgagnnnnnnnnnnnnnnnnnnatgcaactcatataatgaacctgtattgattgccaccagggggtgaaggtgaaacacggtccatctgtgaagtgcttggggccgaaaaggggatcttccaggggggatctgtgtccacacggggggcgcctcctaaggcctgaaccggggtctgggcaaccctcagtttctttggtggcgaaaggaacctgcttcgtgggggtggaacccccccctttggccatccgtgcacaatcccatgtacctttggggccggaattttggccgggcttggaaggaagtccacattcccctgggaatgaattgcccaatccacaagggagaaactgggg

SEQ ID NO: 418922 - DNA, 365 bp, Homo Sapiens
  misc_feature (210)..(210): n is a, c, g, or t
  misc_feature (263)..(263): n is a, c, g, or t
cttaatttcccacatagtaacgagactccctcccccatgcaaattccacaccccccacacccatccccgttatttgtggggactctccaattcccccctcgctccatggacgagtacaaccgcacgtcccgccctctatcctatatagctttgcatcgccgccagacgtagtgcacgtccccaacgccgcctagaacttcgcagatgtangctgggctcgatcgcccacctgtccgaatagataagtgtgatcgatgtagctngtactactcgactgaatatctgtctcctcgcgatagagatattcagacgcatctaacacatacaaacgtttgacacatctgtggtgccctaactactccgcc

SEQ ID NO: 418923 - DNA, 335 bp, Homo Sapiens
  misc_feature (57)..(97): n is a, c, g, or t
ccgcttcttccccgtgccccccctttccggggctgggtcggtattccgccggttcgnnnnnnnnnnnnnnnnnnnnnnnnnnnnnnnnnnnnnnnnngtggggcaagggttcacctttgcgccccccgggtgttttgccaggagaaaataaacggccgcggtccctcttcctccccctttgctaggcgatggcaaaggcggaccccctgatactatcccccgccccgtgcttaacaccggggcgaccccgccgaagcgtgcgaccccaccgtgaaggagaatctctcaccagtcaatcggggcgaaacagtaacgcgaattgttgacttaccccc

SEQ ID NO: 418924 - DNA, 336 bp, Homo Sapiens
cggatggtaaggcgggcgcctccccctctcttatcaagtccattcccgcgcctttcgcacccaccttcttatcccgcccctatttgtcccggactattgtgtccgctcactccaatggtggaccccattccccctattctctgccccgcggtttctccccccatcgtccccttactcacgccgtccagactttatacccccggcgctcgccttacttctaccgccctgcgcggtcagctcgctccgcgacccgcgatcgctgcgcacatatgccctcatttatcgcaagaaggcccccatcacagttccccccccgtatacttttactactctcac

SEQ ID NO: 418925 - DNA, 1132 bp, Homo Sapiens
gagcgaggcctgggtggcgaattcggacgaggccgggaaatggggtgactgatggacggtggaggcagccccttaggcagtttaggcctgccctgtgaagtatccctgtgggcggctctggccagcttgagtgacgcagatcctgagagcgctcctggttcaccctttctccccaggtgatcgggtatggatcacggattggaacatagcctccttgcagccacggtggagaggaccccagaccatcgtcttgaccactcccacagccataaaggtagaaggaatcccagcctggattcaccacagccatgtaaaacctaaagcatctgagacctgggaggtgagaccaagcttggacaacccatgcaagatgactttgaagaagatgacaagccctgctccagtcacacctggaagctgactggtccgtgcatggctgaagcatgaggaaactcatcatgggactcattttcctaaaattttggacttgtacagtaaggacttcaactgaccttcctcagactgaggtagggcaaaaagttaaaacagactttctgtttaaaagggacttgtgtgtataatgctacccagtacaagatatgcagcccaagaagtgaccagcttgatgtgtgctataacccattggaactagtttatccctgttggaaaacagagtatgtaactctaggaattgatggaactggactggaagacctgggtagtgaagatgacagtgagaactcccactagtgagtgagattctcaaaggggggaatgagaagtgagggcatttctcttactgggctctgtctctgaagaggaggaaggaaagtaaaaggtgaaaaaccacaggaatgaagtcatttggcaagaccagcccggtgccactgatgaccaggcctgaaggttaaaagatccaccccccaattttaacacatgtgctctcaaaccatcatgacccttttcatggggaccccccttaagagttgaaagcctttaaaaagggccaggaactcttgtcttcaggggagctcggttctttgagaaatgaatctggcccaagctcccaactggttgaaaatggaaatttgcccaaacttcctgggcgaattaaagcccaaccctttccttt

SEQ ID NO: 418926 - DNA, 1060 bp, Homo Sapiens
gtagcgaggcctgggtggcgaattcgggacgaggggaaacgctgtcaagatgtcaaaaatacgcggaaagggaaaaaaggaattgctacggaaagagaggtgggagaggaacccagtcaatttcacctgctccccttcctccaggaagaatcggaaccgaaagcttaataagtgtggttgttttgatattcgaatcatgagacccaaggcatcgtaggggacctcgcctgcatccattcgcctatccatcctacagcagcgactgcacccctgattgtgatgacgaatgcacccccatccttgggctccgtgcccactgctgggctgggctgctccctcaggtgcggcagccagaggaggtgtggactcccatcccacgcgtttatcctcctgcagcctctcgagcttggtggcatagccgtccttccagtccccaagccagatgtccttgatgccccttctcccagccccatccccatcgccagttgtatcagttttctattgctactgtaacaactcactacaaattgagtggcttaaaacaacacacatctactctcttacagttctataggtcagaaatctgacatggtctcagagggctaaattcaaggtgtctgcaggacagtgttcctgctggaggctcttgagggagaatcggtttccttgccttttccaagtatagaggccgcccacattggcccccttccgtcttcaaagccagcaatagctccgagtctttcctccctagcatcgctgtgacgctgactctcctgcctcccctcttcacatttaagaaccttgtgattacattggtcctcccagataatccagaataatctccccatcgcaaaatcagctgattagcaaccctcaattccaccctgcaactttaattttctccccctgtcatgaattataagaaagggagatcccatatggtttccggggaatttggggatggcagacattttttgggaggccaatgggttctggccgaaccaaggcccaatccttggaacaggtttttaaccctcctggggaaattctcctgggcagt

SEQ ID NO: 418927 - DNA, 1107 bp, Homo Sapiens
  misc_feature (166)..(281): n is a, c, g, or t
ggtagcgaggcctgggtggcgaatttggcacgaggatcttcctctgtcacccaggctggagtgcagtggtatgtcagctcactgcaacctctgcctcccgggctcaaaagatcttcccaccttggccctccctgcacagtagttgggactacaggcctgcatcacnnnnnnnnnnnnnnnnnnnnnnnnnnnnnnnnnnnnnnnnnnnnnnnnnnnnnnnnnnnnnnnnnnnnnnnnnnnnnnnnnnnnnnnnnnnnnnnnnnnnnnnnnnnnnnnnnnnnatgagccaccacatccagccataatttttaaaaatggcttcctgaggttttacaagaaaatatgcacctcaaaatacacaaataggcatgggaatagagtacagtgaagtgaaagataaaatgtactgagagctgggagtaggagagacaaggccctggctgagggggtgtcagtgggcctcccaacacctcaagccaatccacttggaggtctcccaaagttcatcaggagaaccacctacagccaagaacagaaaaggattcaagaaagccgcacagatatcatgccctgacctgcaatgaggctgctcacttcccatgacttctgcttgataccattcaaccctggttagctcatgctgaagaaatatttactagaagcctcagatatgggtgcctagaaggaaaaagatccaagttctctgtgggggtgcaaccttgtgggaactattgcctcatgctcagaaggccaagcactaggctcccatacaatacctacaagacagaaccctcctgggaggggagatttctccttttggaaggaggacccccgggggctctccctctggggggcccgaatggttggaaatgggcgggatgcccaagactttcattctaacctccttgggccaccagccagcccctagggggtcctctggaaaaagctccaaaggattttcccccactggtttgaaccggccccgggagggctataggggggggccgggatctggagggaaaaacccgtgaaaaccccccgaaaaggtgggccgcgcccacccaaccccggttttgaagggcaagatttttttatttgggagaacaa

SEQ ID NO: 418928 - DNA, 920 bp, Homo Sapiens
  misc_feature (141)..(145): n is a, c, g, or t
  misc_feature (147)..(150): n is a, c, g, or t
  misc_feature (152)..(152): n is a, c, g, or t
  misc_feature (154)..(158): n is a, c, g, or t
  misc_feature (160)..(160): n is a, c, g, or t
  misc_feature (162)..(169): n is a, c, g, or t
  misc_feature (172)..(173): n is a, c, g, or t
  misc_feature (175)..(176): n is a, c, g, or t
  misc_feature (178)..(179): n is a, c, g, or t
  misc_feature (181)..(181): n is a, c, g, or t
  misc_feature (188)..(188): n is a, c, g, or t
  misc_feature (197)..(197): n is a, c, g, or t
  misc_feature (204)..(206): n is a, c, g, or t
  misc_feature (216)..(216): n is a, c, g, or t
  misc_feature (224)..(224): n is a, c, g, or t
  misc_feature (252)..(252): n is a, c, g, or t
  misc_feature (259)..(259): n is a, c, g, or t
  misc_feature (291)..(341): n is a, c, g, or t
  misc_feature (349)..(349): n is a, c, g, or t
  misc_feature (355)..(416): n is a, c, g, or t
  misc_feature (638)..(692): n is a, c, g, or t
ggcctgggtggcgattcggcacgaggagcaacccttgtctgggagttaggagccctgggttcaggcccagccactgacttgctatggtcctggaccagtcactgtccttcagtccagcccaggaggggtttggggtgctgnnnnnannnnanannnnngngnnnnnnnnaannanngnnanaaaaaanacccaaaanagaaaannnacatacaacncctacacncacgacacaactaacgaaaccacaaacncactccnagcaagccatgagagcaacgacgcccaccacnnnnnnnnnnnnnnnnnnnnnnnnnnnnnnnnnnnnnnnnnnnnnnnnnnngcggacangcacgnnnnnnnnnnnnnnnnnnnnnnnnnnnnnnnnnnnnnnnnnnnnnnnnnnnnnnnnnnnnnncacccgcaacacagcggaacacaagaagaccacaaaaaaaaccccccgaaaccagcatcaccaacaaacggaagccatcagatggaggcatgattttcataaaacagtaaggcagagtccaccaaaaaaaccaaaacttacccagaaaaacgcaaaaggcaaagcaaaaagaagataccccaactcaacaccaaaggaatgaacttcagccaacaaccaatnnnnnnnnnnnnnnnnnnnnnnnnnnnnnnnnnnnnnnnnnnnnnnnnnnnnnnncaaccacacggccaaagaaacccaaacaaaattctaaacggcaaacaaagacagatacaaaacaacaatacttgcaaataccctgagacaaacaagcaatccaccacaaagaaacacaaaacagcaatgccacagaagaacaaaacacaccaaccaatttgtcccgaaaaaaaccaaccaccaaaactacccgcccccacagaagccccacaccgataaagaaacaac

SEQ ID NO: 418929 - DNA, 978 bp, Homo Sapiens
  misc_feature (655)..(923): n is a, c, g, or t
catttggtgccgaagacctgagacaggaggactcctttgggagaccggtcccctgtcctcgccctctctccatgagatccacccatgacctcgggtcctcagcccagccgaaggaacttctcaccaattttaaatcggggacgcaaagccaacaagaatgaagaagtggccaggaaattaaagcaatgtgaacaccctctggccagcctgttggagggtgagagaccacatggaggagacagagccctgatgtcccagctgaggacatcccagaaaagcctatttccagacaactgaggacaggtgaatgagttctttgtagatgaaccagaatccagtctatctacctgctgagcacagacatgtgagcaacccccccatcaaggtcaactgagcctggcccagatcaacagaatcacgagatgacctatggactcaggagcaatcatgatgtggttgttccatgacactgaatgtagaggtcgttgattctgcagcaccagcaaactgacacataacaccgtgtttaatattgggttctgggctttggggtccctgcagagttcctgatttcagccccaagggctcattcacaaatttattactcagattctaccctgtcaacccaggacgtgttacttacacatttcccagnnnnnnnnnnnnnnnnnnnnnnnnnnnnnnnnnnnnnnnnnnnnnnnnnnnnnnnnnnnnnnnnnnnnnnnnnnnnnnnnnnnnnnnnnnnnnnnnnnnnnnnnnnnnnnnnnnnnnnnnnnnnnnnnnnnnnnnnnnnnnnnnnnnnnnnnnnnnnnnnnnnnnnnnnnnnnnnnnnnnnnnnnnnnnnnnnnnnnnnnnnnnnnnnnnnnnnnnnnnnnnnnnnnnnnnnnnnnnnnnnnnnnnnnnnnnnnnnnnnnnnnnnnnnnaaatggaccccaaaaaaccagaagggggggacctttctatttattgccccgaacg

SEQ ID NO: 418930 - DNA, 1052 bp, Homo Sapiens
  misc_feature (352)..(352): n is a, c, g, or t
  misc_feature (450)..(450): n is a, c, g, or t
  misc_feature (466)..(466): n is a, c, g, or t
  misc_feature (744)..(744): n is a, c, g, or t
  misc_feature (754)..(754): n is a, c, g, or t
  misc_feature (793)..(793): n is a, c, g, or t
  misc_feature (928)..(928): n is a, c, g, or t
atccgcacgaccaaaaacttccgagaaacatcccacaatcaacacaccaacctggaaaaacacgacccaccaaaaaaagggagatccccgacgcttccaccgtgcggtatgctttttagcgcccgagacccttgctggttcggcgacgcgcaccctcgcaaacacgaccgcgtccacccagcacgcctcttaagccgcacgccgccacggaccagattcaagtcggggcgagagcggcgctatgagcgaggagagatcagaccacccgacgtatagagtaggagccgccgacacctcgtaagagccgtcggcgacgagaccccagaaggggaccactactctatattgtagncgtcacaggacgcggacgccttcgcgctcagaactaccgtcacaattacgactaccccgcatttaccaccaccacaaactaccattcagaagataaanatactcgttgagacanctaattaaataagcttccaccacatcaactaggactccacagcgtgacaaagaagcaagagggcaaccccgtccaatacgctcgttcaactatataacataagacacgactaaacccactcaactaaacccacaactcatggaccaccgaaaaataagaacgggaaatatgctttcgggcaagcgatacatgtagcaccatgctgccggtaccgtaagaaatatgaccactaaaacgagtaaggcaacagacctcgtctgatacaccctcacatggcnccgtcctaanatacccaatcgctagcgcgactgcaacagcgaatctcancataagaaagacaaccagacaaaccgacccccgcacgtcgaaccagttgatccacgtgacgataaaggcgaatggatgctggcggggcgcgagcgacgagatggcctagatgacagaagatgatagatcagcacnctacgcataaagcggtgcttgtcacccatcggtcgaagcattagtcccaacacgcttgtaatcacccgctatcaagacagcaggctaagtctgaataacaaagcccaaacacacactactccgc

SEQ ID NO: 418931 - DNA, 1128 bp, Homo Sapiens
  misc_feature (185)..(756): n is a, c, g, or t
  misc_feature (801)..(813): n is a, c, g, or t
  misc_feature (838)..(928): n is a, c, g, or t
  misc_feature (1026)..(1084): n is a, c, g, or t
ggcctgggtggcgaattcggacgaggacccacgccgcgccacggcccccgctttggagaagtctcaggaaacggcgaggaagaagatacgttggaagcagcaccgtgaactattccccacctgaaggaagaagctcgttcccttttggctccaggactattcggggtgggcctgttgccctgaannnnnnnnnnnnnnnnnnnnnnnnnnnnnnnnnnnnnnnnnnnnnnnnnnnnnnnnnnnnnnnnnnnnnnnnnnnnnnnnnnnnnnnnnnnnnnnnnnnnnnnnnnnnnnnnnnnnnnnnnnnnnnnnnnnnnnnnnnnnnnnnnnnnnnnnnnnnnnnnnnnnnnnnnnnnnnnnnnnnnnnnnnnnnnnnnnnnnnnnnnnnnnnnnnnnnnnnnnnnnnnnnnnnnnnnnnnnnnnnnnnnnnnnnnnnnnnnnnnnnnnnnnnnnnnnnnnnnnnnnnnnnnnnnnnnnnnnnnnnnnnnnnnnnnnnnnnnnnnnnnnnnnnnnnnnnnnnnnnnnnnnnnnnnnnnnnnnnnnnnnnnnnnnnnnnnnnnnnnnnnnnnnnnnnnnnnnnnnnnnnnnnnnnnnnnnnnnnnnnnnnnnnnnnnnnnnnnnnnnnnnnnnnnnnnnnnnnnnnnnnnnnnnnnnnnnnnnnnnnnnnnnnnnnnnnnnnnnnnnnnnnnnnnnnnnnnnnnnnnnnnnnnnnnnnnnnnnnnnnnnnnnnnnnnnnnnnnnnnnnnnnnnnnnnnncgtcccccccctaacgcatctgctccccggtcccccgttcccttnnnnnnnnnnnnnaccgggggattctacccgcggcaannnnnnnnnnnnnnnnnnnnnnnnnnnnnnnnnnnnnnnnnnnnnnnnnnnnnnnnnnnnnnnnnnnnnnnnnnnnnnnnnnnnnnnnnnntagcgagcgccgttcccgcccgtcaacccgccggccctaagccgaactccgcgccccccttaccccgcgcgcgtccgccactttcgcctcccgcctcnnnnnnnnnnnnnnnnnnnnnnnnnnnnnnnnnnnnnnnnnnnnnnnnnnnnnnnnnnnaaatatccgccgggtatccgcgcctcatgccccgccccccgcaa

SEQ ID NO: 418932 - DNA, 1124 bp, Homo Sapiens
  misc_feature (632)..(672): n is a, c, g, or t
gctgggtggcgattcggcacgaggacttttccagtcaatctgattttttcttttctgccagacttgaattgtgttcttcttttactttggctattctgtcaataatttaaagcattcgtattcttccagaggaattaccaatagcatgtggaaattgtttcagatctccagaatgaatacttattttaacatatgtttattttatgatttaagaaagttatggtaaagtaatatggagcatgattcataatccaaaattaacaagaaaataacttggatacattaaatgtactaatgtgtggaccaaagagatttaaactattgtttttactctagaatgaaagtataattgaacggttaataattagtttgtagagtgtcctgcagttattatcaagttgctttacattatcaattgtgtgtgtatgtgtatacttttaattttaggggttatttttggtttctttgctgttttcagttatttccattgagattttgtgcaactgtctctcttttgatgttttgagatgcagttgaatagtttgagtttgtgaattgtcttaatagctatttatatgctgaaatttttaaaaagttagtagctttcctatagacacaagaaatgtttaatnnnnnnnnnnnnnnnnnnnnnnnnnnnnnnnnnnnnnnnnnagagagctgctatatatgaatacagtctacttggaaagctttttttcagtgaacacttttcatgttctagtggaaaatttgttcagtgtaatgatcttttaaataggtttgaggatgtttgaaaattttgaattttgggaaaattttcttcacttaatacagcttggagacccttgtttgggacctgaacaaaaggcccttattgacggattttgggggtaaatacctctgggtacaacttcgcgaggccaaattgaggcaaggaccatttttctttcgcgggaacgaatgcccctcaaaggctaaggccacggaacacccccagaaacaggaggaaacctcgccttgtactctgagaagaacaagggtgtgacacaatgcaagacatttgcggcggataaaggcggagagaacgccacgagtttccctccacctcgcgaaaccgtgaaacc

SEQ ID NO: 418933 - DNA, 821 bp, Homo Sapiens
  misc_feature (172)..(218): n is a, c, g, or t
  misc_feature (561)..(561): n is a, c, g, or t
  misc_feature (741)..(741): n is a, c, g, or t
tcgataataactgaggcacacccttcaccacggcccacacacctcggctgagacaacacggagttcctccacccccgccagtataccccaccgcccagcacgccggcgaacgaaccccccgccccatcaccatacccgacctggttcccacgcccctgcccgatcctctcannnnnnnnnnnnnnnnnnnnnnnnnnnnnnnnnnnnnnnnnnnnnnngactatccaatattttccaaaaactcgccctcaaacgcacgctttgcgttcacacctcacgtcttgcccctcccgtgatcatccccccactcctattttatcacaccacccgttcccagtctatcgcccatcgctgcactccagcaccccctattacaacgccatagagagctttcgccacatatacctatccagttatctctcgggcccgcttcgcgcttcccgaacccttcattagccccgtagcgcctcccgacacatacccgctcattactcttcggacccacctatacccctcgcgatatctcagcgaatacgtccaacctccccacgataagacccntcctccatgcgcaccacccttaccccccctttgtcccgctcccgtcttcatgcccccgcactaaattatcgtatatcgcccgcatccccctcataacccctctccatacactatagcttcgcgaatatccatattcgccgctcggcccgctcatacactattgtatgtcaccaccacccnacacaatccatgtccatgtgcaccgcgtccctatttgtcattgatgtactcactccccgaactatccataaccattctcg

SEQ ID NO: 418934 - DNA, 984 bp, Homo Sapiens
  misc_feature (176)..(226): n is a, c, g, or t
  misc_feature (536)..(548): n is a, c, g, or t
  misc_feature (558)..(606): n is a, c, g, or t
  misc_feature (673)..(768): n is a, c, g, or t
gaccggcccaaaatggttattaagaatgaattttacaaactttacttatattaacgggaacgggggaactggaaaaaattggcccttttccaaactggccggggaaaaccaccaaaaaggggggggaaattggggcccttttcaagggcacgggttttttggcctggaaaaggcannnnnnnnnnnnnnnnnnnnnnnnnnnnnnnnnnnnnnnnnnnnnnnnnnncaggatttcttctgaaaactttatggaaggggtcaatggggaaaacccccaaaaatttggatggggaaacttcccccaccccaaaaaaatttcggactctccaaaccccccagggggggccaactccctcctctggaaaggaatgaagggttccaacaaaatttaactgggtaaccccctgatggacagggttgcccaaaattgcccccctaagaaatggggggtttccgcccccccggggaaaaccaatcctatatataacggaaccttggttgggcttgtaacccaatccgggcgctttaacaaggcnnnnnnnnnnnnnaaccctgggnnnnnnnnnnnnnnnnnnnnnnnnnnnnnnnnnnnnnnnnnnnnnnnnncgcatgaaatcaaaatggttttttttcaaaaatccgggaaggccttggagcccccctcttggcttannnnnnnnnnnnnnnnnnnnnnnnnnnnnnnnnnnnnnnnnnnnnnnnnnnnnnnnnnnnnnnnnnnnnnnnnnnnnnnnnnnnnnnnnnnnnnnnaaagagggggtcttcaacctccagaccaagaaagccccaccccggcgcccacacgcggggggaggggcgccccttctgtgacataaacacaccccgcctcttagcctgtaaggaggggaggaacacccaacacacgcctattgtcacgcccgcctgacagccgcgaacaaacacctacagcccccacactcagcatagacccacacacaaaaggag

SEQ ID NO: 418935 - DNA, 957 bp, Homo Sapiens
  misc_feature (304)..(592): n is a, c, g, or t
  misc_feature (686)..(686): n is a, c, g, or t
  misc_feature (734)..(734): n is a, c, g, or t
gagactcacactgtgcacaggaagaaaattatgtgaatgtccttcctaacagggagaggccttccctgaccttgctccccttgggctgccatcagcatggggctttcttaggtatcaaggccacctcagtttggagagatgccagaagtggaagtgtcagccagaccatgttttcattctacttgtctatattagatcaaagtcagagagagaatctcagttcatagagggaacactttataacctgtgtttatggaggagaatcacataccaagtggaatcaccttgaagcaaggcttgtgtnnnnnnnnnnnnnnnnnnnnnnnnnnnnnnnnnnnnnnnnnnnnnnnnnnnnnnnnnnnnnnnnnnnnnnnnnnnnnnnnnnnnnnnnnnnnnnnnnnnnnnnnnnnnnnnnnnnnnnnnnnnnnnnnnnnnnnnnnnnnnnnnnnnnnnnnnnnnnnnnnnnnnnnnnnnnnnnnnnnnnnnnnnnnnnnnnnnnnnnnnnnnnnnnnnnnnnnnnnnnnnnnnnnnnnnnnnnnnnnnnnnnnnnnnnnnnnnnnnnnnnnnnnnnnnnnnnnnnnnnnnnnnnnnnttaaataaataaatagttgagtgggattttcaagaaccaagctgcccaaaaatgatggaccatggttgggataaaacttaactggggcgggcgngggcccaatgcctgggaatccccagctaccctggggaagcccgaggcncggaaaaaactctcttaaacccggggaggccaaagaggttgccagcgaaccccaaaacatcgcccatctgagaccccaagcccggggggagcaaagaaccaaaactttcggtgctccactgaattgtgtgagaagaagacaaaagaggcgaactgcagagcatcctagactgcgcggggcggcgcacgaaacaaaaaggcgcacgtaacggtccgccaccgcg

SEQ ID NO: 418936 - DNA, 585 bp, Homo Sapiens
ctgtcaatagattggcccaaaaggaagaacaaggaaaagggcaccaaagaagataaaatgaaaatacaagggtataagctgaactgtggacatcctgccactgggaattaagttacagtataaaaaaagcagaatgtaatgggggagtccccttcccaaaaagaatttggaatcaaaccatggccactgagggggaaactttgcgccagggccccattttaacttgaacactggacctgatccctgaaaataaccctaccagaaaaacaggggcctacaggcctatacacaaaaacccttgtggccccccttctgccttctggggaaggggccctaggaaaccttaacactcccctttgaaaacggccaacacgccgccaatccccttctcactgccccaaaaaacgcccaccacgacaagatagggcaaccgtcgccctataccccctcaacaaaacacttttaattcccccccagttacaacaccacattagaatccataatttccccctcgccacaccacggataacggtacctctcaatcccccctattttagacgcgacccccgccttcgcatacccaaa

SEQ ID NO: 418937 - DNA, 1154 bp, Homo Sapiens
  misc_feature (582)..(862): n is a, c, g, or t
  misc_feature (897)..(981): n is a, c, g, or t
  misc_feature (1043)..(1052): n is a, c, g, or t
caggcctgggtggcgatggctggggcagaattctctgtaggtagggtgtgtcacctggggaaggacattctgggtccttggcagggtgactataaaagcacactggcatgaaggcctaggtggggccatatctgaagggctggggcatgctctttgagtcgtgggtagagccgtgagcccttgccctttgtcctgagccagtgtgtgcctcccgcagcagccacatgcccgcggattgatgtcaggagccacctctgcaagcctggcttaccacagggagccaggctccaggacagcagagtgagggagaggcactggctccatggcacccactgtgtctggggggcatccaggaggctggctctctgagggcctggggaacaggagagcaaagaaggggagcacttagattcacgagcccagcccctaggggatagaagcctaaggatcctgtgagggctgctggtggggtgagcccatcccacgcaactctggggtctgtgaacccaccaacgatcaacgaactgcaacacctgctggacgcaaatgcaccccaaacgcatacgtccagtaaaaaaactnnnnnnnnnnnnnnnnnnnnnnnnnnnnnnnnnnnnnnnnnnnnnnnnnnnnnnnnnnnnnnnnnnnnnnnnnnnnnnnnnnnnnnnnnnnnnnnnnnnnnnnnnnnnnnnnnnnnnnnnnnnnnnnnnnnnnnnnnnnnnnnnnnnnnnnnnnnnnnnnnnnnnnnnnnnnnnnnnnnnnnnnnnnnnnnnnnnnnnnnnnnnnnnnnnnnnnnnnnnnnnnnnnnnnnnnnnnnnnnnnnnnnnnnnnnnnnnnnnnnnnnnnnnnnnnnnnnnnnnnngatataatcccccgacccagccgccgcgccctatnnnnnnnnnnnnnnnnnnnnnnnnnnnnnnnnnnnnnnnnnnnnnnnnnnnnnnnnnnnnnnnnnnnnnnnnnnnnnnnnnnnnntccattacctatataattccttcacatttataccctacacgcaccccactcatcataacaannnnnnnnnngttatcaatttataccccaacctgcaaaccggttatattaacctctacctctcatcctcaattatccctccccacgatagacgccccctgtcaattatccgg

SEQ ID NO: 418938 - DNA, 634 bp, Homo Sapiens
  misc_feature (80)..(130): n is a, c, g, or t
  misc_feature (145)..(192): n is a, c, g, or t
  misc_feature (214)..(297): n is a, c, g, or t
  misc_feature (346)..(356): n is a, c, g, or t
  misc_feature (382)..(429): n is a, c, g, or t
  misc_feature (589)..(589): n is a, c, g, or t
aacctcctcgttcccgcctccgccccgccaaactaaataacaatccccaatatcttcagcctccccatcatagaaaccannnnnnnnnnnnnnnnnnnnnnnnnnnnnnnnnnnnnnnnnnnnnnnnnnngatctatgtaattcnnnnnnnnnnnnnnnnnnnnnnnnnnnnnnnnnnnnnnnnnnnnnnnngcgcaccgcctctatgtttttnnnnnnnnnnnnnnnnnnnnnnnnnnnnnnnnnnnnnnnnnnnnnnnnnnnnnnnnnnnnnnnnnnnnnnnnnnnnnnnnnnnngcatctttacccccatccttgagctcccctcgcacctctaatacattannnnnnnnnnntcattaccatttgccgccctgccaannnnnnnnnnnnnnnnnnnnnnnnnnnnnnnnnnnnnnnnnnnnnnnnaataaaaaaattctccccgccacatattaactaccccctacgcctcccgcccgcccgcgattaaccatccacacccgccatctcaatatttatctcccccctgacttcttcccccaaatatatttctctcccccacccaaactgcgagctcgtcccaatnataacaccccctcaagaacatccgagtcccctgctttccaccatc

SEQ ID NO: 418939 - DNA, 223 bp, Homo Sapiens
cctttatgataagtacgccgccactcccgccccgtgacgctcccgcctttttatcagctgcccccctcccatgcataagacatatcagagaattagtaatacccaatcccatgtccacagttcgtattgaaatgaaccaatccacccgccaacggcgcacttccctatcatcgcgcaacactctattgataacctacccgagtcttacactgaaatccctccg

SEQ ID NO: 418940 - DNA, 1285 bp, Homo Sapiens
  misc_feature (68)..(124): n is a, c, g, or t
  misc_feature (142)..(142): n is a, c, g, or t
  misc_feature (421)..(483): n is a, c, g, or t
  misc_feature (1025)..(1025): n is a, c, g, or t
gggtgcgattcggacgaggttcctgcgagcagccccctagcgcgcctgcgcagcgggccactctctgnnnnnnnnnnnnnnnnnnnnnnnnnnnnnnnnnnnnnnnnnnnnnnnnnnnnnnnnnactagcacgtcaagaaangaggcatccccttccgtccagatatcagaggaaacgatccgaaacatagatgtaacggaaagaaacctgccggaaacaggcggggctaaacacactctgatgcggggcacaaagaaagacgccaggatgtgggcgcgagagaacccgtacgaacccccatcaacaaacacagcacacgacaatacacaaagaaaaaaaaggaacggagcggaccagccgcaagggggagggagagaaacactgggaccaaaaccaggaaaacgcggaccacacaagggnnnnnnnnnnnnnnnnnnnnnnnnnnnnnnnnnnnnnnnnnnnnnnnnnnnnnnnnnnnnnnntgaggagcacagtagacagaggcccgaaaaggaggaggcgaaagggaaggaaaacaagaacagagtgaaaacacaacaaaaagcgcccgcacgaccgccgcactgcctgctaacccaacaacacaccacagacaccagacgaaagcgacagaaaggaacacccgcggaagaaaagaagagaaatggacaaaacgaaaaaagtccccgccaacgaaccaccccaccataacaggcccacagaggccccgggaaaacagaaggagggccgaaaaacaagtgtatgaaaaagtaaaagtaaagcgagcaaaagagagagaagagagggaggcggagcaaagagggaaataatagtgagaataatataacccacaataattaatcgtcacattccgaccacccaacaatgcaccaccttgctctagccccgcacagcgccacaaatatatatcccgcaacctggctattgggctcgcaagacaaacgaaagaagaacaccaatacatataggtacgacaaatacgcgccaccaccacgatattagngaccgaccccagcaggtttaccctcggccagcgaagaaatcaacaacacgtgtgggcacacaacaaacaagcgcgcggatgacgaatttaatagcacgacgcacacgacctatcgcgcagataacacacctaacttactgcacacgtcgagctcagagaacaacgcacaacacaacaccgtcacggctgttaactgaaagaagtgtctcttatagaaaacgggccacggtagatataatgacaaatacacgaataatagc

SEQ ID NO: 418941 - DNA, 1062 bp, Homo Sapiens
  misc_feature (12)..(12): n is a, c, g, or t
  misc_feature (618)..(663): n is a, c, g, or t
gaccaaggggangagcaaacagagaactagggggataagagagaagaaaagaagaatggagagagaggtttgcccagaaggaaaacgaagagccagattgaaatctgactctggcttgagaacaggacgggtcccagagtttgaccactgccagaatccagtgtttcaagatggagttggtgaagcatccaagattttggatcctgggcctcagtgacactccatcacccaactaaaaagatgttctctgggacctctctcaggctgatgttcttctcatcaagctcccgaatgtgtctcgcactattggacactttttgggggtacacaggtcttctctcctcccctcctgcagaggcaccaaaaccaagaccaaatgggggttctctagccgccaacttgaaacgctcctgagacttctgtgtatttgatgcttcttcaagtcagctctgacgtggccaattccctgacctgggaaatacccacatagtaatctagaccattccttcttcctagtaacctgcaactccctcgttaccgcgtttcgacccaagctcactttccccgtcgcgccagctgttcgggtggtcctccgaggccaacctcctatctctttannnnnnnnnnnnnnnnnnnnnnnnnnnnnnnnnnnnnnnnnnnnnngatttattttcccacgcatgtacctatacccaatatacccataataaacgccccccccatcccttttatcctacccactttcccgccacaccttttcccctcgtacacagcagaacatatacctactcctttccaccacaccaggtacctaatccccgctccgccccactgctaccttaagaccaatagaatcgccctcagtttcccctacaatttattctcacaccccttaatacccccttctagtaccccatctccacacgcatataccaaccctaatccaccgcgtggcccccgactccgtaccactttatacctaccatagccaagcgtcgcaaaccttttatattcagtagccccttgcaccgacccggccgtcccagttacacctttaatcgt

SEQ ID NO: 418942 - DNA, 1000 bp, Homo Sapiens
  misc_feature (559)..(721): n is a, c, g, or t
  misc_feature (844)..(957): n is a, c, g, or t
tgggtggcgaattccgcacgaggaaagaaatggtcgtatttccaattcattatccttattctgaagatagtacggcagaattttaagcagagatagtggtgaagatggtgacattatagagtgttgactatggccacaatcttgtttctccagttaatgaatttttttatgtgtttgtttaaagatacatattaagcttgtagaccatagggacatacggagagtccattgctaatatctcactcagtattgtgaaattctatctcaccaccgtgaaactcttcagttttctaattgctttatcagcagggggtataaaaggtcatgaaagcaatttccacatgctgtggctccaggtctctgggtgtgaagcagagcaagcctggtttgtcctcctcctgtctccacacagacggcttctgcaggtttggtaatctacagtacactccttgcagggaaaaggtgatgagtcatcatggacttatttgaccactttttatgcatgcttagaggaaaacagaatactgttaagagattcatctgctagttattaagtaannnnnnnnnnnnnnnnnnnnnnnnnnnnnnnnnnnnnnnnnnnnnnnnnnnnnnnnnnnnnnnnnnnnnnnnnnnnnnnnnnnnnnnnnnnnnnnnnnnnnnnnnnnnnnnnnnnnnnnnnnnnnnnnnnnnnnnnnnnnnnnnnnnnnnnnnnnnnnnnnnncacccgctaccccccctgaactccccccttaatttggggaggctgcgggcatgaccaattcgcctcacaccccacgacagtggggcgccccccgcctgagcccaccactggggcccattggtnnnnnnnnnnnnnnnnnnnnnnnnnnnnnnnnnnnnnnnnnnnnnnnnnnnnnnnnnnnnnnnnnnnnnnnnnnnnnnnnnnnnnnnnnnnnnnnnnnnnnnnnnnnnnnnnnntggacgcgcctccccaactcccgcggtcgcccaccccgcttaa

SEQ ID NO: 418943 - DNA, 1325 bp, Homo Sapiens
  misc_feature (323)..(383): n is a, c, g, or t
  misc_feature (970)..(970): n is a, c, g, or t
gggcggccggagggcatcgggctccatgttcagaagtggaacatgtacctgcggagcaggattttctctaacattgacctctcaggaggctctaccctgttcaaaggttttggagacccgctcctgcatgaagtgaacaaactacctccacaacatgtgaaaataaggatatctccacctcaggagagaccgtattccacgcgtatatgaactctctctccttgtcctccccgcccatacttacgagcccgccaatctttacctctgccccccgccacgccaactaacgcacacaatcaccaacatcctcatcaacctccccnnnnnnnnnnnnnnnnnnnnnnnnnnnnnnnnnnnnnnnnnnnnnnnnnnnnnnnnnnnnnctcacccttatattatcaaccccatccttccttccacctgcccacgacgctttcctaacacttatccgcgatttataaatataaaacaaaattcctttacgcctccttttcctttactctcctacgtcgccaccccctttttccccctccccctctaaccttacctcatctgcccgctatctcccgacatgtttcagtccccccgcttcaatctttatcctccgctctctccgaccccttataacgtccactgccgaccccaactcttccttctcctcctttttctaagccaaactctactatataccctcaactatcaccaatatacgaaccgaaacaaacacatctatactcttccttccctcacgccccataatacacaacagaataaactatttagtaaccatatattttaccccactaccgtccctctctccccttttttgtccttctctgatacccacccgattttttgtgcattttcccttctattcatatccgcgcttcgcccactatacgcaacgcttactatacaccatactaccttaacgcctacgaccatacaatcacctcaccttttcccttcntcccccttagctcccgaaaagtcattcgattccactatcccctttacactctctctattccctcttttgtcccagcgctctatcctcgacacccataccagtatttcccacaccaaatatcgtgcccttaagcgcattcctcccaacccacttatccaaatcttacatatatatattccaacctatacaaaccgcctgtacattcgcagtattcccccacccgtgcaaccgtccacactatcaaacacccatctcaaaccggtagtttccgctttttttacccttccctcactacagcacttattccccgccttattcccccccctacctattcatcccaggctgatttcctcaa

SEQ ID NO: 418944 - DNA, 1072 bp, Homo Sapiens
  misc_feature (139)..(177): n is a, c, g, or t
  misc_feature (201)..(299): n is a, c, g, or t
  misc_feature (332)..(392): n is a, c, g, or t
  misc_feature (419)..(518): n is a, c, g, or t
  misc_feature (619)..(668): n is a, c, g, or t
  misc_feature (786)..(786): n is a, c, g, or t
  misc_feature (788)..(788): n is a, c, g, or t
  misc_feature (790)..(790): n is a, c, g, or t
  misc_feature (796)..(796): n is a, c, g, or t
  misc_feature (798)..(799): n is a, c, g, or t
  misc_feature (808)..(809): n is a, c, g, or t
  misc_feature (831)..(831): n is a, c, g, or t
  misc_feature (997)..(997): n is a, c, g, or t
gtgtgagccaccgcgcccagccaggcttatacttttaatgaccaccataaaccaccccacaagggcttaaggaagccagagcccttgggggaaacttcttaccgttctctaccccatcatctccaccctccgcgtcaannnnnnnnnnnnnnnnnnnnnnnnnnnnnnnnnnnnnnngcctcctcgcacttacccactctnnnnnnnnnnnnnnnnnnnnnnnnnnnnnnnnnnnnnnnnnnnnnnnnnnnnnnnnnnnnnnnnnnnnnnnnnnnnnnnnnnnnnnnnnnnnnnnnnnntcctccgagctacccccttcgctaccacctcannnnnnnnnnnnnnnnnnnnnnnnnnnnnnnnnnnnnnnnnnnnnnnnnnnnnnnnnnnnnaccaccgccccgcgctctcgcctccgnnnnnnnnnnnnnnnnnnnnnnnnnnnnnnnnnnnnnnnnnnnnnnnnnnnnnnnnnnnnnnnnnnnnnnnnnnnnnnnnnnnnnnnnnnnnnnnnnnnngtcgcgatttagtcctcttaacacgcacactaaagagactcaacaatattcgcccccttcctacttcacctatcaccccccctgtaccacctcactcattnnnnnnnnnnnnnnnnnnnnnnnnnnnnnnnnnnnnnnnnnnnnnnnnnnggcctcatcctctctgcgccgctacctacaagctccagtctctccacaaacacccctcacctgcggcattcgctcgctcagacccccacaactccagacacggcaacgtgcgcgtttnancncacacncnnacccgccgnnactaaactagttcacctacgtnaatacttcccagagaagcaccagacgaatgtctcctcccccctcccccgtcatcgcgctcgcgactttgccccctcttaatcactgcagtaacagacacgcgccactatcacgaaccatctagaacgaatccccgcccccatcatcgcggtactcactccttccgnctaccagctccgacacttgctcgccccctccacgcctcttcacacaccatatacccttatctacagcgcccgccc

SEQ ID NO: 418945 - DNA, 1113 bp, Homo Sapiens
  misc_feature (358)..(413): n is a, c, g, or t
  misc_feature (1074)..(1074): n is a, c, g, or t
ttctttatttatgccctctttggggatactgcgacgaggtaaagaagctcctactgcagttcttgccgcatgatgacctcccggaagaatcagctcaagaataggaacccactgttgtccgctggctgataagaaagctggtggctataggatgacgtacctgcaaaaagacccccaggctgacccccaggagttgacaccgatatcagctaggggcagaagcagaacgctcccttggtggggagtgcccacaaagtggatgcctcccaacctgggagtgttcttgccagctctgtgtcttccactgccggctacctctacccaaccatcaacggcgacgcctcggaccgccgagtgnnnnnnnnnnnnnnnnnnnnnnnnnnnnnnnnnnnnnnnnnnnnnnnnnnnnnnnnaaactcgctcgcacgctttccccgcgtttctgcctccccggctgggtcgcccaccaatcttcacccgagccctacgccacactccgcccattcatccccccacttccccgtttcccgcttccctcctaccacgtcactgcgccctccaccgttcttctcgccgcccagatccagcacatccgcctcctgcccacccactcgcgtgctgttattcataacgtcccgcttgtcaagccttatgtgaccacctaccctcgcgcgttgccccatgtataccatcggttctcactcctgctattcacttatgtctcgccgctcctctgtgatgtctcactgagcactctcctgataccacttctgttctgagctatgaccggctctgtatcttctggtctgccaattgaccacctcgcgcccataactcatcaatatcactaccaagaagacgtaatcgcagattcgcgcgcgagcagatccgcctctccctcccctgaccggttatctgcgtatctcttacactccgcgttctcctatgcgtctcactgacacgctgcgtgtcgctgactgttgcgtactatcgccccccccgcttttgctcaccctatataaacatatgccccacccgtttctacactgacacatggtagataccgaccccagntatatcttctcaaccactattccgtaccactgcaccgcc

SEQ ID NO: 418946 - DNA, 1303 bp, Homo Sapiens
  misc_feature (67)..(135): n is a, c, g, or t
  misc_feature (765)..(765): n is a, c, g, or t
ggcagtatgtagccccgaagactgttgcccaagtggtagaatgttagcacactaccagcctaggtannnnnnnnnnnnnnnnnnnnnnnnnnnnnnnnnnnnnnnnnnnnnnnnnnnnnnnnnnnnnnnnnnnnnctaacataagtctgtcgcgccccctaaaaggcccgatccgcaaatccaagacaacacgcgcatattgaaacagcaccatttatagccagaccacagatcccccacctatatgcataccacacaccactacggggcgggtgagcctatccctacttctccacgataatgcgctacctcccgcacttcccacacatgacgctcatccacgccagtctacataaaccctctacaaccacctctcttcaccaaagccccgcacttcacgcacccccccctacctctatccttgtccagttccgctcataccccacttacatacccaaaaagagactcgcataatacgctaattcccatcatcgccaccaagcccattcccgcctattgaaaccctgtcgtcgaacctcagtgtgcccctaaccgcggactcattgccgacacagtagtgcccaacaactcgaggatcttgctcggcacgccctcgtttacatcctccgccgcacggaaatctccccacaagctcctggcccaaagcccggcgccccccaatccccatcataagttctcttgccacaacacactgctcaatagataacagagtaacgacactcccacataatgcaatctataaantagtcccctaccacaccctacaatataccatctaaaatttcatactatagatctcattctatctcctcaccacatgatatatgcaactatatcacacgtttcaagactaactcgcccctggaaatccccctataatcgtcccgagccttgcccgctcaacaccaaaccgactgaccgcccgccggactctatctaatgcccctctgatggaactgtgctcaactgaccgattatcactcgcgcctatctcatcgccccatgataaattgaccgcctcatctctcgttacagataagttatcactactacaccccacgacataatactatatatatacagcccacactactttaattaattacatctactggtacgaacgatcggaatgagagatatcgccgccggatagtaatcgcccgtgcatcctatgacagctcaagcttgcgacgtatacagatacacttcctcccacggctgacaacacgtactccacgcagtacacgacgctgcactccagagtcggcagccgccctcaccc

SEQ ID NO: 418947 - DNA, 723 bp, Homo Sapiens
tttggcgtcattgatgcagtgggtgaaggcgtggaaagcgccagagtcggtgaacgtgttgctgtcgatccggtggtcagctgtgggcattgctatccgtgctctataggtaaaccgaacgtttgtacgacactggctgtattaggtgtgcacgctgacggtggtttcagtgaatatgccgtggttccggcaaaaaatgcgtggaaaattcctgaagcagtggccgatcaatatgcggtaatgatcgaaccttttaccattgcggctaacgtaaccggacatggtcaaccgactgaaaatgataccgttctggtttatggtgccggtccaatcggcctgacgatcgttcaggtattaaaaggcgtctataacgttaaaaatgtgattgttgccgatcgcattgatgaacgactggaaaaagcgaaagatagcggggctgactgggcgattaataacagccagacaccgcttggcgagattttcactgaaaaaggcatcaagccgacattaattatcgatgcggcttgtcatccttctatcctgaaagatgccgtaacgctggcttctccagcggcacgtattgtattgatggagttctccagtgaaccgtctgaagtgattcagcaaggaattaccggaaaagaactctctattttctcttcacgcttaaatgcaaataaattcccgatcgttatcgactggttaagtaaagggttaattaaa

SEQ ID NO: 418948 - DNA, 513 bp, Homo Sapiens
tctagaggaccccccaactgcaagccgacatccttctactgggaagagcaacttctctgcctttacttctctccctgagagagctaaacctgagatgatgccactctatgctgggtgcatagctgccctgtggttgtgggttctctgtgcaaggcaggtctcacccatccccagggcagaacctcgggggtccccgaaagcacctgagatctggcccgcaggtgtcagtgaaacaagtcctggtctgggtccaggagcctcctgaaactcagcctggcttctgatctgccattggccccttcgtgggctaccaggcaggggtttaaacgaggtgagggtgccagtctttgttggggtgcatggttggttttgctctcggggtttgtcttttcccctgcaccatttgtgaaggtctttcgcagccttgaatctttccagaggcggcaggtgtactcatctcttccacctggtggctccccacctccctctgcaaaccactccccacaagaggag

SEQ ID NO: 418949 - DNA, 454 bp, Homo Sapiens
gaaaggccagcctgtttaccaatttatgaagaccagcctgacagatctattattacatggaaaactctcattaggatgctaattcatatgaaattggcaagaaaggaaatttttgttatgtaaaaatatatgactttatgtacccatgtattcctcagtaaagtacctacacttgataatatttataatatgaaggtttaatttacatctgactccaaacattatctaagtctcagttgtggaacaagaaatagatgacagaagggatccaggagtctcacatttaaaacaggtgagtggaagtcagtggcaatgtaaattgtaaacatctaagatataatatttatgtcctttccatgaattattatgctcatggatatcagtagactattcattttttctttaaaatcaatagttgtttcctaaactccaaactctgaaaagataaataagg

SEQ ID NO: 418950 - DNA, 302 bp, Homo Sapiens
  misc_feature (105)..(145): n is a, c, g, or t
  misc_feature (222)..(222): n is a, c, g, or t
  misc_feature (233)..(234): n is a, c, g, or t
caactgcaagcgcttgagttgatgtagaacatgactgcacacattatagcaataatattttggattttgttttctgattcagaaaacattgtgtacgctaagagnnnnnnnnnnnnnnnnnnnnnnnnnnnnnnnnnnnnnnnnngcaaagcagaaattatgcttaatttgtttcaataaataaagcttctctggaagaaaacctcaaaggcacatgtaacntcttctattcnnccgaaaagcatgcatcgttaaataacttgaaacagaggattcgatatttggaactctttttgtttttg

SEQ ID NO: 418951 - DNA, 477 bp, Homo Sapiens
  misc_feature (36)..(36): n is a, c, g, or t
caactgcacgacaacaaaacacaagaacttcccctntcatatctagagaaaatgactttggggcacagtttaaaatgaatcacccacatacataagtggcgtggtaacaacacagaagatgaactgaaaaattaaaagtcatcagaatatacagattcttgcccccgatatggtgtagtgagtagaaaaatccatataagaaatgaaaacgaacctggcaaataccctgtttctaaatgcatgccacatcacacaaaggaaattcacacaaaggaaattcaaggaatcatgaaacattagaacaaggaagccccagtaaggtttacagtgtgcgtttttccctgccacctacacattccacagccaagtatcacagcattgtctcaatgactaggcaacacgggctatagatgacacataaatgtataaagtaccaccagaatacctggtggaaagtattcttttatgatgatcagt

SEQ ID NO: 418952 - DNA, 125 bp, Homo Sapiens
aggctcccccagtagcaagcgcgcttctcggaatatacagtgcaggtctcctaaacaaggcattggctgaagacctcattcatgaccataatggcttactaaaataagttcaaatcagttgcatg

SEQ ID NO: 418953 - DNA, 215 bp, Homo Sapiens
ctgaacgtggatgcccctgacctttgacaaatttcctatcagtgcttgttaacagcatgagccaactttatggctcaaaccaataggaccatttgctgaggtctgagagcacccccttcagagaatccctgatctcccaaaatttgctagggatctaaagtttattttgctgtacaactcccttttttttggagttttacttgcttccaacacaa

SEQ ID NO: 418954 - DNA, 424 bp, Homo Sapiens
  misc_feature (97)..(130): n is a, c, g, or t
ttacaagcgcgcataaggaggaacttctgtcattttgccatttttttctatgtgctttgtagctattttgtccttatttcctgcattactgtctcannnnnnnnnnnnnnnnnnnnnnnnnnnnnnnnnnttggttactgtgatgattacacttaatatttaaaaattacaatatttataccagcttaatttcagtaacataaaaaaattatgcttctttacaattccatccccaccacttattgatgttgcagaattatatctttatacattgtatgtcaaaaaatataaactaattttttaatgtgttagtctcaagttatgtaaaaaacaaaatgtggagttccaaagttacaataatactagaatttataattgcctatgtatttactgtcactgcaatttttgttttttcatatagcta

SEQ ID NO: 418955 - DNA, 274 bp, Homo Sapiens
caactgtcaaagcgcgtctgaatatacatgagggcaagagcctttctttacatcacatagcttcatgttgaatttgaacaccttagtatcatgtatctagtgtgaactcggtttattcaaataaaaggaattttttattatggttttgtgagacagcataatataatttacttggcttcaaggacataaatattccatcacagattaagaagaaaaatgagaagagatgctgaaatgtaagtcccacttcatcttgtttccggctttgcagttg

SEQ ID NO: 418956 - DNA, 297 bp, Homo Sapiens
caacatgtaaagcgatattatggttccagaggagccacttcacccctctggactctagcttacttactctccaagcagggcatcgtccccttgtggggttaacgggaaaattaaagttgacaccatgcatgaaatgctgtccaaatcttgaccatacaattacagtgggtgttctggaagtaatagtcgtaagaatcctaatgacggtagctatccctgacttgtccatagcatttacagtttacaaagggcttcacacacccgcgcgctttgcagttgcgctctgcgcaggcgcgc

SEQ ID NO: 418957 - DNA, 155 bp, Homo Sapiens
tattttacttttgtgtttgtatatcaaattcaagatatcaatcagatgacatggggaatttttactatctctcatggtgttacgatagtccttcctcattggaagaatgtagattgattaattgttgttagaacctgttgattgtgaccccctaa

SEQ ID NO: 418958 - DNA, 119 bp, Homo Sapiens
caaatgtcgcggagaagcgattgggagggtcgacagacaccagaggggtgtgcagacattaggacgaggagcgaggcgaggcgcgatgtaaggagaagaaacgggggcggctttgcagt

SEQ ID NO: 418959 - DNA, 187 bp, Homo Sapiens
caactgcaaagcgcgggagtcattttcttgactatcttcctatgtccattacctaatagaggttgtaggacatagttcctgtatattttagttatgatttgagatgatcctcttcttgttcacatagcgaaaggaagaatgtaatgtgagtttttgaaattaaatgattcaaaatttctatttagtt

SEQ ID NO: 418960 - DNA, 311 bp, Homo Sapiens
  misc_feature (126)..(126): n is a, c, g, or t
cccaaagtctgcggcaggcaatcactgcaatggacagcaaagagaacggaatcagtgttgctgccagccctgcagttctcctcagcataaccactaaagaggaaatttgagtcagatgttactttnggtacagcctccttactaacgcccttgttctcttcagcattttgagctcttagaaagacaggaagtcactccttcttgtattgctctggtgggaactaagcaatcaatttaccactaaagctagaagatgtagtataggataccatggaaatctttgagctggatgactaaaagattaggcatag

SEQ ID NO: 418961 - DNA, 232 bp, Homo Sapiens
  misc_feature (31)..(31): n is a, c, g, or t
aactgcaagcgcgcatgtacttgccataggnctatttgccttttatgattctaaaagaaagaattttgtgcataatggcttcttgcatagctaaagatctacagagaatagaattgaaagtcttctatatttccatggaatttagaccgtccttagatagcatacgtgtaaagggatgttgattgacccagtgccataaattatgttgtgatgaacaggaactatgtgaatt

SEQ ID NO: 418962 - DNA, 275 bp, Homo Sapiens
aactgttaaagcgcgctaacagtacctgccctgtatgcttcacaagggtatgattattgcaatctgaaagaattttgtttcaacaaaagcaagtttgcctgaaggacaatgagctgtgtaacacagttaacgaattaggaatgccactccatatgtacagaaagtgttccaagaacactggcttattcactaaacccttactgctactgaacagggttagtgtgccaaattctgtgctagtcactttcatgtattgtctatttcacatttctaaa

SEQ ID NO: 418963 - DNA, 369 bp, Homo Sapiens
aaatcacagtgtatctgaaaataaattcagtgaattgggtaaggatgggaaaatatttctggagcacttgatcttgttttctctgagctgcttttcaaaagtaagaatttcttgttatactgatattgctttattggaggtgatatggcagggggtcatccacctttattgcagaggtatccagaatgtgttaaatatacaacatttattatagagggagcaagattttataacctgttcccaggtaaggcctatttctatttgagtttattcaacaccacttttgatctccccaggtgctatttactgattgctggcttattttgtttaaaagcccttggggtcttttctgtcctgtgcctctgaatg

SEQ ID NO: 418964 - DNA, 390 bp, Homo Sapiens
caacgtgcagccgagaacagtattttcagtgacaataccaagactcaaaaagatttcgacaagctgattcaaccagctgaaatcaaaagaaaaagtctaacagaaacaagtgtcaatttccacattcaacttcaaacaatcaattgtgcaaatagagaacagggtgcctagcttctctggagtgttttaatacagtgaatcctcctgagatataaacaactgtgttcaagtctacactaaacagtgccagacagctactctttttcacttcctgcatttctttctgtcttctgtcagctgtcacttcttaggttatcagtttgttttgtcccacttccaagtcactgcttctaatctactgtcagctctaggaaaaccagataactgagc

SEQ ID NO: 418965 - DNA, 393 bp, Homo Sapiens
caactgcaagcgcggttggtgggagggtctaaaattctcttgtacaaaacctgccaaagatagaaggcaaagttaactgtcatgggaaggaggagcaggagaaagagaggccacacagggtctgcttaagactgagcctggaccaggacaacagaaaaattaccgtacttccccaccaccagatcagcaagtaccaagtaacaaataatagaaatctactactgagagacaggcaagagcataaagagagatcccttctactgtgcgcacatgcaggaaggccaaaacatgggggcagaacaggaacatttcagggggtggggggactctccaagacccctgaataagtacagaataacaccaatggaatttgaaattagtaatgttagtaat

SEQ ID NO: 418966 - DNA, 341 bp, Homo Sapiens
gggatccccaaagcggcgaaattcatctaactctaactaatctgttttttttccaataattacagcattcttttagtaaagtaacaaaaatatgtagttcatcagcaaagctatttaacagaagtcagtactcagtatgttgtgaatgatgttgctttttgctattgtgtaaatgctttgaaaaaagtaagcatcgtgttgtccttttaaattgtcttacttgaagctgaattcaatttgtgtagatttatacacacaaattttatatagtatcttatgttccttatttaatgcagaagataaatattatctgtacaatgaggaactaaatggttcctagg

SEQ ID NO: 418967 - DNA, 257 bp, Homo Sapiens
agcatgagaccactgcctctggactatagctgtttacaaaatgaggacccaatcaaggagcacagtgagtatatttatttattgtatctctttaaatctcttataatttatctaaggacagttccttaaactaattatgtgtcttaacaggacattgacagtttaagaagtatccaggtcagtagttaaaccgaatatccctcaattcagtttagtccaacagctttctcatgattcagctagtaatacataggcaa

SEQ ID NO: 418968 - DNA, 116 bp, Homo Sapiens
taaaactaaaatttttaaatcaaacatgacaaaaatgttaatataattcagaagtaccttgaaattgaaacatatttgtgcaatgatcattaggctttttgtccttgttgttttaa

SEQ ID NO: 418969 - DNA, 173 bp, Homo Sapiens
actgcgcccagactcccaaagccaattttcaattatttgtgagccatagattcagtgactacatcaatatctcttgccagggattggcctaacagctcagagaacagattgttaggatatatgggcaagccttctaagttcaagaggcaagagcagaaaatggaatgctatag

SEQ ID NO: 418970 - DNA, 320 bp, Homo Sapiens
  misc_feature (188)..(262): n is a, c, g, or t
caactgcaaagcgcgtgtgacagggcgggagctacaggactggacatgatcaccgattcagagggagggagggatgcaggcagaggcctaactccagcatgttagcatgtgctatggaagtgctgtccacaatggtggccaccagtcatgtgtagtactttaaataagtctgttgtggctgaggaccnnnnnnnnnnnnnnnnnnnnnnnnnnnnnnnnnnnnnnnnnnnnnnnnnnnnnnnnnnnnnnnnnnnnnnnnnnnatctagagaaacagctagaaaaaggagagagcactggagtcacagtaggggaagaggt

SEQ ID NO: 418971 - DNA, 161 bp, Homo Sapiens
aactgcaaagccgggagagggtggagtgtatacggcatgtattagtatttactgtgttcatccctctgaacagttagttcagagattagagaagatgataaatcagcagatactggtgtggtcaggaaaagcttcacaaaagaggcgcgcttttgcagttg

SEQ ID NO: 418972 - DNA, 222 bp, Homo Sapiens
  misc_feature (198)..(198): n is a, c, g, or t
caactgcaaaccgggatagtgggctcgtgctccttagtgggactcattgataaggaggcacttagtagagtgataatatcttcaccctctataccatctgataagtcaaacaggtagcttgggatcggtgcagtagcatttgggtatatgttctggcctggctttactaaacaatttgcaaggcaaagctaaaaccanaaacatatgcgcgctttgcagttg

SEQ ID NO: 418973 - DNA, 124 bp, Homo Sapiens
gcgtccctttcaggtaagatctccatagtatatatgcattttccatgtcaagttatgacggagttaggaatcacaaatacaataaacaatcaaaataaactgttttggagggcacgaaatatat

SEQ ID NO: 418974 - DNA, 296 bp, Homo Sapiens
agttgtgcagcaacagaatacaaaggcaatacacgatcaatataggcagtgaaacaaaagtatcatatgcaagcttaaaacagactacccaatattaactctggtttccccctgaatatgtggcatccttggcagcacttctgagagtggctgctttcataccaagaagcccatgggcttggaggtgggataggtgcctttctggcttctcattgctgcttctagatcagtctccaaatatcccccttccccacattggaatgaatagccatcacagcatggatggaggttagaat

SEQ ID NO: 418975 - DNA, 139 bp, Homo Sapiens
gtaggccctattatatgttatagatttaagatcatttatgtttatagttaactctgtatatgctttcaggtttcaccttttaaattaataaaaggttgatttatgtaatatttcaagtaaaaacagctaagtgaaccag

SEQ ID NO: 418976 - DNA, 416 bp, Homo Sapiens
  misc_feature (197)..(304): n is a, c, g, or t
ttttattcatccatactgtttaaaaactatttcgtatttaaattttactctgacaataatggtatataaaaaatatcggggctctttttaaaggaacaacaaccaaaaccctcataggaaaagacagggtccatcttgttagcatacgtgttagttaagagtgctgcctctggaaccaggctgtgttcagctggaannnnnnnnnnnnnnnnnnnnnnnnnnnnnnnnnnnnnnnnnnnnnnnnnnnnnnnnnnnnnnnnnnnnnnnnnnnnnnnnnnnnnnnnnnnnnnnnnnnnnnnnnnnnattgacaagtgagaactgtggctactattattaccgttattaacataccttcatgagctgggccctcttggtgtgcagtatttactttgtaagtctgagacacctgggagag

SEQ ID NO: 418977 - DNA, 376 bp, Homo Sapiens
caacatgtctacatcaatctcatactttctctttgccttaattaggagaattaaaggagagctgaaatgggaatcatgtttttacgctgtgattcagtgctatttaaggctgtttccacgccctaaaatcattacaacctcatgagtcttaaaggttccactcttgggaagcactgacatcatctagtccttccatgttttacaaacgaggagatggaggctcagaagaggctgtcccaaggatttagaacctgtttacaggaattcacatggaattgagtactcacatgtattgagtacaggggaattctatggacccacagcagggaagtagggccgggtcttaagatgatattcttttgatcttcactttctc

SEQ ID NO: 418978 - DNA, 381 bp, Homo Sapiens
agaagttctggcaggttgccatctcaaccaagcatcaaatttggcatccctaagggtagggcaagctgccatgctgagcttcccaggtgatgtcatataaggtacacaccatcactcaggaagaattcgcaccacaagaatgtttatgctaaatctaactgagtctctagacccaaattccagttcacggggaataccaaggatagaggaacaagtcaaacaaccccttaaagaaaagttcagacaagttcagaatgtgagacatgctatatgaaaactcccaaggacttgacaaaaagtcttatcacaggggatttttttaaaaattctagattttctagattaagagactaaaacaacataatgcagtacataaacctt

SEQ ID NO: 418979 - DNA, 152 bp, Homo Sapiens
cggccactgtaacggtggggatagagaactccagaatttaatcatcagactccaatcagtccctaaatccacaaaggcagaaataggagctttttatttattcaagtacattttgtttctttcaacttaagcccaaaacgatagtttaatca

SEQ ID NO: 418980 - DNA, 330 bp, Homo Sapiens
  misc_feature (107)..(129): n is a, c, g, or t
tgatcgagctggtaccaactgtcaacgaaacagtagtaggaatataatatgtatatccagaaatattagtttgaattaacagtataattcaccatccataagacatnnnnnnnnnnnnnnnnnnnnnnntatatatataaacctcctgagtcaccaaagcaaacacattccacattgcttcaaagtcagcttcacagcttgtagggtagggatgtcagtttgagtctaagtgagattctggtatgtctaggctggtcagataagaaacaatttcactggtggggctcaaggagccctgtaagaaagagttgggctctttgactttagcct

SEQ ID NO: 418981 - DNA, 141 bp, Homo Sapiens
ctggctaagccgcccttcccataagtagcttatggtttagaagttcagttctctaatacaaaggataaccaaggacccatgcaatggcaaacagagactaaacagcaaaaattagaaatgacaactaaagttgtagccagg

SEQ ID NO: 418982 - DNA, 343 bp, Homo Sapiens
acttcagcagcaccactcttcttggtgctggtctaccaggattatcccacattgtacttgagctgaggatatctatttatgacaatataggggtaaagtcatgaccacagggaacacactgagcctgggcggaaggctcacagaggactagggcttgaaacaggagtccttcctaggccagcgtccactggctggtggaaagggtctctcaacctatgcactcatttcacctgctcccagcaggttactgtgtctccaaggttactcgtgctccctgcacagagctgacgctaactgaggcgagacagtgggctaggctcttgtccccttccccagtgtggtg

SEQ ID NO: 418983 - DNA, 218 bp, Homo Sapiens
gcgtccgtcaccctgccttaccaaccttactgaccccaaaccgggcctctgagctgcatgactccccccgagcttcacacccttcaggaaccgagcggcacctggacctgcgatggtggagggcactggacgcccgtgcgctgacacacccacatcccacgcgcccacaacccacgcgcccacagcccatgcgcccacaacccacgcgcccacaaacc

SEQ ID NO: 418984 - DNA, 175 bp, Homo Sapiens
  misc_feature (16)..(16): n is a, c, g, or t
tgggttgaggccgcanaccccacccatttacctcttaacggtttcacaccctctagggctctctcttcaaagttctctcccactttcccttacggtacttgttgactataggtctcgagccggaatttaagcttaaatggagattaccacccgttttgggctgctttcccaaaca

SEQ ID NO: 418985 - DNA, 495 bp, Homo Sapiens
aggactcccccaagctgcaagccgattttgtagaaaagattgtgacgtatcctgcagaaatatcatttatgtattcccacaaagcactagtgtcctttacttctgtccctctttactgaaagtctttgaagacattgcagctaaatagccctgtgcagttataaggaaatcaaaagaaaacattaccattctggtcactggcagcagcaccagctgttatgtaattttgttataaagctatttcctgctactggagggtttgaaataacatttacttgtataattttaattccatttagttgatccatccggggccaaataaaaagcataaattaatccactatgaatatgtcaggcagataaccattttaaaatacgagagaattaaatgttgtttacaaataatttatagccttataaaagtacctttacaaggatctataaacattcactgaaagtcccatatttggccccttattgttcaggcgcgctttg

SEQ ID NO: 418986 - DNA, 284 bp, Homo Sapiens
tcgtcgagtcggtcccatcttcaagaatgggttcttaaactccaaatttacagccctctttcccagaagcccctaaaaacatacccttgaaaaataccaaatgttgtattcaggacagtgtctaggccataatcagatatttagaaagtccctaagtgaagaggcattaagaaacaacatgaggtatagttctattagatgacatcctggtggctttattcatttagtgctatactaaggatttctcatgtttttacattgtgttcataatatgaattacaaca

SEQ ID NO: 418987 - DNA, 279 bp, Homo Sapiens
cgctaatgtgaaaaagcaagaacacccagttctgagtctcagcctggtcccaggcagcggattacaagcacttaaactgctcagcgctgttgtcacacagtcttactaagtgtcgtgggtgtttgacgtaccaagggacacacaaaatcacaccaacacatcccactactctctagccatggtaaatgtgttgcctaaaagcattgcaggtttcaccctttttattaaacaccatttttccaggggcttgattattagtacattggtgttggatgtcaa

SEQ ID NO: 418988 - DNA, 162 bp, Homo Sapiens
tcatagagtatatctaattctacatttatgcaagaataactttactaagtatggatctttaaacaattaaaatatatactaatcccaagttgcaaacagtggttcaagtagaaaacaattttgtttggctggtttatttaatatttccacttcaagttcatt

SEQ ID NO: 418989 - DNA, 122 bp, Homo Sapiens
ctccataactagcatgtatatattactgggctatcttttaaaaagtaaccaacctcaaatgcaattaaattatgcctaatgctttgcaatatttattctgccttccctatcttagatttctt

SEQ ID NO: 418990 - DNA, 224 bp, Homo Sapiens
gacataaatgtgatcctataatactctactgcttatatcacctttaaacgctttgcatccttcacagggtcactgtataccagcttgatctttggattctcctctgaatagcctctcctttctgtgtacatgcctcctattcgagaccttaaggtcacccaaagagaaacattgcttaccacccacttttccttgtgctcatatttgttctctctgtctggtag

SEQ ID NO: 418991 - DNA, 329 bp, Homo Sapiens
  misc_feature (133)..(133): n is a, c, g, or t
  misc_feature (179)..(179): n is a, c, g, or t
  misc_feature (184)..(185): n is a, c, g, or t
  misc_feature (191)..(192): n is a, c, g, or t
  misc_feature (197)..(197): n is a, c, g, or t
ttaattatgagtttcattctagaagagaaacagctaataattgagaaaaataatgcagtttcatacagtgataagtcctctgaagaatgttaacaattaggaaataggtaaggggagatagtcctgagctcanggaaagatgtcagggcttggagaaataaatttgggatttcctatcnttccnntagaanntagcnagactgttatggaaagcaacatggttagatgtagtgtactagggagtgagaaaaaggaagagggagttgaagcctgcactctggcatctatagaatagaacatagaaaaggagcccacagagatgaatgaga

SEQ ID NO: 418992 - DNA, 253 bp, Homo Sapiens
taaaactcggcagtgaggtacagaacagctggattggttccaggttggcatttgccttattggaacagtttgaacactcggcagtctatgcatggttgacgtatggctgctgggattggtcaagactcggccactattacaggcgcagactcctgaattaggttttcggtcctgtctgctattaaggtaggttatagttcgtccacaaggactcaaacatagacgtcctggcattcttctcaggccacatttg

SEQ ID NO: 418993 - DNA, 160 bp, Homo Sapiens
tcttatgttcagagggactgacaatttacaaaggtcagagatggtacgaggacagagtatggctaagtgtggtgtgcaagcccatctatgtgggagcacatgttgacggagggaacatggacgtggaagccagcgtgcggaaagagaagtctggaggccc

SEQ ID NO: 418994 - DNA, 232 bp, Homo Sapiens
cgccaatgtgaaactaataaatgtgaaattttttaaaatgctgtctgaaatataaaggtatcctaccttaaaatagatcttattttagaaacagctatcattttatagcacatgtggtgctacacctttttaatacctttatggtttatattgctgctaagcaattaataagatgtcaaattacaggccttaatctgcttgaaagagactggtaaaggcatttcattttagt

SEQ ID NO: 418995 - DNA, 173 bp, Homo Sapiens
  misc_feature (133)..(133): n is a, c, g, or t
cgccaatgtgaaatgatgaatgcagttggtggtgatgacctattaatgatagtagcaaagacaatgttgttgatggagatgacaacattgatggaagtggtgatggatagagcttcgtctgttggctgttgantggatgattgacgagctgagcaacttgacggtagtgatgg

SEQ ID NO: 418996 - DNA, 267 bp, Homo Sapiens
cgccaatgtgaaaaatgagggacgatgtactgctgactaaattagaaattaagggagaaaagcgcccagtgttaacaaagaagcaataacctgatgctcacactgcggacggtgttatgaatcggcctgacactttggaaagcaacttggcagaatttgtcaagagctgtaaaagtgttcatactgtggcacggtaacgttactcctgggaatccaaacacagaaaccacttcagaaggaccagtcactgtgacatcgcttataagg

SEQ ID NO: 418997 - DNA, 146 bp, Homo Sapiens
cggccaatgtgaaaagaaatgtgatctaaaatcagaggagcaactcatacacccaggaatcaatgtcaaagaaggtagtaaatgctactgcatgtttttcatgcaagacatcagaaggatttataccatttatactgcaaggtatt

SEQ ID NO: 418998 - DNA, 145 bp, Homo Sapiens
gcgcctaaatgtgaaagggttttttaataatggaaaaaaataactctcttgatgctcaagtcttgagctcaattagcaaagcaggtggacagatcatatttttttctatagcataactccaggaggatctgagctgtctttgtta

SEQ ID NO: 418999 - DNA, 122 bp, Homo Sapiens
tggaaatgtacgtagaactgtatacagcttatttataatacaattttagattcatataaaagcatgcacttcttaaaatgtcaaatattttacaatgtgctcaaaagtacatttggataata

SEQ ID NO: 419000 - DNA, 124 bp, Homo Sapiens
ctcgccacattgaaatctaaaaaatagaagggatgatattttagtagaaaatatccaaaaaactaaaattattaggacaaatcagtcccaacaattttacacacataaggttttctctaacaga

SEQ ID NO: 419001 - DNA, 376 bp, Homo Sapiens
tttcaccgaatacgtatcagagcatatctgttacctagtaagaacactttcccaagacagacattagcgaatcctaaacatgcctacacctaagaacagcacatcaagctccaccgggccataactgatagaactgaaaagcaggctaatccactattatcgctgaagacttatacttctcctacatcagtagactgagtagagttaagatggctgaaaatccttaaggacatatatgacctgagtcactttatcaatcattttgaactcattgacattatagaatactccatctaacaatggcagaatacatattagtctcaagctcacatggaacactgatgaagatagaccacattctgggcaataaagcata

SEQ ID NO: 419002 - DNA, 204 bp, Homo Sapiens
atatgaaagctaaaatcagtgccgtatctgactgtaggtgagtaaaattataataaccaggtgacaatctattaatttacgattaggaattacactgtgaagcttgactgttctgactagacacgttggctagtctacaggctaacaatactagaggagccagaattatggcactcgtgagtggacttaagacagtgttgcttt

SEQ ID NO: 419003 - DNA, 149 bp, Homo Sapiens
ctaatgacaaaaattaaaagggagtctggagggaggggcatgaacaggtggtaaggaattagcccagccagtctcactataggcaagcccactagtcaactggtgccatgttgtacccacagagcccctattttaaatataactgtaga

SEQ ID NO: 419004 - DNA, 161 bp, Homo Sapiens
gacaggtaactctaagagtataccattatgcagacgtgacataactaatcactaaatagcacacgtatgcatatattccattgcatactgaaatgtacctgaacagagcgaatccagcagtagacagaatagcatactacactggatggctgccatggaac

SEQ ID NO: 419005 - DNA, 156 bp, Homo Sapiens
cacagaggcaaggcaaatcttacttgtctagttcttactcacggacaaagaataaatatagctcctccaggagcttaataactcagtgatgtaaaaacaccttacacctaatgtagatgccatgaatagatagtactaaataatcccctctggatc

SEQ ID NO: 419006 - DNA, 319 bp, Homo Sapiens
gtgaacagagcatattggattttgtataaaaatacagagaattataaatgagatgtccaggaggcatcctaagtaggacacctaagatcagaatttatattctagttgataaaaagttgtggataaaattagggtgctgagatggaaaaagaaaggctcctgttggcaggaggaacactgatatgaagtgatgggagagctttgatcaagcctgtatctttggtatctaatatggggatgcgtagagagtattagaagccataggtacagccacatacattgttaaaatgtgactttttgtatattatttcacttgttc

SEQ ID NO: 419007 - DNA, 186 bp, Homo Sapiens
agactttgtactaaaaacaacaacaaataccaaattgctgatcaaagcggttttaccagtttacattttgactagcagtatattagtgctcatgacgctctctgtataactttgctatcagatttttttgataatctgctgggtttgaaaaggaaatttattgaggctttactatgcgtttctgat

SEQ ID NO: 419008 - DNA, 248 bp, Homo Sapiens
cgccaatgtgaagacctaggtcgctcttgaattgcccatctatctgcttctgaacataatgacgttgactgatgaccttggggagctggctgtatttaagagaagagccaatcactgtcaaacattggtgccgaacagagagcagcccttaaatacatacacacaagaagcaatgaaaaaatgtttcatttgggaaagaagacagaaggcacaggatggcagaagaaggaacttacattctataaata

SEQ ID NO: 419009 - DNA, 126 bp, Homo Sapiens
cggctggccctccatggaaggactgtggccaggtggctcatgcagtcaccggcgctttgctacagagacatgtgtgctacacgtccaggctgaaaaaccccgagaactgtgaaggtacagctaagc

SEQ ID NO: 419010 - DNA, 167 bp, Homo Sapiens
tcttgctatagcccctacctacaggtcatacccatgaatattacctacgggacacctatgggcatctgagtttgtaatcacagcactaactacatgtgtgaccctgggctgatcaatggatccttgggcctcgtgttcgaaactgatcatactttataattacacaa

SEQ ID NO: 419011 - DNA, 106 bp, Homo Sapiens
gtgaaaggatatattatgaaggaggatgcaaactttttcatcaaatgttgctgagaactgatgctggtctttagtcaaggagaccattgttaacccttacatgaat

SEQ ID NO: 419012 - DNA, 228 bp, Homo Sapiens
  misc_feature (93)..(101): n is a, c, g, or t
tggattattatatgtttcctttgggatttacttctttcactttagcaacatacaggtaagattcatacatgttgctcgtgaacggtttgatcnnnnnnnnnacgagtagtgtgccatttctgtcacataaggtcatctgagttatttccatttttaggaaattatgaataaagctactgtaaaaattcacaagtaagattttgcgtgtattcgagttttcaattggcg

SEQ ID NO: 419013 - DNA, 263 bp, Homo Sapiens
gcctgcaatttttattactcaaggaaaatgtgctatacagaccattgctatcaccatgccacagcgactgcttgctctacaggaggaggacttcacccatatgaatggggtgacacatacgtgtgcttgagtcccttccctctggctaatctgagacaactcaacctctccctctttccccaatttcttctcgtttgctatgttgattggattgttttctcaagactcttggttgtaaaaatgaaaacgaaaataggcagtta

SEQ ID NO: 419014 - DNA, 412 bp, Homo Sapiens
ttagctcatgatcttcttgttcaatctaaagtgtcccaacactggaggaagtggggaggtgtgggtacaggaaagaagaacactccagtagctataagccaacgccttgaaagtttcatcaatagcctcctccttcccaagttgctgagaacccaaatgaagcaaatgtctgtatagagggtgtggccacagcagcaaaaacatgagttcaattcatcaagtctcttctttaaactatttcaagttctgcaaatgaaggaactgaccatttatagattgggtcactggaacaagatggaaaggcgggctgtggtatactattctggaaaggattttaaaggttagctgacagcccttttcctgaaatgattaacactgataaattgtccgagggcagaatgtatttaaatac

SEQ ID NO: 419015 - DNA, 383 bp, Homo Sapiens
cagccaatgtgagagaaatctgggcaagtgaacagaaaccgggaaacactgccgttagaaagacattgaaacgtgatgcattaaagggttctttattcctctcctttattcaaactttttatttaaactacctccttttttgtaattcatccactaaactactaaaaactccattataattatcctcggattgaaccaagttgatgataccagccctgtggtccgctagtgtatcattactgtgaacggtctggcctggctttgtgctttaaatgcttggggaggctgacaggggagcagccctgggaggaagctgctggttttagccaaacagggaacacgcagctgtggagccaagtcccagacttgaggcctcagctcat

SEQ ID NO: 419016 - DNA, 352 bp, Homo Sapiens
cgagtggcctgcaggtttccttagcacttggtacctatccctgtagtggcacatgtttgcattgtatactgcatatttacttgctatattctcctccactaaattgcattccttgagagttggcatgtgttgcatatgtgtgtagagaagaggcatttaatattggttgaatttctgactgaacaagtaggtgaagaaatggagaggttgggggaggaatggataaatgtctgggccttgagtcagcaggcagggacactttgaccagcttatgagatggggagacttaggcaagggcctgaggtctgtcgtcctcccctgcaacccatgagccctatagcagggacccact

SEQ ID NO: 419017 - DNA, 372 bp, Homo Sapiens
ccctgcgagtgggtccctgcagagtctgtgctgagcccggcttgtcaggcacactagggctgggacagatagaaataagcggataggagctacagtcccgccacactgctccttccagtggtcactaatcctagttaaaccggaacgggcctcccgtcgtccagtgtcaatgggaagcaaaggagcctcgggctgatggattcgggactggcattggcagaggggcttcatcagaaagccctgagagggaggagggcggggtggcaccgtggtcccgttggtggagacagggatcatgtcaactgatttgctgattgagcttcagatcctaggagaaccttccacagaatcacatcagtgcagcagcaggga

SEQ ID NO: 419018 - DNA, 529 bp, Homo Sapiens
  misc_feature (47)..(124): n is a, c, g, or t
  misc_feature (196)..(236): n is a, c, g, or t
cagtggtcctgctgtgtgttgggacgagtatatgttaggggggtgannnnnnnnnnnnnnnnnnnnnnnnnnnnnnnnnnnnnnnnnnnnnnnnnnnnnnnnnnnnnnnnnnnnnnnnnnnnnngattatagacgtgtataaatgtgtattcgtggtgtgtgtgagttaggtgagtgtgagtctctgtatatacannnnnnnnnnnnnnnnnnnnnnnnnnnnnnnnnnnnnnnnnccaccgcttgagatgatcatcctattcatggtcagtaatgttgccactatcattaagtatgaataatattgtgtggtttatacaatgtttacacctgaatcatgtcatcaaagccatctgattccatgaaataggataagatatgaataaataggtaaatgcatagaatataagtttcaataattcattgacactcagagaatccaaatgcatgcagctggttagaagctgtgtccagatgccaaaaaaacctcctaacaatgaactccaaagaaggcagtccaaggtgcacc

SEQ ID NO: 419019 - DNA, 377 bp, Homo Sapiens
ttttttctgataatagcctgatatggagatgagatagcagaaaattggcatgatctagaaggtttcttttccccttaaacctgagtgttttttgttagtgaattcactccaatgtattgctaaaggtggtcgtataaaccattctgtttgcaatctcctttttgtccttctgttcaaagtgagtaaagaacaacctgtttgaatcagacatcagatcatgatagttatgtggggagagggcaggcagggactcagtaaaaggacctggtagagaaagcagaatctacaggtttgaacataacattatggctcagggtcagtcattctaggaattggtctcatggcagatgtacccaaagctgcatttcaagtcgtga

SEQ ID NO: 419020 - DNA, 554 bp, Homo Sapiens
caggtgggtctgttgaggtcagcacccttcccttcttcccagtctgttaccttatctcttactatggtgttatgatggggaggaaaggaagggtgctgacctcaacagggagccagcatattgcttaactaatccaagccagggcttgcatggaggatttttatttcccacaatatcatgggtaccctgtgcagggtggtgaggggtgctgggtgggaccatatcactttacttcgcgatgctggaagtgtttgggctttgggaggaaaggtcacaggcagcgttatggtatgagtatgtagagatattgggccttcactctccagctgcagtagaacgaggttggcaaacagcagtcaaacttatgcttttaaatgagatagagctgatactaatggacaagttggtgctatccccggaggaacatgaactgcctgtatttgagtatgtatatgtctgcagctctcagattatagtgttatggcttgttgtgccagagagttcttctctttacaggctgcatagaatattttcatggacactgaccttgagaa

SEQ ID NO: 419021 - DNA, 484 bp, Homo Sapiens
cgagtggtcctgcaaagtaggaaataaaaatgttacatgatggagacgtggctgtggctgactcctctataagtactaatgctaaataaaatcaccttatactgggagctgaaatagtattctggtaagcaatacctcaaaatgtcaaaggcaaaatttttagactcatgaataccattgcatatttcttttgattctaattacaatacaatttattcttgattccaaattcattttgcatcagtgaacatttcctattgtttctagacatgtatcactacatggtaatttgtccattagttctcatttgttaaaatgtcttctatcaagtcacatatggccaatattaattttccaagtacaactgcccttaggcaaatgtttattagcattcaccaatacattttcagctcttccatgtaaaacaatttcactaaaatgtcttctcctgcagatatagaaatgtcacctgagaaattcatcc

SEQ ID NO: 419022 - DNA, 561 bp, Homo Sapiens
cagaggatcccccgagtggcctgctcactgccgagtgggtccctgcagcagtggggaaggggaggacagagggagttcacaagaactgggaatgagagaatttaccatagacagaggcacaggatgctaaaaacaagacttttctggcaactttaggcgccaccatgtaggaaatgtttattggtgtgacctttggtttagtatgtgaaggtttacatgattggggagaaccacaggactcagatttgcagaaatgaaagatgcatagtaatgaagcttgtactatattaaaatggccacaagtgagctatatatttaggcaggtgaggctataggcatattataaatccacaacagaaggcaaagtcaatggtgcctcctgtatcaccataacaatgcataaaatgtatatttcaaagctagaaggtgataatcatggaaaatttataggagggatatctgaaaggcagctgaaaggcccagaagccatagggagtgcatgatttcataaatactgaaaaagaattattgcaggtctcctaccaagcccattatatgtgt

SEQ ID NO: 419023 - DNA, 173 bp, Homo Sapiens
cgttgtggtccctgcttaccataagaaataacaatatactatgtcacatgtgataggaacttggctgaaaaattacagatcagggaaaaagcataatgccccactcatgcatggcaggtagagttgttcattaacaaatccgacaaaaatggattggttaggcgcggccatcc

SEQ ID NO: 419024 - DNA, 525 bp, Homo Sapiens
cgctcgagtgggtccctgaacttatggggctcaccatccagtgtacctatatggtgaaatgctgtgcccctaaaagacattgaatgacagctccaattgagtgatcttactgggggacctattattttcaagatatgtactatttacttaggttacagtatcattctatcatcaaatttcatgggtaatttttatgtacaaaagctgatagattctgagatgagatccagcctgaagccagtcaggatgaaatgataaccctgaacatgtgatgatgaaaatcaagtgaaatgaacactatggatagttcgatattttctcacccacacactaaatgtcaagggatgttttaaagaatgctgttctctgtgcagctagagtaggttttaaatatctgcccatgcttaacaaaaactgtcaatattgcaaccttaatgatagagtgaaatggaagatcgcatgtagcaatgcattattataatcactaacacatcaggtgaggtatacaaattaacaatctcacag

SEQ ID NO: 419025 - DNA, 296 bp, Homo Sapiens
cgagtgggctgcatcctctgatgtgtacttttctctcaacagtaaacaccttatatgatgtttttcagtatctcctgagtataaggtgctgggctcttctctctttctgaacagttctggttctttagtcctagtgcagagacagcctttgtgattaaaagacaaaaaaatgtactagtaataataagattttccaaggcagtcacccagtcctctcttctggtttgtttttctgtctttccctcacctcctcactcctgccttgggaccagttgtgcttttgctcaattcattca

SEQ ID NO: 419026 - DNA, 315 bp, Homo Sapiens
ggatccctgggtctgctaggagtatgactgaatatgcaagtctgtttccacactcccggcgaccttcctcatcagtcataggtttcttttccaaatgagctgaggactaggacctattggttagaagttcgcaccattttcttccccttgagattaaggattgtggttttcaccatgcacaaaataagcctctctaataagtatcaaccaacccagctggaagcacaatgttagaataataatgtcttacattagcaagatatttcttcctattttctaaatgtccctctccatcagtagcacctggacccacac

SEQ ID NO: 419027 - DNA, 400 bp, Homo Sapiens
cgagtggtccgccgtgggatctgttcgaagggggtagtccccagcagttgtcctgacctgaatatgtttctatttcctgccttcacagaccctgaagcaggtgacaggagtccctacaacacgttctgtccttcaccggaaaggcatctgactagcatgcctactcaaaagtcctccaccttgcagaatctgcatggagtccttggctatgctagcagagtctgaaaatgatttcctatgctcgagcaggggttggcattgctaaactgctgagggacagagtgaaacactcatttcctgtgttctgttgacctgcgtccacagtgtcccctctgggtgccccccacatgttatgtcttcctctatttgcaccttctcaccgtttatcattatctagttt

SEQ ID NO: 419028 - DNA, 387 bp, Homo Sapiens
cagatacagtagtgctatatcaacttctcctaagctacactatgcaactgtataccccttttatatcactattactcagacagctcctacgttcctaactcccccaccaaccatctggagattaatcttgatcatgagataatttaccatagccactcctcagacctctacactaagaacaaaagataacagctttcaacttacttatgctgtcactacattgatgttaacttgcgactccattgaagcactttgacattataacttcttttcacaacttaaattagtccaaatagcaactaatctgtgctatagaaaccagactccatatttccacagcaaatccttgcaagggacccacctcggcgcgaatcctctacagctcga

SEQ ID NO: 419029 - DNA, 234 bp, Homo Sapiens
tgtcagtgatggcttcacattttgcatataggaagtagaactgtggactaggaaggtgttacccttcttcctgcagatcacagatgctggggtctccatgcttccagccctccggcccctgggcacctatgtactttgtggaccattattatgtcttttccctgtaccagtttatgatctagttactgaaaggcctgtgctgctaattcctttcatacgtatcatatgtttttt

SEQ ID NO: 419030 - DNA, 223 bp, Homo Sapiens
atgcccttgactcacctaaaatgttatcaactgtctggatgtgacatttcagacttctaaacaggaggcatatcaaaacaggccttttgcctattcatgaggttgctagcctgataaacaacatcctcatagagccacactaacacaccttgacctgcactggagtattcaggagtagctaggtaccagcagcggacacagtgtctaggcaactaggagctac

SEQ ID NO: 419031 - DNA, 322 bp, Homo Sapiens
gctgcataacaaaggatgtaaaaataagtacaggacaggacatcattgtcaggcttgacaggcggatgtacctgaatgatcaggccctatcttccggtgcacaggtagcagtggggcatgatgtgtgttgccctcttcatgggtgccttgtactagaagctggtaaaaggatgtaggacagttgtcaccattagtaataaagcaacagaggtctgcgtttccagtgtacattcaagcttgcctgtaacttgtgtgtgcctcggatatcaatttttacaaaaaagtttcaggacatctggcttggtccactgttactcagagc

SEQ ID NO: 419032 - DNA, 344 bp, Homo Sapiens
tagtatatatactccaaatagactgcagaatgcaagaatggaggagaagagacagagactatgcccagcaaaagatatagccaagagaggagtcagaccagcttggcagactactacctttcccccagaggctccattagaaagccttaaagcagcctactggaacccttgtctgcgattcaacaataagaacagtctattacacattttcactagctcctacctacatgaaacagatagagaggtctaactaaacaatgtacatcagtttggtcataactgctaggaactcttctgtagtaaactggctgcacttcaaaaacatcccatcttacctccaagtc

SEQ ID NO: 419033 - DNA, 279 bp, Homo Sapiens
tagtcctgcttgggtgactgctctcacctccagacaaatgtgcccctgatctctgaatgtctcctgcccaggcctggaaaacctaaacattattaccttcccctagcctccctcatcccctaaaatgaggtttctaagggttttatctgctgttgtcaagtttatggccataatttgaaatgctgttaatattactgtcagcagagagctacaaattacaaagttgtaaagtttctttatagtgataactgtcagccttcactagcagggacccactcg

SEQ ID NO: 419034 - DNA, 125 bp, Homo Sapiens
tatgagactctcttatctttatataattctgcaaaaggagatttaagctttgcagttcaaaatacgataagctcattttaatgactgaaatctatactatacactcagaaggcaattgctttttg

SEQ ID NO: 419035 - DNA, 200 bp, Homo Sapiens
gttcactgcacccccatggaactgacatttctcaggactgaaggagagtggcacaaaggtcaagaacccactctgcctgagctcagcctgagctcaaactcccagttcaggctctttcctgttgttttactttgggaagataaatgttttacccgatcagtgttgtcatctagtaaatcagcgaattacaactattatct

SEQ ID NO: 419036 - DNA, 365 bp, Homo Sapiens
ctttgtttacactactcagcctcagcaatggcggacgcacctctcccagcctcactgcctccttgcagttctatctcagactgctgtgctagcagtgagcaagcctccgcaggcatgggaccctccgagccaggcacgggatataatctcctggtgtgccatttgctaagaccgttggaacagggcagtattagggtgggaatgtcccgactttccaggtaccgtctgtcacggcttcccttggctcggacagggacttctccaactccttgtgcttcccaggtgaggcaatgccccgccctgcttcggctcacgctccgtgggctatacccactgtccaacaagccctactgagatgaacccgg

SEQ ID NO: 419037 - DNA, 148 bp, Homo Sapiens
aaaaaaataatatcagctcggtacctttatgtaatgaagcctccataacaacccaagaggcattgggtttggggagcttccagcatagctgaacacgtgaaggttcttggagggtggtgcatctacggaggacgcagtgacccactcg

SEQ ID NO: 419038 - DNA, 423 bp, Homo Sapiens
tctgtaagctactgaagtagggtgaacttccaggatgcggcaagcctggaactgtggcacccattctggggttcaaagaaggaggctcccctaggcctgagaacatgttctagagcaaacaggaggcaggaagtcttcttcaccagcatgccagcctactctgagcccagcctgagagaccgccaacatttgcagaaatacttcctgttaacatttaccttggctgatgtctattaatcgggtctattaatagactttttgtttggcctttcctaaggaataacttctagaagaagcattcctacccaattatgccctgccttgcacaatgcttagggttcgtcaattgctcttccatccttatctcttgatccattcatttacttatccatagcacacaattattgagcagggacccactcg

SEQ ID NO: 419039 - DNA, 289 bp, Homo Sapiens
tgggtctgcgtacacggtctatgcaggcagtgtagctctatatgaaaaggaacctattgattaaatacttggaaagtttcaaaaagcccccttttaaatcctaagatattggcattcatgtgatggatgtcttgaggcagataacacagttgaatctttttagtggaagaaacacagatcttttcacatgaagttgtacttgaaaaatattgccataattcaaatatacagtgtagttatcaggaactgtacatttttatgtatcttgaaagagccttacagagttaat

SEQ ID NO: 419040 - DNA, 352 bp, Homo Sapiens
ccccgagtggtccctgcacattatgttcttattttattgtgcccttgctatataagtgtaaaacccaccatttcactggaaaaagataaatacttcatttttcactctaagaagtagcatatctaaatggtccatccaggaataatggagagtctcaaaaacaaacatcagaacttaacttcttagcacaccacacaaacaagaaaggcttcatttctagatagtctcctcatatgtctaattggccatgacaatatggtactggtatctcccttctttcctttaatgctatattttaaaaagtctgcattcattcaatatttagagtgtccctgttaaatgttgaataatg

SEQ ID NO: 419041 - DNA, 179 bp, Homo Sapiens
cgagtgggtccctgctgctgccatgggtgagaaagcatatgtcagtgagcatgctctctggttccagtaatggaatcgctaactaaaaatgcctttaaacaacagaggtttctgttttctctttgaagtgatatggaagtatgttacccaccttgaattctccttatcattctttctcc

SEQ ID NO: 419042 - DNA, 385 bp, Homo Sapiens
  misc_feature (227)..(288): n is a, c, g, or t
tcttctcatatctccaaaaaggatagtacttaaattttaaatttcgtgagttaacctatagttggaacagttttggacggtgacctatttgtcatgaattgataaaaggcccacataaacactatggaaaggaatgttaaacattagttaacactgtgcaacttgtttccttaagtttgcatttgtcaccagaatagaaaactaacaaaatatttcctggatatctnnnnnnnnnnnnnnnnnnnnnnnnnnnnnnnnnnnnnnnnnnnnnnnnnnnnnnnnnnnnnngaatctgaggcataaacggaagtctgtccagacctgatagggtactcttatgagagtctggaagaaagaagggaccaactgctaactcaagcctacg

SEQ ID NO: 419043 - DNA, 341 bp, Homo Sapiens
tcttctcctgacatgtgatcgtctttcatttgctttggagcttagtggtgaagagagggaacatttccataactgaaaataaatggagaaaagtggtaactcttttgtttgtttgaggatatttgaaatactagaaataatgaggaaagtacaagcctagctgagaaactagtttcatcacttgtggacttaaaaaagtaaagctaacagggtttaaagttgagaggcagttcacatcctaagtgatacctagaaacctgctttcttgttcgcaaatgatcaacatgaacatacagaatggctgacatttggacctttggataagcttaaaacatggattg

SEQ ID NO: 419044 - DNA, 113 bp, Homo Sapiens
tcttcttcccctgacaccaattcaagacagtgattaattctgggtaaggaaggaaaagggatgaaaatgaggcttgattctatctctgatttttatttcttaaaagagagaga

SEQ ID NO: 419045 - DNA, 365 bp, Homo Sapiens
tctttcccctgacatgttaattcaaatttgtctatgtggtttaataaggcagaccctgccttcttatgatgagcttgtaacctggacctggtccgagtacttcacccatctgaccatagtaattgttcaggtacagaaatgtggctcaaatcagactaatcatcatcctccctaagactggtattataagaaaggatatactctcaatttctagatagaagcctataaggaccagacagctcgaaactgaagggggtatcttgcctctgagtagagagacttctgaaaataaggccaagcagagcagaaggactggggaagagagaatccagatgacatctctgaccttctggatgtggctctca

SEQ ID NO: 419046 - DNA, 342 bp, Homo Sapiens
tcttctccctgacacgaagtgaaacaagttaggtacatgacagcacatccactcttctctgagcacctcctgaagggaaggaggaagttgggctatttgaggtggaagaataaagacagggagagttctttccctaaaacagccacgttgatggcacagtggctcttcccagacgttcctcgcctttgcagggcttctgatagtcacctgattgattgcctaaaatctggggactttcctgggagctgctgaatggcatttgtttccatatctttggagaagattatcaggcatgagccttaacatcttagcatttttgtaattagtatttctccactgaaa

SEQ ID NO: 419047 - DNA, 382 bp, Homo Sapiens
cctgtacagcattgtagtaggtaacaatattgtactatcttggagacttggggaagccttttttccccttgtctaatatctaaaattaatctgtattataactatgcatcttctgagcccttgcctcttgtatacctgctaattacattaatatttgagccagcatgagaatcagacagaaaacaggtatctcctatccacacttttgtgagaaatcaggcgcagaaaatcaggggccctctcataggcacctcaaacccagcatatctcaaattgaacatgtttccaacttctagctagttatccctctttttatgaccttcctaactaaagacactcatccatctagtcacccaagccagaaacctggatgtcagccatg

SEQ ID NO: 419048 - DNA, 386 bp, Homo Sapiens
tacttctccccgacagagtctggaaggcttcccagaagtggcacttaaggatcagtggaatgtttttttgcatgaaaagcaggaacagggccgcaagcagcatgaacaaccttgagaagtctggaaaaggcttcgaggattttggtgtggctggagagtaggctgcacgtggcaacatcaagaaataagacaagggaaagaggcagagtcaggcacagaggtgcctcaggagccacggtaaggagttgaggctggatctggaaccacagagaaccaccgaggtggtgttcagaagcagaatcacacagagaaacttgcattccagaaggttcactcaggctgtggcttggagaaagtggacgagaggctggaagatgctgctgtag

SEQ ID NO: 419049 - DNA, 324 bp, Homo Sapiens
tctctcccctgacacacacacaaaaaacctttagcaaaccatcacactacagaacatttgtggaacttcttggaactcatttctgattggtgcggcaaaaagtgcaataacctgggagttaacaaaaggtttgcattaagcactagcaggccaatccaggggagtcaaaaccaccaataatgagaatgcgtgtgaatctgcatctgaaaaactgagaaaaagatttaatgaggctggagcacaaagtatgaggaagatgggcaaatgagggggctggagaacattctagagcctattgagaagcttggattttatagattgggc

SEQ ID NO: 419050 - DNA, 401 bp, Homo Sapiens
cccgttcccgtgctctaggtcagagtgtattttgtaaatggttactatgctaattactaagcaactttcaagtaatttgaagagtccttctaaaaaaattcaatggaataattacagttaaattttctactactcagttttgccctacccagccaactttcccctcataaatgtccttctgtttctactcaaaatgggctttctccttgcatgacattaatagtaccagcttcctctatcacgttaataataattcgttgtttggccttgcatttgagattttcaaagctacaggaaaacagggcaggacaaagattttctccagactacatcagactgattttcccccactgctgtctgcagagccttttctttagaaggttggggccaattatggggga

SEQ ID NO: 419051 - DNA, 403 bp, Homo Sapiens
tgactctagaggctcccccaatttgacgcggagtctaggcccacttcaaaatccaactcaagatgttactttagggtctactatgtatgtagtgattcccctcacaaattaagcatctgcagtgtcccctccagagacccatgaaggagaagacaggattcaagagaaaacactaaggatgcagaagtacaggggaacaggcaaggggcagcacagctcagcaggaacatgaagtgtatggagaaaggggactcgtggtggacactcatgtagggaggagtaggaaaaattgcaagtcatttattttcaaagcatgttttcttaaaaactaggcaactgaaaggacattactacaattcttgaacatataaacacacagctgaatctgtttgacaaagtagga

SEQ ID NO: 419052 - DNA, 353 bp, Homo Sapiens
tcattctccctgacagaaaagaagaaccacatcccacaataaaacccactgggctctgagaaaaggtgattctgatagaaaataacaggtatgctctaaattcaaatggggctatagttgagtagattcactccagtcccggaattaacatcacgaccaaatgaaaggagccacgtcctcaggtctcaaaaatcacagatgctcacagcaccaagagcccttccctaccagcggttcctgtgtccctcaataccacagtcctacccagggaacattcactaaggacacattaggagcgagtgctcagttagacactgggagtgtaacgacgaataaaacacttccttctctca

SEQ ID NO: 419053 - DNA, 122 bp, Homo Sapiens
tcttcccctgacaattaatttccaaattatactagaggaacgctcacgtgatacttcactgaaaacagaatagtgagaataatatatatgatgaccagattcagacatttaaatatcaggtt

SEQ ID NO: 419054 - DNA, 182 bp, Homo Sapiens
ttctccctgacaccaatatgaataactcatgtaaggtgtggcaagccacagataaggacttcagacaatccagcatgaggacaagtggtttatacatgaatagcacatggctagtctttcagtgttagcagagtagagagagaacaattaatagtctcagatgggagggaaagatgaaatga

SEQ ID NO: 419055 - DNA, 352 bp, Homo Sapiens
  misc_feature (301)..(301): n is a, c, g, or t
accctcttctccctgacaggaggttttgctcaagcattgatttactccagcaccccaagagagagaaaaagcatcacttgtacgttttcaaagtcatgtactgtgtgtgtaaaaattgtaaaataaaatacagggcatcagagagatttctctatggctgtgtgtggttttggcatatgcttcaaggtcttttctgtaatgtggaatatttagggggaaaaatataagaaatgctgacataatggaaagcatttgggtactaggatcagccaaacccaagttcaaatatgacttctgccanctaactacttgtgtaaacataagtaaattagcctctccaagtttcaatgtc

SEQ ID NO: 419056 - DNA, 349 bp, Homo Sapiens
tcttctccctgacagctaaacatattacgtgagttatatcacttaatgtatgtagtaaggagaagaaaatcctggggtggtagcttcctttgttctgagtcatttggtaggtaacatattgaaactacttctgttagcaagttttcattatttactggcaccacaccttccttgctcatagtttctctgactgtacatccttgaacgagcatgaaataacccaataagtcttcgtgttgctgagtagttttcatacactatctagggtgttatgcagagcgtgtttagtggggtcagataaagatcagaggtccaagactggggcttcctatagtgtcaggcgagaaga

SEQ ID NO: 419057 - DNA, 162 bp, Homo Sapiens
cctagatatacaaataggaagatgattttttctagtcatctgattatctcaggctacaattgtaataactataggtattataggtgtattggtcatggtttcctgattagtattcagccagtttgaccaatatgaaaatctcatttgcaattaaagaaattt

SEQ ID NO: 419058 - DNA, 185 bp, Homo Sapiens
tcttcccctgacatgtcacatctatttgttttcaacaaaaaatcgatgaatcttagatactgaaaattatgttattttgctcaagggagaaatctaaataaccataaaatcagattaagccaaatgtaattatctcagcaaataaaaagcaaatggcaaaatctctccaagcaatgctcatagca

SEQ ID NO: 419059 - DNA, 413 bp, Homo Sapiens
tcttctcctgacagaaaatcaaattgagatacacaattttacataataaattagctaattttggtggtacagatgaagagaatgttaagtcacttaagatatctgggacatttaaaattgatacaaagcctttgaaaatcaatttgtaacaatttatcaaaagccattgaaattgtgaatcatttgaccccatgaatgtaggaaaacctctaaacacgaacatttcattaaagcattacctagcaatatttagttggggaatggttaaactaattaacatgcagccaagctgcttaaggaagtctgttgatcatgagagttctccatctgacttgtgccaacagttctagattcaggaattttttatgtagacgctttatctgcttttatttttaatttccaagatatatttt

SEQ ID NO: 419060 - DNA, 155 bp, Homo Sapiens
atctagaggatccctcttctcctgacaaatatactcagtaccgagttttctttctatcactgttgattggaataaacctaaattttaaaacagtcaaaagccacactatgatattcttacattagcttagcagaaaattgaaaagttcacggcac

SEQ ID NO: 419061 - DNA, 276 bp, Homo Sapiens
  misc_feature (180)..(180): n is a, c, g, or t
tcttctccctgacaagcaaaagcccttggcacaatttaattttcacataaccactttccattgtccagctgcaggcaaaagaaatgagcaatgaaagttttggagtctaccccagtaccctcatttcctgtctttatttcctttactttatagatgtattctatacctgctatgtagatnatgctctagttttccctttactgccaactggaaaaggagagttggctttacaggggctgtggattaagagccaggcttcattccatcccaggggag

SEQ ID NO: 419062 - DNA, 331 bp, Homo Sapiens
ctcttctcctgacaaatgaatggggcttgggactcacctggggatgccagaggctgagtgaggtcaggctgagtgctaagtccattctggtccaattctcagccccaccactacccaacctgaacccagcaaggacagaattttccacagaattcaggacctgaatagaaaatacagtactagaaatactcatggaggtgtgacaagaatacccacaagataaaacgatggctccagatcgaaatgtgatcatagcagcaaagtggggcgggatgtctggggccttctggctaaagacaattctgccaagtgggtgaactgagtttagagg

SEQ ID NO: 419063 - DNA, 220 bp, Homo Sapiens
  misc_feature (144)..(144): n is a, c, g, or t
  misc_feature (209)..(209): n is a, c, g, or t
tcttctcctgacacatgtaggggcggtaatgagtctgaaaaaggatatgagagaggaaagattaccttagggattttgatcaggaggcaataggaggtaaagtgtagtgtttggagacgtttgaaccaaatgaatttggaccanaaaaaaccttttagcaggagaagtaacacaagaaacatttcgtggaaacatctcaactcagcacnactacatacca

SEQ ID NO: 419064 - DNA, 330 bp, Homo Sapiens
tcttctcctgacaatccatgtgcagttttagtaaccagctaaatatctaggcaagtatcccaggaaagatgtctgtactgaaggaagagatttgggagtcatcagtttacagattttgaagctttgggagtggacgaacttaccaaaggtttcttggattcatttaataagtcctagagtgaggtggagaaaaagactagaactgagccttgaaggtcatcaatattttaagtgagagtagatcaaaggagtgttcagaggaaaaaaagagaagctggtgcagaaggaggcacaccagaagagagttgtaccccaggaggtaagaaaata

SEQ ID NO: 419065 - DNA, 178 bp, Homo Sapiens
  misc_feature (48)..(48): n is a, c, g, or t
acggtcttatgaatttctcagaaagccactaaacgagatgtgccttgnaaaacgaaagagtaaactaagcaagaggaagatctggggtctagggaataagaggtccagacccaaagagaggccaaagatattccttgagtgaaggcaaaggggagcactagaatgtcaggggagaaga

SEQ ID NO: 419066 - DNA, 317 bp, Homo Sapiens
ctcttctccctgacaccaaccaacatctacaagcatgaacaccacccagaaaaatatggcctcatcaaatgaactatataagacaacagggaataatcctggagaaagagatatatgacctttcagacagagaattcaaaatagccatgttgaggaaactcaaggaaattcaagataacacagagaaataattcagaattctatctgcataaatttaacaacaaagattcagcgaaccaagtcagaaatcctacgagttagagaaatgcaatggcacatattgaacgaaaggatcagagatctcttaagtaacagaa

SEQ ID NO: 419067 - DNA, 244 bp, Homo Sapiens
tgtaaatgtaatatttttacatcttatagaaacttagaaagtttcaaactccacactatcacttatttatctcattgctacccctctttttcctcttctttgggtcccttagaacgactacaacttttgtcctggttttatccaaagacacaaactggtgttctctcatatcattcccactcttagagtcttagaaggtttcccctttgcccacagagatgcattggatatggtactgagatta

SEQ ID NO: 419068 - DNA, 422 bp, Homo Sapiens
tcttctcccgacagttaaataaaggttgctgcaatagacttaaatgttaggcttagcttgagatttaatgaagccttggtctgagagaatgaggaatgttaagtgtatggaatctggagtccctcctttactttatattatgatggagctgaagaagtatgttgctagccttctgatataccccgggagtatttagttgataccacatttcagttgttttccaggtttctgaaagagactctggtgagagagatatctttactgaacatttcattctgtttcattattcatttcattcttgttttactggaatcagcccttgttgtaaacaagccacaattctttactctgagtcactggagagatttctgtctcctaagtttcacctggcaaactgatcaaaagtaggcatgactggcaaa

SEQ ID NO: 419069 - DNA, 140 bp, Homo Sapiens
tcacgacagtggtcagaggtctcggcaagaaaaatgaaggttctgggagttctgagagcaataggaccagagcctaagggagagataggggtaacaggtaagcaagattccagtctcaaagaagctgagacctaaataca

SEQ ID NO: 419070 - DNA, 390 bp, Homo Sapiens
tcttctctgacaaatgtagtatcattacaagaagcctaaaatggccactttatgttaactggaatgctcaaatgactagtgttttcattagcaataaatggaaagctgaaaagtaacaattttattctttgtaatagatctgtgactttcaagtctttctttttgacatttttttgtagcctggtggggaagcaggtccggctgtgagaggtgtggacagtgacctctcattccagcttttatcatcatcctgcattgtttaacaacagcaccaacaccatgctgcttgctgaaaatgcagattccattcctggattaatattctggtaccagatgtatgaggctggctctaaagaagctttttctcttaaatactgtcaggggagaaga

SEQ ID NO: 419071 - DNA, 644 bp, Homo Sapiens
ccctcttcccctgacaaggtagaatggatgcctctttcgcaggctaaatacacaaagagaagagctgttggcattggattgttcaccacagtgccatttcagtggccctctgctcatcaggaaagttttccagaaactgtccctggagcttaatttgaaatcagaagaccatttctaagtgactcttccatttattttactgcgattcttcttcttttttggctcaggtctctgaaagagcaagcatcacttccccactctggatttttactttctctggaaaaatatcccactgaagtaggtagtatagtcacagagtcatcgtcttttaaggctgataatgtcatataattatattttgcaaataaaagtaatatgattttttttcatttaggattcatcttaaattgggtgttgttaagagtaaaaattggttacagaaagagttacttagtgttatagccagaaaatggagatgtttaatttgataaacattttctgaactccttttaatgtgcaagccactgcgttaaatgttgtggaaggttcagcagatcttgtgcttcaacagcttacagcaggagatgtacctggtgaggtctacccagcctaggagttatatggggatgtgatttttctctctt

SEQ ID NO: 419072 - DNA, 201 bp, Homo Sapiens
tccttgaataaaaaggcagtcatgtaattaatagttatgtactacttgacagcataattactcattaccaatatgcaggaacaaaatgacttctaattttatcttcagagtctttaaaggtaaaaaagtacttgaaaggaagtaaactagaaagagaagatggcttttgtgagtgcttgagattcttcttgacttggaatt

SEQ ID NO: 419073 - DNA, 118 bp, Homo Sapiens
tcttaccctgacacacaactccttttcatttcagtaaagcttcctgtcagaacacattcatcaatgtaatattgccaacaaagtttaagagattaaatccccctccccacaagaatgt

SEQ ID NO: 419074 - DNA, 206 bp, Homo Sapiens
acattgtattggctgggttctgaggagaaatttatcactcatgtcagtgtatgtgtatattgcagttcagagtgttgcttgctaccttaataaaacaatgaggcataggtataaatgaaggaacatgcaggtcagctgtcagtgcatgagtggactgaatgctatgaaattgcatactattctgttggcatgtgtcaggggagaag

SEQ ID NO: 419075 - DNA, 288 bp, Homo Sapiens
tcttcctcctgacaatgataagacactgagtgttgagagagcaccgaattcaatgaagaaggttaagtgcaaaacaccatgattttcttcgagatgtgagtgtgttgagggagggggatggagagggagagcaggcaaagggagcagaagctggagaggggaggttgacgggatccagatcagcatatcttactaggttagtatttaatgaactggccagtatcagagtgatttggaggtgccaattaaaatgtgaggagcactgcaattttgtgtcaggggagaaga

SEQ ID NO: 419076 - DNA, 532 bp, Homo Sapiens
  misc_feature (176)..(228): n is a, c, g, or t
  misc_feature (317)..(327): n is a, c, g, or t
tcttcccctgacaggatagatttggcccactggccacagtatgctgacccctggactaaaggatgaatgcacaacaatgcatacgtactttttaaataaaaagctaacataatattggaactgtaggtgaatcttcgatcattagagtactagaaccagtttgtatctattttcannnnnnnnnnnnnnnnnnnnnnnnnnnnnnnnnnnnnnnnnnnnnnnnnnnnntttatgtgtttttaatgggaaattgatcccatgcaattatgtcaaagagttgttatttttaacctagaaaagtaaaagctaaggggaannnnnnnnnnnggttgggaaaatgaagagtcttttaatagttcttctaaaatcttaggttttggatattatgaggggagtgttgctgttatttacaagaagctattcagttgttcataccacaaattggggagccatccttgtctccctccacccattgccccttcaccaattgtggttaatgctggtagtgtttcaagcaggggtaccgagctcg

SEQ ID NO: 419077 - DNA, 116 bp, Homo Sapiens
ctttaaaaatcaaaaatggtatccactagaattatgaaatgcaggactctgacacaccactggaaatctattgcttaatagtattagctacatagacaacatttgtctttcttact

SEQ ID NO: 419078 - DNA, 569 bp, Homo Sapiens
  misc_feature (81)..(133): n is a, c, g, or t
  misc_feature (251)..(300): n is a, c, g, or t
cccctctttacctgacacacacagactgactaccaactgagagggcctaggagcaacctaatagcaacaaacacatttaannnnnnnnnnnnnnnnnnnnnnnnnnnnnnnnnnnnnnnnnnnnnnnnnnnnncgagggcttggacaggaaagtttaagaggagcttggaatcaacttcttgaggtgctcaatgaatgacagagaccatgtcaaaataatacaggggccagcagtgcaaagactgaggcannnnnnnnnnnnnnnnnnnnnnnnnnnnnnnnnnnnnnnnnnnnnnnnnncatcacggtagcaggcaaactctaacatgccccccgatgtatcccaccgcatatggtatgcatgccctatggtaaaggtgatgtgatgccattttcctaattaggttaagactgcaaattccatcttgctaacagactctattgccttctatggttagcacgctttgatgaaaacaagcagtcatactgtagatgtccccatggcacagacctggcggtgacccagtcaacaaacaactaagaattgaggctcagtccaacagaccttg

SEQ ID NO: 419079 - DNA, 358 bp, Homo Sapiens
gggatcccactcttctccctgacatagtaggattctaaagtgtttcagagagaaagagtggcttaattgtaacagtattaattaaatgctgataaaaccatcctctcaaaatttttctaattttaattataaatctaaatcctttatttaatcacactactgctgtgcttgttaatgttgcagcgaacaaggaaactagttacctaaagacatcaattagaaagcatcctcacaaaatgacacttcaacatttttttcttcacctgtgaaaacttgctaaatgcctatgtgaaattaagcaatctctaaagcaagaatgtctttgaactatagtgaatcaaaataatttaatgttttt

SEQ ID NO: 419080 - DNA, 494 bp, Homo Sapiens
tcttctcccgacataatgacatagctgtggagcccatggaaagagagaacctgcatctgctccagaggcagcctgggaagactctcattctcctgcaaggtcgtcaagcaaaggggaagttaggagcttggtgagaggccagggggctgctatgaaaaggaataagcatttgctaagtaatcccgaagagacaagttgaaaggaacggggcttagtagcctggataacagctattaagtatacagaagggactgggctgggcaagttttgtcctgggtggtgaggacgcaggtatcatgaaacacaggacccacagagatcatggcttcagaggcaaagcactatgtggtttctaagcactctgtgtaggtttctaaagagatttggtctgtcaaactttggaatgtgtgtccaaaggaaattacaagtgaccttttcctacctccctcccccaaatcaaggatgatcagagataattcagtttagtgtgataa

SEQ ID NO: 419081 - DNA, 172 bp, Homo Sapiens
gtattactctgttctcaccctgctatatagacctaccctgaggctgggtacatttataaagacacaagacggtttaaactgacctcacagttccccaggctgtacaggaaacatggctgggacggcttcaggaaaccttataatcctggcagaaggtgtcaggggacgaccg

SEQ ID NO: 419082 - DNA, 425 bp, Homo Sapiens
tcttctccctgacacctggcaaccaccattcgactttctatctcatgattttcactattctaagtacttcatgtaagtggaatcatacggtatttgtccttttgggactggcttatttcctgtaacataatagacatgtaatactttcttaaaagttatgaggtgaatatgaaaccgtacgagtaaactctgactttgttaccttaaaattcattgatggatctaatactttggatggatcttttatccatgtatgattttataacatcctgcactggttatttggaaaatattgattctttgagttatacccatcttctaaatattggtacattttattttacaatatgaaaagaattcattgatattaccactgaactcgtcagaaaagtccctaattattgagaatctgtcaggggagaaga

SEQ ID NO: 419083 - DNA, 374 bp, Homo Sapiens
ttaccacgagaagtgtacacttctatcttactgacaccaccttagctcagataggtagcatctgctgcctgtcctgtgcatctacatggaataaataccagctgtcctgcagaccagtgcggttagctagcttaggaacatgactgtgtcacccctacagttccgacaacccttcatttcaagcccatctgccttgctgtggttactcaggctcttaggactggtcctggcttcctgcctctcttctcctcccctcttgccccagtgtactcctcagcttggacaccctgagctgctttccacttttcacacaaaccaaatcatctttttcctctgcgctgactgctccttcttcctcggtgcctgactagccc

SEQ ID NO: 419084 - DNA, 680 bp, Homo Sapiens
tctattacctgacactgtaactagcatgcctagtggaaacaagtaaccatgctcgaaaacaatctccaattgctggatggaaacagccgtagtgattagtttaagatacaatatacgtaaagcaagcagcaccgagattcgcatgttgttggtactcaggaaatggtaactattattacaaacacctttaccttaaatgctctgctggtgtagtgctcactaccgtggaataaacttaactgaatagtgccctccagaggccactgggaattcaactgtgctgacagttgaaaaaaggtctggaacaagactacaaaataccattataattgtctatgtaacaatagatgatggagtcagcaccagagccccggtgtcccaggatgtatacgaaacatgaccgactgtctgatatgtcacccacagaaggctttctattggaataggacttataatgtatgcaaaggacacttatgaggacatggcgatcttggggacacaagtccagctaggcactgagggaactggtgctggaacctgccagaccctggaaggtactgtcccatccctttttctggggacactgtctttcatctctgtccttttctgcatgtccactctgtgttcctctaaagcaaccagtttctcttgacgtttgccattctgtaactgtagttaca

SEQ ID NO: 419085 - DNA, 629 bp, Homo Sapiens
atcccccgaattgcttcagagaactgagagaaagaagatatgttggcagacactagaacctatccatatccagtactgtatctacttgtacaacagcactgcctagatcattagatcagtggaaggctccaaaagatggtggacccaaagtcgagactctttgccagctctgcctcttaccggctccaggaggtctgttcatattaactcattcggcccagagaatttcccacagaactttctagagtgactggggtaggggagaaaaggagggaagaggatggaggcctctcagcttcttttgtcctgtatcacagcctggctcccagcaacactttagggatgcctcttgtagcaggtactgggagcaatgcacacacactggcttagttctccatggtgggcagggggcacatcaattcaaaacattttaactgggccacctgccatttccctcacagagctcacagtcccatagacgaaatgaaatgcagaaatacataaaaccaagcactccttcctttacgagcagcggtcagcaaactatgacctcaggctccaatctcgcttgccactgcttatgtacataccgttcgttgtcacacaaccgcttcctttcttcctcctgt

SEQ ID NO: 419086 - DNA, 685 bp, Homo Sapiens
  misc_feature (532)..(630): n is a, c, g, or t
tctttacctgacacttggaagtcccaggcttgcgccgaagtgacttcctacagggctgggcagttattttctcctggcttggtcctgggactttgggacaggacatgaaggaaggaggtcacagataatgcagtgtgtacaagttgcagagttctcccatagctcaagcatggttctcccaatggggtagatggtcatgactttaccctaggagctgcagaacatctcaggattgaggagtcacatgaggcccaacccagggctagcagagcccaggtggagaggtgctctggagctggtttccaggtctcccacacctatgtcaaatgctcattctgccacattatatccgcttacattcctgagaccagagacagctttggagagctttctagtgggtccataaatgtctcacttgcctgatttctaaaagcatgatttagtaaaaggcacacaggctttggaatactgaaagtatagggagtgaaagtgctcagatcctagactgcttgtatgtgatcctggcttcatnnnnnnnnnnnnnnnnnnnnnnnnnnnnnnnnnnnnnnnnnnnnnnnnnnnnnnnnnnnnnnnnnnnnnnnnnnnnnnnnnnnnnnnnnnnnnnnnnnnaatagaatgaatcctaatttgattacggatgacattacacgacttatggatgtaa

SEQ ID NO: 419087 - DNA, 304 bp, Homo Sapiens
ccctgtacaagtttcaacaaggggggatccacagaactcacaaggggggatcaatcttgccaaccaacagcatctcatcccccctgaataagcaagctacatggcaccctactgtcctgaaagcatccatgttctttcaaaagaggccagtatccccaggagatcattcagaaccctggcaggatattttcgttttgggtttgttttcacagctgctgggagagaggcgctttctctcagtgtatcagctaaattttccacacagtgccttgacgtacagttgtcccacttcatccgcctgtca

SEQ ID NO: 419088 - DNA, 403 bp, Homo Sapiens
  misc_feature (264)..(360): n is a, c, g, or t
ccggtctcaggaaagacattggatatccctgggctcgttaccaaatacctcctttctgtgtgggatctgaatttgcaaagatgcccagaccccagactgctgacaccagagctcctataagcataaatcactatagtcatcattagcaactcttctatctagacttggaactcctcgtgcaaattgctatgaccctatgtctgtgtgtgacttcttgggtcaagagcaaagcagtttaggcagggtgttaagaccacaagccannnnnnnnnnnnnnnnnnnnnnnnnnnnnnnnnnnnnnnnnnnnnnnnnnnnnnnnnnnnnnnnnnnnnnnnnnnnnnnnnnnnnnnnnnnnnnnnncctgtgaaatagaatggtgcttataaaggttagataaaatcta

SEQ ID NO: 419089 - DNA, 322 bp, Homo Sapiens
ccccttgcattacttcccattgcttgaagataaaattcaccacctttaatggagtctaaagagcctgaataatttaaccttctgtgattccttggcccaatcttgacttaattgccctctgaattttctttgctcttgccactcttggcttctttatttcactggatgtttcatgtatttgcttcttttggagtctttacatatattggtccttcttgaaagaagcttttacaacatttgtcctcttatagctctgctcctcctttcccaagtctctcttctttgtattttggcttaaatgtcactttttcagacagtgaag

SEQ ID NO: 419090 - DNA, 261 bp, Homo Sapiens
cggcccggtgttcgcgtgaatctgaaggatagggctggggagtgtttttaaatcatgatgacattgttcataaagattgtgtcacacagattctactacctatattttggggtgggagggagagacagggaatgtagtttaagaaaagcaagcatttatgtctgccagtgttctcaaatgagctcatgtatgaagtgggacatggaactcgctgacctttattggcctctgcattcagactacctggggttgaagccacgt

SEQ ID NO: 419091 - DNA, 239 bp, Homo Sapiens
agggatattgaacatgtatgaaaaatgtatactgcttctaaaatattacatttttagcatgtttatttcaagacagaatgagtatttgataggttatgtcctaccagttcaggatatacaatttgaatagaggtcaaatcctgtttcagtaaattccaatgtactaaaaaccttgaaaatttaatgacagcctcaaaactacaatgcttaacattatcacctttagcataggacactca

SEQ ID NO: 419092 - DNA, 457 bp, Homo Sapiens
ccgtcgtgactcaaattttaagagatttcaaaattagttactgatctttaatattattaaagaagagctgaaattggggattttaagtcacaaataacaaggatcttctgtttctattttattaaccatgttgtatgtatactctgctggtagccccctcaattccttgtggaaaagataaaagataaaaaacaagcaagcaagatcaagatggctgatggaccacccaacacttgccttctctacaaagaaggatcaaacaacaaatagataaccacacattaaatacagcatctaagaattcagcaaagaagagataaagacactctgaggcatggaaacttgagatgtataggatgggaagtaaagcagccagccagaactggcttggagatgagagccccctgcccccttattgcaggaaaaaggtaggcaggagatccccagcagtccacat

SEQ ID NO: 419093 - DNA, 251 bp, Homo Sapiens
  misc_feature (120)..(137): n is a, c, g, or t
cttcaagaaatggggacataaatttatcaattctaatcaaggaagacctataaaaaagatcaccttggttcttacctatgtgggtggggcttaagtgatagaatttggaacatgcctagnnnnnnnnnnnnnnnnnnagggcacaggtttgggagttttcactatattgcctaaattagtaatttaaaaagtcaataaataaaatcagggccattcttgggctaatgatgggaatttgacaaaaactggag

SEQ ID NO: 419094 - DNA, 451 bp, Homo Sapiens
tcgagccggcctgccttatctcacctagaacttaacaaacactacacataagccttttgcaatataattgggactaatagttaatacttcaaccgcatacacagattcatgtcctaatcttgatgtatagccaaggcctttcatttgagcctaagtctactgcattattaatgatttacaggttcaattgtttaaagtggaataagaatttcaatctattggtataacaatatatgagtgtaaaatccttctagatttatctgatttcccctccctacagtctttttattgctgatcttacaactaattccacagcagtgttttaatgactcatctttattgaatcagagtgaagtgcttagcattcagctaaagaaaagatcatagcccactggggagattaggaaaggcttcacagaagtggcatttgagctacgccatgaagataagt

SEQ ID NO: 419095 - DNA, 423 bp, Homo Sapiens
gctcggcacctccttactggcttcactcagaaaataatttgggtccgatagaaaagacaaaagagttaagcaggtttgtattgaaagaagtgacaaattgcagttaacttaaaatagtttctattcttgctaatcttccaaaatagcgacccatcaaaaaatcaataggttttgagatgcattttaaaaatgcagagtgtgcaaaatatataagcgaagatcatgggatacataagggaccaagaaattgttctgagttgagatgataaccatagtaggattgtggtctgtttagtggaaagcctaccggatgctgagattgactgtctagtgcctgtataagtaatttcagagatggctgcagtttgaaattactcttttaaatactctgtagttaatccttagcattgtctaatgtggttc

SEQ ID NO: 419096 - DNA, 206 bp, Homo Sapiens
gatcgagctcggccatgtctgctccagctgaactgcaggaagggtcaacactaggtcgactagtgtcaggatatttggatacttgtgtaagtaaatggaattcacaaaatcccaggtcaattttcgaatgttctgaaatctggcataaatctctaatttcaacatgctccattcagtatccacttcactaagtttcacatttggcg

SEQ ID NO: 419097 - DNA, 400 bp, Homo Sapiens
tcgatcgagccggccccgatgtgaatatttttaaagcccctccataaacatactataccacttgctattaaacccttaaaaaatacagatactagtagctcctgtctggtatccttgagttgtatggctgaattgcaacatcactggtagttactgctcctaagtagtaattatctctgtcttgtatacatcaagagtgtcctttaacaaggaaatatttttggctttttctatatcattccttagatactttttgatatgaatgaatatttttgggtcatgtatacttttcctctatctttcatactgattatggtttagccacagacatttgaaggatttcactttgaagaaaaaaagttatatatggacattaagaattatttcttgttgacttact

SEQ ID NO: 419098 - DNA, 422 bp, Homo Sapiens
gcacgctttctgtacagatgtgttgcaaagttaagggacatgtgtgcacgtctggatgtgctcacttctcgagggcctcctccctggggatctggggaaaggtagagctcagttctgaagcctctctagcatcaagggctacctcctgagaccaaagggaaattctacaaagttcacagaaaataaggggtttcagcataccacagaaaaactgaaattcagtaatgtgacaatgaacccaagaggaacaggttctgacagagtttaaacaggggtccttgcttctcctgggatgctcagaatgggaactctgccacaggtttatcaaaaacccaggattgctatttttatttccctcttctattagttcgtctcaaaagaaatatcagctccttacagggacagacaatgtttttcaactt

SEQ ID NO: 419099 - DNA, 443 bp, Homo Sapiens
attgctcaatctccataatcacaatgtaagctggtcattaaattctctgaggaatgcaagaggatacaacctaagacaaaaaaattaattgaatcctgatatttcattagtaaacagggtaattgatggataaatgtaatggtctcggtgggtggacagtagttatataagggctgatgcagcaagatacttaattatttaaaggcgtttgaaagaaattgaaacacaagagtgggtgtattcaactaaaataaaatcagagagccctaaaataaatccattttgtgggtaaaaaaatggcattagaggagattctgggtcaatcatccagctgtgaaagttgcatcttggaagcaggatccctgtaatgcaacgatacttgtttatcagtggtggtctttcagtggaaaagattttgaagaatcgacccttccttttttgta

SEQ ID NO: 419100 - DNA, 333 bp, Homo Sapiens
caaatagggcagacaggatgtaaacccgagagagcagagagtggcggtctagagctcagccccctcagagcattccacagaccctgccttattctagctggtgagatagccataggaaacaatgattaagatgcatgtacagagtttctccttacaaatgagatgagggttatggagaggaggccattccaggggagagaatgtgccagggcacagcctagagtcatgagcctctgcaggaggcgtgtggaaatgcaatgagggtgtggaaatgcaatgaggctaaagtgggaggtgctggcaactaaaactactagggggattgggtccaga

SEQ ID NO: 419101 - DNA, 273 bp, Homo Sapiens
gttataactagaacatttcccttctttcatattataaattctcattttgtattttaatcactttagctttgtttctatagatgaggcagaaagaacatggtaagaagcagctcttctccagtagagaagtccacccagatactggtagtggtgtgttccttttccacaagagttctctcctgtcaccatcagggagcatgcttttgaaactggctcattatgccttcatgggaagaggtccaggggtctggttttattagaagtggtatgaac

SEQ ID NO: 419102 - DNA, 349 bp, Homo Sapiens
acagtggaccgagcagagcaagtggctggactctgtctagctcagatgaggtcccaagctgttgctcactggtatgtgcatttgatttagcttcattacatatttgagtccagcacagacagcaaaaagcaaagatgatatttgaaaatagagttccatcctagggaagactgccaaaaccagggcagcctgctttcagagtttgacttctccaggtgctaagccctagggctgtgggtgagggttcaggccctgccctcagggatgtcctaatctgatttgggatattaagcagacgacagaataatgattgatactgggtatgcttctgaacctaaatactcatttc

SEQ ID NO: 419103 - DNA, 305 bp, Homo Sapiens
cttcagtactccaccggattgctttattggttaggtaatgaagcacgctagggaatttctatcaaacaggagtcaacatactgcccaataacatctgaaatgactgaactataagtttagggagcatgggatgaggtgtactgttaaatcgctcctatgctggaaagtgttccctaagttcttcccatcactacctggagaagttgatgcgggattactgggagaaggcttgtgacttttaggtcctctcagagctcttcactttgctccatgttgtgtgttgttttcttgttcgtgattttttt

SEQ ID NO: 419104 - DNA, 379 bp, Homo Sapiens
  misc_feature (241)..(284): n is a, c, g, or t
tggaactggcaatgatgggcacagcgaacagatcctttgtagatgaaggcatctttcatgggatgcaaacactggaggatgagcaggctgggggaaggaacgagaagaggatatgcttagctgtagacaggccgagtctgaagtgcttcctaggaaactggatcatgggtttagagcccagtgaaagttatggactaaagacaaatacttggtatttgtgagcctcagacatacaggttcnnnnnnnnnnnnnnnnnnnnnnnnnnnnnnnnnnnnnnnnnnnnggatacagctagggcaaagtgaaatgtactataaataagatacatgctacatttccaagacagtatgaaaagggaatgtaagatctcaattttta

SEQ ID NO: 419105 - DNA, 296 bp, Homo Sapiens
  misc_feature (41)..(156): n is a, c, g, or t
gcaaagacacatacattatgtgcatggtatttaaagatacnnnnnnnnnnnnnnnnnnnnnnnnnnnnnnnnnnnnnnnnnnnnnnnnnnnnnnnnnnnnnnnnnnnnnnnnnnnnnnnnnnnnnnnnnnnnnnnnnnnnnnnnnnnnnnnnnnnnaagttgcagaaaaacgaaaactttcacttcagactctgtattgttagatgctggtgaatttttttataaagggtcagatgataaacattttaggctttagatgtcgtacaatctctactggaactattcaactttaccta

SEQ ID NO: 419106 - DNA, 385 bp, Homo Sapiens
tccgacgtgttcaagcatgaattaggggaaggggccaagagggtaacgtggtagtgaaggagatggcaaagtgaaaagcaagttgctttaaccctgaaagaaagtatttctctagcaaacagcaatgctttgaaagcaattgacagaaagctggcttaatccttgcttctggagatacttacagctgcccgtggtttttaattaatacactgggctccctaacaaaggggaggaggttggagagcattaacagatttactcacccaagccaaggaaagtgctttggaagaaatgccctggccgcccatgggccgggatcttcctagccctcccttccctgcatggcaaggcacgaaggtggtctgatgtggattccaggacgaag

SEQ ID NO: 419107 - DNA, 276 bp, Homo Sapiens
tctctcacgctctattgtcttttatctcactacacacaagttaaataggccttattctccttctatagtagtctagctatcatatgagtgaactacaaagaaatgaacagaagagcacagtaaaataataagttggcttggcacgccattttctaacactatgtgataatgatttcactctccttggtatcagagatatctgtcaccactgaggaattttacagttgtcagagaactagttaagagaaaacaacttgacttcggtgtataaaatta

SEQ ID NO: 419108 - DNA, 159 bp, Homo Sapiens
gaatggtgagtccattcactgcacacacacctgttacaagactgtagaaattatacaagataaaaataatggtaccctaggatggtagagcaaggatggagcacagtgtattaatttaagaattcgagagttcatgattggatgaagccacgatcggaa

SEQ ID NO: 419109 - DNA, 377 bp, Homo Sapiens
  misc_feature (250)..(310): n is a, c, g, or t
actaaaatacaaagaacattaaagtccctttggactatgcatagcagacgagaaaccagacatcttctcgccaagcatgcctcaggcccacaaatacccatggaactaggtctatatttctgagtaaaaagccaccatccatgtcagacaagatttgaatctccctcagctgtctttcttctcttagctctgtctgcctcatactttgtggatgactactttggcaaagtgccactcgggtcacgacacnnnnnnnnnnnnnnnnnnnnnnnnnnnnnnnnnnnnnnnnnnnnnnnnnnnnnnnnnnnnnagtcattgtgagacaacacatgtaaagcactgagcctagtatatagaacacatttaatgagcagaaa

SEQ ID NO: 419110 - DNA, 325 bp, Homo Sapiens
acgtggttcacataaaacagtcgctcaccgaacccattatcttcccaactgcagagtattgtatctatggaggaccaaaggaggccataaaaatcaagtcccctcaaattctatcctcacacattcattcaccaatgaagagaaggctacagaattattattattattattttagacagggtctccttctgttgccccaagctggaatgcagtcgtgcaatcacagctcactgcagtctccaactcctgggcccaagtgattttcccacctcagcctcccaagtagctagagctactggtgtatgccaccatgcccagctgagag

SEQ ID NO: 419111 - DNA, 288 bp, Homo Sapiens
gtaaagtaactttgcatcatatttggcctaagttgaagcgacctgtttccatgggtagttctccattaccaaaacggttgggcgacctcgtccaggaatatattagagagggcttaggtctcagttgggtgagttgtaaggtttcttctaaccttgaaattctctacttttggtttgtacaggagtcctctaaacatttctaataattggtgattcagtccccacctgagtattttccttcagaggtagcttatttcatggcagtatcatgactatgatgtatcttgc

SEQ ID NO: 419112 - DNA, 326 bp, Homo Sapiens
agaggatcccgggtcgtctctagataataatcatatattttaaataagacataattacctttttatagtcttgtatcatttagtttattataacctaaaaaacctcagaaacctaatttctcctttgccattgcatttatccatcgttttatacgttctgataaatctgatgtgtggatgtgccattctttgtttttatgctcattggattcagtggaatgtaagtattgggaaaatgcagggttggaactcagacctatttccagaactcttccagcatgctcccatatttatttgcatgttgttttgttctgattttggaagca

SEQ ID NO: 419113 - DNA, 162 bp, Homo Sapiens
ctcggtggtcgttctctcagagaaaatttccaggaaccgttttctggtgttaatttgttaagtcttcttactaagtgagaataacagctggtggggtggactctgacctgacattaaagttaattagaaatgtcatcctccagggaacatcgtcccctgagg

SEQ ID NO: 419114 - DNA, 262 bp, Homo Sapiens
tgagatcgtctgcaaatgacttggagaaactgggctcttcttcatcaggcttatgtcagcctgaggttataagccaagcagacagctctattttcagtcttcagtatacatgatgagtatcttctacttctaggaaagttctgttcactggagaccctctggcccaccctgaaattggatacagggacagggacctgatctgtgttttattcttctgccttgtcatcagcttctttcccatttgattttcctaatttctatg

SEQ ID NO: 419115 - DNA, 390 bp, Homo Sapiens
ggccttcgaatctttctgttgctatactggggaaggcttcatgagggcagtaatatttgggctggaccttgaggaatgaagaattgacagagtagtagggcagggcagtatagatagaaggaatgacactaatgacagcatggaattgtgaaaaggcgttagctttggcaataattcctaatgatctagacttcactgtttccagcttctttctaggtagtctagttttgatgaaggaacatttattccctgagaccggaagcatgccttttactaatcttaagttggaagttaatcaaaataactagacacctaacctgctacttccccaatgctctaaatagacaacacttaatacatgtttttcacatcctcttgaattacacaatt

SEQ ID NO: 419116 - DNA, 330 bp, Homo Sapiens
tcggttgggtcgttctggaatgacaccaagtagccattaagatgtcatatagtagacatcataacttttaccctatgttcaacagcgtacagccaatggctaatcaatattatctctggaaaccaatgagaatacctgtcaaaacttttatcagcccactccttgtccccctttgcctttaaaaacctgcttgtaccaaacagagtactccccaaggcaacctgaaatgggtccctggcagctgttctcactttggctcaagtaaactctttcgaaattatattttgtgcctcagcttcttccctttaggttgacatacactcaaggaca

SEQ ID NO: 419117 - DNA, 155 bp, Homo Sapiens
tcattacatcaaggagcaccatgaatgtgcagtcgttcagcttttattatgaatgtacattgaatgcacgttcaaaacctaggttcctagcccttgattctttttttgtaaaaggcatgtaggacacctgtacacgttctgaggctccagggagg

SEQ ID NO: 419118 - DNA, 357 bp, Homo Sapiens
cgctacaggtacgcataaagtacacaaccattattagatacagctaggtgtgtctactgtgtgagctccaggactaagcattcgtaacaggttcctctgtgcatgcctgactgtgtctgtgtgaccacagcagctacagagcagtgatttggcagtgtgcgtgcaggagctccctaggccaagctgttcaggattacaaagcaaggacggcaaggactgggacaggtggggagggagctggaagacaggcaggtgctgccgcagacaggctgcaaggctttatgatcagacgtgccttagctggaagcttggctctgccgctttccagcttagtaagtaggggagtgaattcgcttc

SEQ ID NO: 419119 - DNA, 271 bp, Homo Sapiens
gcctgtgtgctgtgtttctgcatgtgcacgtgcgtatctgtgctcatgtgtgcacacgtctgttgccgtgtcacgcattgtctgttttctcctggatgaatgctgggaagcacactgaggcaccctcacacgccccggcacatttcacctcatgtcccgacaccccaccatgatcgcacccgagaaaagcagcggttctccctgagccccgtcctgtccgcctgtgtggcaatggctttatttcggtggtttgcacctgcgtccgtagcgg

SEQ ID NO: 419120 - DNA, 258 bp, Homo Sapiens
acattaacaccttacttctataactgaagtgagatgtgtccctaagggaagctacttggagagttacgggaatgaccaggtatctattaccatctagttgaccccagagagagaaactatttaaagcctatgttgtgtgtgcagcttcactctgcactgacgtctaccaacattgccccgtggccactagacgttagtctagggccactggtaaagaaactgaacttcataaaaagtagaaccaatccagtggttgtc

SEQ ID NO: 419121 - DNA, 380 bp, Homo Sapiens
actgtacggacgcccaaggacacagaaaaacctcctgtctgtcccaggggggattgcgaaagccatctttctggaaggaaggtggctttaaggactggatgaacttactttagaagaattatggctgaagccctcataaggcccctctggagaccctcccagtttcccccttgcatggcgagggctgtctgaggagctggtggacctgtacctctttcagcttggtggttgggaaagggctgccactaagcaagagggttggctttgattggtccccttaaataaatccccaggttaaagctggcagcaagataggaaggttcacctacccaggtgggaggcctgacagggtcctcagtagcaggcagcgtccgtagcgg

SEQ ID NO: 419122 - DNA, 669 bp, Homo Sapiens
ccggacgctaggatgatcaggaccacaggaagccctatgggaagaaggctgtgagtcagtaaggcactggcttccggacctcagtgtgtgcaaaaatcaagtggtgagctgttcaaatgctcatccgcaggcctcactccaagagagcctacgtcactaggtttggagtgaggacagaaatctctcttaaataaacacccacaacctggatgcaggtggtgcctgcaagacccgtggagaaatgactgcactgagagctgcaaagggaccgagccgagtctcagcgagccgggtatgggagactcttgtatagccttccagcttcatttccatcaacactaaaaatgttataacattgtaacaagtgcactgaaagactttcctttcagagctaagaattctctatacagtaaaagcaaaatggtttcttagaagattctaagatcgggtgacagaaggcaaagtgagggagcctcagctcatgatgaaaaatcaaaggacatctccaaacaccaaagcaggtgtttcctgattaagggaaaggcgtcagaaaccacagaaaaagattgctagaaaaggaaagtgaggggtgtcttttcaaaatcttacagtcctcctggtataccaattcataaaccaacaaagaaccgtctacttctgaggtccaag

SEQ ID NO: 419123 - DNA, 533 bp, Homo Sapiens
  misc_feature (295)..(366): n is a, c, g, or t
  misc_feature (400)..(457): n is a, c, g, or t
cgcttacgacgcaacacagcataaggaatccaggaaatactggctcgccacacacagcctgggagccagaaagcccggctcattgcgtagggtgtactggtgtaggagggagccaagaccagtaagaagcctcaggtcacagagtctgcaccaggatctcggtggtgggagtaacagagaagagctgggtctaaaaggtgatcaaggaatgacagtccatgggattataagcatgtgacctcacatgaagtaacattaaactgctcttataaattcccatatgtaaagtggagannnnnnnnnnnnnnnnnnnnnnnnnnnnnnnnnnnnnnnnnnnnnnnnnnnnnnnnnnnnnnnnnnnnnnnnagtaacccagtaaagtgtaggataaaggaatacnnnnnnnnnnnnnnnnnnnnnnnnnnnnnnnnnnnnnnnnnnnnnnnnnnnnnnnnnnggatagcttaccagcaatcttaccatgtcgagatggtaagcctggatatatcaggtaaaatgacacctattcattg

SEQ ID NO: 419124 - DNA, 200 bp, Homo Sapiens
tccaagagcagacctttaatctcacttgaagtcattcaggctagctaagactacacgattacacgactcctcccagacaacagataacaattaaaacatcatcctcactcaatcctcgctctacaaactactacttcaccactctgacgtcctttgacttagcgatattaacaaattacacctcatttacactgcatttt

SEQ ID NO: 419125 - DNA, 238 bp, Homo Sapiens
tcagtccaggcatggtcaggcttcctatggctgagtgatgacgatgggcatttaggagaaggcaccaaaatggcaggtgtgggagacaccttcattcctcccacagctattgatctggtatctaccaggtcctgggcacgtgcaaaagtcatcagccagacacgtctgcagatcttgttttctctttggaaggacgtagacattgcccgaaagctactttactctccaggcagtacgg

SEQ ID NO: 419126 - DNA, 139 bp, Homo Sapiens
aatcagctcggcccgcttacatgagaataaaggactaattaaaaaaattaacccttcgacttttatttcactctgttccttatgaaatagttgttttctcagctacatcgagacactcaacatagtaatctgcttagtt

SEQ ID NO: 419127 - DNA, 169 bp, Homo Sapiens
tgacagtatcttattcctatcctacaccaaacacaaaaactctattcctattaagaacttccaaattcctctagactagacttccaaactggtgagctggagaagctatctcatagtatgttaatagttgtgctgtgaaaaaaggtgttttgtgttcagtacagttaaa

SEQ ID NO: 419128 - DNA, 163 bp, Homo Sapiens
gatcgactcggcccttattaaggatatcatacggcaaaaccctgcaatccataagacaggtgggataacaacataatacactaaattggaataatcaatgagagtttatgaccttacgaggcattcttctgagaatccataatcactttggcctgtcttcgta

SEQ ID NO: 419129 - DNA, 328 bp, Homo Sapiens
  misc_feature (113)..(151): n is a, c, g, or t
tcaatacaaacacgcagagttgttgtggggatgtcctgccctacacaatgcttagtgcatactgggtattccataaaacattacatcactctccgatttgaagatgctacttnnnnnnnnnnnnnnnnnnnnnnnnnnnnnnnnnnnnnnnacttagaataaatcttctattatttgtcctaagatagagaaccttgccagttcctatccaacggttttatctgtgctttccaaatacattaggcattctgattttggcacctttaaaaaattccctccacatccattgctctatatctgcttttattcttcatcgctatgaaaagtt

SEQ ID NO: 419130 - DNA, 251 bp, Homo Sapiens
caggtgaagatgtatgttgtaatgatgtcttaggaagcaatcatgaaatgagccctttactccgttgtcacttggaaactcaggccagttgtccttcaggctggcaccagaccagctcagtattatagtttagagaccttgaagtcatttgctgtgtgctattggagctcaaggtcatgttgaatacttaacgcgatgaacagccgtataccaccaccaaacggccggtctgtgcagatccaaaacaaaac

SEQ ID NO: 419131 - DNA, 380 bp, Homo Sapiens
cccgtacttgtaatgatcgagggctgctaggcagcagatgttggcgcttcctgggccctggcaagtcactttctctttctgagatgcctttaccccgtctagaaaatgagggacttggagtcatggattattaagggcccttgtgggattcagaaacactagatgtaaaatattcagccaatttgagcagtatggtctaggttgctctgggagggatcagaagccatcttaaagccagggtaaatggtgtgtttatgattagctcaggagcttcccagaaccctcagaggcggggctgtggaatcagcagggggactggccctcagaactgcagtctgaacatctagttctggaaggagcttgccttttacatatgaact

SEQ ID NO: 419132 - DNA, 415 bp, Homo Sapiens
  misc_feature (402)..(402): n is a, c, g, or t
tacttacacgtttgggctattataggcattatagcatgaatatggtgacaggagcattggtgtacaaatatctgttcaagtcactgcattcgattcttttgtgtatatacccagaagtggaattgctccacaaatatttgagtacctagtatatggcaggcactgtgctaagcactggggatgcagcagtgaaaaagaggggcctggttcttgcccttatggaatttacagtctagtagggaaaaaagatgttaaataagcagttgcagttaagtgggttaaatgttacaaaaacgttaagcacagagtgccgtgtgtatgtttcatataattgtaataatatatatatgttaagccaaaagagactataaaacatcaaatactttttccccttccaatatnatcccctgcagca

SEQ ID NO: 419133 - DNA, 554 bp, Homo Sapiens
  misc_feature (377)..(411): n is a, c, g, or t
ctgagtctctcctcattctgctgtatgtctttgggtgactgtatatatctgtccctccccaagcctgtgtgctccaggaagggtgtggactagcagggactagactcaagagatgtccttggaaaggcatgaatgaagagatgctccgtcagcatagcagactaccccgctccatgacatgtccctagtgtcagttcagggccccacagagctgccttggaactcacttccagccatgtgctgcttggagcatctatgcccagatgcctgccctgccagggaccccagcaccaagcaaggctttctgcacgcacaggatacaaggcactggagtctggcagagcagctccactacccactgtctgtgtggacttagnnnnnnnnnnnnnnnnnnnnnnnnnnnnnnnnnnnctgctaatcccacaaggttgttctgaagattaaagaagggaacaaatgtgcttagcacaaaataggtcctcagaaaattgcagtttggcccccccatccagtgagttcacaggtgggtctgaccctgtctcacctggatggcg

SEQ ID NO: 419134 - DNA, 577 bp, Homo Sapiens
caatctgagtctttccagaaaaaagttagctaacctagtgttctagatgctcttttatcctttgctttttaaatttcatatatcctggaaattattccataccggttcacagagacattctttattcttttctccagctgcatagcacggccgtctatgtggatgcatcacggcttattcgaccaccctcctatacatgtgcattcgggttattgccgatagtttgcacgtacagccaacgctgtgaaaaataataatgtggtattacagatcttttttagacttcccccatacaatttctcataaatatccagaaagaaaactagttttcatttgctacacaaaaactgattcaaagcagactttgaataattttttcattgttgtttctttaagcttttattttgcctcctgttaaaacctcaaaaatgagggcaggatcaggaagagaaatgtaacgtgggccatgcataggctctcctggtacgttgtagccttgtgaggcctctggggaatggccatgcacagatgacaggcgaggtgtcatttatacccaattccagtagtacagagagtc

SEQ ID NO: 419135 - DNA, 217 bp, Homo Sapiens
cgcacacttatgagtctctaataaaatatgcctattctgtaccgtcagctttccatggaaaaaactaaaaggtgagggaaggcagaataatctatagagacattctgggcacatttttttcacttacactgaagagctggaggaaaatggaaactctccagcaaaggctatacaaagtacgtggttttacacaacagcgttacacaacgtacatgga

SEQ ID NO: 419136 - DNA, 116 bp, Homo Sapiens
ctgagtcttatgatatctgactggtcaaatagaagggagtaaaaataaggaggtaaggtgaaccgaacctccgagtaagcagtttcagaaaagtagtaaatacagccaaatagagt

SEQ ID NO: 419137 - DNA, 364 bp, Homo Sapiens
aaatgactgagtcagattaaaaaagaatggagtctatgagagagctctggtccatatacatatgtatgtaacagggaaatggttaactaaatgaggctctaaattatgaacctcctgtgaggtatggctgtacttgctgtaaaatatcctggggattgaaggtgataataatgcctggatgcttgaaacacccatcactatctgaaccaggaagtagttaggtgatacttttcactgctataaagatatgaaatggagcttctctgcaacagcaggatcttgaactagtaaccggaaggaagctaagcattggcaaactaaagaccagtttagcaaatcaatagccagtgaggactcaggtggt

SEQ ID NO: 419138 - DNA, 562 bp, Homo Sapiens
  misc_feature (390)..(457): n is a, c, g, or t
ccgctcaaatctgagtcgttgttggttgctctctgtggtttgtggggcatggagtggctcccatggccaggaagctccccttagctgagggcagttctccagagaagggagtgagctgtcagcagcccaccctcgctgcagccgggcgggtgtaccagccccaaggaggggactgcacctgggaagtttgcttaattctttggaccttgctttgctcatgaatctttccaaagtgagcataataacagcgcccagctcccagggtggggctgacggactgtttagcacaacagctcagaaagggcttgagagttgttatttttataatgttaggattgcttgcaaactgggggtacatgctagttctttgaattgggttatccttgctannnnnnnnnnnnnnnnnnnnnnnnnnnnnnnnnnnnnnnnnnnnnnnnnnnnnnnnnnnnnnnnnnnnttagctctctttaagcatcccagagacaaagtggttctagatgagggatgagacagggtcaagaaaaagaaaaggaaagctacccaggatttggcaacattagac

SEQ ID NO: 419139 - DNA, 458 bp, Homo Sapiens
cgtcattagtgacttggtggatatttgatacataaagaatgacatcattaatgtgctaactaggtcaaaacaatttacttactttaaaagtgaaaaaacatttgactctttaagctattttaagcttttatttaataaaatatgtcaccaaaatatttgaagtgatacattttttaaagcatgcacaatgcagtagtaacccatctgtccctaacccaacatttattgaatgtctattatattccaacactaggagggatgaataaaaagatgagcacatattcctggccctcaaaagagttgacactccatcagcaagatacatctctaaaacatgatttcaattaccagtagagagtgatttgacatgatatagaaaaatttgaaagtgtacatatcttagtaccatattgtatatacttctcatatatgccgtagagaactcttgaagatgagca

SEQ ID NO: 419140 - DNA, 426 bp, Homo Sapiens
atgctatcagaggaagaggtctggctggattaacttttacccaaaggagaattaccaagagctgaagaagttcttcgattccctgcagcacagctgtgatattgatatagagtactaggaaactaaagaaacgtcttacttgactgcagttgtcacattatcatgcattacagtgcagcagcctgaatcaaagagatatgcaaaattcaccaaggacagcagcaatgcattttttccccctgtatttgtggaaagacatcaggaaaaggaaggcaagtatgaatgcaaaaacatctgctccctaaactcatttaaaaaatatcactgcaaaaaataaatgtgaatcatctatagtgtagagcagatggaagtgcaatatgtttaacttaaggcagaaaggggatgcaactgaagaaccagaggata

SEQ ID NO: 419141 - DNA, 281 bp, Homo Sapiens
tgtgtgcacggtctgttagatgcacacaggtagtagagaaaaatgtgtattaattattcccatctgatataaacaaatatatatccatcccattcccatgtcttattttccttcaactgtagttagagggatagtaagtttatctaattagggcccagctggcatactagaactactttctatttgtttagtccacctctctcaaatgatatgtgttttcttatgacaaactatggcacaaatcttcagctatgtggatccctcagccacttccttttctc

SEQ ID NO: 419142 - DNA, 180 bp, Homo Sapiens
gcctgtacgctcaattcgggtaagatcctcacccagacctctaacacctatagcctaaggctgcatgatcctccttagcagctgtgccagtgagaccaactcttgagatcctaactccaaggtcaggtccatcatcatatgaacttctatcagttaagaacatcctccgatcctggaaac

SEQ ID NO: 419143 - DNA, 411 bp, Homo Sapiens
tgcacatcccatcttgccctacaattcaacttgcttactcctacaccttcaagattcccccactttcagtcaatcaatcatgtgaagagccatgctgtaattttgtgcttttcacatcctcaacttatgttacaatgagatttcgaggtgctttttgctggctcaagctgataagagaaaatatgtaagagtgttggcttcttgagctaacatcagtgttgtgagttatataatgaaacctgtctggatcggaatcctaaagctattatctttctagaactgagataggacacttaaggagccatttagaatctcttagccacttataggttgggaaatcaggttcttttcctcttaaaaaaggtttgttgagggtagcttaccatattgtcagcattttgccggggatcc

SEQ ID NO: 419144 - DNA, 430 bp, Homo Sapiens
tgggcagctttcaggccttgggagtgtacacattagtccttagcagcagcagtaacagcaatgatgacagtgggcagggagcctgtcctcagagtgcatgctagtgcatagtggccacgcaggcaaacagctgtcaggctttggggaacatgcacattggctccccttgtttcagcagcacagcagcagcttccctggtgtgccacaccacccattccctgtggtgtgggactcttgagtgggctagagtgctagggaccctgctgcactgctgggtccagccagcatcatgctactgcagtcctccagtgtagggggttgttagtggtgcttcagggatgtcgagatgcaggggctatggcatcccagggcaggatgccctggttgaggttaggcactcagaatggtgctgttctgcagttgcttaggt

SEQ ID NO: 419145 - DNA, 123 bp, Homo Sapiens
cattactgagtctggatggagggatggtaatgtggatgccagatcattctcagccagattggtggtcctcccagacccctcatgtcatgtcatggggttgctcagaatgaatttaggtggtgt

SEQ ID NO: 419146 - DNA, 191 bp, Homo Sapiens
tgcctactgtgccatttactactgacctaatctcccactaaatctaagatgctacctgtgtttgaaggcccccaattcctacttcactgcacctctgtagtgaagtgtggtgtagtgcatattattcagttgcaagctacacctccatcctctcaggctcccttgacaacagaggttcagactcagtggtg

SEQ ID NO: 419147 - DNA, 119 bp, Homo Sapiens
aggaagggccctgctgacagaggacggagacaagagctgcatggagggcttaaggaactctacaaaaggccaggatggctgctacagaactccctccagtcagttctccatgtattagc

SEQ ID NO: 419148 - DNA, 412 bp, Homo Sapiens
cacttctgagtctgggactcagtcacccactgatgggtgtgttaaagaggatccatgaccattttctgagagaaatcatggccttcctttgcttaggagtggggtactctccacatgctgctgttttgttttcatgaagtagtgcaaacctggttgttaatctgctaattctctaagttcaatatgcccttaattgacaacagagaatatttatattcctgttttttctcggagaccacaatctcaaactctatgccactttgtccttatcaaaacggtctctatgataatatttgcataatatttctgaggaatatgtaatccgttcattctgctagggagtagaccttttcttttaattcaagccacatcatcgtagagttttggccctttgagaattgcttttactgag

SEQ ID NO: 419149 - DNA, 255 bp, Homo Sapiens
  misc_feature (135)..(164): n is a, c, g, or t
tattatcagatacccaggatcttcagaattacaaagtttaattaggttattccttgacaattatagtactttgagaatgaagacaaagagtgtatcctagtacacaggaatacagtcttatgggttcaatgggannnnnnnnnnnnnnnnnnnnnnnnnnnnnnactgagtcttttgggacaagttgcctcggtttcctatatgtgccactttgaagattacccatgttcccttcatctggttcttacagagata

SEQ ID NO: 419150 - DNA, 139 bp, Homo Sapiens
ggtagatgcagagattttagttatcctgcccaggttcatctcggtcatgattactttcatctgtcagtacgttccgctatgtcaatgttttactcctctgtcatactttttcccaggttacaatcattaggagcaatat

SEQ ID NO: 419151 - DNA, 405 bp, Homo Sapiens
gggaataaggtggtatagtgtgtatatcttcttttgagaaatgcttattcacgtaatttgcccacttttcgatgggattattattatttttttcttgttgatttctttgagtgcctgtcaattttgaacattagtcctttgttggatgcatagtttgcaaatattttctcccattctgtgggttgtctgtttattctgctgattatttcttttatgtgcagaagctgataatctgctgattatttctttttatgtgcagaagcttttagtttaactaggtttcatctgtttgttgttgttcttattgcatttgctttagggttcttggtcataaactctttgcctaagccaatgtctggaagagtttttccaatgttatcttccagaatttttatggtttaaggt

SEQ ID NO: 419152 - DNA, 172 bp, Homo Sapiens
acattactgagtctcatctgtgatgggggtctctgtgtcagctactgccgctcacctgctccctccctctagtctccctccagaactccctccagtcagttctccatgttttagctggagctgcctttataacatgcgaatcggttacctctctgtacttaaaacccttcca

SEQ ID NO: 419153 - DNA, 365 bp, Homo Sapiens
aaattctgccggcataggagatttggcatatataagttaaagagcagacgttactgcttatattatatcttgggcctgtagcacttaatattcgtggataaccattaacttgtgattatgaaaactcctggggggcacaccgtggcatgcatgcccttcacataactttgtaagggtttcccttctccaggcattttccgttcttagccgacataagaatgagttgctttcaagatgctttcataaagatttaaaagaaattgagccatctgagataatttttaatataacctgctcctagtataagacccaggatataaatcatgaaacagaatacttcttcagtcttcatgaatagctgggtg

SEQ ID NO: 419154 - DNA, 420 bp, Homo Sapiens
tagaggatcccgaaaactctgcgcggccccaaaattgtggcagcaaaaagaacacttcatatgcttaaaacccattctttttgaattagattttgattttaaatttttaagtctggtgtttgtgagaacacttttctctttgctcagtcttttcgatctggttgggtagggaaggtgttcctcatgctctctgggtggctgccttattcatagttgagagagctgttaggtaaaatctttatatgtgtaggggtttattgggtagggggggtagcaggtaaaggtggcccatggctagggcagcaaagatgaataatttgaggaagcatttggttggtggactcatttgcagagaaacagtggtgacaacaaatcagagctgtttccctcaactctggctataagaggtcattctctgca

SEQ ID NO: 419155 - DNA, 327 bp, Homo Sapiens
gggagacgaatgtacccgcaatttcgcgaattgggtgccgcctacgccatggaccccaagagtgacgcgggcatctattggacgggcttattcggcacgcaataaggttgagcgccggcccaacccggccaataatgacggcgtgcaaatagacaatgaaatcaaagtgctatcagggagataattgcgctgaactgaatgcggtcattccggtctgttgctagtcggcctgactcttcaaagctaaacaatacgtagcaagcaaggtgtgaaccccataatgaattggctgcaaggcagcagcgaaatggcagagcgggttcgtca

SEQ ID NO: 419156 - DNA, 240 bp, Homo Sapiens
cctgccagtgtcagtgtgttgttaaagcatggtttaaaaatcttggttacagaagatttaactcatgatagaaacaaatgtctgcgggtcagtgatgttaagccactagtaagaggagggctatggtggggaatgtggctgaatgtcctatcacaagagcatattcagttgcttttatctctgacctgttactgatgtgcagaagcttacccagacttgaaaaatcgattttttccctca

SEQ ID NO: 419157 - DNA, 152 bp, Homo Sapiens
ctaccacgaacacgtttgatgttaggtccgcttggcatttcgggcaattccttgcctctagaacggccggggtcgggcttccaatccgtcctagtccactcaagtgcggcattccacgaggattcatcaaggtccagagcttcatcctgagg

SEQ ID NO: 419158 - DNA, 125 bp, Homo Sapiens
ttgctaacattactttatattatattacaaaactattgtagcctcaaacagttagcaagatggtatagttaccaagtgccattttggaggttattgtgtaccgatcaatctctatataaatttgg

SEQ ID NO: 419159 - DNA, 158 bp, Homo Sapiens
tatgatagggaagtaatggtttgaaaacaagcgtgggtagcaaagaggatctcaaactcctcttgattctgagagggtctaaattatacgtctagagcgaatgagggttggatgaagaaatgagcaaaatgtaggaatggaaccctggaaaacagggc

SEQ ID NO: 419160 - DNA, 202 bp, Homo Sapiens
cagactatctaagaaggcaaccgagtatggacaaaagatcatcgctgacttgaacaagttgaccctggatttggtggctaatggtaatttaaacagcaaagcattttcaaagtttagcgctcattcgtccgatcaagccaaactacttcgtgttttaacggcattggattacatgtttgagcataaagacaaagaccagtcg

SEQ ID NO: 419161 - DNA, 186 bp, Homo Sapiens
ggatccacatctggtaggactggtatccaggattaagaaattccacgattcagtaataaaatgagaaccagttttttccccccaaggataaagatttgggcaggtacttcacaaataaggaaacatgaatggtggccagtggacacctgaaaatgtgctaacaccgttaatgatcaggaaatgtat

SEQ ID NO: 419162 - DNA, 174 bp, Homo Sapiens
ttatttatttaaggataatatgaaacatatggtcacaagaagacctatacaacgttctagccagaaaatagaggccaggtgtccattacaggagaacggacaaacaaatggcggtgttttcttacaaacggaatggtgtggtactctgcaacaaaaacgaatgaattactcata

SEQ ID NO: 419163 - DNA, 501 bp, Homo Sapiens
cggaccttgattacgaatgtttcagtcggggcttcgtaccgccagcggcggtggcgcacaagctgctcaggcgatcactaataacgctttcatttcttcattaccttcttcagaggcgaaagggggcacggggcccttgtgaggccgcgtgtgtcacttaaaagttgggaagttcggattaacgttgccttcgtgggggctgttgcgttgttaatcagagtgcctagttggcggagttgattttaggcgcttcggttatattcatatacccgcagttttgataaacacttttggcggtttttgtaacaatccctcaatcaagattttttcagaaacctgccagccgccgcagcacgcgggccagagcggtgaaaaggcatagcagggcaatttgtagggtcttgttactaccatcgtcgaatggttctataggcccaccccggctacaacaggggccatacaacaacaactatgtcaccgaggtaagaaagatgagtgcgg

SEQ ID NO: 419164 - DNA, 357 bp, Homo Sapiens
tgatgacgaatgtacttcggtggagagctggccagtctcacctgggacaagcatagaaccagaaacgattccgtcgactccagtgaaaccgcagctcataccagttgaaccgcagtcctcaatcagaccggatctgccaccaaccgcaccgattgctgtagcgatcccagatccagatgcacagtcgtccagacggaagatcagcccggcggcagaggctgcggcactgaaagccttgggtgatgccaccccggacttcactgctttcgttcagcctcggaagaagaagaaatcggtgttgaacaatatgaaccgaattcgagacgctgtcgcacgtcaagttatacctgtgtgtgg

SEQ ID NO: 419165 - DNA, 442 bp, Homo Sapiens
gctcggcccttgatgacgaatgtggaagatgcaaacaagtcgtaaagttaaagcttctacagcttctaaataccccattgagtctattgtaggacagataagcctagtattttacttgcctgaagatgttcatgtaggggcaacgcgtagtgaagtgctctttgcttggggtgcaccgcggagctatgtggcgggataatacagatggttctttgttatggctatatgaaggcgttattggtaaagaacaaactattacagaaaatacacaaaactctctattcaaaaagaggagttttcacatgttggtgaacaatacttatactagtgactctttatcaggttctaacagttctgtgggttatgtatggctttcattgaagcacgggaaagtcacgcatttgggaatgattgcgggtcatggactggcctcgttttgcta

SEQ ID NO: 419166 - DNA, 255 bp, Homo Sapiens
tggcagaactatgcgcacgggaaccaaccgcttacgcccgcaccacaggcgatcctcgtagaagcgcgaagccgattaacagcgcctcgttcatgctgatgcttcccgatccgtctaaatcggctaacgtcggcctttttaaaatttgaatgacaattccaagtcgcttcagatgaacgcgccatattcgcattgttgctatcgggcgaggcgcaacgtcttccagttcatcttctcgtttcttcacattcggtg

SEQ ID NO: 419167 - DNA, 447 bp, Homo Sapiens
ttaaccaaatgctttcctgacagcgtcttggccagctcgattgcttccagaccttcacgcactgaaagaggtgtgtgcagtgtccgcaacaaggtagccgggtcggaaatcccggtgaattttgcgaaatcgtcttcatgcatcagcgcctgctcgagaagtaggcacgcagcttcgttgatatgtggaagcgccttgccaatgctttcggtgagcagttctgcactcacctggttggttctaccctggtaaataggaacaacccttccactaccctcagcagcgaccagcgttggattggacaaactcaggcggccgtcgaaggtagtcagttcgccgtaaagattcaccactgtcccaagctcaggattcaaccagctttcgatcgctggttttccaatcacattgatctgaaccctttcgccacgggcgtcagctgcccggagg

SEQ ID NO: 419168 - DNA, 170 bp, Homo Sapiens
gacgttcggcgcaccgtgcgtcgctgcgcccacgacctgcaccgcccgttgtgcggcggcctggttgtcgccgtactgcaccaccgccggtttgcggccggctttctccttggcctcgttccacgcccgcaggactttttcctggttggtgccggcgccgacgctgctct

SEQ ID NO: 419169 - DNA, 132 bp, Homo Sapiens
taatcaaaaccacaaattatgtcagcaatatgcactaagaggctggagaaacctacgcgtccagaattgttggcctcagttctcttatatgtcagatttagtccttcacgggttttgcaggggtttattcta

SEQ ID NO: 419170 - DNA, 433 bp, Homo Sapiens
acgacaaggcatcttgggagcagcccacccctatcttgaggagtggcccgccacatctagggagctctaagaacaaagaccatcctataacatctggtggcccgtatgggtattcttcaaagtggtgagtaatattggacccctttcacttgctattctgtcccatccttccttagaattggaggaaaatactgggcacctgttggctggttaaaaagattagcgtggctgctggacttaagactcaggtgtgaggctagtctggggaagggctttctaacaacccccaacccttctgggtatgcgagcattggtcagcccagaaccagcttccactttcaattttcctggggaagctgagggccaactagaggcagaaagctggcatcctgaactcctggcataagctggttgagatcatggcacagtcaga

SEQ ID NO: 419171 - DNA, 289 bp, Homo Sapiens
aacgaaagggtgcttctagatctcccggtccccctccggctgccggagctggcgccccttctcctcgcgtctgtcctgtcccgtgtggacgggacgtggcgagtgtcgctgagtccacactggtgtacagagcacttcggggccagcacgtggccacatgtccttagctgttgggctttgaaagtgtcccttgggtgtcaggcgagtggagggccggagagacgctgcggcgctgcttagcgggtcctcccagagagtgtgtccccttcccttggcctttcgtcccccg

SEQ ID NO: 419172 - DNA, 260 bp, Homo Sapiens
aggaatgctgtatgggtgcctgcccagcaaatactgggaacactgggaacctgtgtggtgcgccggagtcctgaggagaagccttgtgttcagtaggatcacgggtgccagccccgacaatcatggggcctgcatttacactctttcccacaaacctcacagagttaaacttcctttctttaactctttgctgtcaccttctgctaagctctggggattctacttgtgtcctaggaaaaagtcttccttactcctttcgt

SEQ ID NO: 419173 - DNA, 169 bp, Homo Sapiens
tcaaattggacgtctgtctgtccccctcccaagatgaaggggtcagaaaccggctgggaaggggggattctccaaagggtgagccgggctggcccatccatctctcatttctatggaaagaggctgcacattagccccacaacgtgaccctcctttttaacactgagtg

SEQ ID NO: 419174 - DNA, 193 bp, Homo Sapiens
tgctcctgaacccggcgagcatggtcccacacacctttgtcattactgttaccggtggtgaggatcttcggcacatcgatatagccgtacaactcaaaggggcccttgcgcccgaagtactcgtattccaggtagacgtcatcttgaggcttggggccgaaactgatgtctttgctgccaatcagcgtgaggt

SEQ ID NO: 419175 - DNA, 131 bp, Homo Sapiens
cataatggagatgcatacaaagtacaaagggagaactaacaggtactggaatctgccaaggggaaatagtacaagctttagtctgaaacttgtctcaaggactagaaagagcatacaaggaagatccccag

SEQ ID NO: 419176 - DNA, 179 bp, Homo Sapiens
catgggtgtcctaccagcatgtgattgataggcgactgccaaaaacactaagactaagaaggataccgaggccgtgcctgtgcacagctggacagtttactgtgattgatgaatgatgtctaggcattaaggcttccccctaaccgtaaggttttgaatgacaagcaaatccaatttgc

SEQ ID NO: 419177 - DNA, 265 bp, Homo Sapiens
gagtatatgaagctagatatatcgggttcatgaatatagcgatgcacgtgcaatacagagaaacttgaatagctgatatctctcgaaacatatagtacatggagagaggtaggaaaccttagcttagattgctgcttttactttggcaagactatggaagtgatttaacctacggttaggaatatcaaaaaccaaaatcaatagcaatagttgaatataaaatggatgcttctcagaatggtctgtattgttaatgtaagagata

SEQ ID NO: 419178 - DNA, 432 bp, Homo Sapiens
gtgttccatcggtctcaggcgttctcctaagcgactgtttaaaaaaagaggacagatacttggcatggctgtcaagagactaactgaatttccttgtaccatatcgtcaaacttccgagaggacttactttgcatttacaatggggaagatggtgactcacagagagaagtgagcttatgagagtatcctaaaaaaccagcaaagacactgagaaagctgagggttggatggagcctttggatacatgctaacggcgtactgccaacgcatgaccagagctttcagcccaaccaccatcacaccccccaaggcaggatatcccacagccatcaaatctgggcatgaattctagatacactttcccttctccttattgacttcatttaccaaatctatacagaatatttttcatgacggtaatgttagagata

SEQ ID NO: 419179 - DNA, 217 bp, Homo Sapiens
tgttagtgagatcatatgtggccagagactggccctcttagtatacatctatgtctccttaccttctgccacatggcctgacataaataatcagggcccatcatatatcagttgcttaaataatcagataaatgaaagaatgagtgaatggagtgattttttaggcttcgcccttgggaccattgtttccatccctttcactgtaatgttagagata

SEQ ID NO: 419180 - DNA, 171 bp, Homo Sapiens
gaagaaatccattattagctgcaaccaggcttaaagaacatgccataaaataatgtgctcagtcagtccactcagaggtgccatgtaacttttacaggcagagttggaaattatgtaaaatgggtcaggatagcaaactgctgaaccaggcttcagataatgttagagata

SEQ ID NO: 419181 - DNA, 180 bp, Homo Sapiens
gattgacggttcgattactgtatcctgattgtagtggtatcgggtaactactatcagaaaacatgaatgataagagtttacgggaactttcaggatagtgttgactctccagtacagcgggagagtgatgccatctcacaggataccatggggcttcaaagtcttttgttaatgttagat

SEQ ID NO: 419182 - DNA, 173 bp, Homo Sapiens
ctttactctgtctactccacatgcccagtaatatccttaagagcaataataaacaaatggcaagaaatgcaaaagactgctttgattgcattaattgcaatcaattaattgcaaattgaaaagtggggcagcaatggtaacctgacaagagctctggaaaagttggtgactgc

SEQ ID NO: 419183 - DNA, 303 bp, Homo Sapiens
gtatctctaacattatcattattatagactagagaagaatgcaaatctctacatatgtaaatttcgtgaataaggcatccttcccgcagggctaaaatcaccggggcttgagggactgtcagccacaagtgatgtttgaacaggcatatatcacttggtcacttatttttagaatattcatggatagagcaatgatctgtttcttcaaacagacatagatcaggcataaaccaggcaggccctgtgaacctagtcactgaaaaaatagtaagtgggatattaagaaatgtccataatgttaga

SEQ ID NO: 419184 - DNA, 329 bp, Homo Sapiens
attttgaacccacgttctcctacttctccggtcaaacatggttacatgttatactgcagttgggtatctgcctacaaaatttggcaagtataatctcatctgggcatcgtttgctttggacagttttgttatcatcctctccaaagaagggatagttacattaacctaacgataaattggccatctttttctcaattatgtgatctaagtcaaaaggtatcttcagtagaaccagtgtttcaaaactggcccgtggcgcataaatttactgggcagagaaaagcgagtacagcgtaatcttcaggaacagagaatattctaatgttaga

SEQ ID NO: 419185 - DNA, 116 bp, Homo Sapiens
gggaacaaactaggtttaaaaagcaagagaaaactataactaatagtttatatattctatagagttatttattttaaatcagtttcagtgataaacttacaaatatattgaatcac

SEQ ID NO: 419186 - DNA, 136 bp, Homo Sapiens
gaggtgaatagtgtgatcccatttcatataataaacactttcttaaaattactcccttaattttgatttacacacagaagttattcaggcagaaagttgtaaaattcacatctattatgatgtaatgttagagata

SEQ ID NO: 419187 - DNA, 148 bp, Homo Sapiens
aggtatcggagcgaatattataatccacattaaataagatgcctcactacctacgcaagtacatgaatgttatatgattcttctgctttcactcatcccccaatcttctggagattatgaataaatggtacaagacaaggagagtaca

SEQ ID NO: 419188 - DNA, 230 bp, Homo Sapiens
ggcgctctagaggatccgtattctaaattacgctagtatagtcacgccatctcgttcgtgctatgtgactctactattccacactacgctacgtaatactcacggtcctctctgttctgtgctatgcgactctgctattccacactatgctatgtaatagtcactgtcctctctgttctgtgctttgcgactctactactgcacaccatgctatgtaatattaataccat

SEQ ID NO: 419189 - DNA, 121 bp, Homo Sapiens
ttaacgtaaaaaaaggaaatgtgagggaaagaaggggaagaactctagcataaataatgtattaatataaatatctatgtcgattttcaccccccattccccttggctaatgttagagata

SEQ ID NO: 419190 - DNA, 129 bp, Homo Sapiens
gtgaggcaagagactgacagagtacaaatgagcagcaggcacaatttaactagttcaaagtgtctgccatttcattcaatgagtatttacttgtccagagccccaagatgggagacattaatctactat

SEQ ID NO: 419191 - DNA, 466 bp, Homo Sapiens
acagagggtccaaaaaacctcaagaaggaatggctcgggggcagggagccaggctaggggatccctcaaggctgacaggagagaggaatttcagagagaggagggaggcagtgccagaacttgtaaggagacggggggtgaaggtgtctgtgttcacattctaactatagttacctttgcttcctgagtgacatttgtggctcacattggatctgagtgctacttcctctgcccagttgaagcagcttaattcagaggctaaagggagtttctgatctttctaactcagtttgtgaagccagttaaaataagaaagactggttatttcatggggcaggaaaaacttgattatgtgaagcagtcaggaaatggagcatatggatgttaattacattttggggatcacacaagatcaaccagaaagagccttttgtgtttgtttcaatcctgttatgggaaatctcag

SEQ ID NO: 419192 - DNA, 380 bp, Homo Sapiens
gaggtgttctagaggatcccgtatctctaacattaccatagggtcttaatcctttagatagtgtggttctgatttaaatctggaaacttcaatttgatgaatcattacaaataggtttcctttcagcatttgattgatggagactgccagaaacactaagctaagaagggttccgaggccgtgcctgtgctcagctggaaagttttctgtgattgatgaatgatgtctggcattaggcttcccccaacctaaggtttggtataacaagaaatccaatttgagttgtccattgattatagtaagccgaatctatgtctctggacaatgtgtgctataagtcatagagtgacctatgataactcagttaaatgaatatttat

SEQ ID NO: 419193 - DNA, 307 bp, Homo Sapiens
tcccgtatctctaacattacagcaatgtgcaagaaaattttctttcatggatgagaaaactcaggctgaagggataagtcacccataacgtggggctgaatgtaaaacagcgtctgtctgatatgaaaatcgaaaccatgacgccatcctgccggctcattcataaaggccaggtaaaggtaatagtagaaggaaccagcgtttactgagccgttactgagtatctgaaactctggtgctttgcctacttacttatttcacatctctgctttgtgaagttgggggtatgtgcctaatgttagagata

SEQ ID NO: 419194 - DNA, 412 bp, Homo Sapiens
aagagatcacacggtgaatttctataaagtcagatggtgtctttccgatctccaagacagttttatgtttagagcattatcaagacacataactaagtttttcgaactcaaacagcagaaaactctttactccttctagtatgatttaggtttttttggttgtttttcttcctgtaaaagcacagattaagcccttcctttttggaatttcatccacaaatctttagacttttccagcctttctccaaagctccctcagtacattctggaagggattctgggctctgtgcaaaccctacaatacatctttttcatagatggcattcatgctatcaagataaattatatgaaaacttatgaagagaaatgttcccattcgagcctaagaatagaacatctagagtatctctaa

SEQ ID NO: 419195 - DNA, 119 bp, Homo Sapiens
agaggtcccccgcagatggaaccaaacggagatacctacctgcccaactgcaaccaataaagaacataatgggtagcaaaagatgaagagggagattcaggtaaaagagaacagaaatt

SEQ ID NO: 419196 - DNA, 291 bp, Homo Sapiens
gaaaaacagcaatgaagatatttcgtttatctgggcccttacttgggggagttctgtggttataattacagacagccatcctagaaagtcttacattcctatccatttctgtaattgaattgattttaatctcttcctattttatacaccaaggatttataggatgctaataactttctcccacaccactaccctcttcttatccaaattcctgtaacgtaaggatatcaagtcaaccacagagtttgaattgactgcctgtggctgtgtctggatacgaatctgaaggga

SEQ ID NO: 419197 - DNA, 304 bp, Homo Sapiens
ctataggatgacgctggctcattaaatgagttacggaggactccctcttttaatatagttcggactagtttcaggaggaatggtatcagctgctgtttgcacatctggtagaattcagctgtgaatccgtctgttcctaggctttctttggttggtagggtattaattcctgcctcaatttcagaacttgtgcactggtctatgcagggcattcaacttcttcctggtttagtctcgggcaggttgtatctgtccaggaatttatccatttcttctagattttttaattgatttgcacagcagg

SEQ ID NO: 419198 - DNA, 310 bp, Homo Sapiens
ttaggtataagtcaaaatatgtataaaagtatgagaaaattgataaaactgggatgaaagaaattaaaaaagaactaaatgaatggaaagatattacatattcatcaataggacagactcaatatggtcagaatgtccattcttctcaattggatctatagattcaatagaattcaattcaaaatcccagccaattacttggtagctatagacaagtgaatgctgaagtttatacaaagaggcagttgactcaaattaaccaacacaatatggaagaacaacaaacaaagtgggaggactgaggctacct

SEQ ID NO: 419199 - DNA, 600 bp, Homo Sapiens
aggatggatcgactgtaaaataaaaaccaagttgcatacgttccaagatacaatggtgttccaggaattaggtaaatattctcataccaaaggaaaaaaaatggacaaaagaaaggggtaataagccccacataattctgaaactcagcagagctgtcattaaatcttaaatccccaaaattatctccttggactgtatgtcctgcatccaggtcacactactgcaaggagtgggctcccaaggcttgggtcaggtccactgtggcttggtggggtgcagtgtggctgctttcatgtgctggagtggagtgcctatgacttttccatgacgagatggcatgatgctgttagatctaccattcctcagtttggaaggcagtggtcttcttcccacagctccactgggtagtgtcccagtggggacattccagggggttccaatgccacatttccctttggcactgccctattcaaatatctgtgtgggactctaccttggtggcagccttctgcctgagcactcaggcttcctgatacatctactgaaatctatgtggaagctgccagccctcctttattcttgcattctgtgcactagca

SEQ ID NO: 419200 - DNA, 475 bp, Homo Sapiens
agtgctattactatggaaatcactaccaaaacattaaaatgtttctctttaaagagtgtttatcaatgctcaaacctgaaccagtcaacacagcacacaaaagcacaaaaaaatggaaaagcagtgcttaaaatcattcaaggatcattaagcatgtcaatccttttcttattcctaataccaaaagaagcaatcctaagcatcaaaagattgatcagtgtcatgacatgcaattcaattgagtttaaccatcatttaagtaaatatttgacttttgattttgtaagatcagccgggagaaaggaccagagagcaagatccaagttcaggcaagcttttattaaacccgccggctgctttatcacagacaaaggaggcagcagcagccagcttacagaatgaggggtttatattgaggagggagtcagagggagttctttggtatggccgcatcccggtgttgtttgctgattta

SEQ ID NO: 419201 - DNA, 423 bp, Homo Sapiens
attcgcagatggcagaagcgcaggggtgccaccaggggtcacggcagcctcaccctcccaggcccaagggaaatcttttcacctcagcctcctgagtagccgggaccacggggttgcaccaccacaccgggccaattttggtatattgtgtaaagacaagatttcaatatgtgggccggtcggaaactcttgagctcaatctgcctgcctcagtctcccaaagtgcgggaataaggagccacagcacctgggccagattggtctctttaaccacccgctcgggcatccctcttctctcaagcgatatccgtctctctcactcagcgcttctcggtctcacgtgatggtatcccttttcctacatttcccagcatctcttcctgaaaccgcttgggcaaaattctaccgaggaggctgaggggt

SEQ ID NO: 419202 - DNA, 191 bp, Homo Sapiens
ctgtgagcatcatgcttggaatggtggccatggcccggatggccaaggggccaccacactgccattcctgaactagatcatctgagagagttgatggagcacctgtgaattctgggaattctgcaccatctcagaatcccagcattctcaatgttctcagcagtctgcacattccaagatcaagggggcac

SEQ ID NO: 419203 - DNA, 336 bp, Homo Sapiens
aaaacagttcagtgaattacacgataccagatacaaagacacctacactggctactctataaaatgtctactgtgacttggagtgatgacagtggattcattttggggatcgggggagatgtatcctgaaagaataaggggctcactttgtgagcaacttgtgaggaagccatctgggaagatacataacgttctgtcttggtgggcacctggcttatgcatgaggctagaacatggggtaatgcaaatacagctctccatttgggaacaaaaggacagcagtattgcatgcctcagattcaagcttgacttctctatggctagtgagttggggcc

SEQ ID NO: 419204 - DNA, 304 bp, Homo Sapiens
ctacagtgacaatcatttaaaagtaatgctgcagtaaataaagtactatgtgatagtcgggggaatattcctaaattctatattgaagtgtataggtttaaatgtgactcagtacttttttcagtgctagtcatatataacccaggctacatttcaaattttttttatcatatttgtaggtctcttttgttaatatcatttgaagctgaaccatgatattaatactattttttcagtaaaaataattgccttcataatttatactgcacatgatcctttagtgatcaaactgtaacttacagtg

SEQ ID NO: 419205 - DNA, 381 bp, Homo Sapiens
ggtcccaagggttacagaaactgacagggaatgtgtgtccttagacgagggcagactcttgtttccctgtgtgcccctccggtcatgctgcctcccagcacttctgtgggggaaaagccagccctcatttctctgatgaaatggttttacctagaaccttcttcttagctggtgggtttcaggacggaaaccccagtgaatgttgatgaggatgccagagaatgacgactgtcacctgcggtgaatggttgttgctttatgggacactcgccgagaatgcatcacattcttaacacggagttcatgggaaaatggaaagtgcaagcaaaagttactggcatttctcctggggtagaggctgcattaggattccattggggg

SEQ ID NO: 419206 - DNA, 203 bp, Homo Sapiens
gcatgcagccaggtgtgcacatcagacccatgcaactgctaatttagtatatgcctttcctggagcgtaagtggaaacataccatatgtgggatattgcatcagacttctttcactaagcataaggttttgagatgcatccatattgtagcctatatcactactccattgtatacatatatcatttaaagaaatccaccagtt

SEQ ID NO: 419207 - DNA, 196 bp, Homo Sapiens
ccaaatgatacagtctggcacaaacaaacaaacaaacctttaagtacagtcagttccaaacaccacacggcgtacagttatagaacataatggtggatcatatcaagtcaaaaattattaacaggagcaataattaaccacaagggggcatatatatctactccttagattccagcagaaagggattccttggggg

SEQ ID NO: 419208 - DNA, 428 bp, Homo Sapiens
ctcctcaaatggaatcctcgcgaaatggaatccgtagcttgactgtctatgtagcatccagtgtcatctccccaatattaatactcaataaggtgtgtaatttatataagcaatctaaagcagaaccacagttcctttagggaaaatggcaaatgtgtcaggatgaacgaacctatgcaaatcgtaccaaagcatcaccacatagtagctaatacactctcttacatgttacatataggaaaaataaaacatgcaagtcttaaatatgacacaaagcacaggtaactgctgctaggattacatttcttgtgatccgtgggcttatcatggatatcaatagttaactattttatatgtactatgtgactgacaatgtcactgaaaacctgcacaatgcaattttagctatggattccattgggggggta

SEQ ID NO: 419209 - DNA, 282 bp, Homo Sapiens
tcacttaaagaaaaaggaagaaagttagaacaactaaggaaaaatagctcaagcaatgaaatctataaccgacaaaaatgagcctaatctcttatatcacccatggatttcgtctcctgcctggcttaccaagttctcgtgattcccctttatcctctgtcctttcctcttccttctcgtccattgtccagtatatcaaatatacaaacacggccctgaagccggacccaatttagctggtcggaggaatcacaagaaaacatatgtcactgtcgcgaccca

SEQ ID NO: 419210 - DNA, 266 bp, Homo Sapiens
atattagatacgaaatagtgtggagatggagaaagcatagtagctgagagagtacttgatgaggctgatgcttcattggggctcacagtgctaagaaaaagcatttgcagaatcatgggagcagaatgatcatttctcctataatctggggtcccagcctttaggatgtatccctattcaatgtaaaacactaggttttattcagtgaatggcagtctagcatggttatgctagctgaatggtcttatagggaaagattatagcag

SEQ ID NO: 419211 - DNA, 176 bp, Homo Sapiens
atttaatggacatacaattcacaccttaacaatatctcatacatctctgccacagtaaggaaatctgagttcctagcacaagcagaaggctctatggaatggactagatctgcagctttggaataaagtaactgagtattggtggctttttctttgttctagaaatactgagaggg

SEQ ID NO: 419212 - DNA, 378 bp, Homo Sapiens
ctgcagataggatactgctgaaggtagaatcgatagcaagtaagtgaaatagggcccgacagatgccagtaacttggagccgtgacacattaagacaaaattcaggcctcctgggtgtgtttaattggttccctgtatattaaagttcagggaactacccaagatgggaaataccaaattcacctaagaattgagctgagtcccagaagcaagccaagtgataaacagcaccaaaaagagttgttggggcttcatctgtttgctgtggatccctgatccttgatgctaatctgcctctttgtatctttcccactaaccctgaaaggaagccacatttctcaggctgaagtgtctggctctcttttattattcctgctg

SEQ ID NO: 419213 - DNA, 305 bp, Homo Sapiens
acggataaagaatgagtggaagaaatctattaatgcatgatcacggagccaatcactagaactacagagcacacaagaaacaaacaatccggactgacatattctctacaaagagctgtggcaggtcaccaaacatagctgacagactactaggataccaacaataatgatgtgagaaaattaaacaatttggattgatagcctctacgaccatttcaaatccttaattctttaagtaccatctccgaatgagcaagtgcagcactcgctggcactcacagctgaagcctggaagacagttttaa

SEQ ID NO: 419214 - DNA, 136 bp, Homo Sapiens
cgtatgattaaattgtattcctgtttaaaaagcttttctctggatctggcagactctggatcatcattatgcacattagtcttgtcattgcattgcagccatgtatgaactcttggctgttggatcccatttgggg

SEQ ID NO: 419215 - DNA, 113 bp, Homo Sapiens
cgggccagcagcgatatgacaaggactggtctgtacagggcagagaggaacttcctacatgaattttcataattcaggtaacagcaataggcattccaggcattcattggggg

SEQ ID NO: 419216 - DNA, 344 bp, Homo Sapiens
agattgtaacaggagagaatattatctgcactagcaacgaacagtcacaaatatctcagtaggcgacatgatcatatgtgattgaaaagatctggagaaggaggctgtaaagggttaatgagtcattaaaggtccaaatgtcaacggtgccgagaaattgaaaatgaggtttaccaatgctggtcagtgatacagatggctgaaggcagacttgtaagagttgattctagttgaaacatgtaaaatgaatatacacgtactcagaaaggagttatcttaatataacttttgcactttccattatagctgcactgcatttttacaaagttgtcatttggaataat

SEQ ID NO: 419217 - DNA, 251 bp, Homo Sapiens
  misc_feature (85)..(101): n is a, c, g, or t
tcccttgcagattatagcattgattagttaggcccaaattcaagagaatccccagattaaaatgcatctattgctaaaaactagnnnnnnnnnnnnnnnnnatatcatgtctaaaatgtaaatcctaagtgaccaattaggcattaaaatgtcacgtacagaaatcccaagagaatgcgacagtttatattcatagcaatcttatcaatttttaaagcctaaaaatcatttagcaatataggccaaggaat

SEQ ID NO: 419218 - DNA, 380 bp, Homo Sapiens
aacatgggcagtaaactgcatgaggttggtcatggcacgttcatgtcaacttataaatggtagcaaaaggatagggaaggactggtaggtttaaagggaatagttatgggagattatgggttataggctcctgtgcatatctcagtaacttcctcagtaaggaagacatggccttgagcccgaataccctgggaagctggaactaagactcaactccttctgaccccttctctcaattaaggattctttttttctcatttcaccaagaacagagaagcaaccaaagatagcttttctatttttccaccaccatatctcttcacatagttttatctttatccataatctaccttctcttcactgtctgattcaaggccaac

SEQ ID NO: 419219 - DNA, 449 bp, Homo Sapiens
aatcataaccgtaccctcagcgtcaacggattccggattataacaggccccgcgagtatcaccttaccaatatctactaacattatctgccacagtaaggaaatctggagttcctagcacaagcagaaggctacagggatggactagatctgcagcttcggaatatatgaaacaaagtatatgaatgctattacctcttgttctagaaatactgagaggggatgcatcctgagtaattacaataggcaaatattagcaccttttattctgagaaaggggtacaaagctattgaacaccattcaataactaacaattttagctaatgtaggaaagagtgacattgttatatttttatgtctttagtaacttgagtcactgcatacaatcctcttttattataagtcaggcttctgaaatccgagaaccaatggcttgttgtatctagtgg

SEQ ID NO: 419220 - DNA, 241 bp, Homo Sapiens
gagctgtggacgtgagcttcgtctggtggggtgacataagaggcagccactggcccaaccagccaaggcctaaagctcgcagaagagaaattctcattagcagaattttcagtcgttggagctgagctgcaggatgtttgaatgtggagacctagcacaaaatgtaccaatggggggctggtccgagtcttcagtcccctaccatgctccctacctctatactgtgtgctcctgtcactct

SEQ ID NO: 419221 - DNA, 211 bp, Homo Sapiens
gacacactgtagggaaacagcaaacctctattatacagatggctgtaaagttctatgcttttattcctagggtacccttggatctgaaataggggaagatattagtatttatctgactcccaaagatgtgccggatactaagctacgctctttgtagtccatatctcaattaacattcacggcgaccaggagctaagtgttataatattat

SEQ ID NO: 419222 - DNA, 272 bp, Homo Sapiens
tagagaatgcgaagtcattctggctgtcggagaaagactccgtgttgtatctgttgattcaattggatgacacagattatctgatctgatctgattattctcttttcccttcgccccaacaagtgctatttgacatctcatgcacaggaaagacccagtgggccacaaatagagaaatacagttacaggtgctctgtgtttatggaaactaggtgtcgacctacacatttatgggagttgtctatcactgagttagaactttcgccgttagg

SEQ ID NO: 419223 - DNA, 409 bp, Homo Sapiens
ggaggactgttattatgagtagtggtatctatcctggcccagaatcatgactaaaaagttaaagttatctgctacattgagagggagtggggaatagaagggaatatgaaggccgaaatcagattgactgcatgttcttactggataacatgaaaggttaatttgttaggacaacagtaagttttgacctccctctcctgtgggcaggggcacctcttgcacaggtgggtctgtgtcttcatacatgtaggggagagaacgctttgtaggtggccaaagaggggcaaggaagcagggctgaacgcctgaatgtgaaaaggttgccctggagtctggcgcgggaaaggatcaggggtgtgagtgcagggagtctcacttacttcctcttgatgccgttaggccgatctga

SEQ ID NO: 419224 - DNA, 259 bp, Homo Sapiens
cccagtaactaactgagaatctcactcgacaggacttactgcaggtctatacaaaaaggtatgttatgtccttagccttataaatcaattttaattgtaacaacagaaacatcagcagcaaaatggagccaaatgggctggggcctttgtctgcgctttatacccatctcagattaaatgctgaattgtctattggggtctgagttttgtcatgcacaacgaagaaaaacaacttgctttccattttccacatgcatca

SEQ ID NO: 419225 - DNA, 168 bp, Homo Sapiens
tgtgtgtagctgatatctgggagttgcatgtgagatgaacaggatgcgggctgtcatcctgtacacaactgatacatttaagacaaagcaggatgaaggatcagagaaatccaatatgtaagataaaggctaaaaagtgttcagcaatgacttctggcttctcctaga

SEQ ID NO: 419226 - DNA, 173 bp, Homo Sapiens
aggagtgataccagtctcatggaatctacagtcgcggtagtcaagtgacttcatacagtccatgttcatgaagagagtcgctgctagtgattgatagcggggtcggacagacatgtccattgtataaaaagcagcatccatctgaaggactcacttggattaaatgtacacct

SEQ ID NO: 419227 - DNA, 268 bp, Homo Sapiens
atctagtaccctgtaccaagctcatattcatttctgtgatcacgcacatgagaatggatacttaattaaaatgaagtaacattctgcctaattaagtttggtgataaggttgtgaatttgtctgtgtacttgaataactgatttagtcaagaaatgatttgtcattatccgtaaagagaattcaccaaacaggacaaggcatattctattagaagaatgtagtcagccaggtgcatatcactgcatatgagaaactacatgcatcagt

SEQ ID NO: 419228 - DNA, 110 bp, Homo Sapiens
ggtagattagatacttacacaaattgaagactaagatatgtgaaagtaaaataaagagtaaggaacaagcaagtatttcagaatgttattttaaactaaaccaaaaagtt

SEQ ID NO: 419229 - DNA, 344 bp, Homo Sapiens
atacagtaaagtattagtatcagcaggaaacttcaagcatgaagaccagttggaactcaggatgaacagtgctagttgaaagccactgctctggatctagcctaggattctaacaattactagactagccaaccatcttagacagagtggatgaagtctggatactaaggtgggatgacaaaaaagatggccttatcactctccttcactatccttttgctttaggttgacacagctcattgtctaacaaaagccttccctggaacatccgtttcaatcctactctttgccttcaaatcacaactcagtcgtcacctctcagaaatacctgacccaacatcatt

SEQ ID NO: 419230 - DNA, 572 bp, Homo Sapiens
catggctcaggattatcagtagcgagagatgtacatggacggatgggtataactggtatcaggatctccctcgtccagggaaggatacccgggtgtaaaaacttcccccttgccaggtactcaaagcaattgatttatacgtgggcaactcaaatccctgtgtgaagaaatctcagagctggaagattattgtgtgtcggtcggggtggctctgtcttgagtcatctcgtgagaaccttgtgcttgtggaaggtagaaattcgtcagcccccatttgaatgagagggctggaggatcaaatcaatggagagagggatttctattttgtaccaatactatggagaacaaaactgtttctttgaaatggaccttcatttattgggaggggaaagcagttagttcaataatggctgcctggtgccttccagcatttgaaaagacagaagaaagattgggagcaaggcaaggttccagtgttatctaaacaactcactaagcccagctacgggttggctgcggagcacttcctgctaccgggcctgcatcccccaatgtcccctacatgcatcagt

SEQ ID NO: 419231 - DNA, 275 bp, Homo Sapiens
gtgactcggattgatgtcggaaaggtatagcagggagagcggtattgagactagactataggcggcgagggcgaagctgagaggagagttaggaagctatggcaaaaacccaggtgagagtaggtggcagcttagtgcagggaggtagtgacgcagacgatgctgaagtctgatgcgggatgtctcgcgaaagggcacgcccccaggatgagctgatcatcaaaggtgaggaatgggagaacgaagcacatccaccgcggatgagactacatgct

SEQ ID NO: 419232 - DNA, 120 bp, Homo Sapiens
tctgccccaacccttacaggagacatggaagtaagctggtccagcagccagcagatgcaggccaggctccaggatgaatattggacagacagagaggacaatggtgactgtctctagcag

SEQ ID NO: 419233 - DNA, 319 bp, Homo Sapiens
aaaaagagggaccaatcatggtaagccaggagaatgatggtaaagacaaaaaagcaaagacagttgatctctagacagggctgagttgaggacaaggaacttgaaatcagatatatcatgaaattccactgtctaagccaacatactgtgctatttaatttcagattctagtgtagttatatgtacctactttcatattgtagcaaagttaagcaaatcatttagctatgttttctacctactcctttatcagaataaacaaaatgactggcctatcttaagggaccagatggctggtaatactaaacaaccactcaga

SEQ ID NO: 419234 - DNA, 121 bp, Homo Sapiens
ggtgatcacaggatcttagtgatgcatgtagtacagaccttgaaatattagtgtgtaaatgatgcctgagtctgcttaaactagtctagcaaaaataagcgaaggaaggaaggctggaagg

SEQ ID NO: 419235 - DNA, 364 bp, Homo Sapiens
aatatcacacgactatagtcatgaatgacatgggatatatgacgctcctagcatgtcacctggcacaaatagtgtccttcaaatattaggtcctttcctctacccacaaggaacttctagactgaacgttaatcttgggaatgagaacacccgagaaagagtacatgcacgctcaggggaagttgcagctggtcagaagaaggacaagctcatgtctactcagcataaatgtggtatttcaggacacgctctgtgaaggcaggtacatgtctgagctgggtcacgaaagaatggaggaagaatttgcttctactgtgattaggggccaagttatgccagacaaatgcattaggcacatgcatca

SEQ ID NO: 419236 - DNA, 316 bp, Homo Sapiens
ttgatctagaggatcccgagtgatgatgtaggggtagattactcactaaaatgtgagctccatagggcaaggatcttctgttttatctacgatgtgcctatgttgaataaatcaaactaggaaagagggcaaagaagaacatttggcacaggtcggcttattaacaagccagagtggtcaagatgaattccaggacaaaactgatctgagcttctggagggaggttcttcttagcctctccttggattatctctttggctcggactccttaccttcttaagtgtattgagctattcttcttttttcctccaagagg

SEQ ID NO: 419237 - DNA, 224 bp, Homo Sapiens
ggagtcttaccagaatattcctcttcagttgactcagttggcattcccctatataattgtttcaatggtgctgccactgggtggttgtcagcttccaccatactcagagaattgcgtggctccctcctaaagctttgctacattgtgatcttaaatcccagttaaagaacagcacatcctgaggatagtcttgatagttttctaatattttgagagctcatcag

SEQ ID NO: 419238 - DNA, 271 bp, Homo Sapiens
ggcctctgacactaataccaaatcttcagacccttggtgtctcattctgttgcttagttgggatctctgtatcctccaggcagtcatcttgagtggaacctttcttgaaatgaataaaaatttcttccccaggattgacactgatccaacaataaattcatgaatctgtcctgtgcagctgggtcgatctcataaagcatttattggtcaaagttcagccttaaacagttgtttcttgaattttcaagaggcagataccagtgccgggtac

SEQ ID NO: 419239 - DNA, 302 bp, Homo Sapiens
gatctagaggatcccagtcatgtctaggacattacgctgaggctgatgcgtaggcaaggaagtccaacctgcaggctaagagtcagttttcactcctgtgggaaaagcatgcccagctctcagcaaaagcatagaaatcaagagagaacagtaaaggcaaacaggatatgtagcctagttccagttgaaggtattattcctaacaatgaaaaatgtcaatataactatttccagagttaaaacttcaaacacatgctatgacaatgagacagtatgtttgaaactacagatgtccaaggaaa

SEQ ID NO: 419240 - DNA, 195 bp, Homo Sapiens
atatatatgtatgccataccagtctatctatatatgtacatagaacacaaaccatctataatgatgcctcgatccccagcctagcattacatgattcattcatgccatatctccttaatcatatttgtcctatctttctcctggacagaaaactggctcttgtaacctaccatatatctgcttatttgttcatct

SEQ ID NO: 419241 - DNA, 187 bp, Homo Sapiens
cagaggatccgtaggaggtagcacttcctgaattcatcgtgtggtgctaacaacatcatctgcctactaatgttagtctttttaaatttagcacagcagactttgataacctgcctagaccagaatacaggccttcttaggaataagcagctatgcagagagctgtggacagccaacaagaaatggt

SEQ ID NO: 419242 - DNA, 530 bp, Homo Sapiens
tattctagagatcccgagtgatcatgtaggatgagcaggactgaacattcaggcaggaatagtggggaaaacagaggtggagattataggacaagtttaaggaatgactgaaacaattcagttgaagtacagagttatctgcaggatggtaggggaaaacacaatagaaaacatagatggggacaaagcatagaagattgtgcatgctttgcattcttgattctgcaagagattcatgcacgagttttaatcctgcatgagcaatggcaagaatggtatttgtctcattcacaataacaagcataaaataatcagaatgaaatcagtagagaagaattagcctgttttacgggagtgaaaaagcgcaacctaaaaatttgaaactggtatacctgcaaaaccctgtttacaacaacttaatagatccttacccccatcctctcaaaaaaatattttatcaatgcatcatcacaaaccatttatccatgtaacaggaagccacaagagctgagagacagcccacatctcca

SEQ ID NO: 419243 - DNA, 437 bp, Homo Sapiens
  misc_feature (97)..(164): n is a, c, g, or t
acagaggcataagcgagatctcggggtgataggcagtaactctggaactctaatgtggcaggggatactcagatgctacgtgtctatcaaaacagannnnnnnnnnnnnnnnnnnnnnnnnnnnnnnnnnnnnnnnnnnnnnnnnnnnnnnnnnnnnnnnnnnntatagattaaatatcttaggtggtttaaaactcaagaccaaagaattacattaactttctaggtaaattactaaattaaacaccaatgatagagtacatattttaaatcaaagtaactcccaaatcaatttttccctaaacaagtgttattacatgaagtgatgactccctactttgttagaagatagaattccacatgggactcatataactagaactagaaaatatttaccctatgtaagccaagatcactcagacaactacatgcatcag

SEQ ID NO: 419244 - DNA, 319 bp, Homo Sapiens
tagcaatataacaatccaagtcacaggaggtgtacaaagagaatatgtctcaccaatctattgtctagaacaataacatgtgagactatgttacttacattttgttactggtaatgtcagcagcctttaatttaaaaagctttagcatacttaatgaaattaaccttgaattgattggcaattctgatccagcaggtattaaacacatcaaggtaaacacacaggccactgtgacaaattcaatagatcaatctgcagtgatgcaaaaatccaataaatagaaattataactaaagaatattgcacaaatgccaatccc

SEQ ID NO: 419245 - DNA, 166 bp, Homo Sapiens
ggacaaagaaaatggctgtgagtaccaaaagacaaagtaggtgatcagaaaaagaatcccacttctcctctgagaatctcttaagaataaaatgagtatggggatactctacttcacataccagtcttccttagggaaaaccatcaacagaagcaccctttgccca

SEQ ID NO: 419246 - DNA, 121 bp, Homo Sapiens
gacatctccgtcatataattctgtatataggttgcctaaagatatacataaacatgaaatcatgttagtctcttaattgttacatctacacagtcaccttcaaataaccctgccttttctt

SEQ ID NO: 419247 - DNA, 147 bp, Homo Sapiens
ccctgagggggatgaattagtaggcttatcagattgttagatatgcaggatgaagaaaatggaggaggcaaaagtgcctgcacaagcttgcagatctggtgcacggcagcacatggtgcataccatgaagcgaaaaggaggcagagt

SEQ ID NO: 419248 - DNA, 150 bp, Homo Sapiens
gcatggatataacgggacttgaccatgcatttccttttttgttcccttcagtaactcactaataaggaataatagggtcctaactgaggataaagattaaataaggtgtaattagagtggtacatttcttccatcgatatactttatagt

SEQ ID NO: 419249 - DNA, 200 bp, Homo Sapiens
agtgtagcacattaacaatggttccctccctgaggagtacacagtttatttagacttctaaaaaagatggatcacaagccctccaaaaccaaatcctacaaaagttgaaatactagcaacttctacttctcagcacttaaaacagtattatgcgcatgagttcccaataattatctcattgactaatattctacatgcat

SEQ ID NO: 419250 - DNA, 241 bp, Homo Sapiens
aaggatcccggatgatgcgtgtagggtaggacttgcaaggggatggaagacctatccaagcttcttaaatgaacttgtatagagaaagataattttaattctaccttgtactctgatgccagaggtacttggtcctgccagtttctgggccttaaaggaattttgtattataagcatgttggttcttggctttctacacttctggcatcagagtcaaggttagaattaatagggtacccgt

SEQ ID NO: 419251 - DNA, 317 bp, Homo Sapiens
cctctttaaaaatactctgtgtaaaaagcgctgtcgtagaaaatccaatgcagaaggaataaagaaagcaaaaatctccttaaattcttctaccaagatggctgatttgcctctctctatttctcttctctatcatctgggtacacaaatacatgtacatacaaatggagttttataataaacatatgagatacatacatgtttcaagctcataatattttacactggggtgacatacctgctgtttttcaaccttcttatttgacttaatatgtgttgtgatctttccacattagtgagtaaattctacatgcaca

SEQ ID NO: 419252 - DNA, 390 bp, Homo Sapiens
cagagcaggaggccggaaacactgagggtgagcaatcatcacagagtcgagactataaagagggacagagaaaaagaggtagtaacatagaagaagacaggggacaagcatgtgagatactaatgggaaccacccactacagagagaaatatgaaagcagaaagagaagggagaaatgctggagtgatgtcctagagttggcaagaatagatgaatctcatgtacatgtcgagaatatgtccttagacatggacagttggtgccaggacagaagacaaagtgcgagtggaaggtgaatatgtgtggcagcagggacttattagtaccatcattagctgagtgctcatctggatctccagtttaagattttacttagagtgacctagggag

SEQ ID NO: 419253 - DNA, 366 bp, Homo Sapiens
  misc_feature (129)..(188): n is a, c, g, or t
cagagtataaacatgtcagtaaaacaaaacaggaccaccgcctatctaccaaatcacagcaaaaacatgaaagaaaacataccaaagcaatagatatgtgaaaaataatttctactatgtacatacacnnnnnnnnnnnnnnnnnnnnnnnnnnnnnnnnnnnnnnnnnnnnnnnnnnnnnnnnnnnngtaatgtgctatacactatgatgatgctagtatcatggaatatgggggagttttttctcaactttccaatattttcaaactactctagtcttattgtagcattttgtcttgttctgcagtcaactgttttaaaggcggcagtgcccttttctgcttggtcggggtcagaattctgtaa

SEQ ID NO: 419254 - DNA, 608 bp, Homo Sapiens
gagcacatctaggatccccaccaccgccaccactccccaaagctgtttttggttggaggcaggaagtgcatggcataggatagcataatcaccagactgtactacagatgaggaaatgcaagacctcccagccatgagtgatcactccagcatttcaatatggcaggggagtgaggagtccagataagatctgtctaaatattcttggtggactttaaggcatatgggaataaataggttcatattcaatttcaggctcaagaaggttccaggtcatttagattaatgatgcatccttaatgagtctaggtggtggtctaataactgccaaaagaacgaattctccaggagggcaaaaagccaaagcagtgcagggatgctgttcagactaagatttctctctaaggaagaaccttcaaagttccctctgatgctaaagcttgggatgaagagtcatataaatggtacctcacccaggaaccctacttgagcaaaaatgtccctcatttaagggaaacggaaagcaacactggaagaaaccagagtctccaggccttcactctttgtttgaaggcacgagggcctgagattaaatggactagtaggtc

SEQ ID NO: 419255 - DNA, 440 bp, Homo Sapiens
gtatctgccaatatttatatgaattgaatttggactcaatgtttggtatgtataatatgtaacatgaagagaaaatttaccagaggaactggaaaatgcacttaacttttatggaggtgagaacaaatactgaattaaaatctttccctgacttggtgtttcctgtgtatgctcatgcatgctagctataattttgtcatttctgtactgtgataattcataattcatatttacatgcttaaggtggggcctaatacagggcagggcgttatttacactgtagggtaggcattgagcagaagtggtgtgatattttttctgttcatttttctagatgggggaaagtttaaattgaaattattggcatcactgatgataattaagaactgtttaaattccatttctggcgaattcctgaaggatatataatcaggaactct

SEQ ID NO: 419256 - DNA, 644 bp, Homo Sapiens
gttctagaggatcccgagtgatgatgtggtgggggtaggggtgaaggtgggagtgtgtgaggtcaaatagggcaattcagccagagattaaattagaggtgtataggaaccaaatcttgaaggctcttccattacaggcatagatgtttggactttgtgctagtaaaaatgaggatctttaagggttttaggtacaggaatgaaatattccaataagtttcaccaggaaagtgaaacttctgctgagctttgaggcatttatgggatttgaatacatgagaggtaaaagaaagaacaatgtaggcaagaaggtcaacagtaataatgacccagaattggaatagtttgggcagatggggaaccagttgaagatgtaaagcacaaaactagatgatgacaataaatccaactctaaaagaaatcatacaaaatatgtggatcaaaatcatcaatttaaaaacaaaattttagacatagtctttaattcagtagtaaattatatataagtgacatatttgaaacacacaagctctctctcttccaaacaaactagattagatgataagaggcaggaaagagaatgaacctttgcttataacctactgtaatgtacctcctcgtaatttaattatgtctcagagtca

SEQ ID NO: 419257 - DNA, 500 bp, Homo Sapiens
atgatgcatgtatgatgaacaattagaaagggattattccctttaacagaaataagctgtcttccccaaaaaggttatacctgcttacatactggtggaacctattcatttattgcaggtcctctcctccccttgctagatttgtgggactcacaaagctgtttcaagtgacacctgtggcgcccctgctaaactacccactagaacttataagttttcttggatactgtaggctttattttatctggagttagtaagctgaactacatgacccaaggacccttatcagcttcctatgctgataataacagaagacctttgtaactcttgattaaaccttaatgttttatcagaaatcctatatattttactagactcttgagtaactccattttcccccattaaaaggtagtctcagcccaatcaatgtgattccctcgaaaagtgtaacttgaaatgacacaatcatcatttactgatcttatgtaacatatatgaca

SEQ ID NO: 419258 - DNA, 450 bp, Homo Sapiens
gcgtgtaagttgatccatgactataaagtgtatgacttagctataaaccaggcagttctatcaaatgagcaaatacctgtggcagtcatcacttagccacagccctatttgtcaactttagatcttttttgtgttcttgcagatggccaccagagctgcactggagagtgcatcttctgcttccatgtgtgggaagatcactgtgttctctgtgacccagtagtgtgaattgcttatctgtttctgcattaactcaaatttatcagtgattattgcctgaatacctcatgctttctgagatctacaggtacagatttagggttgaactctttctctaaataaatttacatccatgtgtgttatatgttgtatatcttcatttagtgactacgaaatgtctagctatgaaatgtgcatgtgaattactcattaagcctttggatcgccttc

SEQ ID NO: 419259 - DNA, 275 bp, Homo Sapiens
atagtagaacacgcaatagtcaacgtccgtgcttctactccaaagccacggtcagagtcaccaacctcagccagtgtccttgcccatcatctctcaccaacctcagcctgtgtaatcgcccataatctctcaccaacctcagcctgcgtccttgcccaatcatctgtccaggcatctaggggtagctccatgattactgcagttccaatggcttcatgatagtaagagcaacagttactgaactttcagttctaagccagagcctcctgtaagca

SEQ ID NO: 419260 - DNA, 365 bp, Homo Sapiens
gaggaaagcagtgagtggagtagagttcatactatatcaaaatgtcatgtcgagatacttcttaaatactcttcgtgtttctagtccctaagttgagatgataggaatggaaactctacattagtaacatgtcaaaacaactagaacactgcagtatctgttctcgttgtttaaaacgtttctttatagacaccatactcatcagtatgctgttagaaggtgtatattgcactctgcctgggagatcaggcccccgtgccttggacacacaggtagctttctcagccatgtgtggagcaagcatggctgatttgggcctttaaggtatcctggtgatgctgtgtcatctgtagcataggggacca

SEQ ID NO: 419261 - DNA, 364 bp, Homo Sapiens
ctgaaatgagaagtatgtctccatgagtagaaacttacagataatctttatttatctatcccctcaaccaagactatagcttataccttaggagatgagttaaaaaaatgaatcctaagcacagacatatacttagaggcactgtcactttgtctctttttccttttttggttttcagctactgagtgaagagtggaggttttctacaaaatttctacactagagaagtgacttcccccccttcttgctgtatgcaattaaaaatgataaatgagaactctactttttctgagactttcttgtcttctagctaactgtcttttaaaatatatatcctaattttcaatagttaatactagatagt

SEQ ID NO: 419262 - DNA, 539 bp, Homo Sapiens
acatgatgaataatagtcagaatgtctatgagtccactttctctgaatgactgcccaactctccttgatggtggatgcaataggattatctccattgcatcattaatcaagtagaactgcctggaggtagcatgggccaccacctgagccaggaaagtattttcagtgtatttcagagacactgtaatattgaccctggtatggtttcattaatagagaatggcccaagagctctttctttctgcatgaagggtagatttggttaatgtcgatgtaaataacttcccgtctttatcagaaatacgcatcattaactcatcacaggaaggacttccaccaccatcagtcaccttctcaaacatggacccagactttcttcctcacccttacttcctggtgattttaaacctcctaactaaaggaccaacatccctgctgaagaaacttaggaaactcacactctcttgatccaagagaaaactttctttctagaccccagtaacttggcattatttacctttccctctacatgcatcact

SEQ ID NO: 419263 - DNA, 227 bp, Homo Sapiens
atcaaattttcatttgtgtaagtcatttcactgcctgactcagtttaactcggtttagtgccattcctgtgtagcttctgaccaaggcaaggcactgcttgcttcctaacttgcttcaggctcaaaattcctggactggttcttcaggaccccatgcggtatgaccctagcctatttatgtaaattaatgcttattctttatccagttaaaacctccataacacaga

SEQ ID NO: 419264 - DNA, 376 bp, Homo Sapiens
gtatgctggggtatattctaatctaaaatagactaggcattttctgggaatgggaagaaatgagtagattagggattgaattctgttttctcttttcatctcttctttattttatcgtccaatcattctcactggcatttaaaacacacttaatttagtcctatccttgtagagcaagttgatgtcatctagtttgatttagcctatttagtccaataagttaattggttaataggccatctgtatgcatcaggtgacaggaatgctaggatgaatgcaatcacacacacatgttaaataagacgacatgggattgtataaaaacagttcagtttactccctatgactgctaaagtaaggttttctcatttctgat

SEQ ID NO: 419265 - DNA, 314 bp, Homo Sapiens
  misc_feature (170)..(197): n is a, c, g, or t
agattgcagtacatcaactaccttgatgtccacagaggtctcaagtccaaaggtgtgactgtcatggtaggactgtttgtgaaaatcccataaggcattagagtgtgagcatctgaggtagaaatttatctttttatatccagaacacttatctatgcctagcagatatnnnnnnnnnnnnnnnnnnnnnnnnnnnngaaacaggtaccacttccagagatggccctagttttttgtccttgtgattactcactgtccgtgtgttctaaccacaacaggatctacatatcatgctgttgttgccatctatcact

SEQ ID NO: 419266 - DNA, 238 bp, Homo Sapiens
aaaagatctttagttgtgcctcagagtatttccatcagacaatacagatgtgtctcagaaaatctctgaataccatcacaggttttaaaaagtttaagggtattttcatcagcaaaagcttgaggcagagtttatgtgggacgagatgtgtggttgttgctttggtctgatggagtgaactcaaaattcacaagtgagccacaaagtttttaagagaagtctattagcagaaacatgg

SEQ ID NO: 419267 - DNA, 253 bp, Homo Sapiens
gagaaagaggagtattactatagaagtaaagtcatggggcaaggtcagtgtacagacaaagacatgtaacagagcattctttatgttattagaaaaagaatgttggagatgttggggttttgtgcctctgaggcctggtgggccggctgctagctgtagtggtccatgatggggatacatctgagatgtggaatgaagaccaggtgagccagatgagggacagagacatcacactctgacacggatgtctggt

SEQ ID NO: 419268 - DNA, 425 bp, Homo Sapiens
aacggggatatcagtggataacgaggggaagaagtgtaaagaggggatagaatgataaacaaagagaatgatagaatgatagcagattgacaggcagacagaagatagatatcgaggtccatatatatctgtacatagttgtatatctaaatgtatatctatccaactatctagctataataaaggagaaaaagaaacggagaaaaatgcagagtgagaaagggaaactgcacagccatccctttcaccatgccagaacaccaccaggctaagcatgtatgtggagggagctgaagcccctcctgcagggatgagcacgctgcagatgaagatgtgagcaggaccagctcatcaatcacaatcacgcagggacacactagcacggcaagaggattagcactccagcctgctcaggtcttttctct

SEQ ID NO: 419269 - DNA, 255 bp, Homo Sapiens
aggtgcatttccatgtgattttgtgcatgtggatgtgtaacaagctctgtactaaactccctgttctaaatagtgctgggctatataccagaaaatgttccgatggtgcttccatagaaacatctcagcacatctcacaggcagccatttatgtcaacctaaccagaggctccagcaaaagtattcccaaaggtaaagtttgtttacgattaaattctcttaagctctccagcagcgtcaatgcggattggccat

SEQ ID NO: 419270 - DNA, 384 bp, Homo Sapiens
cagaaggagactaagatctggctcaataatatctgaacaaggtaaatctaactgcattattgaatacacaaaaggaatgttaccgttacttgtacatagtcaaaggtgaagttaaaaacaaaagggaagttaaataactgaagtaatggttcgcccaaatagcaaacgtaggatacaggcgtgggcaaagagcagctactgaagctcatgaggaggatgctggatatagggtaggtaacttgacaactgcctctgcttctttggaaccttctacctagactcacccccacaaactccaaacctggctctttcagagcacaacagccacatgtaactaacctcctcattacttctgtgatattaggcaacagaatgagatagttt

SEQ ID NO: 419271 - DNA, 140 bp, Homo Sapiens
ctggggtggttgtggttgggggagctttttttgattaaacagaaattccttcaagtagaacttgaggaaggacactaaatacagtcatcttaacccaggccagaacctaaatttattggtttgcctaacagtcttattgt

SEQ ID NO: 419272 - DNA, 532 bp, Homo Sapiens
gaccggctctagtagcagcttgacataatatcctcaaggtccatccatgttgatgcatgcgtcagaatttccttccttgtaaggctgaattacattccattgtatgtatagaccacattttgcttaccaattcatttatcagtgaacgcttggcttgcttccaccttttgcctactgtgaatagtgctgctgtgaacaggagtgtacaactatctctttgagagctgcttgtaattcttcaggtatctactcagaagcagaattgctggatcatatggtaattctatgtttaatttttttgaggaactggggcaggttctaattttatttccattttataaatgagggcactgagactcagagaggttaagtctcttttctgaagttgcacagctggtatatagtagagtcaggatttgaacccaggctgtctgtgtccatataaaatgtgctaacaatacgcactttagaggggtgtcatgaggattggatgtgagcctgcaaggagtgcctgtctcacaggagatgctaa

SEQ ID NO: 419273 - DNA, 494 bp, Homo Sapiens
  misc_feature (117)..(164): n is a, c, g, or t
catatgtctacaagaaagtagacccaaatcatgcatttctgctgtgctttccattttattcaacaggtcatgaaattacatgtcttttttctcacacaccccttacattttgtctannnnnnnnnnnnnnnnnnnnnnnnnnnnnnnnnnnnnnnnnnnnnnnntcaattagacaagagaatatgtatttatagattgtagtgggggttaggacaaaaaaaggggtcaggtacttcctttacatcatgtgctgaataatgatgttcattaaataaatcacagttaatcatctctgtccttggcagtatatgagctactgacaaattttctgacctaataaatttaacagactgcaagaagataaagaatgaagtcagctcccaaagctttgtccatttctccaaatatttaataatcagtcgttgtaacaagaaaaagggtgcagtctgtaggaacatgaaatcatatgcctcatgactgtcaaagattctgtg

SEQ ID NO: 419274 - DNA, 160 bp, Homo Sapiens
ctagcggatccttatcaacatcagtgtgcccttctacaaactctttttgttttaacccaggtccctccccacctacccccttcctttgcttgcagtgaaaaaagtctcaccttattttccctgctagcaaaggcagggtacctgcagctcgaattctgta

SEQ ID NO: 419275 - DNA, 138 bp, Homo Sapiens
cttgccagatggagcgaaggatgctagaagacgtgtatgaaatcagaataaaatttcagatgaagaagaaagacaatagaagaaacatttccaaaaatatggaatataacattaggctaagactttaaaaattctatg

SEQ ID NO: 419276 - DNA, 191 bp, Homo Sapiens
  misc_feature (98)..(125): n is a, c, g, or t
accatgagagctctctcctattatccaggtagcattgttagatatgttggattacaaataaaaaattattgcctaattcagtatttaaagtagttggnnnnnnnnnnnnnnnnnnnnnnnnnnnnaaaggtttagatttataaagccttctcagtggccctcacttctctgttttattgtcgttacagatt

SEQ ID NO: 419277 - DNA, 359 bp, Homo Sapiens
agcttaatagcatatcttactttgaatatttacacaaacacataaccatgtgactacattgataggccctgtaccacgggccttgaaactgtagcctatgcacattaccagccctgaaacctaaattatggtagtgttacagtacatccacttgcttgatgaaatagacaatgtgactggattgctcttagcaggtattcaatctctacaagtttgggctattaatagagatttaagcaaccactaatgctgacgtccaagtatagaatacaggaccagcctctgtctagtagagctggggagtggtgagcctggattaggaggctttgatgaggagactgaacgtttgatcgagctaa

SEQ ID NO: 419278 - DNA, 184 bp, Homo Sapiens
gtcagcactgtagtaatattactgtgggagggatggcggcggtataccagaaggaagaataatcttcatggtctctggcctctatcttcagtaaatttgcagtctaggtcagatagagaaaactggccgcccactgcaaatgttggcctggttctcatagtgatgttaaagattaaaacaggag

SEQ ID NO: 419279 - DNA, 602 bp, Homo Sapiens
  misc_feature (180)..(196): n is a, c, g, or t
cttcataaattcatatagcaagactaaacataatcatgcctatgaaagtgtggtagcctctaaaacattacgcaaatagccaagtattatcattatttctgttagtaatgaaacaatatatgcgtgtcagataataaggtaaagctccaactcctgatcttttcaggagactctttgccnnnnnnnnnnnnnnnnncccttgctaggatacatagagtggtaagatatgtagaaagcagagttcaggggaaagtcagaatgaggcagagcttccaggatagtactttcttgttgatctgttatttttctaaacctttttcttttctgtgttgaagcacaatgccattttttgaacttctccaattgttatctcagatatggatatgcctgaggcctgggcaagtcagggcagtgccactccagtttcagaaaagaaagtgtgatggggtccagcaggggaattgctgtagtacttcattagccaagctcagtaatacaaagaataccgctgcgggtgtgggtgtaatgaaatgcagatcacaggcctgcccagcaaatagatagagtcaagatttgtattcacaagcctgtaatactccagc

SEQ ID NO: 419280 - DNA, 262 bp, Homo Sapiens
gcatcatgagcttcaaatcagaattaaatttcctatgtaaaattaacaagacaaatagcatcagttccttaaattagcagaagcaggcatctgctaaagttctgaggtagacattcagtgcattttacaagaaatcaacaatatgtccatttcttccagtccttggatcgaaataagtccattcgttctcttcatctataacccaataaataagttttgatggccatctaatgcaaagataatgccctcttaaccataagct

SEQ ID NO: 419281 - DNA, 289 bp, Homo Sapiens
  misc_feature (82)..(202): n is a, c, g, or t
atccatactagtgaagtacacagaacaggtaaacatatatgtggcactaggaattattacaatgttactgtatgaggggtannnnnnnnnnnnnnnnnnnnnnnnnnnnnnnnnnnnnnnnnnnnnnnnnnnnnnnnnnnnnnnnnnnnnnnnnnnnnnnnnnnnnnnnnnnnnnnnnnnnnnnnnnnnnnnnnnnnnnnnnttcactgtaatataaatcttaccttatgaatgaatcaacaccatgaaaaaatagccacaaaatccagaagataagattctatgggac

SEQ ID NO: 419282 - DNA, 397 bp, Homo Sapiens
  misc_feature (71)..(318): n is a, c, g, or t
atcataaagagtatagaagaaatatcgtaaaacatatggagtggtcctccgatatccatgaatcatagatnnnnnnnnnnnnnnnnnnnnnnnnnnnnnnnnnnnnnnnnnnnnnnnnnnnnnnnnnnnnnnnnnnnnnnnnnnnnnnnnnnnnnnnnnnnnnnnnnnnnnnnnnnnnnnnnnnnnnnnnnnnnnnnnnnnnnnnnnnnnnnnnnnnnnnnnnnnnnnnnnnnnnnnnnnnnnnnnnnnnnnnnnnnnnnnnnnnnnnnnnnnnnnnnnnnnnnnnnnnnnnnnnnnnnnnnnnnnnnnnnnnnnnnngtcccccaaggataccaaatggcagccacactctgaaaaaatagattgtactcaacttttgaaaattctcattgtattt

SEQ ID NO: 419283 - DNA, 619 bp, Homo Sapiens
acattcctctgtctgactccccgtgagcttgatcttaagagaaacggccctcttcctccttaggccacagtacgtgggcaagtttgatcttacccagcatgcccaaaccaggctctcaaaccttgtgacttctgctgccctgcaacattcctcatggcaatccacaacagagtatggcctctttagacccacaaaccaggtagtcagtctatggggaccatcctaggatctgccattgcagaacaggctgccctttatggtagataaaacaagcatttaaataaagaatgatttgtttggcttatccacgatcctgagaagaaagggttgatttcagagccaacatgtgcctccctactgccttcttccaataacattgcttccccctcaaacaaggaagaaaatttagatgccaagagatactaaacaacccatttcttagccatccacctcattacacagccaacactaacagcagagcacatacctcctaacctagtagggagctggctagatgacagaagagataaggcctgacagcacaactataaccgcatctaaacacagaggaaaacaattacttgaaaactgtcaggtatctgtggaagtccaggcaatc

SEQ ID NO: 419284 - DNA, 179 bp, Homo Sapiens
atgagcattgactagatgaaatcttaacccaggaccctgcatagagatggcttcattttctagggaaaaggaaacaacctgtaaatcaaagggcagcctttcctccagtaaaactgcatagtaggaggtctctgagccaatgtgcgtaggaactcaatgggtaccagagctcgagattc

SEQ ID NO: 419285 - DNA, 495 bp, Homo Sapiens
gtgtgcaactcaacaaagaccatccgcatcaagctcagcccacgtgcttccaagaggcaaactttaccttacacttagccaagaattatttcacctgcgttgtatcacttttcgcaataaccccgtgaagacagtaggatgacttcttatgtgtggctacagaatccatgaaggctcagaagactaatgtaatagaagactgcaatgacagggttacctcccattaacaaaagatacttgactttcctgtacctattcataagaagagggcctcaattcaacagtccccaaagtggggaagcaatcaaggctggacttgagttccaccagattggtcagagacctccactatgcagtatactgaaggaaaggctgcctttgattgacaggtagtttccttttccctagaaaatgaagccatctctaggcagcgtcctgggttacgatacactagtccatgcaccttgtacttatgaatatgtgtatgaaggaatg

SEQ ID NO: 419286 - DNA, 182 bp, Homo Sapiens
tatcctgtactgttagaatgtaactgtgcccctcctttaagggcacaggtggattagtagtggctaatgataagaggagtttacttcctctagttctctgaaatttttctggtgtgtaaatttaccttttcccatagcatattttagatgcttaagacacttaggatgtacagaaggtacat

SEQ ID NO: 419287 - DNA, 257 bp, Homo Sapiens
  misc_feature (45)..(127): n is a, c, g, or t
cttggtattaacaaaatgcgtccaaaacatcatatctgtacacannnnnnnnnnnnnnnnnnnnnnnnnnnnnnnnnnnnnnnnnnnnnnnnnnnnnnnnnnnnnnnnnnnnnnnnnnnnnnnnnnnagcaataacttctggcgcacctagacaatggcacatattattcagcactgtaaagacctgcagctatccatcacctgaaaggccatggcaggaacactgaactgcctcatttctaagtgaaagcaagcca

SEQ ID NO: 419288 - DNA, 462 bp, Homo Sapiens
aaggtaatcaccgcgagtctctatagtatactgttctagtaagtgagagtgggtgctttgctgcctgaggatctgtagttcagtgagaacgaaggagacaagaaacgggtaggaaatgtatcccctcattgtcttggttcattcgggtcatgatggttctttttcattacaacaaatattaattggttgcttcctgtaatgccaggctccgtaacagaggctatgggttatagtcagtgaataaagccaaggcctctgtcttggaggcacttacattttggtggggcatgtgaatccatctaagctaccttgaagggcagggacggtagtcccctgctacaacagtgtagtacatcagggaccaacctggccttggatagagaaacttgctcagtacattgtggcagtaactagtgcttcagccatttcaggagtgctgctgggtgagcagaatgcatggag

SEQ ID NO: 419289 - DNA, 331 bp, Homo Sapiens
attctcgatacctagctgcatggagagtatacctcgcagagaatactatcgatactatggggatagctatactccagtagatcaaaagaattggcggcagagcacacacatggaactgtcctggaaggacaaatcagggtagagatgcacagtcaggtgactggaggtttcttccgcaaagcatgaccaccaggaaatcagaatcagccagtccctcagaatcaggaacaagatcattgcatgagaggagaaataagacagtacccataagagaacagtccagtaccgaatctgaaccctgagttcgtttggtagtcaatcccttcagggc

SEQ ID NO: 419290 - DNA, 548 bp, Homo Sapiens
  misc_feature (369)..(395): n is a, c, g, or t
ctgaggtcagagattacctgtctccacagtcagtaactagctgcacagtgtaccgatatcccagtgtaccatcccagtctcaaagataataataggaatctcattgtagtaatcagagtgtgacaaacctttccaaagcgtgtcagataccatcctaaatgtctagatttatagagccatttactcctcaccactgtcttatgaatgtaatacaccagtcattctcatgttacaaaacagaaaactgcggcacagacaggttaatcaaacttcccaaacccaaacagcaagtgagagagccacaatttgtgccagccaggcagactccatgctcttaactaccagtcagggtcttctcttataaattannnnnnnnnnnnnnnnnnnnnnnnnnntataatgagactctaatactatcttacatattaacaaacccacttatcttgaaaatcttaagttaatctagagggtgagttatttggagatagtaaggcatgccaaagcaatatacgaataatgtatctatacaggaatgccatgtctgtgtc

SEQ ID NO: 419291 - DNA, 362 bp, Homo Sapiens
  misc_feature (145)..(258): n is a, c, g, or t
cttagcagggcgctaagctttcacgtgtgggatagggcctttgagagacagagcacatagcttagccatagagaaaagcttttcctcttcccagtgaaatggtctatcccaactgcagagttgtcagaaaaagcaattcttcatnnnnnnnnnnnnnnnnnnnnnnnnnnnnnnnnnnnnnnnnnnnnnnnnnnnnnnnnnnnnnnnnnnnnnnnnnnnnnnnnnnnnnnnnnnnnnnnnnnnnnnnnnnnnnnnnnngcaattcttcctcttcctgttttctgtaaatcattgtggtggctaactaattggtttatcatgtgactgttgatttcagtatagagaaaaagtttgggtgatta

SEQ ID NO: 419292 - DNA, 107 bp, Homo Sapiens
gatataccaattagaacgcgacaaaaatgatctacagaaaacaggaagaggacgaattgcttctttcggagatcgagtctcgctaggctcacccaatgctggtcttg

SEQ ID NO: 419293 - DNA, 154 bp, Homo Sapiens
atcctttccgttctcgccctctccttaaaaaatcataaatttattgaatgacttttaacatttaatgacctaaaactataactgccctggattttatattaaatcagttcagcctgctttattagtttatttgatatcccatatacaaaaatag

SEQ ID NO: 419294 - DNA, 346 bp, Homo Sapiens
tgctaagaatcagagctcggaattcactccccaaagtggcttatgcaaatgccatggacagatttattgctgttcgtcatgcattagtgttctctgccctaattgaatcagcaactataaattacttcaccaaaaaaggatgtgcttgggatgggaatagtgtagtacatgacaagataaacgaaaaggcttccgtaatgatacagaacaacgcttatgcagtgacagtagcaaattatgccccgaatctaacaaaagatcaagttctctccaccatctccaacagtgcaatcacgccaatatccaacaagaagccaaacaacacagccagctgaagcaaagaaaa

SEQ ID NO: 419295 - DNA, 331 bp, Homo Sapiens
gtcacctgacctataaataggcagagcctcagatctcttgctgagcttttacaaggtaaaccagacataaaaacacccccctctacctcagtgaggatatgaaagaatttgtgtgtgcttggaggtgggaggttcctgtaatattacaaaactaatactacaaggcgtgcctctggacggatacagtaacctctttatagatttccttcatccatccctgctctcctccaaactgttttccatggggcagccaggaacttcaaatgtaatttctgatcatatttgaattccttcctttgccttcctcactagttttttctccctgactctc

SEQ ID NO: 419296 - DNA, 315 bp, Homo Sapiens
tttggtgatcatctcctctattcagtcctacacttctctccccatgccaatgtataggccatgcagacaaggacatatactaaatagcaccacctatccatccagcttccatcacactgctagagataacacttcagaaaatccaagtacaatcctattaaaatcttattataatcaatcgtctatataataatttttattattgcccattactaggatagagaattccaagtttgtcaagtaatgaactgcatgatattcctggtctctttattcaaagtcatctcctacttatacccctaatgtgtgcgcgcg

SEQ ID NO: 419297 - DNA, 348 bp, Homo Sapiens
gtgaacaaattcctaaatgtgacatttaatgctttattatttgcttccctccccagcttcccttctcagaatttcagtactctatgtagttatagcttagccgtaggtagcctccaagatcctccccttgctctgtgctgctcctactctacagcttaaatgctgttgactccaatagggtccccaccctggctacccaagtgtcatgcttgtgtatattcccacctctgaacatcaccatcacctgaatgtcccacaggcactatcaacatatttaaaattgaacctggtgacttaagccaaagaaatctgatagctatccttgtcctgatgtttttatttcctaac

SEQ ID NO: 419298 - DNA, 367 bp, Homo Sapiens
gtggctgtatcagtaatagaaaacatgaaaaatctggagctgacaaatttcttagaggggtttacagatttaaacaggcagaagaatcagcaaactttgaaaataggacaaatgtaattatccagtccgaggaacagaacgaaaaaagaatgaagagtgaacagagcttgagggatctgtggcattttatcaagttaccaacatacgcattaaaggagttccagaaaatgaaaagaaaaaggcagaaataatatttgaggaaataatggctgagacttcccaaattcaatgaaatacatgagctacacattcaagaagatcaacaaattataactaggataaactcagagatctattactaaacaca

SEQ ID NO: 419299 - DNA, 343 bp, Homo Sapiens
cttttatgatgataatgtttattgatttgcatatgattgatcagctttgcttcccagagataaagtcgacttgattgtggtggataaggtttttgctgtgctgctggattcagtttgccagtattttattgagggtttttgcatagatgtttatcagggatattggcctgaaattttcttcttttgttgtgtctgctaggctttggtattaggatgacactggcctcataaaatgagtcagagaagagtccctccttttcaattgcttggaataatttcagaaaaaaatgctaccagctcctcttcgtaactctggtagaattcggctgtacagccatttagg

SEQ ID NO: 419300 - DNA, 125 bp, Homo Sapiens
ctaaatgcgttacctaaaatggctgttacctaaatcgctgttacctaaatggctgttacctaaatgggctgttacctaaatgggctgttacctaaatggtctgttacctaaatagtgtgttacct

SEQ ID NO: 419301 - DNA, 420 bp, Homo Sapiens
ctacctaatggctgtcataagtaaagggtagggctggggggcaggagtatggtgggtgcagtgctgaggtgcaagagtgccatatatttactgaccccagtctaacaccttcttaaattagaccaagatctttgcttcattataaatactgaggcgttctttggcttaaattcagaaatattaaaaagcattttcctcactccaaaactggcttcacgtgatcactgcctgaagggatattataatggccatggctttgtcatctctcctgacccagtgatacacgtgcaaactcataattcactttattgtcttttgtgatctgtaatgctttcttcagtagcttttgtgtctatggtgcaatttttaagttttataataacctctatcttgttctttcctactgtgagattgtatttc

SEQ ID NO: 419302 - DNA, 391 bp, Homo Sapiens
ttcctttaaatagaagattgagcacacagataccccacaaggctggcttattgcaactgttctcatgtaggatgaagtggcacgtatgcaatccccataacagccatcttaaccatttcacagcatattattcaaatgtacatctctaggtggcaactaaggataggcgacttggactcagtagcaaggggtctgtgctgaaaatcctaggacgagggataggaacctgcaaatggcaagacaaactagaggatactcaaccagaggcttagattgggcagctccattggctttctgactgcctacgaggaaaacctcactggaaactcttttgaggttcttgaggaatcctagaggcaaacggactcctctgccttttggaaaggataag

SEQ ID NO: 419303 - DNA, 124 bp, Homo Sapiens
cgctaaaatggctgtgttctggagcgacccaaggcacaggatacaaacctgtccatgccacaattattgcatctactaggacgcactgattaaaattctgttttcccctgagaagacatttatt

SEQ ID NO: 419304 - DNA, 443 bp, Homo Sapiens
  misc_feature (250)..(299): n is a, c, g, or t
cactgtccagtaagtactatgcaccctcaagacccatactctatgtgtgctgatttattaacactggaacatgtcctcccccttctctgcttgatgaactctaagaccaaaagacttctctaagaactgagtcccctactttgtgctcccacagaatgttgtaattatgtcttacatttgtctttcactttcctttcttgatagattgggccatattttatccttaaatttcaaaaatatagcaatattnnnnnnnnnnnnnnnnnnnnnnnnnnnnnnnnnnnnnnnnnnnnnnnnnnagtgagtaaatgaatctattcttatttaggttttcttaaatatacgctttgcattttcctacaaagtctagatcgatatagaaaaacaaagcaaaatggaaagaaacattttaattctgtatttccctttgcttcttgatgcaa

SEQ ID NO: 419305 - DNA, 272 bp, Homo Sapiens
cctggactcctataaatcaggatctaaagagctgatgaacaataaattaaaaatactttaagatgtcattttcatctattaaaatggaaaaaaatacaaatgtttcacagcatcacagatattaacagatatgttcccactattgccataactctgcaaaggattggaaacactccactatccctacattacgggacttgaggtatatctcatatagacgcagtaactatacacgccatttacgggggatcctcatagacgtcgacactgca

SEQ ID NO: 419306 - DNA, 390 bp, Homo Sapiens
tctgcatatgtgtacacatatgggattcacaggcaaatcaacttggaaatgggaaaggacacaaaggctaccccacttgagatgcaggtcagtatttacagagcagtgggcaggtgctcggctgtctgctaggtcctgggaaaggtacaggagaaacacaggcaagagcatgggcactgaacaggaaggaaaacaataccctggagggcacagccccctagcccaaaagaagagtatttacagtggggaggggaggacagagcatggacaaagtctaaggagctaaaataatacaccctggaaagtggtatgatcatttctgcatctgctccagggaaacctgccaaaatatgattagcataatacccaagagaacatcacattccccat

SEQ ID NO: 419307 - DNA, 427 bp, Homo Sapiens
accgggccctactttaatggatgtaatattctaactttttttaaaatggagaagcctttctcatgtttgttttcctcctgctatacctcctttgctgtgttctcttttacagaactcagaagagctgtgtctcactgtctccttcatctagacaaacgcatttcccttcattccgacactcggtaacccacttattctggttttgtctcaaatctaaaaatacgccactgaaacggatacgttcctaaattactaatgactccatgttgacaaatcaaatggtcaaatcctcgttgagacacaatgggcagctcttacggtttgaacgcccttcttctcttaacctctggggagagcagtctcttacgggtctaatcttactcacagctactccttctccatctactttgctagttacaccccatct

SEQ ID NO: 419308 - DNA, 297 bp, Homo Sapiens
ggtgaatatttagcttcacaagctacacctccattcatttctgccattcctgaacagcaaaaccaaggattttgatgcaaattctccctgctggaacatattccctgatcctctcaacaagctcacctctctaagctgctcagctccataacctgctcatgagttctttatctttccttatttagaaaacgtaattaggtaaaattaacagcaggacatatagggttaattcacagcctttggacagcatttaggtacagccatttaggaacagccatttaggtaacagccatttag

SEQ ID NO: 419309 - DNA, 419 bp, Homo Sapiens
ttgccactaaatagctagtaacctaaatgcagttacctacatagctgttaccttactagctgtacctaaatagctgttacctaaatgctcgttgagagtaccgctggtcataaacataggtgtgcacatctctattcgggtcataatggtatttgagtgctcagaaagcatctcctaacaactatctcctggttcaatctgccctcgcaccaggacccggagtggaatgcatttctgctcctcatctgatgctctgttctcctctgacttcgtgcctgcggcaaatgatgtttcaatcactgccgcccttgatgggtacttccggacccaggcttcccaggctatagagttaggagttcctttccccagacgctttcttttcagtgtatctaggtttctcctggccatcagctcacttc

SEQ ID NO: 419310 - DNA, 189 bp, Homo Sapiens
catttatacgtacttggttttgcaattagaagatgcagagaacaggtgatgcaattattttacataactgtgttcatgaactaagtgttccaaccttccgtgcccagattgatatgcctagaaggcaccccatttggaagtaaacacaggctccatttacggatgcacggaaggttggaacactttatt

SEQ ID NO: 419311 - DNA, 119 bp, Homo Sapiens
ccatatgcatgcaactgggtcacttgctgtagaatagtggtgtacttttggtcagccagcactctctgtggcttagcaaccccagcatatcctcccaacaagcagggaatctgttagca

SEQ ID NO: 419312 - DNA, 305 bp, Homo Sapiens
  misc_feature (47)..(64): n is a, c, g, or t
tttaataattgagcagcgctagtagacatcgtaaaactagggtgtannnnnnnnnnnnnnnnnnactgcagtgcttctctgagcattgtggctctctagggggaaaagtaggggagatggaaaagggctacttaaatttctttaaccacagaactttctttttccctaggacaaccattgtgagaacttagtgttccatcaaaggcagtttgggaaatgctacaatagatgacctcttcagatttctttcctcctgaacatttcaccattccccagctagaagaaaccgagcaggggcacggaag

SEQ ID NO: 419313 - DNA, 281 bp, Homo Sapiens
tcagctcggtacctgatctccgtgcctatgttagggggtggacaagttgtatgccaagacatggaggttcacgcctggaagagaaggggctgaggacagaggtccaatccgtatattagagtattaaggagtttagacttcattcagtgaaccgtggaatcctgtagaagttttaagcaggagtataatgtcatcgcacctccttttgcagtttagccaggcgatcatgacagctgaacctaggccaacggtggtctggaatggaatgggacggaagatca

SEQ ID NO: 419314 - DNA, 338 bp, Homo Sapiens
tatgcagaataaagctgtaccctctaaatatgttatccacactgccacctacttggacaaaagagatagaagatcttcagcctttagagaagtctggatgcaagggtccagaaggcagagagagtggactggtcattgtagtgggaattggcaagagcaggactgatgtgcttgtcatttctctctggggcagagctgatgtgaggtgtgtagaggggacagcagtgcttctagggagaagctcggttcagcgccttggggaccatgggcctggtgtagcccagcattccgtgaggctattggaatcctgttgctggcatctgccaaccctggggagc

SEQ ID NO: 419315 - DNA, 146 bp, Homo Sapiens
cctgatcttacgtgcccttttttactgtacggaaaagccccaactggcctcctgggggatgagggctgaaatgatcccgaaggccttttaatctagtgtgaaatccggcgtgtactcacgaaatccgttccccgcaatttacagca

SEQ ID NO: 419316 - DNA, 116 bp, Homo Sapiens
ttatcttccgtgcccattaaacaaggaaaatataaaggtattagataaatttattggcttacgtattcacattccagaaccacatgctattaatcagaggctaccatcgctgtagt

SEQ ID NO: 419317 - DNA, 250 bp, Homo Sapiens
cttgtggtcgttctctagcaggatccccctagtattattatctcatcttgttgatcacgtcttgattctttagtaatgttgagtacttccccaggtcattacttttgacctgtgggtgctggatttttcatcacttatagctccatagctcccagctctttttattggcttaggctgtggattcctctggaagatggtagatgtactttaagtaggcaccttaagtcagaaaacaaactaatatgcccga

SEQ ID NO: 419318 - DNA, 121 bp, Homo Sapiens
tgatctccgtgccccatgacctttttagcatacaatgttgtgttaagaaaaatgaatggtcttcatagaagagaattataccagagcctaaggaaaaactatgattatgatctgaatttga

SEQ ID NO: 419319 - DNA, 106 bp, Homo Sapiens
tctgaaggttatttcgaaagagatttctgatacacagaataatggtgactttcttcaaaaaggatattaatttgcttcccccagtttaacagggcacggaagatca

SEQ ID NO: 419320 - DNA, 340 bp, Homo Sapiens
tgacttccgtgcccatgtatggttatagctcttagtttatcttttgttaaaccaccagaatatgtgtgcaataggataaatattaaatgattatgaagtcctgaaagttataaaattatttattgcaaactacgatttattgttgactatatgcttccactcttctgccattgaccaataagttattaaaattagcttgttgttatcctctcagcctttctaaccggtataagttgttccatgatatgagcagtgtctcacagtgaatcgttccaggagcttcatggccattcccaatagatcacatttctcacatctctgaggttggggattctaatta

SEQ ID NO: 419321 - DNA, 351 bp, Homo Sapiens
tgatctccgtcccattgaaaaagctgttcggaggagtttaagatagtgctttgtttgtctcacagataagttgtcctcctaattgcaatccaaggtcctttaaaatcatcctttgacagtcctatcacacatttggaatgtgcactaataagcagaactctgctttacaggtgagctcttgagattacccatctctagcgtctcttcattgaacttgaagattttcaagtttcccaggagcaaaaccttacttaggaaatcacataaagaacacccctatctgcctcataattggaaacaaatcccagcccttcagagtgaaaccaggtgttcagagttaaatctcataac

SEQ ID NO: 419322 - DNA, 171 bp, Homo Sapiens
gggtgtcatgaagggtacagctcctaagaaccccacataccaccctccatttgtcaagctcctctggttacgatcgatggccttgtcgtcactcacaccggaccccctcagagggagagatgagcttgtctaggcgaccatttcctcccatgaagcttctgatttataccg

SEQ ID NO: 419323 - DNA, 411 bp, Homo Sapiens
atacagtgacagataaggattgtggaactgagagaccgaagcagaggtcaaggctgagggggcagacatggtgagtacatatggatcacgtaggtggacaacctttgaagggagtcaaactccccaagagaaactaaaaaggcacaagaataagcagacctctttatatttatagtactgtctgtaatattcagaatattttttcttttctcctttgatcttagagccatctaatagcttagactagataccctggtaatttaagttatctatctagaaaaataaacaattgatacatcatcataccctatgccctttatcataacaagcacttataaattgtgtagaggggtgctctgatctagacctcaatatttatgaactttagaaggctgaaaatggagacagtaa

SEQ ID NO: 419324 - DNA, 425 bp, Homo Sapiens
  misc_feature (401)..(401): n is a, c, g, or t
gtctctagcaggatcccctgatctcggcccaatgacagacccatcgtttcctgtagtgctgttacaagttcccagaacataatcttgaccaagagatcaagttattatctgacaagatgacagtctagttggccctgcctccttacatgaaatttatttataaccaaaattacgatatttggagcacaatgccctattgtctgcttgtaaatgttgtttttttggggagaaatccattgttttaaaatctagtatagataggctctatttagtacctttccgcccatgacaagatatgtacatttcacggtagggaagcctcattattgaattcagaaatactttaattgacccaccttgcctattctggtttgaaatataatccaacacagaaatgatcnatcttgaggtgcacggaaaatcac

SEQ ID NO: 419325 - DNA, 401 bp, Homo Sapiens
tattccatgttacgttataaatatatcacaaggccagatgataactatgatcatcactgaggaacgtacactagtaaactaatggactggctcattacctcagagaaccaagtttcaagcaggagaatgtcgtgtattagatcagtgtgctgtttatgatgtccctagagaaaaagtttctaagtaacagaaaaagccacgctatttctgttctgcatttaaaggcataacataagtttggaagctaatcttatgtccctttttgctccagctgctatgaaactcaagagtgaaatgtgtcacctaattctggtgcctgtcaagtactatgttgtccttcaccctcaggcttcatctcttaatactgcacatatttttataagctgtcattccaaggagga

SEQ ID NO: 419326 - DNA, 143 bp, Homo Sapiens
taagctctgcgtcagatgctgcgtgttccacagtattgaaatggtgatatttcaagtttggatgcatgagagccagagttttcagttcagcatgaaaagcatcatctcgagtgaaataaatcaggtcgatctgttccagagat

SEQ ID NO: 419327 - DNA, 265 bp, Homo Sapiens
ggactgctgtgcgctacctatggtagctggtggggacaatagagaattgtcattcctaccagacaattagcatttgattatctcttgccttgcactggcttctgacaatttcttatgcctgaaccttatctcaccaatcaaattgtcagccacatagcattaacaaattcttgcagcgaattctatgcagtgtttcaatgtccattattttgctgggttcttatggcaagtttcccctttcagccgtctctagcgacagcaggca

SEQ ID NO: 419328 - DNA, 304 bp, Homo Sapiens
tcggctcgggcctgcctgtgtcgctaaatatcctttgtgttaccttttcaaagcttttcaatcacactgtctgttctgactacacagtatggtacagcgcgtgatgtggagaatgcatgagactaagataaagaacttaagaaatcttacatcttagaatcctagaaatgggtcctcagctttctcttctcacccaaaatattcatcatcatttgcattatgttctattcccatgtctgcttttaacctcatgagaatgtattaattgtggtttctaagctgttcataattagcactctggaca

SEQ ID NO: 419329 - DNA, 448 bp, Homo Sapiens
cgggcataaatggaaaacatgtactggaaaattaagtgttatacagaacagatcccttctaactaaatttagaagtactgaacagatcctgacactttagacttaggtggcaaagaaaattcatcaagttacatagaatactatcactaaaccttaaaacttaaccaacagttttaatatattccatgttatacatgatggatattagaatattcttgttgcagatggttacccagctatggcagaggaactatctctaatacttatatatactctggaaaagaaaataaaagtagagcttcagtttcctgaagaacatccagtaaaacctaatggagaaaccagcccctcttaagtattaacaagggtaatctaggtatatatttctttaattatcaaaacaaacaacaaatataacctaatgtagaacttactcaacctgataaaa

SEQ ID NO: 419330 - DNA, 478 bp, Homo Sapiens
gacctagaacagctattctcaatcttgagccatgagcaccacctagaaaacattaaatcacagattgctgagttccatccccagtatttctgactcagtatgtcttgggtggagcctagaatttgcacttctaagaagcttcctgatgctgttaatgctacttgtctgagaaccacattttgtgaatcataatctcgaccaaaattactttgatataaacattcagaaaattcaacacttctccttacctacagtatatcctatctataatcataaatgtaatgtctgtcttctcttccagattcttaattccattagagtaaaatctgtccaattcggcactgcatattcacgttaacaggcactcaaatatcgaatgaataaaaaacttccaaatctaaatgtaaggaatactgctacagagtatcacagtctacgagttgtttatctctgaaagcatacccttaccaagtgacaa

SEQ ID NO: 419331 - DNA, 679 bp, Homo Sapiens
ggccgcgttcgctatacaaaacggaggtgcagtgagtataaggatttgtccaagatgacacattaggcaagttgcagaacaggaacttgaaaccatcatttggccacagatccttgtcttcaccatgattattcatcccatggtgttatgaggggaggtgatgtgggaactgcatcctgtgtatttagaaccataaatgactctgaaagaactgttggtagaagcgaaattccaaggactggaaatccaggctcagagtgactaaaagagagaattaatttgctttgattcaccgagtgatatttccagaaatttcaaaaagtcaccatcttcctgctctgcattagaacaggatctggggccctgaaggacatgacgaagatgtgtgatcaggtaagggagccgtatctacctttgcccagcgaacagggacttccatgagcactgtttatcagttgttttcctcttggtacccatgagatctttaccatgatcctctatcgtttacctttcattgatcatcctctcatctcaggtctcaaagaaacattgagggcctcctatctccaagggcttgacattataaatgagaagacatatcatagatcataatagatcattgtgcgcacgaattccatccgggctgataactacgtccagaggaatgtaccaatttaga

SEQ ID NO: 419332 - DNA, 201 bp, Homo Sapiens
tcggcctggctttgcgcctatgcctactagagcgaatacagtcctgtacaagaatatgctaaacctatcagacaagactttttacatctctaatttacccgagatagcatcaactctcactattcataaaccaatcagactcctagccttttatgaaacaaacatttttataacactttatattatcacaaatactgccca

SEQ ID NO: 419333 - DNA, 449 bp, Homo Sapiens
atccacactggaagcagatatttgagctgtgaacacatttttttcttagaagagtcaattaggagctgggttgacgcttcagtctatgcacttagagtcaggttttaggaccaagagcaagcactgtgggcacctgttgtaagaaaacatctgacagcacgaggtgctaaattgcttcaaaatcctccgtagctcgtggggatgctacctttctagtaggagtttgaagcccagaatgcactttatattataaccaacacagttgaaaaataggttccatgtactataagaatggatccatttacactgcatgtcctggaaaaaggatgtattagagactttgcatttgaggatcctgtgtcatctacatctctgagccatcttatcaggcagaaaagcagctcctttaaggtgccttgctctacctcttattctattgtccatttttt

SEQ ID NO: 419334 - DNA, 632 bp, Homo Sapiens
caggttccagtctgtggtcaagaaaacattggccaattattccagaatagatgtgcatagctaaagcttattcaaccctttgtaatatcattttattggaaagatgaatctcttcaacagcagaagaaaattagattgcaactagtattcatttctacatcagagccccaggctggagctatattaagccactaaatggtctgcagaaaattgaaggagcatgcactttgatctcaaaggactgcctacgtcacatatgacaggcatttataagagaagagatgtcctcctgggacctaatgctgaacagcagaaacaagatgtgagatcctgaggatgcagagacatttaaaaaacaacacagcccccaagataacattaccaataatgatacttgaaatgactgacaagtacgtttagaagtcttaatagaaattctagcgtttgtgggattttctgcggattgtaagaaaatcccatcctacataggcgcaggaatgtctgctcttgagtaggaagagtatagaggttgagaacacatacctaccctctccttaaaatcctcctggatcctcccagtttatcagttccatctttgtaacctcagactgcactatccactgacaaagaac

SEQ ID NO: 419335 - DNA, 466 bp, Homo Sapiens
ctgcttatcgtatcccttagtacttttatgtcactatcaggaataacataggcaatgctgtatctttacaataggtgatattttcagccagtcaggacctatttgggttttagagctaaactcagaatcatcaaggccacatctcatataaaggaaaagaaggaagtcagaatcacaggtatctctgcttccagcctcctgatatccccaaatgcctgtttgcctattgtgcttccggactctgactcagaactgcgtatgacttgtatacacaaatccgctcctctccctgatggaaagcaatacatatgtgtgtgcatcacggttccattatgaaatggctccatgtagttctaggcagaaaaaaggccagtggctagactaggtggtgaggttcggggatatactctttagtttagtttacttaggcaatccatgtgtattgacttcttagcgacagcaggca

SEQ ID NO: 419336 - DNA, 199 bp, Homo Sapiens
tcttttcctgcacacatttccatgctttctcctgcagaaggtaaggtagtaaatggcagtgttgggtctggatgcaagccactttgttaaccctgctggagagaaacatatctgcttaattcacaattgggtcattttattattagcacacactcagttcctttatgagtctttcagatattgattgagacatggaagg

SEQ ID NO: 419337 - DNA, 198 bp, Homo Sapiens
gacctgtggaggttggataggggtggggggtgtaccttcaaagtacttggaattctttatcacagaaataaaactcagattctcttctatctagtttacttctaagttccaaatttacaacaagaaccagtttgacattcgcagtaggagataatgtcttgaaccagtgagcttggctatccttctttcatcatagcg

SEQ ID NO: 419338 - DNA, 368 bp, Homo Sapiens
agctcggcctgttgtcgctagagtatttaaagtatcattatgtaggcacagttccttagtttgtaaggcaaaatgctgaatctaagaaacatgtaccacatatgtgtctgttatatctgtaagaatttacttatttaaaatcctgtttgcgttaagggtaataaaagtgaagtgatatatagatgacagatttcatgagagaaaaattttgaagtcagaatggggatgagtatcatactgaattcagtaatgtattatatataatgcttaagtaatgattaacgtatacattattgcagtaccggttaactagtgatcacataattctcatcgaaattgtttagagacataaaatagcgacacaggca

SEQ ID NO: 419339 - DNA, 211 bp, Homo Sapiens
ctcggacccttctttgcatcgcatactgaatgtttactacactttaaaccaagtgtgtacaataatagtgtattttggaagatttatgtcaaatgtgatttaaggagatcattggaggcacttgtcaaactttctggaaatttaactcacataaagcatgacaatctctgtttaagagtaaattaagaattattgattttattggggaagc

SEQ ID NO: 419340 - DNA, 170 bp, Homo Sapiens
cgtctgatgctgcggtatgttgtgctcagtattgaacagatgttgtctatcgacctcaaataacccattgctcgatatgctgatttatcgttgccgtggcaccatttataaagcacaaatcgaccatgatgatatgcgtggtttaattcgtcaccttaaagatggcgatg

SEQ ID NO: 419341 - DNA, 341 bp, Homo Sapiens
cctgctgctgtcgctagggtatgtgggacccgtccctggctggaagggcacggtgctgggaatgcagaatggaaagtctcacatgagcccaggagcccatcagaaacagtgtagaatccaaggagggccgtgttcagatgaagcctgcaaggttggagagacgccccatgtcaggagccattccattggtccagcccccaggggcatgggagaccccattactgagctgaagagctccccctcatggcaccactcctctctggggaatgtctaacagagctgggtgtgcatgaatctggtggtttatcccaattcctttaaagtggtagcgacagcaggca

SEQ ID NO: 419342 - DNA, 345 bp, Homo Sapiens
gtacaggaggtctgggaacatagaactgacctggacagagagaaggccaagacttcaaagaatccaggaaaacaggaagtaacacaaggaggaggaagttaggcccaagggaataacattaggctagggatggacatgaagcttctagcagcagcagagggtttgcttaggagaggaggcgtgtaatgtaggacattgaactctagcattctcatctggactctactacaaatacactgagtggccttggaaaataacttcattctctgtgcctcactttttccaccaatgatatgggaggactagacagaatccactctaacgttccctcatatcagagaagta

SEQ ID NO: 419343 - DNA, 411 bp, Homo Sapiens
caacctcgcacctgttatgtcgctaaagatactgtcttacctttagtctctgtgccagcatcttgtacatcacttattctcacacaacgaagtgagaacaagcacatcacggggccaggactggaacagaatgaatgacttggtggtcatgggcatctgttcctcacaaccagcctctttctttaaacgccatggatagccatcaacatgcaggctgaccggaaaaagaggcactgtctgtcaccatggagaccaagagcagatagccacgctgctcgtctccaacctcttctcagtggcggtgggaactggatttagaggatggggttacgcaactaacaggataaaccaatgacttccagacgtgctgtcattaggaaacatctcagaatctgtagtgctgcacttcaa

SEQ ID NO: 419344 - DNA, 161 bp, Homo Sapiens
ccgaacagcatgctgcactcattcctgggcagcgcgcacacccagagtgcacactctggtggagtgtccgtagcgtgtcctgaccgtgcacactcggtcgtccgacctgggtctacggggcgcacgcctactcgacccatctagtcgctggttccctccga

SEQ ID NO: 419345 - DNA, 337 bp, Homo Sapiens
gttgtcgcatagtaactgcaacataggaattactgagatatgaaggctttaatatccttaaccttaaaatgatgataatgtagatattagactagtggacttggtcttagcttgtgaggaacttacgtatatcgagtattctatgaatgctaaggtgtgactgcacgttccataaatacagttttgaaattcaggtttctaatatcccaactgattttctcgtctcatatgtaccaatctccggtggctaacagcatagttattacaaacggacagccttatctgtaaagagaaagggagaatttcaaggggaaagcgagagaagtggaactctcct

SEQ ID NO: 419346 - DNA, 151 bp, Homo Sapiens
acctgcttgtgtcgctagcgggagtcctgcccaactcttactgagtcggtgcttctcatctactcctcatcccccttaatgacagtagactccatctccgttctcaaaagatttctcaccatggagatactgttttaccatacaaagaagg

SEQ ID NO: 419347 - DNA, 357 bp, Homo Sapiens
gctacacagaaaattcaaactcagcacatagcttaatctattagcttttcacaaatccacttccccagcagcactacacatcaggactaagaatcatcacttcttgtcagccaatcatctaaacccaactcattcttggcccccagtcatccaagactcatctttcaccatcctcctcatctagttgccaaggatcctttcatttctaactctcaagagccccgaattcatccttccaattcttgctaagtcatcttaagtatgaggacctgcaaaacttattgctccatggttaccctaacccccttgctctcaagaaaacagaataaaccctctccctctaaatcccttcttcag

SEQ ID NO: 419348 - DNA, 173 bp, Homo Sapiens
agctccaaatgctaacccaagaggagtggctgaaacgccatcgcataaaattctcggtcacctgacttctgtcacaaagctccttcaaatacaccccagcatttctctttccttgggttcctcaatctggtttaagttaacaccactgaggacaaagccactcgcgatagcaa

SEQ ID NO: 419349 - DNA, 267 bp, Homo Sapiens
cggccctgcttatgtcgctaacattattcattcttcgttaaattgttgggcagtgagaaggcatgtagagaaccctgtatcattataatctgttttattcttctgtgtgacttaagcacattgccccatcatttgcattcttgaaatacgtaataaataacatatttgttttcaggattacagctctgttgtattcaaaatgcagttttctggaccaaaatgtcctttttatgttctatggtgtggcagatgactgttgcattgcag

SEQ ID NO: 419350 - DNA, 164 bp, Homo Sapiens
cgaaagatagtgaactatgcctgactgtcgctatcaaccaacacctttatcatggggatctgatgagacgtcgagaatcgggcgccattaacccggacgattcgagttcatcccgacagcgccagattctgcaataccaaacaatggcccactagagcactcgc

SEQ ID NO: 419351 - DNA, 274 bp, Homo Sapiens
  misc_feature (56)..(123): n is a, c, g, or t
acctaagcccttgtgaagcctgtatcagacttcttccctacagactgcaaggcccnnnnnnnnnnnnnnnnnnnnnnnnnnnnnnnnnnnnnnnnnnnnnnnnnnnnnnnnnnnnnnnnnnnntgtttgctgcttaatttaaattaatgtgtaccattatccacctatcatttacttttgaatgtattagcaagtagggcaacaaccgttctagatgtaccctccattctgttgtactgatcaatttgtttactcctttgccaatatccagttg

SEQ ID NO: 419352 - DNA, 394 bp, Homo Sapiens
cctgtgtcgctagcgacgaagacggagagatggactggtgccttgcaggcctacatggttacgtttgacccaggcagggatgcatggtgacacaagtgatgaggccttcgttctgcagtggctggaatgaggctgtgatgaggatggcgaggaggactacataattaaaaaagagaatattttacttagaccacgttactgggtgatcatttattcttaaaagcaacgtatggtcatgcttgtaattcatatggtctactatttttaataaccataatctatctagcaaaggatcatgtatgaatattggttaaaagcaggtaaagtggaaatatataaccaagtatcaggttatatgccatagttctatatgtgtacattgatagcgacagca

SEQ ID NO: 419353 - DNA, 217 bp, Homo Sapiens
cggccgctgtgtcgtatgtggtgtgagcattgaagctctctcacactccaactctatctgttcttccttatatttttaatggaaaggacagtgaagtaccttaaaggagggatcagtattaacacagtaatcactatgaataatcatactttctatagtaattctctccgtctagccagttacaatcttcagacatgtgtattttataattactcta

SEQ ID NO: 419354 - DNA, 385 bp, Homo Sapiens
  misc_feature (77)..(328): n is a, c, g, or t
gctcgcccctgtctgctgtcgctagtgacatgaaatgagacaatagagtcaacactggctttgagatatttttcatnnnnnnnnnnnnnnnnnnnnnnnnnnnnnnnnnnnnnnnnnnnnnnnnnnnnnnnnnnnnnnnnnnnnnnnnnnnnnnnnnnnnnnnnnnnnnnnnnnnnnnnnnnnnnnnnnnnnnnnnnnnnnnnnnnnnnnnnnnnnnnnnnnnnnnnnnnnnnnnnnnnnnnnnnnnnnnnnnnnnnnnnnnnnnnnnnnnnnnnnnnnnnnnnnnnnnnnnnnnnnnnnnnnnnnnnnnnnnnnnnnnnnnnnnnnncgtgcctgtctggccccattctaaaactggtatcaatcccgttagcgacagcaggca

SEQ ID NO: 419355 - DNA, 445 bp, Homo Sapiens
aaggatccctgtcgctgtcgctaacagaatgtgtattctgcagctattagaaaacaatgttctataaatgtctgctagataccattaggtctagagtgtagttactgtttctttttgtcctaatgacatgtacattgctgaaaatgggacactgcagtcgccttttattatactgcagtctacctctccctttaaaccaattaatatatgtgttatatgtttaattactccaataatggttgcatatctatttcacagttgctaattcctcttggtcaattggccactttatccttacattgatgttgtctctaatttatagttattgacttgaagcctaatttatctaagcatagtagctacttctgagatttttgatttcctattgcatgaaatatcttttttcaaccattcactttcagtctatgtgtgtccttatagatgg

SEQ ID NO: 419356 - DNA, 426 bp, Homo Sapiens
cgtatcgtcgctaggagaaactggaaggtggggaggatattccatgtggagaaaatagtataaacacaaagttcaggaacaaagctgtagagcatgttcagtggaaaaatggatcatgcagtaaggaaggaatgtcagttacgagctgaaaaaaacagtgggaagttagtctggtcgaggatgtaaagctgaggattctgaaggcctgcatgaagaacctgcgtttaatttggtaagccatggagaattattgaaggtgtagaaaaactcaaattttccctctgaaggttttagtctaagtctgtagaaatgaattgaaaatagacaaattagcagggaaaaaaagcatgcaatttaattaaagtgcattagcatgggagaattacagaagactgatatcccagtaacccaacaaggtttagatgc

SEQ ID NO: 419357 - DNA, 422 bp, Homo Sapiens
tagaggatccccttctgctgtcgataaggggagacttccttatacgcctgaccgagagaggtgtctactctagtacctggtctacactacatcgagtacttagtttcggtcgttgtctacacgtatcagtcttatcttttggccaaattatgagttcttaggcgtttaggacccttttttttcttgaataccacagttcattcattgtcttgcgttacagtatatgccctcttaagtgtaaagagggtagagtgaagatcatgcccctatctcctcagagtagaaacaagcgacacagaaagagaaattaaagaagacaggaggacagtcagagggcgtcagggagttttgcctaggtttcagatcattctgtatcgccagctagcttgcctccttggacttacccaccagtctaacagcag

SEQ ID NO: 419358 - DNA, 593 bp, Homo Sapiens
gagccggacctcactatacatgtattgaatgcatggctataatccgtacccagtgttggcaagtgtttggggaagcaggtactcctatacccatatttgatccattcattcattttttaaaatatttgaccaacatcttaaaaatgaatgaatggatcaaatggagcatgaagaactctcaaacacgccctcatattctcctcccactcccaaagaataatagggtctcatgcaccccattgctcaagtcaagctctatgtcatttctgacatttgttttgccctcttcctcttcccctatcctcactacacacacaggaagcagtaactcctacggattctaccacttctctccagccccctgctttacccccgacctaagccaccactcatctcactcagactagttcagcgggtttctgactggtcgttcgctgttctctcttgcccccttcaagaccttctccacaacagagccatgctgcttgtttccagctgtaggctgaggccagtcgtgttatcctagcttaaaaccctttcatggtgtcccttgctcttatgataaagcagcaaccccttagcgacagcaggca

SEQ ID NO: 419359 - DNA, 359 bp, Homo Sapiens
gtcgctaatgaatgtgacggaaacctagctgttcttacctcagtttttaaagtaaacattaatcgcttaaatatgaagttatccaattggcaacattatctaattcatatgctcacagaatctaaaaatgctactatgactataactcaaacacagattctcaatttaactaaagggttatatctagtcaaaaataaagtcatacatttaactgacaaatagcttaactcttaagcgttaatgttttaatcttgtctaaatatctcaagcaaaaacatgtgctctttataacgtcatacatcaaaacttatttaaggaaaatgctggcccaagctaatacagaacctctggaaggaggt

SEQ ID NO: 419360 - DNA, 378 bp, Homo Sapiens
aaaacctacagcatatatcatactctatctaaaattacgtacttgtctatcaagcttaccccaagtagactctaaatacctcaagtcaggtactgctcataagtaggtagctcaaccatgattcctttgcgatgctaaatgttactgataacttctggcacatttccagacctctaagtaccctggccatcccatatgaccctttctctgccatgtactacttgactgggagcgctctgctatggctgagatatcttcttgctcaaaacacacagcagggttggttgcgatcatctcgctacagttcgacatgatggtctccaccgccctcccagcccccggaaccgaggacttacactaacattagctctatcttgc

SEQ ID NO: 419361 - DNA, 223 bp, Homo Sapiens
ggtctacattaataactccagttcctccccatggaatgggatcagtggcccccggggagggcttgtgcaggctgtttccccaggagatgagtgagttgaactgttgggttattaactgaagttacttcacattttcattaaaccttggctcagcatctacctgataattttagtgttggtgcatcagtaatacctttcctggttcattgtatagaactgtcat

SEQ ID NO: 419362 - DNA, 362 bp, Homo Sapiens
gatccaagctttctagccagttattatcctatctacctaaccatcactacctacctcctctaggccgatggacaaacaatgcatcaaataggtcctagaggaataactacccacattaccactaaggaactcaactataacagctctgcctgttatgttctccctgatacggatcttctactcagagtaccccatttacaacaactatagattccatgcgccactccttaacaaacctcagtaccactgactcctcagtaggccactagtctccaaaagagttatgagctacataagaacatggttctcaagcctgtttccttcctagcacacctaagggttacaacatggtagaaccgact

SEQ ID NO: 419363 - DNA, 283 bp, Homo Sapiens
  misc_feature (64)..(145): n is a, c, g, or t
actgtttcaacattcatatggatgattccacttatatctctagcccagtggtttttgacctgcnnnnnnnnnnnnnnnnnnnnnnnnnnnnnnnnnnnnnnnnnnnnnnnnnnnnnnnnnnnnnnnnnnnnnnnnnnnnnnnnnntgaacactatagtacaactagaatcttccagctctcacacttccctactgtagtgcctcttccatttcattacaactccatatttttaaccctatcactattaagatgtattagcagtagcccatggtagaaccgact

SEQ ID NO: 419364 - DNA, 422 bp, Homo Sapiens
ctgtctacatttccccagtctgccatcatcatcacactcaatgaataaaaccaaggctgagttaaataaaactaagttaaatttgttatttaattatttgtgttagtagttttctcaaagtcacacggataaactcatctgtaaggtagggataatgcattactcaacttccaggatcattgggatactttatgaaatgctcaagagctgtgtggagatccctggcacacataaaaacctcaattaatataagtttctaccatttccccagtgcttgcatcatcatcactactcaatgactaaaaccaaggtgagttaaataaaactacgttaagtttgtaattttttaatttgtgttagtagttttctcaaagtcacacggatgaccaatggcagtgccaaaacaggagtgagatgcctta

SEQ ID NO: 419365 - DNA, 305 bp, Homo Sapiens
tcattgggtccaagcgtaaggcatcgctgtacatggcgctctgagcacatgctggtgcaggccctaaacagaagctatcatgactattacacaattcagaattagaaaatgtagaattttccacgtatttatcagaatttttcaaaactgaaaaaatatcttaaaagccatctcgttagaattcacatccaaatcttaaattccttgggatacatcctgattaattattgccttcattcatcacattcagtcagcggattgggccccaagaagataataaagtgatcaaaatggtagaaccgact

SEQ ID NO: 419366 - DNA, 117 bp, Homo Sapiens
accctgcctggccagccgtagcaatctttactggttaccttgctgtgcagtatgtcaagatgttccaggctcttacacatttcatgccaaaggactggagtcaaccagttcttttaa

SEQ ID NO: 419367 - DNA, 371 bp, Homo Sapiens
cactcataagtgatgactgtggtatttggccttctgtttctgcattagtttgctaaggataatggcttccagctccatccatgtccctgctaagggcatgatctcttctttttttatagctgcatagtattccatgtaccacattttatttatccagtctgtcattgctgggcatttaggttgattccatgtctttgctattgtgaataatgttgcagtgaatatacacgtacatgtgtcctagaatgatttacattcctttgggtatatacccagtaatgggattgctgggttgaatggtatttctgtcttcaggtctttgaggaatcgccacactgtctaccacaatggtagaaccgactggggatcct

SEQ ID NO: 419368 - DNA, 225 bp, Homo Sapiens
tctcatccagttttaccaggtattacatcttacctcccccactgcatcattctctttatatttgtatacaattcctgtttgccaagccacccaaaaattgtgtgcagacgccatgacacttcatccctaaatattccttcatggtctgtcaagaacgaggctattgtcttaatatccagaacaccattgtcaccccttaaaagaactcaacaatggtagaaccga

SEQ ID NO: 419369 - DNA, 222 bp, Homo Sapiens
gactgagccggcccatgtgcatggaccagtccctccctcttcttagagacatactttataaaatttacaattgtaaatcctttctgtccctttgggggatatacgtatcttctgctgcacaggaatgtgtttctcactttttctgggagccatccctttgtcatataattatcaggaatgataaggccgactcctggtctctgtgggagatggtagaaccga

SEQ ID NO: 419370 - DNA, 236 bp, Homo Sapiens
ctaccatgattatttgacttagcacttatcatatgtactatgtatattacttaactgtcttatgttctacctacctcactagcaataagttctatgagagtagagattattgtctgtttatattttaccctttatttataacacctaggtctgtgcctgacccgtaataggtacttaaactgcattttcattatgttgcaggctttgcacatagaatactaaagagaaagcaacag

SEQ ID NO: 419371 - DNA, 451 bp, Homo Sapiens
gcgttctaccatgatgctgattcagcaatactcctctctttgcttttctgatatgaacagcttttatgctcaagatctcaagtgttttagatttggttatccttgaagcctttttaaaaatctgacattcttatctaaagctcaggtagcttaaaaattattctctggattggaattaaatattttaatgatgatgatacaataaatatttgttgacattttgattatataatcagggataaaatagtaccccccgaagatgtgtaccaacacattcaagtactgaagacttgattaaaactcctattaaggaatcagaaataagatgataaaggtgaccaatggagaaatttaaggaccagaaacatatttcaaaaaacaacaagatgggatgcactgtatgattaaaaacacaaagagaatatcttgtctgatggtagaacggggatcc

SEQ ID NO: 419372 - DNA, 134 bp, Homo Sapiens
gggccggccagtgttctacatacactattatagaactactaagcaaagatggaaaaagaatcacttgtctgtttaacaagatgtgcctactcataatgtcctattaccccagtttatatatacctgggtcaaag

SEQ ID NO: 419373 - DNA, 378 bp, Homo Sapiens
agtctgttctacatggcattgacgtacctcaagtctatccttttcatgtacccattcacacatcttatgttgcagtcaaattctataatttgctcttccacaaacatgggataagctttccaatcctcgtgctctgctcatgctgttcccacttcctgggatgatattgcctggtctccaattgtccaaaccatactcattttcttaagttccatttcaacttctaaatgaaatcttccatatctctgccagaagtcagtattcttcttctaaattcatacattactctgttctcaacaatcagctactagattctgcatatatgtatatgtccgatctccctattatatgacaagctttcttatggtagaaccgact

SEQ ID NO: 419374 - DNA, 409 bp, Homo Sapiens
ggacagtcgtttctacatgtctcctgcatagtcccacctgtatcctcccaccaacataaatgctcagtgatctcctaaacagagcataaacccagatcttaaatccctagacactgaagctactaccctcctctttttccatcaaaagctaatttcttccacactctttacctccacttcttatactcagctcactgtaccctgatttctgaccaaaccaactctaccaaaacagctctcttaataatcaccaatggctttcctaattactaaacctacacaccccaattcttaatgttatttcatttctctgacaaactgtagacctttacttttgttttcaacggtatgtgtgatctagaatccgtctgtatgatttctctttctctgcttctcactgatggtagaa

SEQ ID NO: 419375 - DNA, 153 bp, Homo Sapiens
  misc_feature (142)..(142): n is a, c, g, or t
catccagtagcattttgttactctgaaggtctgagacttttgagcccttaactccaagttggtagtatcttcagtttttgctttctctaaagtccttcagtgagtccctctttagaaaagagaaaactctgccctgactcantaaggatcata

SEQ ID NO: 419376 - DNA, 385 bp, Homo Sapiens
agattactatatagcaatcatcatagcagttacctacaaagggacaaacatatacttgtctattttataggtatataacagaccgaaaccattaaggtaccccaacaacagtcgagcttacttgttttccctcagtcaaatgttactgggacccgtaaaatggacccagtgtgagtatatcttcattttcagagaactggtcccaattcctatgtatgaatactatttttgtcattcttttcttaatgcatactcactacagaagtattcagaatgatcaccattcctttacaactgtcagacgccaaagcaaaaagtatattttgcatgattcctttccttcacagaatactcctacatgaaactgtgttatctaaaacaaaac

SEQ ID NO: 419377 - DNA, 386 bp, Homo Sapiens
  misc_feature (147)..(164): n is a, c, g, or t
ccagtcggtctaccatctctcttagaaaatctaaacacattattttcaagacgttgctcgtttatttccatttcaatctgaagtgagtttatcttctgatggttgagtttgtggaaatcctccctagtattaaatttctctgtgggnnnnnnnnnnnnnnnnnnggtatgtgtgtaaaagggatttcacattccaggtccattggaagggtaggtccattttctctctcaccctatctgctgtttcctctccaccaatccccagctttgtcctctttcactcttcccctctcaagcacctctatttatctttctccatttggtccttaagcccttaagacctcatactggacagtggggggctctggcccaagggtagaaccgatg

SEQ ID NO: 419378 - DNA, 435 bp, Homo Sapiens
ggtttctaccatgtgatacgtcaattcctggtgtgtctatttgaatatcctaaatatcccataagagttgttatgaatgtaacatgtaaatttactatcactgatgattcctctgaagaatttcatgcaaccaccagaaggtgcaagatcctagagatctacatatcttaggcattttccaggagtactccttcaactgtcgccctgcacctgattaagctggatatactatagtaaaacaatatgtaacagatccatgcactacatggtgttattgtggaaatggccctgacacatggccactcacttgacagctgtacaaaagacagttatgtttttgcctagaggacgctaaggttaaaattgtctttattgctcatcttccccactgatactgagcacacctggcatagctgagattaaactatgagtatg

SEQ ID NO: 419379 - DNA, 364 bp, Homo Sapiens
  misc_feature (57)..(90): n is a, c, g, or t
  misc_feature (222)..(262): n is a, c, g, or t
cagtcggtctaccatgttggacaggccgatctcgaacccctggcgcagatgatctannnnnnnnnnnnnnnnnnnnnnnnnnnnnnnnnnacgtgagctaccgtgcctggccttacatttatttctactttttagagacacggtctcgttctgtctcccaggctggcaaggcagtggcacaatcatagctctctgcatactcaaacaccagggctcaagctnnnnnnnnnnnnnnnnnnnnnnnnnnnnnnnnnnnnnnnnnatgagtaactgtgcctagactaaaattatttctagatattaaacaatattatttgcagactgcagtgaatggtcaggaaacttcatatatgtagaaccgact

SEQ ID NO: 419380 - DNA, 461 bp, Homo Sapiens
cagctgttcacatgaaccaagtcaccaccaaaataatttagtctcttaacaacaatcctgctgacatctagtattcattcatatgaaatgtaattattggggtccttaaaatttgagaatctttgtcaattccccaggaccttaggcaaaaaatcaaggaaatgaagtgactcagtccgccaaaagtgggtattctgaaatatcactttccaacttcaagaaacacacttccctacttgtgaaggaaatgaatcttcctctctttttctcaaattacacaattggaaatttagatactctggagctcctccagctggtgggccaactaagagaaaacaggaagtgggagattctagcttggctggaccatatccaggtcttcataaggaactctctttggctgacatgtaaaaaaattctttcagcaggagcattaatcttaaacgtgtgtaaacaccata

SEQ ID NO: 419381 - DNA, 439 bp, Homo Sapiens
cagctgtctaccatctcatagaaagggaaatagaacaggagtatcttaagattcagtcagaataaggccagttagctgggtcactcaaatatttgagagcactgagctaagcatatatttcaatagcaaaggtaaatttgtcattacagtcttttccatgtgaacttgtcattgtcatttttgcctgggcatctcctcttcacattggaaagagtgaggcttgtccattgtcagataggtcccaggcatctcagcattacttcttatcgttgtctgtcctttgattactacgtagcctcctttagctagaaattaaatgaagtaatggatacggatcacataataaaatgcttggcataagttaggagagcaagtattaatcccctttctgatgcttgccttttctatgcttctgatgaacactttattctcttaggta

SEQ ID NO: 419382 - DNA, 294 bp, Homo Sapiens
accagtctggttctaccattcccacttcttcacattggctttttgaattacttcccaagttccttgcccctacgtgcttgtcatagagtctggcatgccttaatgaaacactcgttaatttttttatttgagatccattgaatcctcactctgtgccagacatctttcatttatgaaaatagtagcttctatttttgtacccatttttgtgataaattaatgtttagagagatgttaaataatttacaaatcacagtgagtggcaaaacctagtcaatttccattatggtagaa

SEQ ID NO: 419383 - DNA, 392 bp, Homo Sapiens
agttgatctaccatagtcagacaacgtttgtcttcggtcataggaaattatttccataaataaaatggaaccataaatgtattaagaagatggcttcactttttcctcctgccacgtttatccctccatcctttctggcttatgctaacgtctccttcctgggagtgaggaatgatacagcaaaccctgtccattttctccttcctgggagtgaggaatgatatggcaaaccctgtcagttttgtttgtgatcacattgttacacatttatggttttggagcaccctaagcaacctcatctgcttctcacagataggagattcacttcctcagggaagcattcccaccttctctgactatgggagaataatattttccttttgattcaaggt

SEQ ID NO: 419384 - DNA, 438 bp, Homo Sapiens
tgtagccaggacagtcttgatacttataaaatggagcatatcagagttagtgggaatataaatgaggtaagtattggaatattttaatcgcagaatagtacattatgcacccataaaatattcactattattattgtaaagtgtataatgatatattctgcagccatcaaattcagtttaaaattaaatggaatgctgaattttttattaatatgtggataaatgtttaaaatcagataaacaacaattatagtatgatctcattttgtacaagtaatcatgtatttttaatgtataaacacattgtaatttaggatttagctcaaactttttttattcatcagtacaattcactaataaaaaagtaaagtgaagtgaataatatcaaagaaattaagttttaatttctgaatggtagaaatggtagaaccgactggg

SEQ ID NO: 419385 - DNA, 299 bp, Homo Sapiens
gatcgagccggtacgtattacttatgaaaacaggtaattacatccctcaagccttttggaacatgaagcttagtccttacgtttctagtatgaacacattggatcgagttcatttgctattgggtcctaagccgagatggtttcactcacaagcaacagcaagacaactgcacagctgttttcacggtgccaccttctgtcgggcctccgtatccctgcattttccttctgtctgataagctggctggttgaaagggaactggggccggatgttcctcaacagtatggtagaaccgact

SEQ ID NO: 419386 - DNA, 453 bp, Homo Sapiens
  misc_feature (353)..(364): n is a, c, g, or t
ggctcggaccgtctgtcaccatcatagtgtatgtcttggattaatgtatcaccttatattaaacagaattgggagcgataataggactgcgctcataagacagaagactgaaagcaatttgatgaggatcttatccttctttcctttttatggaattccagaaaaaacctctatcactggattatagttgatttcaaaagtttcttttacagtcattttccttatatccatggccaattaccaaactaaaaatggctccctctgttctatatgaaagtttcataattccaaagttcaatattcatcactaagtcctcaacgagggaagatttgaatacttgttttaagaaagnnnnnnnnnnnnaaaatcctcaaggtaaaagtattttcaaggtaatcaaacctgggcttactcagtggaaaagtggtaattagtatggtctctttggtgaa

SEQ ID NO: 419387 - DNA, 228 bp, Homo Sapiens
cgtatcgtacattagttattagtagtcagcatttgttaaatttgcttatgcttcttccccaaagacatttatgttaaagggcaactttttctgccactctcaatggaaaattgggaccctctgccgcatgaaaggagtaggaaaaaatgaggcaacaactatatcttaacgccggccagattctgtcacctgggaggggcatcatgcctgaacactactaagctgtcc

SEQ ID NO: 419388 - DNA, 225 bp, Homo Sapiens
  misc_feature (32)..(32): n is a, c, g, or t
tcttcttttctcttaggtctggtgtactctgnacactaatcacaccaaagtgtagctgtcagggaagactcaaattataaggaaccactaggaccatctttattagagactggcctttactttcttaggtcttaaatagggtgtggatgggagaggttttccagttcctgtttcacaggcattaggaccaatctttgtgggcagccacccactcatgagtgtatg

SEQ ID NO: 419389 - DNA, 426 bp, Homo Sapiens
aaccctcactatattatcatcttacctagccatagcttgagctattaatcttcaccactggatacgctagcctagaagggcctgtgagcaaaatctagacccccaactgatttcataaatcaagctatattagaatacaaccacactcatttgtttgcctacagtctatggctgcttttgcgctcaagacacaggtgaatagctgcaatacaagcagaatggccctcaaagccctagtatttaggcttttaaaaaatattatggctctttacaaaaaacttgccaacctctattctataaggtacaatatgccaaaagattagtcctaataactttttctgcttttcaatctcagtgccaacactatagtcaggccacccatctgagaccttgagggttttctgttactcccaaactccccatctg

SEQ ID NO: 419390 - DNA, 403 bp, Homo Sapiens
  misc_feature (234)..(290): n is a, c, g, or t
gacagctttggccctctcctttctctgggtgtgagcatctgtacagtgtcagcaggacaattatactttttacaggcaatagtggcttagagtcaaatgatgagccttcccgtgttatggctacatggctgtgatagcaagtggaattatgcacctgcactctaaactcgtggagtcattctggatgtttatctctgcctatccttgaccaaagtacaaccatgttccttacannnnnnnnnnnnnnnnnnnnnnnnnnnnnnnnnnnnnnnnnnnnnnnnnnnnnnnnntgatataaaatggcatggtatttgcatataacctagaaacaccctcctgtgtactttaaatcatctctagattatttagaataactaatacatgtaaaggctaggtaaacagt

SEQ ID NO: 419391 - DNA, 412 bp, Homo Sapiens
gccggccccattcatgaaaggatatccttctctactgaatgctttggtacgtcttcaaaaatcaattgatatgtgtggggctatttctgggcactttagttttgttccatggatctatatgtctagctatatcatattatcctgattactatgccctataataaatattaaaatcaggtagtgtggtaacatggaaagatatttggtctttgttcccagttattggtacagagctcctaaaactcttgtgtattagtccattctgtgttgctaaaataaattcctgagtctgggtaatttattcaaaaaaggtttatttggcccatgattccgatggctggaaagttcaagactgggcatctacatctagtgagggcctcaggctgcttctactcatggtagaaccgactga

SEQ ID NO: 419392 - DNA, 438 bp, Homo Sapiens
ctcggccagtctgtctccatagttgatgtactagtttacattcccacacatcatataagagttccctttctccacatcctgccagcatttttgtgtgtgtgtctttttgataatagccatcctaactgaggtgagttgatacctcattgtggttttgatttgtgttttctgatgattagtgatgttgagctttttttaatatatgtttgttggccatttgtgtcttttaagaaatgtctattcagattattgtccattttaaaaatcaggttgtttctttttttgctgttgaggtgtttgagttcctcatatattctagatgttaatcccctgtcagatgaatagtttgcaaagactttctctcattctgtaggttgtcttttcagtctgttgattgtttcctttgctgtgcagaaggttttagtttctccaggatca

SEQ ID NO: 419393 - DNA, 144 bp, Homo Sapiens
cttgcatccatggcacaaaagtgagcagacttctttgaatgagtatctggagagctcgctgggccaacagcaatatgttttaccaccactagcttctatctagacccactgcaatgctgaacatgaccatagactgagtgagca

SEQ ID NO: 419394 - DNA, 264 bp, Homo Sapiens
acattcattgtgtccttccttctacactactattgtacacactcaatagaaatcaggacgactcagatttcaaaaccaatcctacggtgctttacaagactttatacaccatcctcaatagggaaaacttctcagggaggaacaaaatgttaactataagaagggtctccataggaaacatttcattatggcattaattaaaagttgctagtttctatcttataggactgaggaattttcagacagataaccttactatttcat

SEQ ID NO: 419395 - DNA, 203 bp, Homo Sapiens
tgactccatctcctttgactccatgtctcatacccggtcacgccgatgcaagaggtgggttcccatggtcttgggcagctccactcctgtggctttgcaaggtgcagcctccttcctggctgctttcatgggctagtgttgagtgtctgtgacttttccaggtgcacagtgcaagttatcagtggatctaccattctagggta

SEQ ID NO: 419396 - DNA, 262 bp, Homo Sapiens
ccctgtactcgcttagcagttggctttcctcctgacgcacaccaaagttatagatttcctatggagccacatatcagacaactctcgcttctttcccaatcttccagtttgaactgcgatttttagaaaaatgttaaactaagcaactactaatcactaagcattttacatatcatctgctttagtcttcacactattttctcttcatagtttcaaaacattgccttatgctgtatttacactttcatactttcttttcttt

SEQ ID NO: 419397 - DNA, 264 bp, Homo Sapiens
gtgaccatccatcaaaaggaaaggaaggcattcagtcctcagaaataggcgagtagtatcagacactaatcacatcataacagcttattacattattatatgtcaatgtaaccctatatgtacaagcttaacataatatgcatatatatatagaatgtactttataaaattgtgtataactcaccaaatataagagctgcaagggttcaacatgtaaagatccatattaactataaaaatagcaaatgtgctcttggcttgaga

SEQ ID NO: 419398 - DNA, 112 bp, Homo Sapiens
acgactttctgcattattaatgtctcctctcccacctagcaaataacgaggggtccattgcaagatgtatgaactcagaatatggtaggccagagggatagaacaatgtgaa

SEQ ID NO: 419399 - DNA, 324 bp, Homo Sapiens
ttcgctggttcataatttgaaacaatatgaaaactgtcctatactcattccaagcaaaagggctactagtgttagttttcttgtccacaagttgattgaattgagtgataaccaacttaattcactcttccctggttctttttatcaaaacgttttcttccttatgcaatcattttgatttaaattctttaaaaacaaaagagaaaaacatgctatcagttactcctttattttttatctgcctcagaatagttgagaaaggttatgttaggaattcctgaaaatggggtcatataagggctttatatcttatgataccgcgaa

SEQ ID NO: 419400 - DNA, 245 bp, Homo Sapiens
  misc_feature (168)..(168): n is a, c, g, or t
tcctcgtgattgtgtataacagctactctcatttcacagctacacacttcccagctgtgatcggggacagggagagatggagtttgagtcttctgagcaccgctcaggtaccccattctcctattccatagcagctgcacaccagaaaagctaggcagcttgtcaggngggggtggaaaagtcacaattcacctcccgccaggagtggggaaagagagtggcagtaccaagaagagtgacaggtg

SEQ ID NO: 419401 - DNA, 200 bp, Homo Sapiens
ttcattctcatccctttatttagagcctatgtgtagtcttatgcatagtagatggatctcctgaatacaggagaccaatgggtcttgtctctttatccaagtttgccagtctttgtacttttaattaggggcatttagccccagattacacttgaacgattaatactggttatagtgtgaatctagatcctactcatata

SEQ ID NO: 419402 - DNA, 280 bp, Homo Sapiens
ccttgctttctgcggtcgactctgaggactcccctatatccgggagagggcttcccatgagaatctggctgggcatggagggatacaggactcagttatcaaggcacctttgccatagtggggtgccagctacattggtgtgggatgcccaggggctgtccctacctaagcactttcttgtctacaggaagtcttggtgcttttcaagttcagcataaggggttccctatgtgaagtggggattcacacttagaaaatctatcctggtcttcacctgaaa

SEQ ID NO: 419403 - DNA, 222 bp, Homo Sapiens
aaatctccccacaatgtttgtactacattttttttaaagcataataaatcccagttgaattttcccaaggtagagtattgtgacttggacgaccactgtagttgtcaggaaacagaaatgtagcaacatggatcccttagacctaaacaacagtggctcaagccctggattccttgagttagggggtaccactccagctatacaaccctccccgggatacag

SEQ ID NO: 419404 - DNA, 155 bp, Homo Sapiens
ccaatgataccagccgagcctcagagggtcaagggtcagcaatggcccaatgccaggcagttggccaagtctgaacaagtgagtagatcgaaggagaaaaacccagcaggagttggcagggaccctgcagcaggaaaggactccagcccctgggg

SEQ ID NO: 419405 - DNA, 209 bp, Homo Sapiens
cgcgttgctgatttcttccccctgttacttcaactgcagattattctctagagtttagtatttatttagtttttaaattctttttgactttaagatttacctgcagttaaaatgtacaaatcttaagtataaatttactgagttcttgcagacatatacacctgtgtaacccagaccctttcctaaatttaggaaactatctgaagatg

SEQ ID NO: 419406 - DNA, 217 bp, Homo Sapiens
cgatccccctgttatccggggagctagcattacatggcatcatcgtcctgacatgagtgtgaaccgtaacagtttgctagaggagtcatctgaaacagatactgatgttgcaggtcaatggattgaaataggctgaaaaccctgagagtatggtgttcgcaaaagccaagagaaaaagtatttcattaatgagcgcatatgggacgggcactgtggc

SEQ ID NO: 419407 - DNA, 270 bp, Homo Sapiens
  misc_feature (37)..(37): n is a, c, g, or t
  misc_feature (39)..(39): n is a, c, g, or t
gttcatctggactgcattgggaatgtcgtgactgagntncatccctctcgtttcaaaggacactgtctctcttgttattcttgaggcagacgctctgtcctctttcccttcaaagactggctttctctgcttatgcatagacttcggtttgccactccctcatcatccacctgggctaatctctctgcatcccaggagaaagactctgattggcccagactgagcaaatttggaccaatcagagaggagtgaggagaggctcaagccccc

SEQ ID NO: 419408 - DNA, 302 bp, Homo Sapiens
gaggatcccccctagaagacgaagtagctctatggagtccttaaccactgatagtcttacaaatactggcagatgccaagtctggcaactactgagacttcactgattttttgcacatttcaagtcagcttctccatgtacttgcagcttagtatgagccaacacattattgaacagtatttgaaaagatcttcactgagaatcgggttagggagttacagctggagaacaagaacattagcacaagtacctgatctgcttttgagcaattgctatttataaccggtcgcaatcactacata

SEQ ID NO: 419409 - DNA, 157 bp, Homo Sapiens
tatatccggggagaggagtatagagaaactatcaaggagatccaacgggatccagcgtggagtattgccagtgccactacaggaaatgaagtgtttgccagaagaactgaagttactacaactggtcttctctgcttctcttatttaagataccaac

SEQ ID NO: 419410 - DNA, 106 bp, Homo Sapiens
tcttattcaactgtctatataacatttaggctatcgcgttggtattagcttgcgttgactgatcagctatttcaggaaccgactgagttaggttgacgacccagag

SEQ ID NO: 419411 - DNA, 132 bp, Homo Sapiens
gtcacataacataaaagctaagagaattcattgtcagcagatcagcatacaaaacatgataaaggagcgttattgaagttgaatggaaattcaagtacggtcagaatgagagggtggagccttcctctcatt

SEQ ID NO: 419412 - DNA, 116 bp, Homo Sapiens
tccggggcgggtctggctggtctcctgctcagtgtggcctttaggttctctcggtgaccgttgcacttccttgcagcagtatctgttctgtttggatctggttcgacagggctcag

SEQ ID NO: 419413 - DNA, 289 bp, Homo Sapiens
  misc_feature (215)..(215): n is a, c, g, or t
gaaacctgcgaccttgttatccgggacagtgtggatacattgctgcgattggttatttaatgactgagggggaaacacaaattttggttaaacaatttcctggtgggtttagtgcttgctgcccagagagcctcttgtgtggaggcacccgggagagacacccatctcaccacgtgctttaccatggcaatgaatgagaaagaagcagctacatngaaaatggttcatttagcaacagacagccatagtttctaggacactgacttcccactgttctccccggatacag

SEQ ID NO: 419414 - DNA, 201 bp, Homo Sapiens
cggtctcagtccactttacctgggtattgctcagtgtggcccagtggggcttcagcgcggggcaagatccactgcagaacccttaggagacgtcgctcagcagccatagtgccttgggacacacggcccgcgccgctccacgggccgtgaactcgctgcggtagctcttcctcgtttgcctccccgctccccgggatacag

SEQ ID NO: 419415 - DNA, 193 bp, Homo Sapiens
tataactttaatggagagatcttatcacaattagttttgatttaacaaatccgactagctacatttgattaaatctcgtgaaattaaccaatttcaaaccagtcaattaaaacaatttcctagtttttaactattttttattagattctgataggtggctcttttaaaggaaaatttaccctcccgaatacag

SEQ ID NO: 419416 - DNA, 103 bp, Homo Sapiens
attgatgactatactctcagctcctaggtttaccctgaggaagatacatccaatgttccatccctccaagctgctgcccaagagactagcatctgtatcattc

SEQ ID NO: 419417 - DNA, 150 bp, Homo Sapiens
tcatctttgttctctccagccctgacacaggatgccactcgttcgcatcttgggttgtgagcacatacgttttcacgttctgtgtttgtcacataacatgttatgaaggggttcccatggtgttacctggatgtcaccctgcaaggccta

SEQ ID NO: 419418 - DNA, 150 bp, Homo Sapiens
ggagcacccttctgaaataatctagaactcagtgtttactaaactaatagacatacatttaacaaggccttatcacaaacatttacaacatccgttcaaaaattctgcccactaattccttcatctgtcccttcaaagagctagcaggtg

SEQ ID NO: 419419 - DNA, 110 bp, Homo Sapiens
gtggaccctgctatcttcagtacaccacgggggcacgtatcagaagtgtccagcaagattggcacagaggtaattctggaatgaggggaggtcaagagattataccctga

SEQ ID NO: 419420 - DNA, 278 bp, Homo Sapiens
cataatctctgctgtaatttcaaaccttgcgctctatacgtctctctatattaaaccctgaattgcaagatcgattgctgattttcggagtattgaacaaatagattagaagaacattttgggctatccaaaaaatctgctttcctttctttacaccttggaccccaaacccttgacctagactctcagacttccaaagagaatctatctacagagttctggtgaagacttggcaggaagagggggcgtctgagtccctggaggtaggcgttgagacc

SEQ ID NO: 419421 - DNA, 228 bp, Homo Sapiens
cctgttccgggaggtgccttacgacgtctgtcactaatggccactgtgtcctgcacgtccttttctgtgccggtttgtgtccacagtggcaggtgcccgtgtttattaatgtgctttgcttctatcagcaatgcgggagtgcgtggtggctgcttgcgttctcaggagatgaccttacagagcatcaccaagttcaaagttccatggcttggtcaaccaggcttgcat

SEQ ID NO: 419422 - DNA, 225 bp, Homo Sapiens
aacacgcaaacagcaagggctttggcgttgggaatattatttaacagcagcttgtttgcactttggaacacgtcggtgcttccagagccggcccatcctgctggggaggggagaggtcccagcgctgctgtctggcagaccttggtttcggtgggcaccagaagcgaggcagattgcttgctgctgcaacttcacgcgtgagctccaggctccccggggagtcag

SEQ ID NO: 419423 - DNA, 152 bp, Homo Sapiens
cagaagtattaggagagcaaagatctaagacagccatgtgaagctgaatgaccatttatgtctagctctgaggtcacagagcaccacttctaatgtactctattagcaggccatcaaggggaggggacatggaccccaccaccacttgatag

SEQ ID NO: 419424 - DNA, 172 bp, Homo Sapiens
cctgacctttttccggggagccggggggttgtatgctctctcctcacaccaactgatgtcactatcccaggtagtccccacttaggatcatggaaagagaaggagagtccctcagtcctgctaacatggaccttactgagaatggtgccctgtgaacaggttgccattgctg

SEQ ID NO: 419425 - DNA, 234 bp, Homo Sapiens
atacgatcagagctcggcacctgtagtgagctgcagtgaaagcttgagatgtagcatttttttcaactcaagcatgtgtttttcaaaaatatcatccttcccccccaccccactaattttagaatcagatcaaagccaagctacagtcctctgtttctgttgggaaaatactatatttattcgagatgcagaagtgtgtcactgcaaacctccgactgcttcaggaaaacaaat

SEQ ID NO: 419426 - DNA, 118 bp, Homo Sapiens
caggaatgattctaataagatctagaaagataaagaaccatactgacattatttgagcatctgaatccaacaaatgcctgaagccaaatgcagccctgaacatgcccagtcatgcaag

SEQ ID NO: 419427 - DNA, 347 bp, Homo Sapiens
  misc_feature (209)..(266): n is a, c, g, or t
catatttatacttgctataataatttatatttcatattcagttcttacaaaaagcactacacatttaaacaaaatacatccccctaaaacatccatagagagaattaataaatgttaggatagaatataaattgaactgtagactatcaaggtttataagacatcatttctatataactgcatatgattccttaataatatctagaccnnnnnnnnnnnnnnnnnnnnnnnnnnnnnnnnnnnnnnnnnnnnnnnnnnnnnnnnnnaaatgaccaaatgtagaagttcaattcctgagttataccagccatacttcaactgttcaacagtcctatgtggctagtggc

SEQ ID NO: 419428 - DNA, 395 bp, Homo Sapiens
acatgggagcacgggctagtttcgccttcattcttctgactgctggagaacacagaaacttcaggagctgtggacgggatggagaaccagtggcacattcatccgtctttgccgggcatggagatttggcctgccccctttccagagtttttcttagaaggtggtcttttctggactgctaaggaacgtcgtgtgctttctcttctcagtaatctgcttttttgaggaacgattttaacggcagatagtaagagttcctcaaggaaagtaaacagaccttttctaccccctcgaaatgtgattttaggaaatgatattcaacttcagaaaggaggcatcttaagtcacaggaggaagttgtgtatatttttactcctctcctgactttaaagtag

SEQ ID NO: 419429 - DNA, 184 bp, Homo Sapiens
tacatgactgagaaggggtgtggcctgcaggcactgtcagagctgctctggtttacagacttgctgttaaatatttaactccggtcctgctgatctctggaggacaggtacagacagcactagctcatgcacgagtcattcaagggaggtaggcattttctcaaagcaactccccgggatacag

SEQ ID NO: 419430 - DNA, 189 bp, Homo Sapiens
aacactcatcatctcaggctgctgtgggaggagaaaggaatgtgttaaagtgtagatcaaggagggacaggagaataaaaagaaatggaagcaggtgcacacacaggaaagatgatgagtgttctattgttgttaaagagttcatgctctaacaacacaaaccaaattaatcccagcctccccgggata

SEQ ID NO: 419431 - DNA, 161 bp, Homo Sapiens
accaataaggctggggtttggtgaatggtagtgttccaatgtcactcttttagatttcgacaacagtaccacgacagtatcagacattcgcaatctgggaagtcgagtactgggaggtctgtcgttgcctctagagggatccttctgctccccgggataca

SEQ ID NO: 419432 - DNA, 133 bp, Homo Sapiens
ctgtatccggggagaccaaaagaagttagttattacaagatatcatggaatgttgcaaaaatcatggagttttgaggagccttaaatatttttgggtacaactatcaatctgatgtttgaatacccttaataa

SEQ ID NO: 419433 - DNA, 130 bp, Homo Sapiens
gttacatcacagtactgttgtttgctgccatggtgctttagaagtgtgagagttcccgggaggcagagtcaataatgcagactacacgtagtgaaaacatggccaggagagctgtagttcaggctctcag

SEQ ID NO: 419434 - DNA, 335 bp, Homo Sapiens
tctctggagagaatgtgatgcacctacaagcttatattaagtgcccctttacaactgaggaattggaggttcagggaaattaaccttattgaacaaagactgagtactcagtacacacaattccctagggtatagtaaagtagagacaaagcttggaagtttgtaatacagtaaacagaaggagaactgcaacttgcaactcggggaaagtgggcaaggtagaaaccagaaagaactatggggtctgggagtacagagaggcctctttcttattggaggaaattagagaagcctcttgtggaaggtggaatggcagaacctgctcattgtcctcc

SEQ ID NO: 419435 - DNA, 205 bp, Homo Sapiens
catttcaaatttgctgaacatatgtaccagctcttggtgggggtggttaaaatatagatcttcagcctagcccgcagagattcagggttagagtgttgattatgggcatgtttgggaaaggctgccttaagtagaggtggcctgttgttctttagcatctccagatgtttttctctctccccggatacagctccccgggatacag

SEQ ID NO: 419436 - DNA, 178 bp, Homo Sapiens
atactaggctatctttcttgttcttccccacggcccagcaagagtgccccccctttcctgatcaggtaatgcctccatctctggagacccccgtctacagcctcagtgaggctgtgtcaccattggattgcttcaaagcaaacacggctgtgctggctacaacctactgagtactcat

SEQ ID NO: 419437 - DNA, 281 bp, Homo Sapiens
atgccgtcctggatgaggccaacggttacggagggagaaaacgttgtggctgtgaggaccctttgtcctctctgaaaagcaggaaatgaagtcatctacagagaatgaggtaaacagaggcagtgaagagaaatattttgagagagggaagggtttacaacaactgctgtgggaaatgggaagtcattctgggacaagtacgcagactgttgagacttagtcagggtctgctagtggtgacaccagttgaaatggttatgcgcttttctccccgggataca

SEQ ID NO: 419438 - DNA, 199 bp, Homo Sapiens
ctgcttctgcgtagtcgtggtccatagagcaggccatgctatgaccaaaggggggtaatttgtgcactcttgctctagaatcaaaatgttgtgcatatctttgcctacattttgtgacaaatgtatactgctaaaatatgtgaatattgttgaaaactcagaaaaacagagaattttaaaaattgagacaatctcactc

SEQ ID NO: 419439 - DNA, 185 bp, Homo Sapiens
caagcaagttgttcctaaaatagactctttaaaaataaattcatttctaatatcaaagttggaaattttgggggacatgaagaatataaaaaatggaaaacgtctaatctcatgaatctactatgttagtttatttttaaatgcaggaatcctttacatggcattatgttgaatgaaacatgttc

SEQ ID NO: 419440 - DNA, 156 bp, Homo Sapiens
ctggctttcggcacataccagaattgttattagcaaattatctttcagaatgttctatttcgactagggctgtgactacctttccttccaaaacttcgagactaaatcctctggcttgaagacaatgtctgttattgaggctggtgaaaggacatt

SEQ ID NO: 419441 - DNA, 321 bp, Homo Sapiens
atcgtggactgcagatgataaaacgacagtcatcacccaaacggcttttataacaacgaaggactctgaacgttgtcgaggtgagttgcactgcctgtgtacccatggacaggctgtgtgcagagcctgggtggacgcaggcaggttatctatcccagacctatgcatcactcctgcatcacacctagcgccccgtgtgtgacccgggatcccaccgttctccagggtcgagggagaacacttcaagagaggtgactaaatctccaccaagcacattatatcaaatacgcctcaggaaaaccctttatggaaacctactat

SEQ ID NO: 419442 - DNA, 338 bp, Homo Sapiens
atcaaagctactttctgtctaatttatcgtcctactaggttatctttaagaatctcggtctgtacatataagttagcgccagcccacaaataaactggtaggagtaagggctgtatacctttccacaccttaaaaccatctgctcagtttgacatttaaaagggcggagagcagagaaggaggaggggggagtagggggaagaaaggagtcagggacagagaaaaagattcaaacgcgaaaaaaatggcttgcactttagcccacaagtttgtgtcaattgcacatagcgcttgaatgcacgttttgcacacaccacgcccgggaagtggggatcctc

SEQ ID NO: 419443 - DNA, 317 bp, Homo Sapiens
cctcgcacctgttactcgggggaatgggggtataaatggtcgtagcttggccagacactctgcttccccactcccacccatcttgtgtactggaggaccaacgtaaggcattagagtggctgccgtctcttcctgtgatgcacacttcttccccataaagtatctctggcgaggacacatccaggcagatgggcagaggagttgtcctggctgcctctatttcccagtagagttgtcttctcagcctcctgatctccacagccagagacagagattatgagaactttaacagtcagaatacacatcagcactgggag

SEQ ID NO: 419444 - DNA, 273 bp, Homo Sapiens
actccctgaagtatctgtgccttctcccacaccatacacagatctgcaaagcatcaggatgcaccagtggttaagactgcatatttgatcaaatctttaaagtctgtcacatctgattatgttatgctgttccctaaatctgtagcatcctaccctagttcaggaagacaatctggtacactgaaaaatgtatctttcagcttcaatcacaggttctaaagttagagaaatctgtgttagaaacccagctttcctgttttctagcattgtatc

SEQ ID NO: 419445 - DNA, 318 bp, Homo Sapiens
taggctggcaggcaagagatgccgtgtgtgctcaaaggcagctcaatttggaggctgggagtgggaacacatcatccctgtaaagatgggatcagattgaaacttctgggacctgatttcaggaacgagctgcaacaaaatgcccgcacacttcttgaacaccttccttttcctccccagctaaaatcctttcctgattcttcagtctcccttgggttcattcacttccctccagccctacttttcccctcttgcttctgggcagtatctttagccattaccaggttttcactcacaccaggacctttgcacatgcca

SEQ ID NO: 419446 - DNA, 279 bp, Homo Sapiens
gtcgaacagttactcccagtctctcactttcctcttgccttcatgtctttccctacccagcctagagtccttgatccattatgttaccaccttttatcttttcatgcgcccacctggcaaaaatgatagccctgactcaatagaaatttcttccttcttgtactaaccttcaggctgtggaatgctgatggagaaaatcacatcagagcagacgggtgctgctgtaaatttctaaattttaatctcagggccgtcatctctgtctagaaactaattagg

SEQ ID NO: 419447 - DNA, 388 bp, Homo Sapiens
actatgtcaatcacatttactccctggctgaatagaacgccttgctagtgttccctttcgtgatcttaatggtcacaagtaatatattcactatccagtaccctatccaacctgtaccgaatctctacatggttcatcatgatcactaacatgttatagatttctagaattggggtatgctagcagttttcagaatgactttgtagaaaagaatttagatttcaccaacttaatatactagtaaaagctccataatttaaggtgggtttaaaagttactttaatgaacttctagcgcttatgttacctatactttcatggttgacaaaagtcactatctctaggataattaatactaccttgggaggtattaagaaaatgctttctcg

SEQ ID NO: 419448 - DNA, 540 bp, Homo Sapiens
tctaacgatcccctaaacttcccggggagtaatttgggctccacgataatgatggaaaggagacagtgcaggcgcagcatgcaggatgttcaccagcagcgtccttatcacacttgatcctcacaaaaaggccacgttcttgcatggttgttgccaccgtgctctaaagataaggaagccatggctatgggaggccaggcagctcctcccgcagctggaccacctggaaggctacctcacctccatgcctgcaccttctgggctgtgaaacaggatcctaaaagggctatctttgggccttccaagcaaaacacacatcagggcacctcattaagtagcaagtgtgcaaggcattatatgaattacaaagttctctgcaaactcaagagactcatagctgctctggctttgcagctgttttagagatagggaaaaccacatgaggaaacaaaggtggaaggagaagcctgtgaggcaagggaaggagggggcgggaggaacttcccaccagcacaccggctgtccactctgccccgggaa

SEQ ID NO: 419449 - DNA, 500 bp, Homo Sapiens
gagatgggactacaggtgtgcaccaccaccctttgctaatttttatatttttttgtagagacgggttttgccatgttgcccagtctagtcttgagctctggggctcaagtgatctgcccgccttagcctcccataacggtgggattacaggcatgagccacccacacccagccctttttttaaaaaatgggtttgtaagagtattttgggaaagctgagtaagcagaggaccctaaattgttatttaaaataattatatgtaatatatttgaagcacttattttgtgccaggcactgttgctttatggtcacttgtttcagttaatcatcgtgaataccttcttatccagtgtgagtggactccagcttaggtccattttacagttgaaactgacactctagtaggattaagagactttgaccgaggtcacacaagttagggcggtgctagagccaggagtgtaacttgttctgtatttgttcatttaccccgggaagtc

SEQ ID NO: 419450 - DNA, 296 bp, Homo Sapiens
actcatatcttcattattcttatttaaacaacaataacatgacatcttaacagacatttttctgatttgaaaacttttatacatgtccattttacaaaattaggaaactccaaaatcccctgtagtgacatttacttatttctattgtttgttttattacttgatgatcacagtgacaggtgctcattgtagtccatttggaatgtacaggaaagtatataaggaacaaagtgatataaccaaatggaggctaacttctcatcattttcccttttgccattaaacatgttgaatct

SEQ ID NO: 419451 - DNA, 110 bp, Homo Sapiens
atccccggctttggatgcactatcttcttacccccagtccactcactccccttagagcgccctctcctcagaccaccagactccttcagaacccagcataattattactt

SEQ ID NO: 419452 - DNA, 476 bp, Homo Sapiens
  misc_feature (133)..(242): n is a, c, g, or t
ttccggggtggtgataatgttggggaggaggagatacagtttcataagggcagtggggagaatgctgtctgaattcagttattcattgtgagaatggtggaggtggtgataatgttggggaggaggagatacnnnnnnnnnnnnnnnnnnnnnnnnnnnnnnnnnnnnnnnnnnnnnnnnnnnnnnnnnnnnnnnnnnnnnnnnnnnnnnnnnnnnnnnnnnnnnnnnnnnnnnnnnnnnnngaaaggaagaataatacctgctattagaactgaaccacatgagatgggcagtggagactggaatattgtgtccaagggtgttggcagctggagtttggcctcctaattatagatgtgaagagaattacggtctgcagagggcctggcagtcctggtgctgacctgccgaagggccagatcttggtggtgactgcgacttctctgagttcccccgggaagtgggtaccgagctcg

SEQ ID NO: 419453 - DNA, 418 bp, Homo Sapiens
ataacttgtatctcgaattgtacaaggtacatattactactccaaaagaattcaaataaaatttaattttaatggagtaaatccaaacctttgatattaactgctgtatttcctgatgatgaatttgcagattatatataaacaactatgagaaattctaaaatgttctactgttcagaagagaatctactgcaaaatgagttgggatataggcacagttttctatttgtcttcttacatctgaatacaccattccattcttctgacaggaagtaaaaccattcatccattcaatcaacaaatattgagaatttactaaggactacgacctggggatacagcagtgaacaagatagccaaagtccctggcctcagagaacttactctaagagacataagttttatcttacatatatta

SEQ ID NO: 419454 - DNA, 165 bp, Homo Sapiens
caaaagcatgtaaatgcaacaaatttcattacctcacctaaagcagcattcaaatgctagtggcaaaatcaaagattttttcaatcatgaaagaagtagcatccaagcacccaccctatctttaaaaaatttatttcacagatattggcctaaatgaaggggatc

SEQ ID NO: 419455 - DNA, 459 bp, Homo Sapiens
tcagtcggtccttattggtttggtgtagcagtgaattaccataggctagagagagtattcagtgaagcatccaaatagacagaaacaacacaaatatttttgctggagtcaggagcactatgtggcacagaacacctcccagcaaagcatgaaaatttttctgcctgaaaaccaatgtatatttaagaccccaagtaaaatacaaaagcaaatgagccccaaactgtcttccctcagctttgcctgggagctgctatctttgcacttatttttctagcatcaggatatcagccacatgacggagccaagcatatttgtctcattttaggcatcattctttggtggttccccccaccccaggtattgttgagtctgtccaaagctgggtgagataccacacaagtcttgcttccctcattgtgctgcttctctcggccttggtggaggctgagcctgttg

SEQ ID NO: 419456 - DNA, 434 bp, Homo Sapiens
ctcggcccattttagcaaatggattgctggcccactgtagccacgatggacattgagcctatcctttcaccataaactacttccctgatattcttcccaatgcatacaactctttgtttataagttgagagaagaaaaggagcatttatttgcagtttccattgcctggcaaaactgcagcagtgatgaaagctaccacattgtcagtgctttccaggcaatggagataactcttcctctcccagatgtgattgggagcctcaaaaggtaatttccacattttagagtaagtagaaaggaatgactgagtttttcagagtcttgcaattaaattacaactttgaaagaataatctcaaagttcttggaaaacatcagtggggattaattacatctttggaaaagagatcgatatcatttaaggaataatgcacc

SEQ ID NO: 419457 - DNA, 207 bp, Homo Sapiens
ctcgtacctgcatttagcaatagttagcccagtaagccactctctaattagggtggtgggagccctccccaaatccaagctcccaggtgccagccaagggtcaactttgcaagcatgactttctaaagatagcagtctccggcctgcagtgtgaagtctttctgcacagggaattatatatacctttctccatatttctaggggtta

SEQ ID NO: 419458 - DNA, 296 bp, Homo Sapiens
  misc_feature (74)..(124): n is a, c, g, or t
gggtaacagtgaagatgtttgctgtgaaacagtattgtactgttgaagttaaagaggtctatgattacattgcnnnnnnnnnnnnnnnnnnnnnnnnnnnnnnnnnnnnnnnnnnnnnnnnnnngtaaagcccatatcactacctataacaagcttttgataagtgaactttctaatttttcctattctatagctatgtaagggaatctttaaattttgccaggactttctagcctaatgcaacaagggaggttacattaactataataatttaaatttcattagttttttcccac

SEQ ID NO: 419459 - DNA, 202 bp, Homo Sapiens
cccctttaatacagtatcgtaaaattgaattttatagtaagcaagcgcgtctaattaatgcaaagccgcttaatcgcgaagggcgtattatgctatatgcctcgataagccaatgcgcaagtttaagagaaaatccctctgcaaacagccgccacgatctgaccttaattatccgcggatacacgacctcgtcataaatgat

SEQ ID NO: 419460 - DNA, 438 bp, Homo Sapiens
gtccttcatttaggcaatcaggtgtgagcacagagccagggcttcagtgccttccagttcctaaagaggaaaaaagctaggtgaacagaagtgaagggggttgagacagagacactcttggctgggtactaatgaaacatttggaggtttctttttttgatatttatattcttactgcttagatgctgagaataaatggcatgtcctgataagggataaagtactggcgtacatcaagaaaagctgctttagctgcaatacagagaacagaatggaggtagcaagcatgtgagcgggaagatccatcaaaggccattacaaccgtgcaggccagaactggagacttccagaagagaaaggattcatgctggatatagatgcctggagttcagaggtgagatctggggcgagtcatccatgaacaggtattatttgaag

SEQ ID NO: 419461 - DNA, 419 bp, Homo Sapiens
ggagcaatatttagaataaaatatgttatttttaatcattagccattgttaactgcgatgtatgcagttttgtcagccaggcacagtaaagcaaggctgaacagtgaaagactcatctacagaaaacaagaatcaaaatgagtaaaaatgagtaatttgaaagattcctacttaaagaaacctttactcttgaaagaaataacctaccgtgccttaatttaaaatagagaactagcaagcttaagcaggactaggctcaggaatgtatttaacccataattgccaaaacaaaagtaactaggtggcacctgtttatagagtaaatgatgatagcaaccattctcaaagtaagcactcgatgactaatggatgccaaggtgaagctttaatcacaacactcatcaggaagagttgaacaa

SEQ ID NO: 419462 - DNA, 494 bp, Homo Sapiens
caaatttaaacatacgatggcagacgttttacttttccagacactcaagacatgcaaatgcattccaaaagacagacacacaaagccatcaagtctaatgtgccgacctcaggaaaatatgcaatgtacattctgctatcctcttcagacaaattttgtaaattcagcacatgaaaagagactatatggtaagttagtattttcaaaggtgccagaggtccagaacattgtcatgcgaaatgatattgatgtgttctaggattagagtccagctacattcaaaactgccaacctttaaaaagctcagtcactaaaggtaaacacattttcatgtacagtaagattaaaaccaaccaaatccatataaatggtagtacaaccttcttatgacagacaagacacttaagctcaaattataatttcaaagtatctcatcatatacaaagtggtaagccgcaagtgtctaaaaaagagctagagaatattaaaaagtc

SEQ ID NO: 419463 - DNA, 319 bp, Homo Sapiens
ttctttaggcaaatccagcctctctgttgcttttccttttggaatatttctaatgcaccaaatgcggatggtgaagctctagattcattttccccaggaaaacatgttttctttgcttgcttaagtgaagctcagtggcaaaagttttggctgactaggagagttgatgttggcaaatgtgggtagagctgatgaatgccatgatcctcaccaatagtttgtacaccctaagaaattactaataacactgatgacaataatagatgctaccatttaattagtatatactgggtgcaaggcattacgctaagcacttgac

SEQ ID NO: 419464 - DNA, 361 bp, Homo Sapiens
cccctaaatgttggagtttggagatttgcaatcatttctgtaacactcagaggtgctataaaactaactcagggacctcctaaacatgttacttttaaggtatgttcaagatgtttttaggtatttccagatatttcctcctcctacctccattctggactacagaaaataaacatgaaagtacaatttcaaagcaaaatgggatcaacagtgtgaatataagtaattcaaaaccaaacaatgaattacttggagttcggtttgttcaaaccatgagaatgaacataggctggcagttttcgactttgcttggcatgattctgcaagctgacaaattaccttcatttttatttgatttgat

SEQ ID NO: 419465 - DNA, 346 bp, Homo Sapiens
ttcattagcaaatggcagtggaaaaggagagaccacctagtggaggggtgaggagagggcagtggaaaaggagagaccacctagtggaggggtgaggagagggcagtggaaaaggagagaccacctagtggaggggagggcggtggaaaaggagagaccacctagtgggggggtgaggagagggcagtggaaaaggagagaccacctagtggaggggtgaggagagggcggtggaaaaggagagaccatctagtggaggggtgaggagagggcggtggaaaaggagagaccacctagtggaggggtgaggagagggcggtggaaaaggagagaccacctagtggag

SEQ ID NO: 419466 - DNA, 311 bp, Homo Sapiens
tagatgattgtatcctaattggtcagtaagaatcctcctgagatttagatcacattaaatgctaaaatcatagatgttcggaaggcaccttttgaggtcatccagtctcacctggcaccctggcctagcatccttgccaggaagccagtccgtccctgtctgaagcatgatggtgtcagtcctctgcaggggagttggccaatgctgaagagcagaaagagctacttccttgccccttcctctactcagtcctcctagcctctgccactcagtcctttgcatgagagacattaaaaactctccgactttcc

SEQ ID NO: 419467 - DNA, 230 bp, Homo Sapiens
gagctacaggcatggttttgtgcctttcagagtcaatgggctatatgcataacatggaacaaaaatgccatgttagatatcgtactgattttcatcttttagtttatatgttggtttctttgtgaaaataaatttaatatcaattcaacagacattttgccattgatatattcaataaaagttttgcaacctggcatgattctttatatgttattaccaatccaacattc

SEQ ID NO: 419468 - DNA, 283 bp, Homo Sapiens
tggtactggacattacccataagtgatgcctgagtggtcgacagacaatatcaaagttattggcacgcaatgatatttaaagccataccagtgaaagctgagagaaaagaaggctaaggaaccttaagaataggaattgtaacgcatggggaaaagaaaacatgaaagtataaggaacaagcaaaaataaaaggtgaaagagcactctagagagataggagtgggatgtcatagagtcttcgataagagaattggaaggaaggagagtgatcaaatgcagtca

SEQ ID NO: 419469 - DNA, 581 bp, Homo Sapiens
cacatgccaaagccaagaccaaaaccacaggtctagaggtgtttgaataagtagcccgatagctcccctgcatgttgagcactaaaatgttaggggaacatgttctgggctgctctcttcatcaaaattgcccagtgtgtgtcttataacatgcagcctttctcacttccttatcctacttatccttgaagactgtgctgagatgtcctgaagtccttccttaatttcctaggtagaaattatatttctctcccttgtgtcctcaccgttcttcttacataatcctgtcgtgaagctcatcaaccacgttggcagttgtttgcaggttctattctcagaccctagcctcaaggagctcatctagacaaattactcatctttgtatctcttatgtcagtgccttataaatgtttgtgggatgaaactgcttctccagctttacatcacatgtcccagaaagccactgccttcatctcctagattcttagaaaatgcagtatttgaaagaatctgtgccaaaatggaatctcagctttggcaataggacttctaatatcttactgactgagaaagtcggtcta

SEQ ID NO: 419470 - DNA, 538 bp, Homo Sapiens
tggtgcccaactgaaactcctttccactttgtaacctatttgaagcccatctttatttcattattttttaaacacagcacaggggagaatcaaaatgagtttccaaagaggaatgacaaatgacagcacatatcataaccaggtattttctgatattttttcatccatgcctcttttcaacaccaacagttactaaatgtccacacctcagaactcctgataagtaacagcaataagccgcattggagcagagtaaagccaaaatcttcacggtggtcttcaagagcctcattgtcaagattcccccatccctagactaacgcctgccattcttccctctccttccactactccctggctccctgggagccctcttcccctagatagctgtattgtgacctccctcatcaacttcatctgtttgctcagtctctttctcaaggaagcctaccctgcccaccttatattaaatcgcaaaaccctttgccctggaattcctgaacccctttatttgctctactttttaaaattgcatttg

SEQ ID NO: 419471 - DNA, 634 bp, Homo Sapiens
  misc_feature (47)..(140): n is a, c, g, or t
  misc_feature (186)..(551): n is a, c, g, or t
gtccatatttgttggacgatgttaggtgttatgaactgctaggacannnnnnnnnnnnnnnnnnnnnnnnnnnnnnnnnnnnnnnnnnnnnnnnnnnnnnnnnnnnnnnnnnnnnnnnnnnnnnnnnnnnnnnnnnnnnnttggatgcaatattggcatccaattatttggccagctttggtgatnnnnnnnnnnnnnnnnnnnnnnnnnnnnnnnnnnnnnnnnnnnnnnnnnnnnnnnnnnnnnnnnnnnnnnnnnnnnnnnnnnnnnnnnnnnnnnnnnnnnnnnnnnnnnnnnnnnnnnnnnnnnnnnnnnnnnnnnnnnnnnnnnnnnnnnnnnnnnnnnnnnnnnnnnnnnnnnnnnnnnnnnnnnnnnnnnnnnnnnnnnnnnnnnnnnnnnnnnnnnnnnnnnnnnnnnnnnnnnnnnnnnnnnnnnnnnnnnnnnnnnnnnnnnnnnnnnnnnnnnnnnnnnnnnnnnnnnnnnnnnnnnnnnnnnnnnnnnnnnnnnnnnnnnnnnnnnnnnnnnnnnnnnnnnnnnnnnnnnnnnnnnnngacaatgattaataggatgaggtgaatgcaaaggaaagctttctaatctgggagactaaagggaccagtggtgccacttactg

SEQ ID NO: 419472 - DNA, 469 bp, Homo Sapiens
atattgtggacgagtgggggggtgtttgccacttacagtaccttgacatcacattaagttctgtttatttccctctttctctttaatgcaaaaaataatcaataagtataaaattttgctgatatgtgtttgtgtgttcttaagctcaaaaagagttgaaagagaactgttcagcctattttttttgtcatgagtaaaagtaaagttgaagtgacttaagacagtacatcttatgttccctgtgggttttacaaggaaattctgctattagataagctttggaaaagttacaggaggtatctgaatatacagcacactgagagctgtcataaagttctggggtggggtttcttatatatgccctcataacttcagagacggcacagctctaatgaacactcacttctagttcactcacaggcattttctggatacaaacaagtcctcaaaaagaattttggtcgtccaa

SEQ ID NO: 419473 - DNA, 368 bp, Homo Sapiens
tatattggggacgagatgcaaaacacacatacgcaactttaacagcacacctaaatatacgtgtagaaggtactgggagaacacagcacacaggatctaaataggggtgaggaagaaactagaaaggtttcaccaagcagattgaatgagattcaccaagatggtatggatggaatggaggaaagacatttaaggagagggaagagcatggcaggtggggtcgtaaaagaagacagtgaagggagaggggcaaggatagggaaaggggcaaggatatggagagaggcaaggatagggagaagggtgtggctggagcaaaaggtgtttaggtacatgctgggaagcggagaagatgaggccagttatat

SEQ ID NO: 419474 - DNA, 333 bp, Homo Sapiens
  misc_feature (251)..(264): n is a, c, g, or t
catattggtggacgatgaggacagaagtagagagaaaaaagtgagatagatggaataggattgaggaggaggactggcaaaatgatgagtgatggaataggattgaggaaggggactggcaaaatgatgagtgatggaataggactgaggaagaggacgggcaaaatgatgagtgtaggtgatggaaatgtgaggactcattacaatattccctataccctcatacatgtttttaaattcccctgatcgannnnnnnnnnnnnnataaccattgcctaaaaaaatttctcataaaaatcctcgatcctcgtccaccctatagttggtaccgat

SEQ ID NO: 419475 - DNA, 352 bp, Homo Sapiens
atactggtgccatgaaccaagtgggaacggtaggtctttaattcttagatattcaaatttgtgttgtcttatcattagtattgtcagaaccacatagtataaagtcttgttcttttcaaaatgagtggctcttctttttctttttgttcctatttaaattgtttttaaaacttttatgggtagatagtaggtatatgtatggggtacatgagttgtttagatacaggcctacaatgtgtaataataatcacagggtaaatggggtctccatcatctacaagcatgtatcctttctttgtgttatgagcactccagttatactccctcagttgttaaagtatacaaaaaatta

SEQ ID NO: 419476 - DNA, 380 bp, Homo Sapiens
atattggtggacgactataaaggtggtaccaagccattcataagggatctgcctctatgacccaaacacctctcattagaccccacctgcaacattgcgaatcaaatttcaacatgaggtttgaagggtcagatattcaaactgtagcattccacgcttgactctccatgcctcacatccttctcacattgcaaaatacaatcattctatcccaatggtcccgaaagtcttaacttgttctagcatctactcaaaagtcccaaatccaaaatctcatctgagactcaaggcaagttccttccacctatgagcctgtgaaatcaaaagcaattcatctacttataatatgcaatgtttgtataggcattaggtaaacattc

SEQ ID NO: 419477 - DNA, 286 bp, Homo Sapiens
cttggttttaacatcaaagagtcatctgaaaccaagttaaagcggctgcagattgaatctttgttctccatcctcttaaagtgatacgccccacctccactatagcacattccaacataacactgttcacaggtatgctcgcttccccaactggagctagctcctcaaaggtggggtttgttctttcttcgagtctccaggatctagcagaatgtctaacatatatacagtatgtttgtggtaaatgtttgttaaaagagtgaatgaattaagatgaatttatatt

SEQ ID NO: 419478 - DNA, 149 bp, Homo Sapiens
atatggttggacgaatgactttgtttttggaatagattaattgtaagggaggagaaataagaatgagactctataaattacaagatacttaggaacatttcaaccatttgcaatgtgtagactttttgagtcctggttcaaacaactgt

SEQ ID NO: 419479 - DNA, 351 bp, Homo Sapiens
tttctttgatatgcagtgcctgtacttcaacagctcctagcacattgttggcactaaataatcaatgactgttagtgatcatgtcacaaaacactagagaacattgaccatgagactgagttaaagttcttagccaattcaatatctgtttcaaagcatccttgacatttcaaatcccctgaatttttcatttactcagtaattgaaaacctaaatctaaaactgtggtattatcacaagtgcccactgcaacctctggattcaaaaggttaattttaatgaacttttaaacacttgcattaggcaatttcatttaaatataattgaaatgtgaagctgggtagttgtagt

SEQ ID NO: 419480 - DNA, 360 bp, Homo Sapiens
atatggttggacgaccaagataggaaatcttaaaaacctgaacacatacaaataccccaaaaagaaaaagagacaaagaggaaaactggagagaaatgataagaatgtcagaagaccaaaataggaagtccaacgttcaataaaatcatagctcaagataaatacaagagggaaaagaggaagttgtcaggagaagttctcagaatcatacacaattgccagattgaaaacgcccaccaaaaatacctcgtggatgaaagtggcccacacaagggcgtatcactgtaaaactgcagaacaccatagacagcgaagattccgtaagcttccagccacaaagaatcaagaatcagtgtggat

SEQ ID NO: 419481 - DNA, 361 bp, Homo Sapiens
atatggttggacgatagaaaagatgccagaagcagatgccttctggccagagcgcagagcatgcagggcagagatatttgctagttacaattattccataggctttatgcttgcctgggtgctgaggttggcacacgctcgggtatggcacacgctttcttaggagactattatctataagttaaagctagggagatgtcactattagaactccaaacacactcttctgctttaaaacaggttgtctgccctctgctttggtatggcattcgggtgtctgttttgtggttgctttagattggaggggtgaccattttattagcccccttgataacatctgttgcagatattgcctttctgg

SEQ ID NO: 419482 - DNA, 381 bp, Homo Sapiens
agccgctaccatatgggtggacgacagtaacttcttcttgtctatcaccgtgaaatccatgtgtttggtgatgtgccattatcttgctttaagctcttcaatttcttccaggtggctggtagaaaaaagtgaaaattccttcgtgtgacatttatgagccttgcctggttccagctatcattcatcatgccccacctcatggcctgtgccccagccaatcaaactgcctgtaattttctcagattacagtctgggtgaggcctgcaaggctgctagttcagcgctctctgttgtatcttcctttggtctctgatttcttttactctcccacctcccagaaaacttggtccaagaacagtgcttctctctttaaccttcgct

SEQ ID NO: 419483 - DNA, 160 bp, Homo Sapiens
ggctcggtaccatataggttggacgaatccttaaatctcactctctccaatttccatatctcagtgaatggcactatcatccagacagtagccaatcttttccatcattctcatatttcatctaatactattactaatctatttgatctacttaacattc

SEQ ID NO: 419484 - DNA, 326 bp, Homo Sapiens
ctacctattgagttggacgagagaaaggatggtgcatgtgaaagatttaagatacgccaccattttagtaacccactcttagtacatcttcagttttcagtatgctgagaacctcacaaaatggaagtggcccagggtttttctagacctttagcagatcctgatctcttgttctctatttgtttggacacccaaaggcttgactactagggtggaaaacactagaatcagcgaatgtatcactgatctgaaaagccctcttgccaccgggaaggggaagaaaggcagggtttggtgtttgcatgagttagtatcgtccaaccaat

SEQ ID NO: 419485 - DNA, 281 bp, Homo Sapiens
ttgagctcggtaccattttggttggacgacatggagttggtgaggggcagctcctggttcctaaaactttattggtgaagggtatagtactttgagaaaagttatttttaggtgagggaaaagtgccagaagaaagggagagattaaaaattcaagagagacagggggatattgatgacagaataaggttctggagaaggcaggagggtgcagggcaaccacagcgagtccacctgccaacacctccacggaaagagagacccgcctagattaacagactc

SEQ ID NO: 419486 - DNA, 419 bp, Homo Sapiens
  misc_feature (308)..(322): n is a, c, g, or t
gctggtccattttggttggacgacataaaaggagtgtgatcttactccagaaggatattataagaatgcattagaaaatataaaacaaaacaaactccaaagcaccatacaaatcttagttttataggataagcataaatgccctcccatctaaaataaaacattttcctttttccgtgattcttctattaaaccaaaccaagatgtcttactgtaaaaaacttgggttattaatacaagttttttgataaagatagtaggtgattcagtccaatggaacagcatgatttctgttttgctctttccannnnnnnnnnnnnnncacttttcccaaagtcgggtttgaaacccaagtgaagtaaataatcaggtatgactccaatactcagagggaaatataagccaaaaagatttctgga

SEQ ID NO: 419487 - DNA, 376 bp, Homo Sapiens
tcagctcgctaccattttggttggacgagaagagagctttaactcatgcaatggcaacaagaaggcaaaagtatgtgagattgatgaggctggatggaccccatgtggtgactggaaggagatggggagtgggagagggaaggatagggaatcactcccagatctctggtaggagccatgtgtggatggagctaccagttctaagggcgaagagaaacgcaggtttggggaaatgattttgatttggggactgattttgctttacctgtgaagcccccaggtgaggctatctgggtgatatcatgggagggctggaggtgcagattcagtagtacagacgggtgggtagaagctggagccatgagtccagtggggt

SEQ ID NO: 419488 - DNA, 311 bp, Homo Sapiens
gatgagccggctacctattgagttggacgaggtggaaccctcagctcataaaatgcagatgacaaagtgacattttaaagtctatttttaattaatattcccgaagaaacccatcacaccaaaaatgtaaagtaaaatataaagcaaaacctgttagaaatccagggaaggcgtgaacaacagcatatgaaaacatccttgatctacccacaatcaaaaccccaacacttctgcccacacacgacggcaggtttccaaaccactaccgtcgactacgagtaagaaggtgaaggacctgggcagacactcag

SEQ ID NO: 419489 - DNA, 413 bp, Homo Sapiens
taccatataggtggacgacatctggttctctcttagccaactttaatcaggtttttcctctatttcccaaacttcttagctgaacgtgcccttgacaagggtcattagtaacatcaaagtgcctaaattcaacagtcagttcacagtcctcattttgtttgacctatgcccagcatttgacacaattattcattcctccgtaatacactttattcacttttggcttccaggatactgcatgttgtgtgcagctccccctgtcccccaaccccacacacacattttattggtcaatccttgtcagtttcctttgttatttactcctttctctcctgcctttaaaaattggcgtgtccattggagatctttatctagacttacacatctttaagtactatccttgaactggctcc

SEQ ID NO: 419490 - DNA, 346 bp, Homo Sapiens
ggctaccatattggtggacgatctacaactctatctgagtatgtcctttctatagacactttccgtaaacggaggattaacatcagagcagggttggaaaattatgtcaactctatctggtgaattccttctgggattacctcactctcttctgccaatttttatttcttattacttatgattatacatgaatctaattatttaatttgtcaatttgacacaatttgttcttaaataaaataaataatacataagcgcagctgactttgaaatacttactttctaaaggcaatgcatgaaacagtatcagaactggttttgaaaatgaagttttagaatagttttc

SEQ ID NO: 419491 - DNA, 345 bp, Homo Sapiens
tacctattggttggcgacttcttatccattctgccatctgtatcttttaagtggagtatttaggccatttacactcaatgctagtattgagatgtgaggtactattctattcatgttatttgatgcctgaatatcttggttgtttatttgtttatttattgtatttttgttttagaggttctgtgagatttatgctttaaggaggttctattttggtgtatttcaaggatttgtttcaagatttagagcttcttttagcagttcttatagtgctggcttggtagtggtgagctctctcagcatttgtctgaaaaaagactggatctttccttcacttatgaagct

SEQ ID NO: 419492 - DNA, 339 bp, Homo Sapiens
tatggttggacgagagggagcagtcagaacagttgtgcccaaggaacaggcacagcagagttgctgacactggcatatggaagaagtgaagaccaccaaactgctgtgagatactccctgggcttggtttttttaatacatgtgctgtattgagatgaccgcaggccactgaagtggcgattgaaagacacatataggacacagtggtgtgaccaagccaaatggaaaccagggctaggatggaccacacttagagccatctggcaaatggcctcagtgagggttggtggtcattcacggtactcaggtgtggtcaaggaagatggtggccaagacaat

SEQ ID NO: 419493 - DNA, 177 bp, Homo Sapiens
atatggttggcgagaggtcaggatgcagtttgtgccataagtggaacaaagcaaagagaatagtccctggtaattagtcctgtgtttgaacttaacagcactactaagcagagagcttgggttccatcagaaagctagacctttagggattttccaatttagtgaaaaaagataaga

SEQ ID NO: 419494 - DNA, 330 bp, Homo Sapiens
ggacgattggagattgtaaaaagaaaaattggtaactaaagtaaaataattaagatgtaacacaactgaatctataaataaataatgataatgtcattacaaacttcctaaatttatcattatgcaaaacaaatgaagaaatgcatgtggtctttctcagcatatgtctttccaggtttatataacatttattaaacattttgatcttttaatggcagttaatccattgggaaacagaatacttagggaatgcaaacaaccattaaattatatgccaaccaggcttgttacattggcagagtatgatgaatatgcctatgatgcctatta

SEQ ID NO: 419495 - DNA, 292 bp, Homo Sapiens
ttcgaaaaaatataaatattattagcaaggagaaacaatatttaggatttgagtaaatcaatcaagaaaaatcctggagggtagtggggagggtaatggaaaagcacaggctgaaaagtcctatttggtcacattccgtagcttttcattattggtttctactagcaaatagagtaaggtacaacagaatgttcaatgcattgaaagaacattttgcttctcttaaaagtcataaaagagaaacagaggatttctctaagaaaaaccaaaataactccctctggagtaaccc

SEQ ID NO: 419496 - DNA, 273 bp, Homo Sapiens
atatgttggacgaccagaactctggccttgccccctactgtgtccctcagaatgttccttgttgttgaagtatcttttctgctccgtgtagaaatctcacacttctctggttttagtgtcagcctcttttccaaggtctggttcagcatcctactatcatcttaattgtctagcaatggttttctctcatctcccaaaaacccaatctctcttccaaatcctgctgtctctgctcatggacctacctcacagttgctttgacttagattcctg

SEQ ID NO: 419497 - DNA, 320 bp, Homo Sapiens
gatatattcctaggtattttttttgtgtgtggctatgtaaatgggattatgttcttgatttggctcttaggttgaatgttattggtgtatagaaatgctactgatttttgtacatagatttttgtatcctgaaaccttgctaaaagtgtttatcagttctaatagccttttggcagagtccttagggttttctacatatagaatcacattgttagcaaagagagatcagttgtcttcttcctattgcaatgccttttctcttgcctgctgctctggctagtgcttccagtactgtgttgaataggagtggtgagaggagg

SEQ ID NO: 419498 - DNA, 124 bp, Homo Sapiens
atactcttgtttgattgtaatattctatatgtactggggcaaggtactgaaatctctaattctcacttttatttctgttcaaaatatgaataatatatctaccattaccttactagtagcttga

SEQ ID NO: 419499 - DNA, 271 bp, Homo Sapiens
gcccatatgtgtggacgagagatagcgggagatcagcagagtagtgcagatgcacgtaagtttcggatggcaattggctacatatcaaaagcttcaaatgcatagaaccttggcacaacaattacacttcccaaaatatattctaaagaaataatcaggagtaactacagttatcaataataatatttttgtatactgcagtgctattaaaataggaaaacaaaggagtgggatagggaagcaacctaactatataacagatgattgattg

SEQ ID NO: 419500 - DNA, 395 bp, Homo Sapiens
gccggcccatattggtggacgatcacaatcggtatctttacattacacaaaagtgacacagaattagagtcatttaatccagggttgatatcattaagtcatgactatttattaaatgtttcttacaatatctgagatgatattgcaaaagatgtaagtgattttagaagttctcacttcgtagttagttgcagaaacctcttttggaggagggatgttttctctatatatcctaatttctacttaatatatttccacacctctttgaagtgtgtagtaagaatggtaaaatgcagtacttcgtcatttggtacagttcaatcaatatgcatttagatgtgatcatatgggtaatagaaaaatgtgaaagatccaattctttttctccagaaggc

SEQ ID NO: 419501 - DNA, 177 bp, Homo Sapiens
tcaatgagtcaacactgcggttattttagccagttgaattaggctcatcaaaatatttaaactggtataccaaactacttcagtatatttaaactattgccgttgttgtgtgcctgcttttctttctcgggacagatatcagggttaccgtgtattttatctaagagctggtttatg

SEQ ID NO: 419502 - DNA, 314 bp, Homo Sapiens
ctgatcctggggatgagacaacaaattcttaaggaatgtgggccttgagatcctgcacgtacctggtcaacaaataaggtcacctactgtgaaaatcaacttctcagagcagcagcactcacccaacctcctaatgaaagaggaatcatatggattaccttcaaagaccccactgctcaactggaacacagccagaatcttacagaaagaaagaacaagctattgataaggaatgcctaagacagcatcggggttagaagctaacacctactcttgtgacctgatgatcagaaagagatgtttatgggctgagg

SEQ ID NO: 419503 - DNA, 332 bp, Homo Sapiens
agatcacccatatggttggacgacaggccgagcttgttctgtcacattaccacgaatagtactgtaatggcacgctctcacttggatctgggccccgtctcagtggggaggggaggaaactgcctttgcccagatcaccataaaggagacagacagaggagttcatgagtgaaaggaggacttcctttatctcatggaaaattcaaacgtactcaaaagcaaatagtctaatgaaaccccaggcatggcagttatcactgattaccagccttgtttcagcagccctcccccggcctccgggagcaaatgcagagaatattttagagtgtacc

SEQ ID NO: 419504 - DNA, 178 bp, Homo Sapiens
atggtggacgagaatgagtgtactgtaaggcatttactctgtcttttagattcttacataatatgtataagaggtggtaaagagttagttcagactgtaaagccagactgtcctgcatccatgttctagtctttttcacgcttccagacgtgtgtgactcatgacgcaatggatctac

SEQ ID NO: 419505 - DNA, 597 bp, Homo Sapiens
  misc_feature (253)..(261): n is a, c, g, or t
agaaggaactaaactgtcaatactgatgttaccaaataatttgaaggatacgtgatttctaatttttgttctttccacttttttaaatgcatggctttcataatcagggaagaggaattacaaaaaaagcagaggaggccctgagagaagaccaaagtagggggtgagagatgccatcaattcacacgtaaaagctgcagcctctctcaactacgcctgaaccttgttagataagatactttaaaaaggacannnnnnnnnccctaaggagaatgtctacctgaattatagccaagaacaaatttgttatagggaaagaatgcctgataatctgaagaaaacattttaacctcataaatgtcacacggttaggttgaatttgtagtaaaatgaataggtaaagacttaactgttgaagactttactttctaccctattaacacactgtccatcatagagacaggaggtggggaactgcctgtccttactgtggaaggaggatgaggaagatggtcacatcagatcttcctgttcccaagctcacttaatctgctaggccagtggcactgaaaccacagtgagttgccatgtcttggg

SEQ ID NO: 419506 - DNA, 621 bp, Homo Sapiens
tctgtataaacaatgtgatgccagctgagcacctgattttcttctgaaagtcaggaattcggattgtggtcagtcacgcaagctcaatatgcccatgtggccaacccacaatccaaccccgaactcccaggctccgatgagcagcgctgatagatggtgttccgcacacccttgcaacgcatcactggagagacaaacatgcccgtgtggctctcctgggagggagttttgggagcctgcactgtcttcctccagactccaacctgtgcaccttttccctttgctggcttagctctatgtcttttcactgtaatgaattctacctgtgagtaaaacctcatgctgagccctgcgaatcctagcaaatcaccaagtctgtagttggtcttaaggaccccagtgaagttggtgtcagaagtggggttggctaacatgactctgcctcactgaaatacgatgaaagctttctttgggaaaatgaaggatgaagaggtgaggatgagatgttagctcctgagtcttccacagcatgaaatgcagctgagctgccaaatgccgtgaaaggtacaagtcatctatggagtttagaaatgatagtccaagcccacgagagctgggatg

SEQ ID NO: 419507 - DNA, 632 bp, Homo Sapiens
atgtacacaccccagtaccttttcttacaaactgctaaggaaggggcctttcctatcccatacattggctgccatctctcttaactgtcagagcccaaatttcctatgagagaaaagtgcaaggtagacagaaaactcctgaaaaactgcctcaggtgattagtgggcaaccgtttgcttttaccttcagggcctctgcaaattttctgagatctctggacagggctaagaagagaaagactggccatataagaaacttaacattcatactgtttcaagattcaaaacagctggccccatacccatttgattggcttgaaaaaatacattaaaacgtgtctaaatcttgcatctgcctatcaaaaagtccagcctcatgttgaacagcagtaaaacttccattactgataaagttgttaactcccttgtagttcttaaacaaaattacttaacataaaagtttcttaaatgctttttaaaagctgtcctttactgaattgcatgttattagcatgatttgtattcttcttgccttttatgtagtcctgagcagacataagagcggacatacaacaagaatccataacatttttagcataaccagatgtacattcccacatcagtctggcatg

SEQ ID NO: 419508 - DNA, 612 bp, Homo Sapiens
ctgacccagctactggcaatgggtgcaactgagtttacctgatgtaaatgcaggatcgctttccctcctgaaagtttatatgtaggattatcacctccaattaagggtcagtgttagtctatttaaacttttgccttcgtgtccctactacatagaatcatgactgcaactctagggaggaataccagtcgaatataaaaatccaagcagacttcctagggctcagcaaagaacattacttgcaatttttctctttcccaatttctccttttccagaattctttgttagaattttggagaaggtatcatggattctgtaataattacagaagaagaaaagatataaggtgaagtaaggacaacagtgcaataaaaaaagatggataaaagtggcaggatttgaggataaaataatggctggagagatcaggttattaaaacaaacaagtgaaatggacagaaaaaaaggaagaagaccctttggctgaggggaaggaaaaggttaacacgacatgaacatcaagatttaataaaaattaatccttgaaaacaccatcactgatttaaaatccatttgaaatagtgaaatagcaaagcaggacaaaataaatc

SEQ ID NO: 419509 - DNA, 367 bp, Homo Sapiens
gcacttgcactaataagaagcactgttggtttcaagtatgccctgacttatccaaccaagctaaaagcaagatatccactgcttgccctcccagatttaaggctttatgggcctaagaagttgtcttttccaagaaaggatcagctgtttagtcaaactctactcctctgcattaactccaagttgtaaagcctcaaagagtaccctccgaaagagtcacaaggaaatgttcgacttttcctgatatgatattggaaatgcttaaaaaacaaatagaatccttgcaaaaaatactgcagtcgatggaaacacgtcctcccactaagcatcagacttgtccctgcccccaggtggggtgtgctttcaa

SEQ ID NO: 419510 - DNA, 179 bp, Homo Sapiens
tgttgaaagcaccctacctgtgtacccgagctacgagctcagtccaggccttactcatgcccagcccagaagaataagtcagcgccctgtcctagtataattccgagtcactacagtttgagccatgaaacagaaaaacccatgactccttcatgctgcttgctggatgaaaccatggt

SEQ ID NO: 419511 - DNA, 705 bp, Homo Sapiens
tgtgaaagaacccatttcactcagcctcttccttgagtttcaaagaagaaactgggatgcaggataggaatgtgcaaggaagtgaatccgctgttagcttgatggagtttgttttgtaggtgacctgccctttctctgtagctaactttaaaattctttctttcattttgaccttagaaaatctgatgatgatgtgtgttggcaatggtctcctgtagaatcttgctagggttctctgtatttcctgaatttgactgttgacctctctagcagggttggggaagttttaatggatatcctgaaatatgctttccaagttgtttactttctcctcctcccttttatggatgccagtgattcataggtttggcctttttacataatcccatacctcatagaggttttgttcattcatcttcattcctttttctttatttttgtctgactgtattattttagagaaccagtgaattatttctcagcttggtctattttgctgttaatcttgtgattacatgtgaaattcttgtattgtgtttttcagctctgtcagatctgttagcttcctttttataccagctatttcattcttcagctccttatcattttatatcattcttagtgcctggattagttttccatgcgatttgagacttatacatcatatcgatctgtttgcattaaccggcactgtagacttcggaa

SEQ ID NO: 419512 - DNA, 652 bp, Homo Sapiens
tgtaagcacaccctttagttaaagggcccttcggataacagatatgcatgcacgaagcaaatatttcactgtagtcccgccttttgattatgacaataatagcggcaaactgatatgtgtttgctataatgtgctgctcaatgatggatccattaagtggtgaaaactctgattgcaaagcagcacacagagaaagcattatgacaacaaaacctatctttgtaactatcaggaagtgggagttttactacttgaagaaaaatgaaagcttcctggggaactgtattttagaagagttctctaggatgtgaatcctgaacatgtttcatggcccatggagtggtgagtgtagacaagtatgagtggagggatggcggctcctctgcccagaaatattcttctactgacaagtcacagtccaaggcctcagaacctcccgatcaaagtgcaaataaatactgtggggatatttatctacctctgggaccctaacatgcctttaatagataactacttgaaatcatggaaaccaaaatgcagattcattaaggaatttaacacaagactatcaagagtcagttttgttttgggaacagttgatggtgttaatggaagggtgccaaagagggtagaatgtcaatgtgactgggtg

SEQ ID NO: 419513 - DNA, 515 bp, Homo Sapiens
agaacacccacagtcatgccttttaatagtgaagtttctaaatgtatgcattcattcatcagcatttaattgaatgctaaatatatgccaaccactttattaaatgctggagatataaagatgactaatattcagttgcttccccaggcagccggtttatggtctgttgtggaagacagaaatatgaactaagttataattcattatgctaagtgcagtgctggagacaggccagtgagagcaaagcatgtgtacttggtagatcataaacagggtggtggtagcataaattataaggtgaacagtgaggctggaggggtgggcagaaactagatcccacaagatggaactggctggttatgaagctttgagttttgtcttctaggcctcaacgaggcatggagtggttttaaacaggtcagtgataaggacaggtttatgtttgagtaagataattctgtgggctgggtgaaggctggagatgatggacgtgaaactagaagtagggagactaa

SEQ ID NO: 419514 - DNA, 338 bp, Homo Sapiens
catggcgaaacgcagaagctgctcgttcatcttcatcggcgcaggtcttccatgctcattctgactatcgctgatcagttgtttccaacacgcgccgcgatctggttgatgctgcctatacactcggcgccaacggatcgcggtgttattcgccgtgtgcttttgccgtcaagcgctcccgatattgctgaaacgctgcgcctcgtgcttggctgggcatggacctatgtaatcgtcgctgagctgatcggcgcatcatcgggcatcggctatatgatcatcaattcgcaggcgcttatggcgaccggacagatcattttcggcatcattgtgatcgg

SEQ ID NO: 419515 - DNA, 230 bp, Homo Sapiens
  misc_feature (68)..(76): n is a, c, g, or t
  misc_feature (158)..(174): n is a, c, g, or t
gaaaaggaattctccctttttcgccagggggaaatggaagggggggaactctcggctcgttgagggtnnnnnnnnngggtttcacccgtttttctggcttaaccctcttaatatagcgtggaacatgtgggtgtcccggcaaccaccccgggtataannnnnnnnnnnnnnnnnaatataaagagtgggttttcccccattttaaccatatttgtgttgtcaactcctcg

SEQ ID NO: 419516 - DNA, 442 bp, Homo Sapiens
cccattgccaaaagaaaccctgtaccctttactatcgcctccccaccccaacctcttcatccccatctctcagccttaagaaatcaaaatctactttctgcctcttagatttccctattctggatatttcatgtgaatggaatttataatctgtggactttcgtttatggcttctttcacttagcatgttttcagggtttacccatgttgtagcacgtgtcagtactttattccttgttatggccaaatactatttcaccgtatagatattccacaatttgtttctgcttacaccagctgatggacatttgggatgtttccaacttttggattttatgaataatgcctctatgcatatccatatacaaggttttcttttcttttttcgtgtcagatgggtaatgtgccaatgtcataacaaggttcgagggtggctttcaca

SEQ ID NO: 419517 - DNA, 261 bp, Homo Sapiens
tgtgaagccacccctccctcgccagcatttgaattgctgtcttttggatagaagccgttttaactggggtgaggtgatacctcattgtaatttttatttgcatgtctgatgattaaaggatattgagcatgctttcctatacctgttggccgtttgtgtgtcttcttttgagaaatgtctgttcagatcttttgcctatattttaatcgaattactcatttttttccgattaagtcgtttgagaatatacaatgatctggt

SEQ ID NO: 419518 - DNA, 609 bp, Homo Sapiens
cctcttggactctgtgtctaaaacaactgtttcaagcgtgtcgtggggttttcagggactagcatattgttaattgtttttcagccactaactttcagcaaaaagacgtctggtgaattaacctagaacacacttggcctgtttaaccctctcttccctaatacgcaacatgcttcctgacctgacatctgctccctctgtccccacaactacaccagtactcccagcacacggaactaaacatatgcctgctgcctgaaggggacaagccaagttaaataaaattccagtggaacaactgctaaagaatcatacagtgcccttgggtctcttccaaatagtaacaactttgtcatccgactcaaaatactagtttcataggagcaagatagcatactggggaaggtagaattccatctggagtgagaaggccaaagttccaagggtgaagaaaaaggtgtgtgtggaggcagtgtgacccaggggaagggttttggcatcagatggactccagtgtgactgggcaagctactaaaatgtttctggacctgagtgtatgttttttcactttccaaaatgtagtatatgtgtaatagtcatatacatcat

SEQ ID NO: 419519 - DNA, 111 bp, Homo Sapiens
agatatagttattacactgccatgcctactattttataagaaataggatcatctcattgaagagtaagataatcaaaggaggaggagtagcactgaacaactgattcattg

SEQ ID NO: 419520 - DNA, 465 bp, Homo Sapiens
acctccttctggcacgcttccatgccccagtcaagcactccatctgtgtgcaccaacctgacgatttcagttccccaaatgtgccatgctttagctttccttcctcatcttcctacttcaggtctcagtttagatgtcacctccttgatcctcacctccaattccgctcagatgaggtgccactgctatgagttcccttgacaccctgtgtttcccccatgactgcactgattcctgctgaaattaaccagtctatgcctttctccggctcttgcaagaaactgtatgtgagccagggcttgtctctcccattctttagagagagatccccagcactcaggacagtgcctccccagggcagctgcatgaatggcctaccgtggattatcctactctctactgcttcacccagcaccgaactcataacaaatgcacaacagacattatcatgcgtggccagaagga

SEQ ID NO: 419521 - DNA, 628 bp, Homo Sapiens
cacgcgctagatgagagtgggacaacatgccgtttgtgtttcttctcaggagctaacaccactctgtgtgtggcctgggtagggccttaagaaatctctgtcttgctgttgcaatcctgcctcactgaccgagtcactcaccatatgttgagttcctgctgcatgtcagccctgtgactgaagagatcgggtcccacaggggcagcggtataagggtgggggtacgcatcccacaccagaatccgttcccaaagcttgagtcacagcacctggggcgagtggcactgggatgctttgtgatatgttcccatggcagcagagccttggggacacttgagtcatgcaagtacataagagggacacctagcaagttcgtattgctggagacagagtcgctttccgtatgagcagaatagtgatcgatttacgttcaggggttccatgttcttctttttgaagagacgaagtagaaatgattaggcatgtcagcaacttagcatgattctagagtatgcattcccaatgaacattctatctggaagatttagggacttctctgttatctaatctgtcagtgaaatgaagattaattttgcatccattaattctaatacctttttttaactga

SEQ ID NO: 419522 - DNA, 530 bp, Homo Sapiens
ctggcacggcatgtgcagtatgagatctcacattcagttcttctttcttcctccatccattttcagatatggtgctttgtggtctgaaggtcatccctgcttcctttcccttagtctttcacaggcatttctcccaacaggtagtgagaatgggttttgggttctggaaatggttcagtcacagtaataatatcatcctgggttttatgtgggacacaaatatttcctggcacaaggtggccacacaaatgaggatttcatcaatgatgaaactgagaaaatgtgcaagtggagaggattgtcttgtaggtacacatgatttgggcattttaaagataggagaaaaacatgtctacaaggactgtggagttagctaattattgctaaattctgttgatgcccttcagaagaataatgagaaactgaggtcaatcaaaaagcaattaagggagaagtgtgagatccagtgagacactttggtagtttacaaagaggtccattctcccgcagtagaagcgtggccagaagga

SEQ ID NO: 419523 - DNA, 473 bp, Homo Sapiens
tttggcacggctccttgttacaacccatgggcactgagccagaaatctgagagtcccttagactccctcactgcttcttgtccaaaccctcatcatccatgcttggatgccagcaacagcctcctcactggcccgagcctcacggtggtcctgggccagtccattctcttccctgggccagacagagcttttccaaagtatagaactgcccatgtcacttcctgcttcacaaccttccgcgctccccagcgcttgcaggacagagcccaaacttcttagtgatggtcaccccagggctgtgcacgttgctggccttcacctcacctgcaacaccccaattcctcctcttgggagacccctccttaaggactgccccctgtactctatacacgtctgtggctctaaggagcctgttttctctgtcctctgtccactgcgaacattcttgtccttgtccttgcgtggccagaagg

SEQ ID NO: 419524 - DNA, 119 bp, Homo Sapiens
ttatggttttagaaggcaatacaggaatatctatataatttcaaagcacatacatcctttgtcccattttaggtagtcactccatagcaacagaaataccatgaggtagggaggagtga

SEQ ID NO: 419525 - DNA, 192 bp, Homo Sapiens
agcccaaagtgaaaattacccgttcttactcaaggctgggttcctgtttattttccttaccttctggcaactgattctcaatagacatccagagatatctagcataattattcactctgctcaaatgcctagctatttggaaataattctccatcagccgaggatgctggccctcagaagctctgtaagatt

SEQ ID NO: 419526 - DNA, 193 bp, Homo Sapiens
gtacaaagtgaaaaatcacaggactcagtgcttaaccctaacacaaacctttttgaaataaattttatagactggtgattagcaagtccaacaagcatacccctatctatatctttttaaaattcaagttcaaatgaatctgtcagtattttaatttctgctgcttgaattaggtttacccaaaatgcctaag

SEQ ID NO: 419527 - DNA, 580 bp, Homo Sapiens
  misc_feature (44)..(53): n is a, c, g, or t
agcccaaagtgaaatagaatataatggctgtttgtattaaaggnnnnnnnnnngagaaaatgatgaaatcctaatgcttagaaatgtttggaatgccacatgggttacaaagagtgaacatctagtttaaactggttggattctttctctcacagaatgattaaagttgagcccagaagctcacccaaacacacatatttgcctaaatataaatccctgtggaatgttggagctataatgtgaaaaacagtttctgtgttttggtattttctctaagactgacctacagctttcttatcacaagttttgaagcaatacttataacatagatgataatttagagttattttttactttgctttttgtgggcaatggggatggggactgcagtgaagatgggagagaatgaggtgtggccctcagacatagtgctgtgcaggaagcctactacttcagaggctgcccacagcctcacatacaacgggtaataccagaattacatgtttgaaaactagaaaatgagaagtagaagccagatgaaattgttacaccaagtttttcttttttcactttgggctgt

SEQ ID NO: 419528 - DNA, 362 bp, Homo Sapiens
gatctaagatccccgtcagcattccagcaggggcccacttggttgtccgtcattccagtacctttacatggctgggtagtggactgggttttccaaagagaagggtactggaatggtctccccctcctctgcacacacttggtggttttaagtctgcaccttggcctgcggtggcctccacggctgggaatgtgccatcttctcagcctcagccgggtcagcagttacggggtcagaaagagtcagctgaggtctcactctgtgaagtttccctgacctcatttggacctcctagactgggccaaggttccccttttctgtactcccatgccgtactggggtatggctctctccagtgcggg

SEQ ID NO: 419529 - DNA, 459 bp, Homo Sapiens
acttagttcaggcggattgggccccagcctaaccagcaacacaaaaaacatgtaaatcccgggaaagtctggtgctcaacagtctggggcgggtttagaatctaggcctccatctgaaagacagaggaagtgcctcacctaaagcccctagggtctcctcactcacacccctcggccatctcacaggggccggtgtgtaccaccactggccaggcggaggggaacgcgccccacagaggggggaccacaggcccacaggcttcggcacacaccacacgagacgcactcaactttcgggctgtgacaggccactacacatcccagcacaacgccttcaactcagagctgaccaggtggaccccggaaaaggagggggcttctctcgtgctctcctaagtctctctatagggacaaagaaggaaacctccaaataatgctttattacatgatactggtaag

SEQ ID NO: 419530 - DNA, 198 bp, Homo Sapiens
cttcagctggaccacgggtttccatgccatgatactggctcttgaattaacttatgcggacaacatccacatttatgcctctagcttggcacctccaggcgggtaacccaatggcccacctcaaactctagcgggagtttaactggggtaccagggatgttaccggcccaaaaccaaactctcgaggggtgtcagggt

SEQ ID NO: 419531 - DNA, 143 bp, Homo Sapiens
tatccaggtaacagggattgtcagcttaaaaggtgccattgagagataggacctggtcagcacagttaattctcagcactgtttcaacaccaagacagctggacccccgagagtatgttttgggggttaccgagcttgaattt

SEQ ID NO: 419532 - DNA, 197 bp, Homo Sapiens
accacccattcgagactagggacatccagagagtaaatatttaaaattatggtgaaatattattttatcccagctctcaagtccaatcttctcttttcggctaaaaataaaattgaccaaatattttacagggacttaaagaggaaacttgaaaacagaatttattatggagaaaacactcgggtgtacggagctcg

SEQ ID NO: 419533 - DNA, 339 bp, Homo Sapiens
ttgtggacataacacctgtatggttagtgtggattgctgtgcagcaagacacaatcaagtctgctcatgggggaatctgtttggctaggaaaagcaaaaagacgggagactagatttctggcctggccctactcctgcctgtaagtggacctctcggggcctctttctacacctgctaaatgaaggtgtcagtccaacttatgtcaaaaccatagcaatggattaccaaatgtaagagataaatagtgcacaatgatacaaaatgcaaagagagtaagaggatattcatgggaacccatctttccaacctgtaatggtttcataatataatttcatgga

SEQ ID NO: 419534 - DNA, 122 bp, Homo Sapiens
ctgggacggatttgggaatgagttggtttaatggggtctctgaaggctatggagtcaaagacagtaagccaattagagggcacggggcaaacaggccccaaatagtattcatatagaagggt

SEQ ID NO: 419535 - DNA, 142 bp, Homo Sapiens
ttccatggcaaagtgctctcagctgcagtttgaaagggatctttgaaagccttttccccaacacttccagccattggaagctgaaaccagcctcctggacgccccttgccggaatgggcagcatcactcagccagaacaacg

SEQ ID NO: 419536 - DNA, 147 bp, Homo Sapiens
tgacacccatgagaggggcagagcacagaaccaatctctattaccaacaactagccaggtaagaactaccaaccacattgttatattgaatcatgcttcatttccatttgttaccgtaaaattcagggaagcaccttcaattctttt

SEQ ID NO: 419537 - DNA, 129 bp, Homo Sapiens
tgacaccatgagatgatatatttttcacagtaaacttcaatcctggctacttgagattatgatcttgattgccttctgatcatgtcgctcaagcttgacgatttctgctaacttgtatttcttttctag

SEQ ID NO: 419538 - DNA, 281 bp, Homo Sapiens
cttttacatcatgtcttgccgtcatgggggtatcttcaaagctcgggtaggtaatatgtgaaagttgacacacccctcccaaaacacaaatggcaaggtggaagtgtgtataggccatgctgggaagaataccagatcagttccacgggagcatgcctgcgtcttccttcctttcctcctgagcttgtgtgcttctcacttgtagttatgccttctggtacttctgacccagaggcacaggaccccagagcagaccacagagctggccctgtggaaaatta

SEQ ID NO: 419539 - DNA, 497 bp, Homo Sapiens
tttaccgagggtgagacttagcattatagatagctcgtcttgggttacacaaatgtagtgggcgtaaaagccccgagaacagattgatgtgctgcatgtagtaagctcaaatctatggtgtactgcattcgactacttggagcatctgaagcgctgcttctcatggctgggcattctataatactcgtcgtcagtcagatgtggcattagcctgagatgggagacacaagaaacattcccacatctgcttcctgcttttaactcacataaaaatggccagtcggtttaacaaagctattttcctaaagggaccagagcttctattttttctgtacatttaaaacgtgccaaacaaaatgacacatgttgtcaacaagatgcaacagatatcttcccacaaagcctcttctttgtaagctgtcatgccagttctgttgatgtagttaccttccgcaaagaccagcggtcttgccagggctccaccctggaaaagctca

SEQ ID NO: 419540 - DNA, 467 bp, Homo Sapiens
tactgtcacatgggtgtagcggcgtttcagagcctgggacatgacttcagtgcttaatttaggtgctccttgtgggtgtcttgattcccatgttgcagttctaagcttcatctatctatgatgttcttacctagaaatgtctcgaccatctctgttactctgctcagaataagaagcaagcaaacctggacctgcttttcccatctccatgtaacagactcagacctatgaatgaattgataacaaaattgatggaaaagcacttcacagttgcagggctacgggatttctcggcaatttaaatttaagtggggatgggggagagttttagctaggatattcagtgtatacactgagacaggtactccagtactgaaccagcagtgaaatgcaagaaagaaaacaggaacaccggtacagcactcttccaggagagaaaagagctaaaaaagtgggtggtgaaaatc

SEQ ID NO: 419541 - DNA, 294 bp, Homo Sapiens
tacagcagcaggagggagcccacggatgaggtgtatgtggcttgaatagctcttcagatgagaagagcccaatttgttcaaatgtctgctactgaacctggccatggaggctgatgaatagggccataacatctcttcccttcactcagtggagtgcaatgggaagtctgttgtctgcctttctgctattcctcatacaaacccaaatagaaagagtgtggtctccaccaaatcatattgattcttagaagaacaaatatggtagtcctgctggtgttccaggtagtaactgag

SEQ ID NO: 419542 - DNA, 408 bp, Homo Sapiens
  misc_feature (375)..(375): n is a, c, g, or t
tttcacaggtgactaagaagtatgcatctgagcagtcagctgagggcttcatctcttattctgaatgtgtcctatgaaaatgagttcatttacttaaattcctccaccagattctaatgagcaacgcatatttgttctaccatcttctcattcctttattgcacccgctttagattctgatactcatatctctcttcccaacatgttcttgcaggtccaacagggctcaatgttgatataaacaagtttgtgcttttgtcaatactctcaatgtttatttagtttattttttgaccaggcagatagggagcaaaggtgataagagcaataaggttctttgttccatctatgggttccttgactttagtgactatngctagacaaaacactttgcttccaaatttctga

SEQ ID NO: 419543 - DNA, 293 bp, Homo Sapiens
  misc_feature (64)..(166): n is a, c, g, or t
gatcgagccggtctactgtcacaggtgcatgccacttgtataaaaacagtgataaaattaatannnnnnnnnnnnnnnnnnnnnnnnnnnnnnnnnnnnnnnnnnnnnnnnnnnnnnnnnnnnnnnnnnnnnnnnnnnnnnnnnnnnnnnnnnnnnnnnnnnnnnntcaattattagaaatgcaagaaaggtgtctttgtgttttctggttgaatttgcccttttggcagccacagatttaaagaatctatagtttttgaagctgcaataatttaatcttatttggatttctt

SEQ ID NO: 419544 - DNA, 549 bp, Homo Sapiens
  misc_feature (83)..(127): n is a, c, g, or t
  misc_feature (167)..(224): n is a, c, g, or t
  misc_feature (365)..(373): n is a, c, g, or t
ccgatcgagctcggtacctacttttcacagggtcttacagctattgtgtattataggaacactggatttaatcaaaagatagnnnnnnnnnnnnnnnnnnnnnnnnnnnnnnnnnnnnnnnnnnnnnataggaattgcgtatacttctctgagcctgttctcaaatnnnnnnnnnnnnnnnnnnnnnnnnnnnnnnnnnnnnnnnnnnnnnnnnnnnnnnnnnntcccctgccgtgagatctcctgagctgcatttctgtttaacacggcccccagtttgtcagccaagcagctcaaatatatgaagtctaaaatgaaagtaatgaccctttatgatctctttctattgttctcaatcagttccnnnnnnnnnagttacctaattctgctcacggtgtgtccctgttgttcagattccagatgtcagtgattgtggactcctcctttttcttaacagattacataatacctgcagctgccaagtctttgtctgtgttttcattatttcatcatttacatcagatctttcttttctcttcccgttgacac

SEQ ID NO: 419545 - DNA, 385 bp, Homo Sapiens
gaacaatagttgggctcagactgggttagaaacagtatgaagcgtcaggttgtatctgcctggtgtctggtgtccccccctgtggtatcgacactcgtgatcgtatgttacggtcacaactgtatccgtgctgtaaagttttacataagaaaaacactgacaaaagttaagaccggacaaaagcagagacgcatagtggaaactctgagagcgtcccacagatgacacttctgtgtcctcaggacgcaccatcctctcagcacattgatgtgtatcaccgaccagggaagttcacctgggcctccacatctggggctttgattacattggcctggttgactcaatcattggccaggcagtggagtcatcctccagccccccagtc

SEQ ID NO: 419546 - DNA, 326 bp, Homo Sapiens
atgcttgggtttcagattaacagcatctgaatggtcagatcttgttgcttagtacagaactagaactggaggtctattatgtctagttcttgctagatggacacagtagcagtctgagctctcttttccccacactgaattcacaaccgtgtcacttctgttaagcaattagggaaatactggaatttggattactggaatgagactaacaagaaggattcaaggatcttagaaaactttgactctcccttgactctccctctcaacccttaagcaacctccccactgattctcctctccatgcttcccttgtgactggaaacaaa

SEQ ID NO: 419547 - DNA, 228 bp, Homo Sapiens
tttacattgcaggtcaaatagttggaagatattactccgatcatgttcgggacatacattgtggctgacgaatacatagttgttaacagtttaattgctattttatagtaatgatcttttttccctctggtcaattttacatttgtctattttgtgttgataatctgtggtcttactacaatatgtccagggatgcatttttttcgtgttgatctcaatcaaatcatt

SEQ ID NO: 419548 - DNA, 101 bp, Homo Sapiens
tagagatcatgaggaacgtatacaaaatatactggttccaccttcatattatctataacgaattactcaccatattatcaaatcaatctctaccatccata

SEQ ID NO: 419549 - DNA, 314 bp, Homo Sapiens
tacttccacaggataaccatctttaatacaactctggtttgtctttggtgtataccctggtgtctacccatctccagggatgaacgtgaacaattcatcgtttggtgtccccatactatggaactccattggttgaaattatattcaatcttcaaagccaatattaaatgttttctcgctaaattggataaccatatgatttttcttctaaactggaatgctttaaagagtggaagagggcctactaatagttatcctatgacaacagatataaactggaggtatcccacagaaaccaggacatatgtttgtcc

SEQ ID NO: 419550 - DNA, 159 bp, Homo Sapiens
tacttttccacagtggaagtgtaaaatcaagggagtggggaattctactccaaggtatcgtcatagctagaataatacatccttatgctatcccactgcatatgaccatggccgtagaacaagtacaattactacactgaatgcgtaaagtgtgctggt

SEQ ID NO: 419551 - DNA, 337 bp, Homo Sapiens
  misc_feature (172)..(184): n is a, c, g, or t
ggtcagatactcataaatacagacctgttttcacatacctagtacataatcttacatcttgatgttgagactagtaaagaaaggttacttctatgtatttatctctcactgaagaaagaaatgaaatttcaatagtccaaattaagtcccttctttgtaacttgctcttgcnnnnnnnnnnnnnaaacctctctggtaatccgctacttccagggtagagattggcagtcttatttggtggtattaaaagagtgtccttttggtagggatgctcgggatctatcactttcccttttccagcaaatagagggggactaaaaaacccgggggaaaagta

SEQ ID NO: 419552 - DNA, 188 bp, Homo Sapiens
tgatcgagctcggtacctacttttcacaggaatctttgatttatcattcaaatgttctggttagtgctgtgtagaacaatactctctgagcaagtagccataagcacatgaattttcttgccatttagcaagagtgagagaattcactttctcccttgacgaaactgcagtcaatagggtaaggaaag

SEQ ID NO: 419553 - DNA, 566 bp, Homo Sapiens
  misc_feature (427)..(488): n is a, c, g, or t
gctcggtacctacttttcacaggtttacttgctgccagccactgtgcaggttatattcatcaacatacttaatagacttttacctcttaagttacagtttaaatactgtgataatctttaggtaagtaaggtaagtaagtatacctcatgacaactggttctcagcaaaattactttacgtctgaatacaacaacattcaaattcacctccagctctgcctcatgaccatgtgctctgtggtaaaagacagccccacttacttcatgcctctactggaccaactcatctgcagagtcctcccacagacagcatctctaagggcatggacggtgtcctctgcatctctcctggccacacttggtaagttgtgacagacagacttcaaaggtggccccaggcccccagctcctgtaaatcccatcccannnnnnnnnnnnnnnnnnnnnnnnnnnnnnnnnnnnnnnnnnnnnnnnnnnnnnnnnnnnnntgggctgtatcacagaagagttagcccctatcttataagagtccctgactatactgatggctctgaagaagtaaagct

SEQ ID NO: 419554 - DNA, 415 bp, Homo Sapiens
  misc_feature (307)..(348): n is a, c, g, or t
tgagccggtcctactttccacagggcagtaaaatatgttaatgatggtgtaattgatcatggtgtagagcagagatatatggttgtttctagggaaaatatagaatgtatacttcaatgtgataaattctcagttatgaaagtgttactgtcatcctcttattttgcagatttgtttgggtataactggtatctgggaaaaaattaaaactaggttttagatggttttacagaagttaatcaaaagctgtttatgtgttgtgtcagaaatgtgctgaattgcagtggctttgccactgataacgtcnnnnnnnnnnnnnnnnnnnnnnnnnnnnnnnnnnnnnnnnnnattacgtgatctacacagattttcttatgtagtatatacataagtgtcatgtggtgtgcacataacg

SEQ ID NO: 419555 - DNA, 512 bp, Homo Sapiens
  misc_feature (305)..(337): n is a, c, g, or t
  misc_feature (345)..(451): n is a, c, g, or t
tccatacttttcacagagcatatagatcattcccagtagtaaagaggtcaagaggtatggctaaaaacctcacttatatatgggatatgggacaagtgggagagaactgacttatctcagtgagtccgctatcataatatgtgtcatggcatgatcgccttcaatcctcatgacaatcttacagagttacccgtatgaggcccactatgaaagatgaggcgcagtgaggttagattgacttgcctgagatctctcacccggtacctggtggagctaaatcagagtaagacactcaaactgtgttnnnnnnnnnnnnnnnnnnnnnnnnnnnnnnnnntgctgtannnnnnnnnnnnnnnnnnnnnnnnnnnnnnnnnnnnnnnnnnnnnnnnnnnnnnnnnnnnnnnnnnnnnnnnnnnnnnnnnnnnnnnnnnnnnnnnnnnnnnnnnnntaggtcacaagcataaagaatcctcccagcacgtggtaagcacccagtgagcaccccacgc

SEQ ID NO: 419556 - DNA, 121 bp, Homo Sapiens
tgagcctggtccttctaaggctctagaagctcaaggagtgacctacagacagtcatctaatatcatagctttgaagggtcttggacagcaattgtcaattaggggagagaggctttgtacc

SEQ ID NO: 419557 - DNA, 581 bp, Homo Sapiens
ttcctactttccacgaggcgtctgtgataacagtctttagaaatcaaacaagtgtgaggaggttatgtttattcagcaacaatccccactccaaatcagttgatactgacctccaaaacatttcagtgtcttctaaataaggtttattcaccctactgaatctaaatgtttcgaatgaacctctaaacaaatatacatcttctctttttcttttttattcaggtgaaatttgtataacatgaaattgaccatcttaaagtgaaaaactcagtggcatttcgtacattcacaatgctgcgaaaccaccacctctatctagttcaaacacattttgcattttcagttttgactgtgttccactcactgtgctaatgctgactgaaggctgaagagacatcatttctgagctcaagaaactcccagactagcggggaagacacacttcgacaggacgatttccagtgctctgtgttggtgccaggacagaggagaaaacagaaccctcttggatgggaaaggaaagctcctcttggggtagggaaagtgttggcaaaagtgaagcttatcacatctgattagat

SEQ ID NO: 419558 - DNA, 467 bp, Homo Sapiens
tcatcgtacccatcgacagtaaagagttgaatacgtccgtaacactactgaaacttaattagcgtgcggaccagtcgagatgatcctgagagatccgagctcgaatacatcttcgtgggcattagtcctctgcctgatgttgagaagtttaaagggattgctaagagattaaccaggacagacaaggaagggctacccgttttatgactaagaggttacaggtgacatttggagaagtcattgctataaacctcatgaaggtggatgagaggagtcaaaagatttaaagtcagagggtaatgagattaggggagtgtgattgctgttcggtgagtgtaattgaaaaggttaagaaaaatcatgaaaatttagaagtggcacataggaccaggttgaaataactttaaacttctcaactttaaagattttcttgtggaagaaagatcagaagtgttctcatcataatt

SEQ ID NO: 419559 - DNA, 153 bp, Homo Sapiens
tgatttacaagcgcatacgtagtcaagagtcctttggtgtgagtgctagaaggatcggaagaaaaagaaaagcaggacaaggtggtatcaggaaaagaatgactagatggtaatttgagtctggggtagggaccagagggggtaccgagctcg

SEQ ID NO: 419560 - DNA, 428 bp, Homo Sapiens
tactttcacaggcgacacaacaggaaaagttgtaggtacaaatttggaccaaactttaaaaaggtaaagtaggatgtcttctgaacccaaccaagtggtggctgtggtgcttagcagtatcaactgtatattatttcttgctatgttagcaaagcatccaaagatcaatggtgtatgataagcttttctgtgggtgaagaactcgggagtatcagactcttctggttctgagtctcatgaagcttttcacttctgagctgaaaggatgctctttgtgcttttcactattagtggtatagtctttcccgaaaatctctagcatggtggcttcagggcagctggacttaggtggtattttggggctccaggagagcttggcagagttggctttttaggacttatccttcaatgtcacataacatcacttt

SEQ ID NO: 419561 - DNA, 453 bp, Homo Sapiens
cttttccgggcatagtggctgcgagtgaagtacaatgtttatgtatgtactctctgtataacactgaagatgatgaccagggttctttgaggtcaaccagtctgtgacctactgcaggaaaggaggtgggattcatttgggcaggtccaccaccacgcaggtccagagaggagcctcaggggaagtgtgttaagagagagagcttgaggtgggctctgctccccaccttccctgttccctgtagcctctgtggtctgcttccaggagctggggccattatgtaagactgagctctgcccgtgccttttaatttccatttactgtagagtgagaatctggtctgctactcagtgataattcattcatttttcaaggctcatgacaatgctttctttctcaagccttgtgcttgcaatttcagcattttaatgtgtatttaaccctcttagttct

SEQ ID NO: 419562 - DNA, 366 bp, Homo Sapiens
agtgtaagtactgagctctcctgatgtctgtttcccgtgagggcaggcgaatggagatgaaatgacagaatgcatgtcagtcagcctggtacaggtgctcagaaaaggctggccaccttccttttagctctttctgggctggaactggcagtggagggtagcagcgaacaatgggccctgtacaaaggaccctgcctctcattctctaacatgtgcacacacgcaagctacatacgtgtgctgagatgctcacatgtgtgcccagacattcagggacaccctcaacatacaaagacagtcaggtgctccgggcacacatttatccacacgcaccttccacaccccacagccctggagcggacaagg

SEQ ID NO: 419563 - DNA, 127 bp, Homo Sapiens
  misc_feature (70)..(83): n is a, c, g, or t
ggcatccctcttaagagtcccatgtggtcccagcttccaaagcaccacataatttagctcttttctttcnnnnnnnnnnnnnnggaaaccattattggacgttttccctttttctccccctcttgtg

SEQ ID NO: 419564 - DNA, 481 bp, Homo Sapiens
tcctctttccacaggctggatggcatagccacagctgtcaaaagtctagtatcagtacagaagctccccatataatcctaggaagttcctttgctagggcaggggtgagttgataaaccatagtgggtgtatattgatgtggtcaagagtctttgagaaaccactttgtggtgaccttttcaccaacagactaaggtaatactcctgacctttagctcaggagttcgattagagaagatagaggaacacaggaagcctgagtttacaatcatggttgtaccacctccttatgtgaccttggggacatcaagtacctcttctgcagttctcattttcttatccattaaatggtctcacatgtaacatgatttttaaggtccttgtcaatcacgaattctatatatctataataactcctaaaagtacctcatacaagttttgaatagattcagcttgtctgtatctgaaggtgacggttacc

SEQ ID NO: 419565 - DNA, 225 bp, Homo Sapiens
gcaatcgctcctgagttggggggttgttcgaaatgtggttttgatagggtacgtgattattttaggaaatagattcatttgtgatggcatcaagttccaattctattggatgtgcattgtgtatggttttataggaaactttgtgtgtacaagggtatcggactaatcttttagttgtcaaaaccaggggtagacaatacatgtcattcacgcatttaaaacaac

SEQ ID NO: 419566 - DNA, 490 bp, Homo Sapiens
ggctagagacatatcgagcttgtcattgccttaaatcttgcacactagctatggctttgcctggtacagtcagctcttggctataaatatctgcttcttcgtagaagcctaactcaggttgctaatcaacattagaaaattagtcatgctcgattacataacacacattctctggaagagtgcattttatggtcagattctttgttgtttatgtattgactgtttattgactatctcttgatgacagaatctaatttccaaagaagaaggaatctcatctctcttcttcactactgtatctccatgtcctaaaagagtgtcaggcaaagagtggatacttaaaaaataaaccagcaaacaagaagtaaaataaaatctctactaaatgaacaaattaataaacttccagaactctaagaacacttttcccatcaaaactaaaaataagactcccaatttcaaatgcttatagaaaggcatgtatatgtgc

SEQ ID NO: 419567 - DNA, 104 bp, Homo Sapiens
ctgtttgctctggcccatttataaaaaaattccttagttatgttatacatcagagaagatgaactaggtctaaccagtcatagagatataacaaaatcagcaga

SEQ ID NO: 419568 - DNA, 177 bp, Homo Sapiens
ggtaccattttttaataccaagttagtatttccctaacaagttacacattaaagctctgctgagattcagtcactcactcttgcatagaaggatgaccagtggtgaaatgtctagaaaccccaaaatatgatgtacattgaaatgaactgagactctttagccctgatggaaaagta

SEQ ID NO: 419569 - DNA, 106 bp, Homo Sapiens
agtgccatgtctccttctgcgtgatctctgttgatggcactctggaattgtcctcagattcacgtcacttttagacatagcatttattatccctgtgcgaatgatg

SEQ ID NO: 419570 - DNA, 142 bp, Homo Sapiens
gttgtcatttagtcagtacagcctgcatcaaatcacttcccttctcaaagagcctccatcccagaaatgtgctgcactaaagtttcagaatcaattcataggatagccggtattgcacagactttgctggtagtgcgtttta

SEQ ID NO: 419571 - DNA, 480 bp, Homo Sapiens
tatttccacaggataagatgaaaatacatttcacagaacactgaagatggggtgggagttatatggcgacaggtaggtaattaacatctatcaagttccttccatttgccagacactgtgttaggcactttacttccctttttgcttctttgatcctcccgacaacctataaagcagatatcacttacctcactttataggcaagaaaatcaagtcacagagagaaatccacccaaagttctacttctagcgagccttcaatctcaagtttgtttgtggttatacctaacctctttcttctaatctttattgctcatctagctcaaagggtttgggtcaatgctgataacaatgtcaaacattgtgcttttattcatgcactcgtcctacaaatatttactgggtatgtatactaaatatactatacattgtaaggcttgccattctaaaggacctacgtggtggaggaatagcaaaggc

SEQ ID NO: 419572 - DNA, 270 bp, Homo Sapiens
agagtggtatgcaaggactggaagagtcggatgggccgattggttatatcacggtcttgtggttgggaaacacgctgagcggtactccatctcctcacttctctcctccatggctccaagctctctgtgggttctggtattactactccatctcctcacttctctcctccacggctccaagctctctgtgggttctggtattactactccatctcctcacttctctcctccacggttccaagctctctgtgggttctggtattactactc

SEQ ID NO: 419573 - DNA, 362 bp, Homo Sapiens
gaggagaagacttaatactattcagtaactaaaattataaatctctaaagctttctttaaaacaaaagaaacctaaaatgcaatctgaatgtagcagaatcgttttccacagaatagtcacatcatgaccacagttgacagcaaatggtaactggaaacagtttgttcttctacttgggaaatgggcatcaactggctaacttttaaaaggagtgaatatatctcttaggttttgtattgtattagtcagttttcacactgctgtaaagacactacccgagactaggtgaattataaaggaaagaggtttaattgactcacagctctgcatggctggggaggtctcaggaaacttacgatca

SEQ ID NO: 419574 - DNA, 419 bp, Homo Sapiens
tacttccaggagaggagggtagatggcatgtttcctgaactgtgttaacaggaagtaactattttaaaaacacaggatgcattttatgattatgttttactgtgtcaacgaacattgtatctgtccacgttcactttttgactaccaagcaagtgcatgtttacaattttgattcacatccaattcctgcgtagaaagcactgtgactcatctgaattttgaaatgaagtaatcatgagctttttaatgttacatacaaaggtatgatattgaaacaattgcataaaaatgcaattttcaaagcattttcacttgcttttatagattagtggaagctaaaacctctgccttgattatttgcttacttaatcaatgttaggtagttaccatctcttggctaatgtttatcaatattatat

SEQ ID NO: 419575 - DNA, 236 bp, Homo Sapiens
  misc_feature (178)..(178): n is a, c, g, or t
tactttcacagggcacacaagtgaaatctgaggacaagttagacatactgtcgcactggttgaggtctttgtatgtgacgtccttgatgaccacattgtaactctcccttctccttcaggtcctttgtggaagcaggagggcccgtcagtgagagcaaggttgcatctgaccccaggncatgttgtatgtcagggctgagtgatgctcagatggttctttgtaaagatagctcaga

SEQ ID NO: 419576 - DNA, 301 bp, Homo Sapiens
tcacagggtcagatgtgaaagacgagatcatagtaaactctaatagagatcatgtcactgtgttggagatacgagataccacatgactgtcatctgtatgtaaaaagtgtaatcctagcgtctcattagatcgaacgtttagagacctgtgtatgagaatatactgatagccaaactagcattatattgccacaataaggcttggaccgtcgtaagaacactatgaagtctgggaagaaagagtactccattaacaaatcacacacatttagttgtgcgctaatcactttttgggcgggag

SEQ ID NO: 419577 - DNA, 528 bp, Homo Sapiens
  misc_feature (163)..(272): n is a, c, g, or t
tacttttccaggcacattatgcaatatcatttacattagtaccctctaggatgaatacttaggtataatctaaccaaatataaacaagctttctataagaaaagcagaaaacactgatgaaataatgagctatcaagccacagaggaatgaaagatgcagacnnnnnnnnnnnnnnnnnnnnnnnnnnnnnnnnnnnnnnnnnnnnnnnnnnnnnnnnnnnnnnnnnnnnnnnnnnnnnnnnnnnnnnnnnnnnnnnnnnnnnnnnnnnnnnttgaagagagaaccagtggtgtgtgcctcaccaaaattccaccatctcttaaaaaacaggataatctgctgccagtaataagtaaacattagtgaatagcaatgatcaggggcacacaaataactaccccttaacccacttattggcatgacttacttgacccttaggtatcaacctaaagcccttataaagcatctggaagtaaacttggttgattattctattttatctaaaaattctgtgaacatgttcagaa

SEQ ID NO: 419578 - DNA, 532 bp, Homo Sapiens
tacttttccacggggaaaaagaccattctagcttttttatagagaactggctgctgcagaaagtccacatgagagaagatggtggcttggatagagtggttagaggttgaaatggtgagtagtagtcagactcaggatgttttaaaggttgagccaataggaattaatgattgattgattataagtaaagaatggaagatgatgcctaggttttggcctgaacaatttggtgagagagaataccattaattgaggtgaaaagcaatgaataaagagcagggtgtatgtttgtcttggggaatggggggactgtgacaggcatatggattcttttccaagtttcaaagtcattgaattggttgagatcatctaggcagtcagtattgagcagaggtctaaaggttgagctctgagaatgctagcatgtagacattggggagagaaggaggggaaggtgtgacaacaaagaaaactaggagtgaggaacaataagcaaaaaggaaaacatccaggagagtgcattgtcctggaa

SEQ ID NO: 419579 - DNA, 204 bp, Homo Sapiens
ggagctcggtcccctttcgcgttatcaaacacatttttgcttgtagtattaactgagaaacttcaggcggaagatgccagtccttcctacgtatctgttcaacaaatctgcctcccgaataccagttccaacagcatagtttaaataaacaaccctggtggcaagaagtaggtggatccgtctagacgtcgaccttgcagggca

SEQ ID NO: 419580 - DNA, 117 bp, Homo Sapiens
ttcacaggcaactgttacaatatcactttcactgaccctgactcttatcattccaactcagactcatccccattgtgttgaaattaatatagacaataacaccgacacaccaaactt

SEQ ID NO: 419581 - DNA, 371 bp, Homo Sapiens
cccctgaatgagagcagtggactcatggcttatccagctctgtacactcagtttggcattcccaagtgctgagcactgttccagatgccacacgtggacactgaccaggatgggcactgactctagctgctcggaactctgggtctatagagaaaggctgacagctaacgaatgaatgacggtactatgtgatacgtattactgggagaaatactcagtgcattccccagacgagcacttatcctgcttgggtgtggggagtgtgtgaggcaaagctcccaggagaaggcatgctagtctattccacagtgccctgaactctatctatggttccttaggcacctgacctagctccgcttggagctgtgtat

SEQ ID NO: 419582 - DNA, 182 bp, Homo Sapiens
cccggtcatggggactgtccctgtaccctcatggacttcccctgtcttttccacaggggtctgataaaaatgatgcatgtttggtcccatttttgacctttagctcttgacagtgtctttttaagttaacaaaagaacatagaccatgttcagttcgttgtgcacggagtctgtggtcattt

SEQ ID NO: 419583 - DNA, 142 bp, Homo Sapiens
gtacctcttccacagggagattacaatatcttatttccagtcataagtttcggttgttagcaggcaagcttgtatccaaaatgagtacaagtggtaagagctcatcctatattcagaaacatgtaacatttggttgcagttg

SEQ ID NO: 419584 - DNA, 156 bp, Homo Sapiens
aatagaataaatggggactatttccttcttggccttttctctgaacaagttatataagggcaagacttaccggtaccttaaagcttggatagtatgggccggagaaaaccagcaggtccttagaccggatcttaaacataaatctaacaaagtcag

SEQ ID NO: 419585 - DNA, 144 bp, Homo Sapiens
tcaagtgatggtaaaggggtcttttattggtagagcaataaacattcttcaaactcaatggttcttcttactcctcacattcccactcaaagcataccgggggagtaaaataagaaagaaaaagaactaccccggtggaaaagt

SEQ ID NO: 419586 - DNA, 139 bp, Homo Sapiens
actttcacaggtgacgcgtttccttggtgaatacggggactacattcctgagccttgggatataccaatgcacgactggctggcctttccttctctagaaaagtcagccaagcataccaccaagagtggatcagaattg

SEQ ID NO: 419587 - DNA, 117 bp, Homo Sapiens
ccacacacccagcccagtttaatttctaattcaaagtaccagatgcacagagattaaagaggcaaacagttccacaagattatgaccatgaacagttctccccccggttgggggtac

SEQ ID NO: 419588 - DNA, 412 bp, Homo Sapiens
ttactgatggcccgttatcggctatcttgctctcttgctctcggagtcacatatgcacggtggattgttgtctctgtccccttcacctcccttctgtcgaaggatctcacgctcatctcttgtcttacttgtctctcgtttttccttatccattgaatctgatctttgatatgtcagtctctgttctcatcttcctttttaacgagtgtgggtttctcatgttatcttgctctccttttgccgagcgtatttgcatcatctattagctgcagttaatatctgctaaatcaaaccatattggcttgaatagcttccattgatttgtgacttaaagaatgcttcagctgcttggccctgctctctgtacgttctttgtcgccagtaggtttaacttactcaaaaccttccttgt

SEQ ID NO: 419589 - DNA, 476 bp, Homo Sapiens
tacttttccagcgccattacttggttatttgtgtgttgtttctctacctagattttaagacagcatttccaacatacaacagtatatctgctcaattccttcacataccattaatgagtaatcctgaggtattgggtatcatattttatttttaacgtgggagataatttgttacaaagagtttggtttcttggaaaaacaggaggctcattaggtactggaaaacactcagccaaggtgataagtggctgctttgcacccaagaacacagaagacagtaacactgattccatgaatggtggtgtgaaataaccatgtctcaaaatagctcagtcaaatgccaacgttctagataccaaacaaatatccatgaagtcacatccctttaaactctaccttttatgtcagctatgacaactttacttttttcccttaggacttggttaaattattatttacctgaacagagaaataca

SEQ ID NO: 419590 - DNA, 160 bp, Homo Sapiens
ggaccatctccagtgggcaccctgttatgtggacatcagctctccccgtgcaggctctgtaaaaggtgcaagccacccttttccatccatgtagatgcctcagcatctcagagcccatgacaatctactctcccctgtgtgaatggcctgtggaaaagta

SEQ ID NO: 419591 - DNA, 372 bp, Homo Sapiens
gaagaggatgagagtaaattatcatagacaactattattgctcgatcaggctaatacattttatagccacgatctagacctctgcatagttctgtatgtgtggtggtggccctcaaaatgatgcttatggggcatcagaacctcctggggagcttggtgaaaagcccatgaggccaggattgatgggggtcaagggaaagaggccccaagggaatatgaacctcatctgtaattgcagtagacactgttccacaggctcccaatacctgttcctcatttcttcttttctgacggagtctgattttgtttggattgcctatgtgcccagctatattctcttacttagtttcccttgcagctaggggtgactgt

SEQ ID NO: 419592 - DNA, 422 bp, Homo Sapiens
atagctgtgccaggactggtctgcagtcaggagggcaatagtggcagttcatgaagcacccgaagtggactgtgcttgaaggttattcttgcgacctgcccagcagggcggtgcgacttgtgcaaggaaggcgtgagagagtgcaggcagaatggagggcacgtggtcctccaattctggggtgaaccagagtctgcaatttggttacatgggggccagcagcagatgagcagtaggctggctgtttccaaggcaggaggcagcccagcatctggcttccagactctagccctgcctgggcagccaatgggaagccgtttacccccatctgtaaaggagaggtgtggcctacttcagggattcttgtgagctttaaaaacagcaacttatggcagcttgcttggagctggagtcagatcaca

SEQ ID NO: 419593 - DNA, 209 bp, Homo Sapiens
gctgtacgaagtattttatgaaaatttcactttttgtgttctcgagaatataaaaggatccttttgcgtcttatacatagaagtgctaaaaactaatgaacaaatggactcggtccacggtacgtcctagccaagcactgtctctgagaagaatgacatgccttcagtcatgaagtatctacaagagaaaggacatgttattaaggagg

SEQ ID NO: 419594 - DNA, 388 bp, Homo Sapiens
aactgggtccctgatgctccatcttggatgaaagcagaaatccctgtacccacttatagtctaatggaatacatcttccaatcataaaaccacatttcaaaaggataaaatatagttgagattttgctcatggttctaaaggggaacagaggacagaattatattgtacaatatggagaaaatgctttgcaaattcgtaagatcttttttcagtggcagttgtttcaggttcttagctttactagtattgacctactgtctttctctgttgctgtatttcacttgtttaccataattttcttttaaaagtacctcctctcttcttctctggccacacttaatcctctcttcccttcctgttttctaaattctattaaatcttatagcc

SEQ ID NO: 419595 - DNA, 152 bp, Homo Sapiens
tacttgtccacagggaggtgttggttgggcagtggcagtccattggggccagtgaaacttacagatgggcgagtcttgacaccaggtctaaggaagcaatgttcatatgtctcgcacggtgtggcttaagctgtaatactctgtaacacccg

SEQ ID NO: 419596 - DNA, 103 bp, Homo Sapiens
ggcggtccgagcacacactgacaagaaatcaataagcttttgaaggctgcatacaatctaatctgattttatccagccataaattaaaaatagttagttctgt

SEQ ID NO: 419597 - DNA, 102 bp, Homo Sapiens
tcactcgagctcggtacctacttttcacaggcctgttgggacaattacaaggtaaaagtaatgaacggttcgggcaagcaggaatcctaaatctgaacacaa

SEQ ID NO: 419598 - DNA, 630 bp, Homo Sapiens
aatcgagctcggtacctacttttccacaggtgtgattagtgcatgttgatgctgagcattaaggcaaaagactctggctgaaacgtcctctgtcgcagcaccggtgctggacgttgacctagattagctgttgtagtcccaggactcatcccctccccctgggtagcttctcggcttattagtttatctgctggccttctcccttgggacccgtacgtggttttaaaaaattctgacctgtcactcacatcagccggggcaagagtggcttctcactgcatggaggtctgcaggcagccgtggtggcttcctttgattcaacatgcttttcttttgggaaaatggctggtctttctgcttggtttcttattgaaactcatgtttggatttgatgactcaaggaacttacttacagtgtctaaccatcatgaagtttggtagtttaaaacctataggtactgaatttatttaaatgctagagtatttaaaaatggcagcatgcatatgtatataccccataagcatatgtaaccatttatttaaaataccctttggcgggatcttgcatgggagtcgggagaagactcaaaaatttaaatgtccaggtcacggatgtcgtgttacactggg

SEQ ID NO: 419599 - DNA, 107 bp, Homo Sapiens
ggtaaattcatttatcaaaatcttgacctgatctgaaatgacattaggttattctttatcttaatgtattaaacttaatgtgaacattcatacattttaccacagaa

SEQ ID NO: 419600 - DNA, 435 bp, Homo Sapiens
tatgtcaaggctatattaggtagtgcaattagttactttctgaattctctatttcccctatctttagcagaaaacttgggaaagcctaagtcattttccacttcttagccccttcctcctccccctcattttctaggcgaaaaatatgataagagagtagctaggataatgtctagcttggttttggttctctggtgatgtgaatttttcccattgttaccaaactcccactttttccacgtcgaaatacatttcatgatagctggagtatggcaacagcactcctgagttacaggcatgcgccaccatgcccagctaatttctatttttgtaaagatagggtctcactatgttgcctaggctaaaaccttctgataaggatattttctagtatctcatgtttagagcaaattactagaatatcaaggatctagt

SEQ ID NO: 419601 - DNA, 124 bp, Homo Sapiens
tagccggtccgaagtggctggagccagtatctatgagacaggagttgtgagcaaacccgtgatatcagcatgacatggtcatattgtttaatctgctttacaagaacaaacacttagctttaat

SEQ ID NO: 419602 - DNA, 120 bp, Homo Sapiens
acaaatgcactttaaacttaacaaccaataactgtgagacacagtggatagggagaaatttacatcaatagttgatagacactgtattcatttccaataatcaaccccataatcactcaa

SEQ ID NO: 419603 - DNA, 210 bp, Homo Sapiens
agttaggacggtattcatattccaacatgagtaatacaaacgctacagattcgtgggagggctttccttccttcaacaagcctaaacaatatttttagatactgccacattattaaacagaaaatagaaattagccagtagctgagttctctctgttcaaaacacagtaagggttgtgacatgtgtgtcaactaaaacatgattagtctt

SEQ ID NO: 419604 - DNA, 572 bp, Homo Sapiens
gtatggatttgctttgttaaaccaaaggcacaattcatacatcagtgggaggcacgacgagcaccagaacctggagccatgtgactagtaggagtgatctcaatccttggccaaggcctgctgcaggtgttgacatctgttctgtctaaaaaaactggttcgtgactggaaggaacttggggggcaacttgagaaacagacaaaaaggcaagaactccttaagtacatctgtgttaaatgatttctggatttggtaatgaactcaaggtgtttctgaatcaggtgaaaatggggaaaatgttgaggaacactttctgtttatgcccttttagtttctcccccacctcctatctccctccagggtacttctgatcacacatgtaagacttatctatgctggagccaagggtgatgatggctttgtgacggagatctcttaaaggaagatacgaattttaatgtctggataggtgctcagatggaaaagggtctgaaaggagagattctgaaatagaatgttctagattgaaaatgctgtggaaagtgggacgagtcgatcgtatcatgctatg

SEQ ID NO: 419605 - DNA, 101 bp, Homo Sapiens
tataccacaggaataggatcaggtcaggtgaacttacctcgatgtggacctgacggactaatcgggctctagtccacacagcacaagttgcccattttaaa

SEQ ID NO: 419606 - DNA, 108 bp, Homo Sapiens
tacttttccacaggaactatgtataggtcccagcatgcaggttaggagcctggggtggatcctggctagatctcggtgtgctgctgctagcaaactcatggagagtgt

SEQ ID NO: 419607 - DNA, 144 bp, Homo Sapiens
cattacgacatcgatcaagtgagatgtagagagagaatacatcacaggtaataataacaatgataattctaatatctattttgtgagattagaagcatttttcctgggcagaagctggatcacctggggtccctgtgtaaaagt

SEQ ID NO: 419608 - DNA, 268 bp, Homo Sapiens
  misc_feature (84)..(191): n is a, c, g, or t
actttcacagtggctgagggtagacgatagggaaattactatctaatagacttcaatttgggataacggagaagttccggaccnnnnnnnnnnnnnnnnnnnnnnnnnnnnnnnnnnnnnnnnnnnnnnnnnnnnnnnnnnnnnnnnnnnnnnnnnnnnnnnnnnnnnnnnnnnnnnnnnnnnnnnnnnnnttacaatagtcaggtatgttgattttaatttttgctaggcaaaaatattccacatatacccctctaataagaaggtc

SEQ ID NO: 419609 - DNA, 130 bp, Homo Sapiens
gactctagagtgatccccacataaagaataattgggactatttccttctttgccttttctctgaacaagttatataaggcaagacttacctgtaccttaaagctttgatagtattggcctgagaaaccac

SEQ ID NO: 419610 - DNA, 288 bp, Homo Sapiens
acactggatgaaaatgttcgaaaaataacaatttcaggactcgcgaaaaatcaaacaaagacatacaagcaacgtgaaaggcatttaatcaagagaaaatactgaacttgggctaagaacatcaggagtctctgacaagccattaaaaacagcagttacactgctggagggccaacttgacttggagaggagcaaggaaaaccccaatccccttggcattactggaagcaatgtcgatggcaaacaaaccagaaaagccaacatcacagctaacctgcgtttgcaacc

SEQ ID NO: 419611 - DNA, 381 bp, Homo Sapiens
gtgaaaacttggtcaagtcttttgcttcttctcttagcctcttgttaatctgtaaaatagtggaccaaatgggatattgcacattatgtttatcaaagtgattagtacacagggaggttttacttttgacccaggaaagggccaagccagtgagatattattaagcatctctgaaatcgagagtatagtttttgagatacaacctcatctaccatatgcaaagggaataatcctttcctcctacccctccaggaagatcatagcttagttcagggcccctacctcctgcaaggtcagactgcagattctgcagggggagcatagacatgaaagagatgctaggtcaaatcccacctggagcttggcatttgacatgggaga

SEQ ID NO: 419612 - DNA, 151 bp, Homo Sapiens
taccacatatgatgacttcctacatttgcctgaaaaacgaggaagtgaaaccaatttgcctcttaatttaaattgagcctctcctcttgttctacaacccatgaagtgatccaagaagcaaaaactagagttaaaggggaagagatatcat

SEQ ID NO: 419613 - DNA, 108 bp, Homo Sapiens
tgatggttaacaatattaagaaacactgcatgttactgtgtgtaaaggttaaaaagggggcttccgtttaatatcttttattttcgtctactatccttcatggtacag

SEQ ID NO: 419614 - DNA, 432 bp, Homo Sapiens
tgtatcacatagttattacgaagcatcaaaattattttttaacaagaggttcttggtacatggtgcttagctgtagctgtgcaaagctgtttgtgccattccagctcctaagggatgtgcatcttagacacacaagcacatactctgaggggcggtatctcctggtgtcctagagaagatgtggctgagacccacggtggagaatctcaaggctcgccctgtcaggagccctgctccacagcaggctgtgctgcaagtcagctgcaagggattcaacatgaacacaaattcccagagcaaataactcttaactccctctccctcctgagttccctcagttgctattgcttataactctcctgggagacacactatgtcagaataggagccacatttttcaggtttcagctcaaggtcagagctctgtcattc

SEQ ID NO: 419615 - DNA, 294 bp, Homo Sapiens
tgctctggggctctacagtatgatatctggaaactgagggatagctgtaggtcagagtgccaagagggttattaagcctggaaaaacgtgaaactagataaagtattctctgatagatgtggcctatcgacagactggttccctatgtctgctaacgcagttgtgcttctagaggaatgaaatgcaacggaagggctctccttgtctttccaggttagcagagaagcatgttcacttcagagcgattacgctgagctagcccgagacttttgtcccattcagtgtcgcctgtgg

SEQ ID NO: 419616 - DNA, 317 bp, Homo Sapiens
  misc_feature (97)..(132): n is a, c, g, or t
tactttcacagggggttgggaggagtactgtcccgaagaattttaccataaaacccacaaaccagtgcttggagaaacggggtccaactctaagggnnnnnnnnnnnnnnnnnnnnnnnnnnnnnnnnnnnnaagagcatttaaaatccacatgcattggtaaaaaatactatggaaatatccggtgtaaccttcacctagattcccccaaagatgttactctggcactaggatggtctggtctttggtgtgagctgagggaagatcacctaaccagaatctcttctggtagagttaagaaacctctggtcagagtg

SEQ ID NO: 419617 - DNA, 246 bp, Homo Sapiens
  misc_feature (221)..(221): n is a, c, g, or t
tttactattgtaaacgtaactgagttgtttatgggcaggtttgcttcccacaattgcagtgctgttcatcttagagatgtcctcttgctgaccttggcttgcattgcccttcccttaattcccaatatccttgctcaggtctctcttgtacccgccctactttagaggaggggcttgagttctggaaccaggcaaagccaaaacccacgtgaaagcttcanctcgctcgtaaattggtaccgagct

SEQ ID NO: 419618 - DNA, 395 bp, Homo Sapiens
ttattttccacaggggcaaacttaaaattgaaaggaaataggaggatataacaacttaaatggcatcagcaatttctcacacggtttcaccccaagagtgtagccttagtgaccttgagatagaagaagtgaatcacttagtagatctcttttaatggtatgcatgactagaggaagcatcttagggtgctgcatgtgagcattacgttttaaaaacacaatgttgtaaaagtatttctgtgtatattgtgccaggggctttggtctgcttatcagtggtgcaatacttcatccgtaaactaaaatttccatttaatcataaattggtaatcctgagagtggcaacttagtttcacttaagatagcttccgtagttctaagcacacgtggagact

SEQ ID NO: 419619 - DNA, 201 bp, Homo Sapiens
ttatttccacagggctactggagagcttggtttcaagccatctctgtcctttatgcaggttatgttccagatcccgggatttcttgcagatcccttgaaacactatgctttctttcctggtttctttctccggctgcttctgagcctgaagggtctgtcttctcttggtcccggtggaaaagtacccggtgtggaaaagtt

SEQ ID NO: 419620 - DNA, 526 bp, Homo Sapiens
tcatttccacagggggtagtaattaaagccatcttccggacagtgtgaacatcagaaggataatctttcactccatcagataaatttaggattacgagaggagagcatgcttaacaaactgcaagagctgcctctacaagaaacatttaaaatattctatgctcaactgtcagcaacagcacattaagcattctattactggcttagctcccataattcacctcacatgggtgaatatggtactccggggaggtgacttacactctttggcttaccaaaggaacagaacaaatactttaatatcattttttccttatctcgggctaagaaatgatccttatggtgaggatggtgattaaacattggcaacaatcatggaagcagagaggtgataaacatgccaaaccagtttccctgaactcagggtagcaagattcccaggagcttactgagagcttcacatattcttctataacataacaaaaacatgcctgatttttataaatcttttgccctgtggcacagt

SEQ ID NO: 419621 - DNA, 120 bp, Homo Sapiens
ctagaggatccccctctttccaaaaggtcagtccaatggtgttatagactgtctcactttctagattcatctgattctagatttaaacatattaggggttaccgagcctcgaatttcgta

SEQ ID NO: 419622 - DNA, 169 bp, Homo Sapiens
tattttccacagggtaatacccaaggcactggcatgagtactattggctaaaaaataacaacattctcgtggggtaaaataaaaatacatttaacgataacaggtttcattaaacagaaatggtctcctatttggtaagtgggaaaatgtatacctggtatcaaggtac

SEQ ID NO: 419623 - DNA, 297 bp, Homo Sapiens
gttggcaccatataatgtatgctaaatgggatggcaatatcagataacttcttctggcacaccgtggtgtcaacaatctagatagcaaatatgataatctgtcccattggtgacatggtatgcctggatgaagcattccaaccagggatatgcataaatttttcatcccgggcaggcacaacacacatcatccatgatcatatcccacactttcctggaaggtcatcatccaatcagcaacttctgcatgctgggcaatctgggaagcaattggcccagcaatccatgcagcatagg

SEQ ID NO: 419624 - DNA, 259 bp, Homo Sapiens
gagccggacctactttccacaggacataaaaatctcaggattcatttgggttgaaactgacatggccagacaaccttcaacatttttcatctgggacttcccctcgatcattctaagcactgacctatctttacacactgactgtatctttacacactgatcgtacctttacatactgattgtatcttttggcttctcttctaggattgctgagtatgtgcaagagacatttattgaagagcagcttcgcttttacttc

SEQ ID NO: 419625 - DNA, 181 bp, Homo Sapiens
gcggacctacttttcacaggtatagcaatctactgatgagctgtcacaataagatgtggtctcatttgacatttacaaccttttataatcctgtggtaatgaataattgcttccatactgcctttttttaaaagttctttgaaattaactgaagatcccttttttccctgtccttcgctaa

SEQ ID NO: 419626 - DNA, 482 bp, Homo Sapiens
tactttccacaggagcaatatagtactgtctcatgggtcgttagcttgagaaataaaaaatagaaatctaatttaaaaggatttctaataactcagaatagctaatgtggtttcctctgaggtcatatgagcctctcgtgtcggtgcttttctcttcattgtgtattatagtgattagatattggctatgaaaattatacttttcatttgtttgtgtgtttggaggttgattacctagtcacttgtttataacaaaagctgtaaacgatactctttgacagagttaaataaggctatcttcatgcccttgtgaaatggaaattgatgaaaatgtaacactgagtaccttttatcaacataaatttcaaaacatggaattcagaaggattcatccaacacatactcttttctattatctggattaatatacctcacttcattcattcactctaatcaggttcatgacctgaagatgatttgtc

SEQ ID NO: 419627 - DNA, 266 bp, Homo Sapiens
gtacattgacaagttgcatgtgtaaagcatgaagtagagggatgataccagagaaagtgaaaacagagggactataatttatagatgacaatgggtatgtatatttttaggtgggtacagattaccaaacaaatatgatttctgagactgcataatcatgcactaagtggatatttcttaggggccgtttaagaaaatactgtaaatggagttatctataatatttaagggcttactactatattgtaatcacaaagtaacccaca

SEQ ID NO: 419628 - DNA, 280 bp, Homo Sapiens
tcgagctcggtacctactttccacagggtctgaagccagattcatcagctgacattagttagccatccgccaaggcagagagcctgcattgggaagaggcagaaggtggacgccagagacatagaagatgcaacctctgctcaaaaagagctttaggcttatttgaaaataagtacacactttcaacatacaatattaaaaaaagtgaatagtttaaaacctggtttattggttttcaaccagccacttttgaagaaacggtatacataatggcactcag

SEQ ID NO: 419629 - DNA, 198 bp, Homo Sapiens
atcgatcgagccggtaccgactacagtgggctccactgcctctggcctgccccacatctttttcaactcagcctataaagttctctggattcttttccaccaaactcaatcttaatcactctttagatttcaactaaaaatttcactttctagggcagcgtttaacgacctcctgactacatccagtccccctgtgga

SEQ ID NO: 419630 - DNA, 429 bp, Homo Sapiens
ggctataaggcgagtcctgggtgaggctgacatgagttgagctctgcaactccttcccactccccattccgcatcatcaaacagagaaaacagtcatctctgccctgccaaacttgcaggcttggtgtgagcctcaaatgcattgaaaacgaggcagtgttttgttagtgatccaagtgaaaggattttattcttgtggacatcattttcattcagaccaaatttgcttttcccttggatagatgattatctctagatgtgtgctttcaaagaagtaagttttcctgccataagttgtacctttccacattgaagttgatgctccatttccaacagagacctgtccaacatgcccttcattgtggtacttgccccggtggcttctagaaagcttctctagagagagctgagccttcttcctcctcccct

SEQ ID NO: 419631 - DNA, 173 bp, Homo Sapiens
atcacaggtgcaatgcccaagaaaagatatctaacaatacaggcagtaagcatctaggtcccagcaagggaatacaaagacaggaccccatttctagctggaatggtctcctcatagaatctcagctctttttaaaaacaacaacatagaactggtttttgttgatccatcca

SEQ ID NO: 419632 - DNA, 119 bp, Homo Sapiens
cgtcaaatgcacgtttaattcataatttataccacaaggaagggaaggagagtaatagggatgagcgcactaagcaaacaattaaaaaataagctaagagtgtcttaagtgcaaatcct

SEQ ID NO: 419633 - DNA, 478 bp, Homo Sapiens
  misc_feature (391)..(424): n is a, c, g, or t
gaaggttatatccacatcgtacagcggatgctacactggacacggatgggtagaatcatccattcagtgaagcatgacttgcgttgaacaagacaagctggctgaagcatttgaaggcgctttgaggtactgaggtaacattcaactgatcttcactcctccccagatgacaaaaattacctggctttcgtcagccactgtcctcatgtcagaggaaattccatctgctaagaagtgttgcccacagaggaacctgtgtatagctggagaaccatcatagcaggaagaagctctgaccgttttaataccttcacgaatccccacataatgctaagatggtgtcttgtatccaggagtagataaaaccaaagatgtctttctgtttgtattnnnnnnnnnnnnnnnnnnnnnnnnnnnnnnnnnngtcagccagaaccccatggcttactcagaaaattgtcagggccctgtggaaaag

SEQ ID NO: 419634 - DNA, 530 bp, Homo Sapiens
gggcgcatacacccagtagatggagggaagtgagccacacggggcgaacggcagaggacgtaggcccaggccaggccacgttccagcgcgtcatgcgtgccttaggcgttcccaccatgagtcccgtttcctcttcagcacctcatgaatcctttaccatctgtaggagactgagtatgaaagtgctttacgttcttgatacccaaggtgacactggctgcccacatgcctgttgctgacatgaggatttcatcttctgtctgcagggagtgaagtgctggtgccttcagtggaggcctcattccttttcaagccattccattaacttgagtctctccacttctgcttcaccccaagatgtgggttcctctgggagaccacagttcttgagattctagagattagatccaagcacacaaacctctctttcagaagtgatataatcctttccccaactaagggttttgttgcggatatgacagaagatttatggaaaatgtctagctcagggtctgcaggcactgttagct

SEQ ID NO: 419635 - DNA, 241 bp, Homo Sapiens
gccggtacctactttccacagggatggaataccatttctcatgactacactccagtgaatctctatttcacttttacacatctactgaaaaattattttttagtctgtattcctgaaatatttctcatttcatttcacccgaaggagatacaatacaaataaggaaacacccaacccattttatttagattatcttggtgaatctagtttctgttcctatcactcagaatagtatactata

SEQ ID NO: 419636 - DNA, 607 bp, Homo Sapiens
  misc_feature (513)..(538): n is a, c, g, or t
tactttccacagtggggaaaggacacaggcatgtttcacaatattctcgaaagtttctggcagttcagagctggaaacatatttttgtaataaacttgtaatcagttgacaaagcgttacagtttttcagggggtcagtatcagcttcttcattgaagtttttcttttctgaaccagcaatcaagactccctacttccttttgctctccaagttcctgtatcggtaaatgaattgtccacttgctgtaattttgccatttagccctctctaaccaagatgttgatcgaggcctttctagacattttggcgtttcatcaacttctttgcaatttcttaagcattagagctttaccacttttagccatgcagtgcatgctttcaacctctcctattttctccaagtgttaatctttatttttctttccttacagcagttctctcaatctcatttttatgttcaattcttacattctttaggtggaaagtccactgtccaaaagttggtgaattcnnnnnnnnnnnnnnnnnnnnnnnnnncttaacatctgaaatcagtttactaagagtgattacttcttgaagtaaggtagctgctattcgggagca

SEQ ID NO: 419637 - DNA, 410 bp, Homo Sapiens
  misc_feature (28)..(28): n is a, c, g, or t
tcgagctcggtaccttccacaggttatntagagatgcagtgcagaaggctaacacgaggactcgtcaaaaagacttctgaaatatttgatttccaggatttggtagattaagtgtgtctatttgtaatgaggagtccatcatgtccagattggattgtaaataaagctgtaaagccctacacattcatcaatgccttcactgtcttgtccacaatcagaagaggtggtaaaatgtccaaatggaactctgaaaaataacctagccaggaattttcagaaactggactgaagtggctggattccctacctataaatgtaaccatgagagttgtgacaaacaaaaatctgggatcttcacctaaaaaactgagtaggcttcggaggcttctggttacatccccaatggtagg

SEQ ID NO: 419638 - DNA, 254 bp, Homo Sapiens
gggtctccctcaactcctcactttgggcatttacaatatcttaagttatccacagataatattctgtttctaatggcccatgctaccaaccattagttgctaaatagtctgcttttcagaagaaaattacaatccatgtattattttgaacttcctatgctattttagaacttggcgattttaaattgtcccttacacaacctaccccaccctctgatgtacatgtttttctgttcagactcatcatttcttta

SEQ ID NO: 419639 - DNA, 375 bp, Homo Sapiens
  misc_feature (340)..(340): n is a, c, g, or t
cctactttccacagggtgctctatgatcacctgggatgatatatatactttggaactgaatcactttacagagtgtcccaccactttctctcccggagtctgaagaaagcctttaagctgtgatatcaacagtcaggagtccttaggatcagagtagttcagtcaaagcaagatgtggttaagacaagaagctgatatgattaaagttatagtctgtatcgcccctcctccaaggttaacttttagtggtatgtaagtgccagcaataagtttaatctatgaaaccacataacttggattttcttctaaatatcttaaaatgaaggcgattttctagatnacagataatagtgaaaagtatccctgggaaaagta

SEQ ID NO: 419640 - DNA, 247 bp, Homo Sapiens
ggagctcggtaccttatgtaaaataagaaatacaaatctttagttagatcacatggcacctgactactgcttagaaaatggtaagacttactacataaatcatgagtcactattgacatctactatatcatatcataggttaggtatctaattataaatagtcaaatcagctgactcaaggtggcatagctcaagcagaggaagataatacaagttgagtatggatttaacactctaaacctgtcag

SEQ ID NO: 419641 - DNA, 154 bp, Homo Sapiens
  misc_feature (26)..(26): n is a, c, g, or t
  misc_feature (123)..(123): n is a, c, g, or t
ggtatgatgagctcggtaccttcatngttactcatgtatttctcatggcacctcttcttttggccatctctttttaaattctcttcctttctctctaccatccctcctccccagttaggcacnttattgttttcttaaataccctgtggaaaag

SEQ ID NO: 419642 - DNA, 151 bp, Homo Sapiens
catttggacagacatgcttctgtgtgtgctttgaagtcacatggcacccaggctttttgttgctctgggtggacttagttgtgtcagcacagacttcgctgggttcactgtcctcttatcacctggtacagaaacagcatctagtttttat

SEQ ID NO: 419643 - DNA, 560 bp, Homo Sapiens
cacaggtttccatgcttccatgagcagatgatgactaacacagtcggggcagctcagatgcagacagacagaggagcccacttactgctcagtgcttgtctaggagacaaagatatgaaaatcataaggacaaggaatacggttttatgaactggaagtttaaagacctggccatatatgctaaaacaggtaaagctacctagaaaaatttccttctctcactctcttctgagtcttctctaactgcaaattatgccacggttctctgtctccaggcttgaccccacagaggcatcactggttcttaagcagcaagtgtcaaatattttgcagaagagaatttagtgaggcttttatgggcaatgccataaggtccagagactttctctgactatattcattttaggtgactcattttcctttcctgatttaaagtgagtcctacagaattaatgggtaagaagtagggggatgtgggaagtgaaaagggataagcaggtaagtcattgttaagtcaccagccaattgtcatgtttcaaatattaacctatggatactag

SEQ ID NO: 419644 - DNA, 131 bp, Homo Sapiens
tactttcacaggattgtctgatgatgcttctgccaggtgccagtgttctctgccagtgctgccagacacaggtgcttctgaacacttgactggtgattattgaactgggagctgagtctttcaccttttaa

SEQ ID NO: 419645 - DNA, 248 bp, Homo Sapiens
tattgtgttaattactattaagagggtcaagtaatagatgttaagtaattttttggattaaatagatcttatcaactagataatagagagattaagagctgcttgcactcaggtttcatgtttttattgcaaagatcaattgtgcttacaagaaaacactgaaggaaattggggattatatatactaattaataacatccagagaatgataaaaatatcagtgtttgtattcttgctgtgacaaaata

SEQ ID NO: 419646 - DNA, 172 bp, Homo Sapiens
gctgaacagagtactgtacacaaaaagtcctgatgatgtaatcaatatcctccagcttctgctgggcagtttggactggaaaagtctcccattaagtgcccatgacaaatgttttctgagaggtagctttagattttctgagccttttatatattattcatagcttcatggt

SEQ ID NO: 419647 - DNA, 200 bp, Homo Sapiens
tgctcagggcttcttgtccacccctgtccacagagccaggctgcaccttgttcatgcccatggggttgccactcaactttcagaggatttgacggccccatcctggcatctcccgatgctgggtgccggcaggttctggttaatgttcagtcttatacctgctactccatttgaagtctctttgcttgacatcactagag

SEQ ID NO: 419648 - DNA, 330 bp, Homo Sapiens
cttccacaggggaaaaagaggaagcaggtgggtttgaagaaggaaaaaaggagtatctagcattttctttttaagaatgtcattcttgatttatttggtggcacaaagggattttcttacgtttctcagacggcttgagtcagtctatatagaggctattcctggatcttagttgaaagctgttgcctttctaatggtttaactgatcacttctgaacgacaattacagttcattgttattccctgttaaaaaaccattgacatccatccaaaagttatagcttacaggtcagggaatatttatgtgatatttatagtctgtgaagaaaa

SEQ ID NO: 419649 - DNA, 240 bp, Homo Sapiens
cccaggtagaagatagcataatcactgtgaaagtattgtcaaatgcaagcacgcatttgcatttttgacaaacaaccacttttgattttacattgtattgttccataatatttaaagcacaaagtcctgaaattatcaaacctacttgagtttgcgatagtcagatactagtttcattgtgcttttaattaataaaatgtggattgtctaaattaaagttttcattatgaaatattttgg

SEQ ID NO: 419650 - DNA, 466 bp, Homo Sapiens
ggggggaagagctacgtaatatttcacctcctggatcgaggttgctttccaaatatcagaagctacactgagggaggaaacaagtgcagcgttttggacaccaaccctggagcgagcagccaaaggagagaagaagtctacacagtgctcctcatgtccttatcgtccttttccactcccagtactctctgctccccagattttcagcctggagatattacaggcattttgtggccattgtaagctgtcacataccaacactctgtagattgtcaaatttatgaatgtaccatttcataatttctggaaacatgttttctcttagtacagttcattaatatggcataagacatgtttactggcagactcaaatatctttatttcctctgtaataagaagaactaaattactatagcccttgacatgtgcctgtgagacaccttggtccgtgttttagtataggatc

SEQ ID NO: 419651 - DNA, 430 bp, Homo Sapiens
tctagatgaattatctacatggacagttgtagaattttgcaagaggtaaggcagcaagaagacagaaccaagtctccatgcaaaaagtttacaactttttcaaaagcatcttttgaatctagggttaggccccatctgtttctctagtttcttcaactctccatccccacagatgggtccctatgggtccctaactcccaatggcaggttcagttctgctaacttcttaaattaaccctaaactaaggcaggaatgattttaagacctctagctaacccaacattctgtgggatacagtatcaaattacccatgcttgtctctctctagtctcccaaacctaaagaaacaggcttctgccatcattctagtctttagttcccaccttatgcccaattttgataattaacccttgatgttttgcaggtcca

SEQ ID NO: 419652 - DNA, 181 bp, Homo Sapiens
gtagttagtctataaagtctttggcttggtgtctgcttcgttcatgctgtcatgttttaaagcggttaaaagtaactctgtgcgacctttaaaaaacacagtgattaatttaacttgtccaatcgtgatgaatatttcggctttacctttctttaaataaataccctgcataacgatcatg

SEQ ID NO: 419653 - DNA, 492 bp, Homo Sapiens
tacttccacagggtttgaaagcaaaccagccttaaaaaggcccacggtttcgccacctaccgggatcaggtgtatgcaatacacttgagcttggtcagctaacccaattatgcccaatcttttaggccaacccttaacaaatttaataccttctattaccagcccaagagcacggtcatgatacagaaacacttttctgcaaatggttagtaaatctctactacaccttacaacagtccacattttaactactaataaagcacggaagtggggtgaggatctgatggaacaagtggatcttctagtcggctcctattccactttaaggcctaaggtgggcagttaatgcccagtcaaatcagattaggtaatacgtgaagaattggttcacaatgcaaaaaagagaattcctgaataaactttcagagaagtgtcccctaaaaggtgaggatcattcaactatgaaatgagttaccttgggaaaccaagatt

SEQ ID NO: 419654 - DNA, 383 bp, Homo Sapiens
tacttttccacaggaaatgggtactgtgtgttagaacctgggatatcattttttaacatcttgtgaaatatggagagaaatccactgcctaattttattgcattttctgcaagtcagtttactcttctgctttcaatatatttatttccatttactcttaaattctttcttagttcctcagtctcaaattacatcccatgcttgttcacttttaatttcagtcttttattttctacagctatttcctcccatatcacatcttcgcatcttcctatactcttgactgtgccaagcttcctgaaattttttatttttatgcagcagtagaaatggtagacaggcaggttgcagatataagcttgccctctagcttcagatcttag

SEQ ID NO: 419655 - DNA, 503 bp, Homo Sapiens
ttaactagctaggcaagtggtagagctgtgatctaatcaaagtctagagtccatgtctcacctccatgaaggaagatgaagccctagaagtcatataacagcaatagagaaggagggatatttgggtggtggcttggacaggagcgagggacttaccactggctgaggggaggagatggtgagttaggagggatttgagaaggatgctgaggttgctggcttgagtacctgaggacagttggtcctttcctctaccccaaggtccatggaaagaggaggagagatccaagcctctgagagagagttcacgagctcagtgacatacatggacagtccctaggtgtctatgggccacctgtgggcacaggctctatggtgagcagaatctgcaggtctagagcttaagagggaatttggtgctgctgcagtaggactcacccacgtgcagggagccaatcttctactctagcacacttgaggaacacaataggctcactacacaa

SEQ ID NO: 419656 - DNA, 146 bp, Homo Sapiens
tacttttccacaggcattaaactgctcttgttttctacacaggctgtgctttcttagttctttttgcttttcttcttctgagaatgcccattagcccttttatctctggcaaattcctattaattagtgtttagaaatgggagtat

SEQ ID NO: 419657 - DNA, 562 bp, Homo Sapiens
gaaataagaggcaggaagtgatgcttttgtctacattctgtcctcttatccagagatgaagttctatatcctccccaaagcctttcctgttgatttctccctacaagtattcctatagtccttgcagttgcagtttgtactacacaaattaagaaataattatatcctaatgtgtcatatgatatcataatgtgtcatatgatgaccttcatataagaatgcccttgtttctccagctatacattatagatttcctgaagacaggcaccatgctgtattttttctttccccgtgccacatggtgggaagtacataacaagtgtccaacaaatgctacatgttatctttttaatatcctctcttcccttcctcaataccagtggccaaatatgaacatgaaggatcaggaacccccaggatctgtccacctgattggtctgggaaccaaagacataggattgccattgtcacttaagagggaccatgtagctcaggagggttctgtgtcttcagatgctcgaaatcctttgagacagctttagataaaccttccagttgtcaa

SEQ ID NO: 419658 - DNA, 525 bp, Homo Sapiens
tacttttccacaggtacatgtgatgtttaggtacatgtatacaatgtaatgatcaagttagggtaactggaatatctatcacttcaaacatttatcttttcttatgttagaaatattacaattctcatctagctattttgaaacataaaataaatagtcatataatttctctactgtactacagactactagaatcgattccctctgatatttcctgaaaggaaaataaaactcaaagaacgatttcatcttcccttcccctagcttatttttctcctttatctgtgcttcttttcttgaatggatcattttactatcagactatctgtgaaagtaattatacttctctggatatttgacaaaggaaaggtattaagggtaggaataacctataaaatagaaaccatttctgacaacatgaaaaagggctgaggaaggaatggagagaatgtggagcccagtgattcagcgagagatataccttttccaagagacaggaagtaaaaaagttaaaacaaagagtct

SEQ ID NO: 419659 - DNA, 140 bp, Homo Sapiens
atctgaatcacttgggactctgtgtgcctgatcatactacaaacttctgaagttattctacaagcctcaaaatgctaatcagactttgttacacacgcttgtgtcttctaaaactaaattggtgatttcaagttggtatg

SEQ ID NO: 419660 - DNA, 254 bp, Homo Sapiens
cgcgcagtgtcgaggccgtggatgcgggtggagatggtggacatgctggccgttctggttgggaagtggcggatcatgccatggcccttcggcatccgccactgtttgccgataaaatgtcggctcccgaatcattccaaccctttcccctggatcagcaccgcatgaatccccagagccagtaccaattcaagtccgtcaactacaccggcctccagccgggcccgcgcgtcatcatcatggggtaccgagct

SEQ ID NO: 419661 - DNA, 140 bp, Homo Sapiens
ccatgatcagggtcgaatctgggggtcctggtccgctccccttggactaggtgtcaagcctcaaggttaagatttcgaaaggaaattcttacgtgaaaaaaatattgctgagactttttcttctgggcccgctttaattt

SEQ ID NO: 419662 - DNA, 155 bp, Homo Sapiens
atcacagaacattgtcctccttcctgtaaaagcccaccccctttcttgtttgagcttctttttctgtgacactattatacctctaatcataattgttctacttttgtcacctataattatcactagacttacaggggatccttctgcattctcac

SEQ ID NO: 419663 - DNA, 352 bp, Homo Sapiens
gtgagaggaagaatagaccctcctatctgctatatcttgaagttatacaaatgctttcagatgaatctgtttctgagtcatgtttctgtgcgaactataaggaagaaaagcaagatctaaaagagaggatatggggcacacctgcattgttaaatgataccataaaaccctattcaggaaagtggatagatactcaagaccaaaagacatgctttctgatgacaatctctacatgttcatgtattatagacatgttttatgaagctgtacaagaatttcccagaggatctgtcacctttacccaccaccctctgctctgctgacacgggcagtttctctcctgagccacctg

SEQ ID NO: 419664 - DNA, 473 bp, Homo Sapiens
catggtatcggtcccccgcccccaactcttgtatttttccagtaaagttctgtatcctgtgaagcatacagaatagatcacgtatgtattagacttatgggccacttgaaagctacgtctgtgtttactgatcccctggtctctaacatagcacttcatgagttttgaatcaatgaagggactaacagaaggagaaggttatttctgtttcctattggaaatcccttggaaatatctcttgtggtcgctattctatcaggatggctacactttgcatctggcttccgtaggagaagggtttatgtggggctcctttttcagcaccacctggcagagctgcttgtgcttgctgtgcttagaggttttgctgcagtctgtccctgaatgggaaggatgggaatcgtggctgaacgcagcttggggtttccttctctcccagatttacagctttaaaggcaccctgtggaaaagta

SEQ ID NO: 419665 - DNA, 154 bp, Homo Sapiens
tcaggttatactttgcaggagtgactggtggtgttgagtaagatgcacggaagaaaatgctggaatctctatcacagaatgaatcttggaacaagcacgtgcatttgagtcacttcgtacttttcagcataattgtctttcttggccatccacc

SEQ ID NO: 419666 - DNA, 164 bp, Homo Sapiens
tcagtaatacaagagaaaggatagaatgtcctgaactagagaatagcagtggcagagaaatggataaatttaggacacattttgaaggcagaaacagaacaacttgtgtaattggattacgattgtgacgaaagtacactgcgggtaacccgagctctgagatt

SEQ ID NO: 419667 - DNA, 178 bp, Homo Sapiens
caacagcccaaaaaagccccaaactttacaattctggaacttattgaagttgtaaataaacaattatgtactcatggcctccacagcacagcagaggttaaaaaataactatagaattctataaagaaacctctactttaagaagattctaagccaattctatgacaagaccaaagtt

SEQ ID NO: 419668 - DNA, 134 bp, Homo Sapiens
tacttttcccagggcatacaaaaccaagcaaattcaagaccataaactgaagcgctcttcggcactgtctgatatgaatgtggcatctaatactataagaaacactatacacttttcagatatatgttgtctcc

SEQ ID NO: 419669 - DNA, 157 bp, Homo Sapiens
ctagaatactccatcttttggagggctggcagatgagagggtgcctgcaaatgaggctcagaagttattactggggagtattctgaaggtgtgggtttctgaggtctcagcaagtaatttggtaggataatttataatggaagaacagaatatggaa

SEQ ID NO: 419670 - DNA, 158 bp, Homo Sapiens
agatgggcgtggctgctcagcagtgaatggggctggtgagaacgcccacctcagggagctggcagtggcaagcatctggcttctggaactaaaacttgctcgctggaactttgacaagttagtgggagacaagtcaaatggtctgatttataaaatga

SEQ ID NO: 419671 - DNA, 186 bp, Homo Sapiens
gcactgagaaagggctagctagacgtagcggtagcaagtcgtgatcatgaggggaccagtgaagataggagagaactcccccttggagggcactgttcattctcacccatccaaacaccgcaaagaaacctgtgctgactcactggcatagtctgtgacccagacatgctccacctgaacgactgt

SEQ ID NO: 419672 - DNA, 111 bp, Homo Sapiens
attaagtgggtgatacatgtgaattgttacgacattgctttgcccatatctgcatgctgtatgccatattttcatcattgatgattacttcatgggaaatatttcgttatc

SEQ ID NO: 419673 - DNA, 146 bp, Homo Sapiens
  misc_feature (92)..(105): n is a, c, g, or t
tacttttccacaggccaaggcaagagagaagaaacttcacctaggctgctgagcctactgatatgttacaaacgcttcctacttgacagaannnnnnnnnnnnnnaccaagacacaactcatatcaccgtggttgcagtacccagc

SEQ ID NO: 419674 - DNA, 183 bp, Homo Sapiens
tacttttccacaggataaaaggcctcagtggtgtggaagcctgggactgctgatatgcagagcgggccagggtacaacagaggtacttagggtgcctaatgaaaagagacccaactctaaaatcactcggggagtgatcttaaaaccaaagccacaaactggaacaaaaatctcactttattg

SEQ ID NO: 419675 - DNA, 412 bp, Homo Sapiens
  misc_feature (220)..(301): n is a, c, g, or t
tacttttccacaggtgcatgtctaataattttcactgccatcttaatggggatccctctctgctaagccgaggaacgcagcattattatcctttaatttggggcatactgactctgactaagtgaactatttccaagcactctattcctttaaaagaaggcataaagggatactgggtagacagctggcagtttctgtcacaactccttcttgaatgttnnnnnnnnnnnnnnnnnnnnnnnnnnnnnnnnnnnnnnnnnnnnnnnnnnnnnnnnnnnnnnnnnnnnnnnnnnnnnnnnnnctgcagtgtctgacaggcacaccataaatagaggtgcaataaacatttgctgaatatggagagagcagagttgtgggttatattttctaagatgatacttaacgatgcaca

SEQ ID NO: 419676 - DNA, 244 bp, Homo Sapiens
tacttttccacaggactaaacaagtgtgtgtgggtggttctgaacaaacctctgaccattagctgcaaaacaactgaagggacaggtcctagaaatgagagtcagaattattatctgaacgactgaaagagttctctgtgttaatggtaataccttcacttttataagggaatttcctcctgcaacccaagttaatgcatgtagaattttaaagggaatggcttttggtttcagatttcccctg

SEQ ID NO: 419677 - DNA, 499 bp, Homo Sapiens
  misc_feature (46)..(68): n is a, c, g, or t
tacttttccacaggttccagaaacccagtgactgggcatttccccnnnnnnnnnnnnnnnnnnnnnnnggaaacagagtctcgctcggtaacccaggaggggtgtgcaatgacaaaacctgggttcatggcaaaatctgcctccggggctcaagcgattctcccgcttcagcctcccaagtatagtgtgggactacaggttacccgccaccacaccaagctatttttggtatttttagtagagagggggtttggccagtgtgggccaggcgggtctcaaattcttgacctcaggcgatcggcccgcttgggccacccaatggtgcggggatcacaggcttgagccacaatgcccagttagggcataacctttggatggtcctcttggaccaaagtcctgaggggaagcacttccggggaggggggtatttaaagcaaagtgccagcgcttgggaaagggcagaccaggtctaacgaaatggggctaggggatagggtgt

SEQ ID NO: 419678 - DNA, 383 bp, Homo Sapiens
gggtacatgtgaaggtttgttatacaggtaaactcatctcacagggggttgttgtacagactgtttcattatccacgtattaagcctagtacccagtagtttctttttctgctcctctccctccctccaccctctaccctcaagtagaccccagtgtctgttgttccattcttaatatttataagttctcatcatttagctcacacttataagtgagaatatgcaatatttggttgttcctgtgttagtttcctttatcataaggaaagttatggggttatctcacagaactcaaggactgaaagttcagccaggctttggagttcttgaaactagtaaccgggaagcagtcagggaccaaggcaggatctctttttgtcttt

SEQ ID NO: 419679 - DNA, 109 bp, Homo Sapiens
tatttaaacatttggtctgagaaagatacttgacatgatttcaatttttaaaaacttcgttgagacttgttttgtgtcctaacatgtggcctatcctgaagaatggtct

SEQ ID NO: 419680 - DNA, 361 bp, Homo Sapiens
gtactacttttcacagggaatatggaataaccttataaacttaattatattattagtccttacttccttctacgtctgcagtagtaggctgtgaattgtgaagaaataaatgacacaaggattatcttttctgcaggtgattagttgataatcctccctgggtagtctccagtctcacagattatcccctaggccaactcatgctatcctgcacgaccacattactcttccaaatacagaatttccttcccttaaactagatatgggtattttggcactcactgcttttagtaattgaccctaatgtctatacacatcctgcgtcaccttactctgtctatactcatcctgtatcactttg

SEQ ID NO: 419681 - DNA, 170 bp, Homo Sapiens
ggtaccagactgtttgatccgactacaaactataagacattaagttactcttcttttatttctatgatatcttggtcataattctatcactgttcctcctattgctttctaatcagcaggtaattacattatgcaaatcatgcacaagtataagttacttgagatcagga

SEQ ID NO: 419682 - DNA, 175 bp, Homo Sapiens
  misc_feature (51)..(51): n is a, c, g, or t
cctgccttgtcaggaatcagacaggtgagagccagttctgacttgcttggnatacttgcacaaactatgacaaacgtgtacctttagtgctgacttctaacaagctagtgcctgagctggagagtgagggtgtgggtggctcaacacacaaaccatgttctatgtttgtttgttt

SEQ ID NO: 419683 - DNA, 120 bp, Homo Sapiens
accaatacttcagtaggattggtacctagctcttttacatcttgtagaatttactgtgaatccatctgatacaggccctttattggttggtagggtttttattacagattcacatttgaa

SEQ ID NO: 419684 - DNA, 266 bp, Homo Sapiens
  misc_feature (16)..(16): n is a, c, g, or t
tacctactttccacanggttgggggttagaagtctaaggtcaaggtgtcggcagggctgactgcttctaaagcctctctccttggtttgcagacggctgccttctccctgtgttttcacacggacttccctctgagcatgtttatgtcccaatttcctctttcttataaggacaccagtcgtgttggattagggcctaccctaatgacctcgcttttgcttaatcacctctttgaagatcccatctccaaatacagtcacattctg

SEQ ID NO: 419685 - DNA, 422 bp, Homo Sapiens
  misc_feature (21)..(21): n is a, c, g, or t
ttttccacagggttttttaanttcctactaaaatccacccaccatgagaacatagcaagcatgtggatgcagggctgtgtgaggaacttggggcaaccatccaatcaaccatgcccagccactgaccttaaagacctccccctggcctggatagagaaagcaatgcatcaggaatagttgcaacacaacatgattttgccccaatcactgaagttatttgggatccagagtattttctagcctgaaagatacctgtatgtatctcagggaaggacacctgttccctgatatatgtgttctataaattaaactgggcaagagctgtcactcacttaacaggtggaatataagggacttggagggataaaggggttaacccaagctacattcaactgccttcattattatttgcacctggtgaa

SEQ ID NO: 419686 - DNA, 183 bp, Homo Sapiens
  misc_feature (14)..(14): n is a, c, g, or t
cttttcctcagggngtttccaaaccatgagtttcactctcaggttccctctaggagcagaagtgcaggtttgcttgggctcctagcctctccctcagctccctcttttccctctaatggatccctagatgctactgatggctcccctaactgacggcaaattgcttgtgggcagggtctgtgc

SEQ ID NO: 419687 - DNA, 245 bp, Homo Sapiens
  misc_feature (210)..(210): n is a, c, g, or t
  misc_feature (233)..(233): n is a, c, g, or t
tacttttcacagtggccacagtgtgaatgctcacatgtgaggagcaaaccaccacagaacacaacagaaacacggtgtactaaatcagtgcttcaaatcgcagccctgcaacttcagaagctaccacatggtaacccatgaaagggagcacggacagcatccgcccactgcctgagtgctatgatgatggaccatgaaacctgtgcttanctaacaacctgccttattccccnctgtgaaaagta

SEQ ID NO: 419688 - DNA, 325 bp, Homo Sapiens
gaatggacaaatggtagatctactctcagatttagattttaatttacttttagattttagatttagaaatctccattctgttttccatagaggctgtactaatttacattcccaccagcagtgtataaatgttaccttttcaccacattcatgccaacatctactgttttttgactttttaataatgaccattctggctggggtaaagcggtatctcactgtggttttaatttggatttttgtgatgattagtgatgtagagtgtttttccatatgtttgttggccatttgtatgtcttcttttgagaaatatttattcatatca

SEQ ID NO: 419689 - DNA, 435 bp, Homo Sapiens
tacttttcacagggggagggagttagtttctccagtgaggcaattcataatgtgagtctgaaatagaacacaggaaggcaggcagctgtgcttacgaattaactagagctgatgtttaatttgcttcttattgatgccatttcctcactggttcattagctgtagttggagaataaatgccttcacagttcattctttatgatgtcctcagcttctgggtcagcctcatttgttccttatcatccctccaaaagagggctctctcttagcctctcctcatgtctaaaggctcatctgtgaatttctggggcagggccttggcttcagtctctgcacagagcagggtccccttggtatctacagtgtctgcccactgagactaccaaggataatgccattgcaacagtccagatgggggtgttggaaaataacttg

SEQ ID NO: 419690 - DNA, 105 bp, Homo Sapiens
tactttcacaggtacttttccgggctcactcctgagacaatctccatggctacccaggactgagtttgctattgcccgtaacaatagggtcctgatccctctcac

SEQ ID NO: 419691 - DNA, 496 bp, Homo Sapiens
  misc_feature (163)..(211): n is a, c, g, or t
  misc_feature (267)..(342): n is a, c, g, or t
tactttcacagggtcttgccagctggtaaggagcttgaaccctattttgaggtgggaggagccactggagagtactgagaagggcagtgacatggtcagatgggtctgcgtttgagaaagacaaactggggaaggaatagcatttgaaaggggcaggagcagnnnnnnnnnnnnnnnnnnnnnnnnnnnnnnnnnnnnnnnnnnnnnnnnntggttttatttatgtatattttagatttatttgttatatgtacttagttatatctnnnnnnnnnnnnnnnnnnnnnnnnnnnnnnnnnnnnnnnnnnnnnnnnnnnnnnnnnnnnnnnnnnnnnnnnnnnnacagtggaaaaacaagaagcgtggtgctaatgaactacaacaggaactccaggtcaagatcatggactaagacatgtaaaggcctagatttcaggtttgcaaaaacaaatccccaaatataaggtcatttccaaattcccccgttggaaaagta

SEQ ID NO: 419692 - DNA, 588 bp, Homo Sapiens
  misc_feature (256)..(293): n is a, c, g, or t
tactttcacaggggtcactgagcatgacagctcacgcccgggactcggggttccgtcagcagagcaagggtcgattcttggagggttgctggaatgtgacacgatgatctcagtttgacagtttggacatttccatggcagcttcagcacagtgccatgccactgagagatccctcctgaagccctagagccgggttctcatccccgcagcacttcagaatcacctgtgggactttacagacctgctgctgcttgnnnnnnnnnnnnnnnnnnnnnnnnnnnnnnnnnnnnnnttgagaagcacagtggtagatcctagctggagaactgaagagaaacagagctgctgagaataagaaataggtgttactcaggattctcctaaatgtcacctcctggtatggaaggcactcaaaaggcaggtcatgaggttaaattgtttatggtttattttgcttaaaaaagtaggagtagatgtaatccattttagtgagacttctataggtaatagttaaataagacttgtgcctttgtgttttactgttatctggcagaatggtctctaaggaaggcttgtttccagcggca

SEQ ID NO: 419693 - DNA, 344 bp, Homo Sapiens
tactttcacagggggggcacagagctacttagcatgtgctgtttatttcgaggtcaccagaggaagctattgtataccatgagcaccatggtatccaagggcaatggtggtgggctgaggtagctgtggagcctggtgaaaatctgagtagtccagagctatgattaccaatgcctgccccattaaaaaatgaagcataaccaggtgacatgtggatctgtatttcacatctaaatatagcaatcagaaaatcattttacatatcataacacaacttcttaaccttcaaaagaaaaagcaatctcatttggttgtgctgaaaatcataatcccgtggaaaagta

SEQ ID NO: 419694 - DNA, 256 bp, Homo Sapiens
  misc_feature (134)..(134): n is a, c, g, or t
  misc_feature (139)..(140): n is a, c, g, or t
  misc_feature (148)..(149): n is a, c, g, or t
  misc_feature (157)..(157): n is a, c, g, or t
  misc_feature (159)..(160): n is a, c, g, or t
  misc_feature (173)..(173): n is a, c, g, or t
  misc_feature (180)..(181): n is a, c, g, or t
  misc_feature (201)..(201): n is a, c, g, or t
  misc_feature (209)..(210): n is a, c, g, or t
tactttccaggtcctgtgctggaggcagagtgcacccaggatcttatgcccctattgcaggggtgaggggcccaggacagcatgagccgggagaatggccaagggctagtggcacgcaccctggcctttcccanggccnnctaaacanncagagggntnngtgttgggcacanaagcccnnttctctggcatctaccccangtaccctnngccaggctagccgggataccctctctcgtggcagcacctcatgccg

SEQ ID NO: 419695 - DNA, 177 bp, Homo Sapiens
tacttatccagggggaaaatactgtatactgcccatctttgaaaaacattttacttagagcataaacttgaaggctagcatccttttaatccacttaattgctggacacttagtaggtattcataagtatatttgtatgaataaagtaaatttgagatcatcctctgtggacaagta

SEQ ID NO: 419696 - DNA, 156 bp, Homo Sapiens
tatttgagttattaataacaccgtcaacctaaatatgcaacaagtgagtgactagttaataaaattatcttaaaagaccaactcagtgtgaagagtattaaaatttttagcttggaccatggtaaactgctcatgataccattaaaaaaagaatta

SEQ ID NO: 419697 - DNA, 206 bp, Homo Sapiens
acttggaaggatcatgattggaaaactggtgacaaatgtggggaagaggtatgttaatggacctttctgagtgatcaaaaactgaaggtatttgtgtcacacataaatgctcattaaaagttgccctcagcacaggaagattttaataatcaagtggataggatgacccagtctgtggacaccactcagcccctttccccagctac

SEQ ID NO: 419698 - DNA, 181 bp, Homo Sapiens
cactctagcaggatcccctacttttcacaggacccttaatcaattttcacagaggaagatgcttctgaaacactcttagcgaatgatgcttccatgtgggttcagacgccaggaattggttctagttgatacttctgctatttcctacttgctagcttagtaatgacgtcaccagagcaca

SEQ ID NO: 419699 - DNA, 465 bp, Homo Sapiens
tacttttcacagggtgtaagctccttcttcttcctgcacccctgccgctaggcctctgtctcagcaaaatgggtgagcagaagagtggaaagaccagctttggagctccatagctctgccgcttaacggcaccttttggacaacacgcttaaccactctgaacctcacgttctcacctgtagtatggggataaggactccagtacttttggggtgttgcaaatattaaaataagaatgcagaatgcaacactaaacacctagcaaaggtttggcccttagtgattgagcaggaaaattgtagctgttatttccattcacaattgcactgcaccttacactgtccaagaagccgttgagaaatttgacaaggtctgctctgatcgtgaggagctgatcctgaacagctaccttgctgcattgttttagtttcatcagtagtagtgaaatcagagcagcagagagaa

SEQ ID NO: 419700 - DNA, 177 bp, Homo Sapiens
  misc_feature (153)..(153): n is a, c, g, or t
atgtgcggcatgatagaggcctggactgagtagcgactctttggtatgaaccagatataacttgcacgatgtttcacaagctggtttggatgttattagcttagtgtgtcatttaccccatccctactcacacccgaaacatgatattttgtnggagctaaaaaaacaatagcggta

SEQ ID NO: 419701 - DNA, 210 bp, Homo Sapiens
tacttttccagggggaagaaatcggctggttgtctccactctcttcattacccacctgcatgctagaggatgtacatagtccatgaggatcacttatggtaggcatttcactttcattgcgcgaggcgagcggggcagttctttcaggcctagcttgaagtattaggcagtatcgtggcactctagctctagctcccgtaccctccctta

SEQ ID NO: 419702 - DNA, 492 bp, Homo Sapiens
  misc_feature (162)..(242): n is a, c, g, or t
tactttcacaggataggggaagaacaacccaaagaactcacaggagctaagaaaacatgagaaaaacatgagcaagagaaagaagcgcctttttcccctcctttcctcttgttaaatgatgattgacacacccgggctcagtttccagttcattacgtaacnnnnnnnnnnnnnnnnnnnnnnnnnnnnnnnnnnnnnnnnnnnnnnnnnnnnnnnnnnnnnnnnnnnnnnnnnnnnnnnnngccttttgatataatgcctatgaaaatgctacatgaaagtgaagcatttatcatcaacacaattagctgaactggttagggttaatgaggtccaggttgtacctccgttcccattagactaattagccaccctcagacatagatgctacaggtaggtcagagattgcgcctctaatccagactattggcttagcagggatatttctatatatccaagacaggtcaccctggccaactgtgcagatgttac

SEQ ID NO: 419703 - DNA, 434 bp, Homo Sapiens
agtaatggacagatttctatgaagcaggcagtttggcagggcgagtggcctgctggtaagtacacacgaggctacgaaacatcggggactaaggatgttgttcattgtatttgttgacaggcaaacagggcagaataagaagcttctttgactctcgaattttagcactagaagaaatagtgaggattatatatttcagaagttctcacccaggatatcagaacacattcagagtcctgatcccagttatgagaaagggccaccttcgactacaaattagaaattgcattttctaccagaacattagacgacaaaggctgtctacactgggatgtatcagtggaagtgtctccaatgtcaacatgggtcatagcagaagaaacatggaaaaccactacatctttagtccaattacttcgttgccctgtggaaaa

SEQ ID NO: 419704 - DNA, 477 bp, Homo Sapiens
tactttcacaggggaaatgccagatgcttacgaagtgtgtgagaactcaccaagaacagcatgggggaaactgcccccatgattcaatcaccttccatcaggttcttcccttaacacctcggggttataattcaagatgaggtttgggtggggacacaaagctaaaccatatcaaagcaatagctttaaaatgctagtttgcccttgacaacagataatagcttcaaaatatagcttttggaaccatttctttccactatttttaaagaatgacatgagtagatagagggttcagactattctttagctacaactcaaagactacattcaaatcttttgagaagaattccttcttcccttttcgtcatcttagcatactctaaagacctactggtaattcatttccgtgaaacagaattgcaaggcagtctttaataaaagatggcaaatgcaataatttacagatgtgttttttta

SEQ ID NO: 419705 - DNA, 159 bp, Homo Sapiens
ccctgccatggagcagggaacaagtcagtaagaacgagcatgacgttccttgtcctgtgagcagatttggcgtagtcagttgacttgcaatggagtgtgtacgcgagcgcccgagtaccactatggcgcaccagccacgtgtgaacacaacacaattct

SEQ ID NO: 419706 - DNA, 129 bp, Homo Sapiens
cattgtctccctggtttattgtacagcagaacttttctgtttgtcatctgagcataatcctatcaggtgtctgtggttattcatggggcagataaacaaaccctgaaaagtagggtatcgaggctcgaa

SEQ ID NO: 419707 - DNA, 183 bp, Homo Sapiens
atggtgattatgggaggcactttatttggaagtaatgagggattccaaaaatagtcttagtgatgcttaacaaattggaaagacaaaaggaactgaggccaaagaagattgagataggtgaaatgtttcattgtatacattttcattaacttggttaataataatggatgtggcatttatatg

SEQ ID NO: 419708 - DNA, 129 bp, Homo Sapiens
catctgcatttcaagaggaatcctaacccagattcttagattcccagtatgtctccagggtttccgtattacgctgcatgcctgcggaggggacttgcagcggggaacacacaggtctttggcgctcag

SEQ ID NO: 419709 - DNA, 223 bp, Homo Sapiens
actggttacgtcgcaacgtaaagaacggcagaaggtgagcggtgcgtgactagtggcgaacgaatcctcgtcatcgttcttgtcgtcgacatgtgctcgccactctctcagctccaaggccgcagcagattcgttgcgcgtgacggctttgatgagatgaagctcgttctctttgaagaccctgtacatgcccttgttgatgatggccatgttggacagatct

SEQ ID NO: 419710 - DNA, 295 bp, Homo Sapiens
gttatactagtaactgacaccgtgaaacattttgaaatgttacctaagtatgtttcacgtatgagaaaactggtagctaccgtattctcaagatgatgatttgggtttaaaaagccatttcaaattaattattaaaatcgttttctttctgaggacgtctttagtaaagtaccgatttcttttacagtaaaaggctttaaaaactactccttttctacagtaaaacgttcagttcttaaggatatattgaagtggcgggtagacgttattgtatacataccatatatgtgaaagt

SEQ ID NO: 419711 - DNA, 147 bp, Homo Sapiens
  misc_feature (127)..(127): n is a, c, g, or t
aacctgaaaccaggcccctgactccaccctgcgagaggagacactctccaggccagccaccacccgatggtgacaatcatagaccagtgacctggggctgcagtgaggccccatgccctacctccangcaaagccacaggacctgca

SEQ ID NO: 419712 - DNA, 133 bp, Homo Sapiens
tggacactgctcgctcaggagggttctgtccgttatgaacgtgtgttagtgcagctgcctcggcagtcctctgtcatcttcctgcgagggtctgaattgaaactcacaagttaccagggtctgaggagcttgt

SEQ ID NO: 419713 - DNA, 117 bp, Homo Sapiens
tttggctgtgcaaatagaagtacaaggggaggagattcctttacaggtcccaagttttcttctgctatagataatagagaaagtgtttcgtttcttgttcctgaagactcaaaactt

SEQ ID NO: 419714 - DNA, 454 bp, Homo Sapiens
tacttttccacaggcatttaggtccagcagagccaggcccacacagttattgaatcagacacgagaagacggaatcgacatggcaatcagcatttagacaggctactaagtgctgccatcaatcaccttctcttcccagaaaagtacagatgtctccctggatttcttactaataaccagaaatacagctgtccaggccctgcacatattttgtatcacttgataaaaatagctaatagcattctatctgtgactcctggtttatctcataaactaaatggatggaaaagagaaaggaatgctacttgaaatcccatctcagcggcacatgaattccaggtagcggctccctggttacaggacagaagtaagcgaagtatcacacacaagagaactatcggaaaacagaaaataacttctagaggaataatttgttgcacaaaatgcaaacaaa

SEQ ID NO: 419715 - DNA, 543 bp, Homo Sapiens
tactttcacaggtcttgtcttctaacgatcaaagcttgcgcaccggaaggtctgacagctctggcacacttgtggcccacacattttgaagtaaacatgagtcactcccaggtctgaaaagaatcaaagcaaatcagcatgaaatggggactgtctgcagagctgcagccagcatgtggcaggaggacaggaacaaggtcctgccagctgttaggcacatggaccctgctgggccggcagcacgggggtcacctgggggacagcagccacagcagtaggacaaggagatcctgcccagattgcagcaggatgtgggcaaaggccaaatagggctcctcatcctataaacacagagcctctggcaacaagctggcacaggcacagaaggccccaacgagggggaagcagcaagaagggccgagaccagggaagcagggagtaggctccaagaagaggagggtctggaggtttgattatctaaagcagtagctcatatgggactcaggcctccttcaattactggcaaaagaaggcagtggttaa

SEQ ID NO: 419716 - DNA, 525 bp, Homo Sapiens
  misc_feature (118)..(126): n is a, c, g, or t
tactttcacagggctatggaactgtaacaacttgtcctgtttctgaagaatccagtgaggagtgatggcaattcctctgattatgtctttatcctgtcatctatatctcagaggcacnnnnnnnnnaatttaaaataaacaaaaagttaaagtaatccttagaggttctctgcagtccccagatattagaactcagtttctgcttcaatatcccattaactccaaactaggtaagacagcttaaagtcatttccaagggcatcaagagatactgtaggataggcttttagagcgaagcttctaacagccgtccacatcacaaaaatgacctaactagagcccaaaacagaaggaagagccttttcctctccaattttcacagtcatttggtttcttccaacagaaaagtcattctagatgctttcacttgcagcagttcctcaggttagtaactaggacccttcccatgattgacttctggcaaggaacaaatgagccccaggcaaagcacatgggtcagcaaac

SEQ ID NO: 419717 - DNA, 121 bp, Homo Sapiens
tcgaaggtgacggagcgtcgcgagcgctggtcaggtgaggcaggaaccgcagcacggtgccggccaggccgcagtcgacgacgccgccaccggcgaagttgctgggctggggtgatcctgc

SEQ ID NO: 419718 - DNA, 217 bp, Homo Sapiens
aaaaaatgaagaatgtcaaaaatgttaacaagaaagtaaattagaagacagtaagtgtatttgtattttctcctcttaattttgttaagagatgactgaacactctgaaaataatgctgtcaggtgggttagctaactaactgttgacaaaatctatactttgacaactaattagcacaaaggaaggacaagaaaatgaagctgggctagagcagtg

SEQ ID NO: 419719 - DNA, 115 bp, Homo Sapiens
ccaggaaggaaccttaacggaactattctccctggaagatgtttcttactatccatgtaatataacatagctagttgggtacttgtctgttcaagcacttatgacccctacgcct

SEQ ID NO: 419720 - DNA, 361 bp, Homo Sapiens
tactttgccacaggggaatggatatagcttgactaagcagatgagccttcaggcttgtaggtacgctattcttataactggctaccctccattagtaaaagatcagatcacttcaaagatatgatttgaagggataatggccaggcctcgattctatggctcgtggaaatgtcacgaatcgactccctagtttctggactttaggacattgactgaggtgccatttacaaaaatgaggccaattccaggagaaatagtatctgggaggaagagcaagcatttgttttttatacataaagctgacagctgaatatgtaagtctctagcaagagatcaaggctggagatataaatttggggac

SEQ ID NO: 419721 - DNA, 171 bp, Homo Sapiens
cggtcccaagttatgtttatattgggttaaaatagaggagaagggagttcccctatggctcagtgggttaaatgatctgatgtcactgctgtggctctggtcactcctgtggcatgggttcaatccctggccggagaacttccacgtgccatgggtgaccacggccacccc

SEQ ID NO: 419722 - DNA, 317 bp, Homo Sapiens
ttgttactttctgattttgatggtatattatggctatatagcagaatatccttgaggaagagagatatactaaagtatttagggggacaaaagagaagcatccatctcaaatatcctaggaaaaaaagttatgtactgtacttgtaactttcgtttagaattgtttcaaaatttaaaattaacacattattttcagcacagtaatcatgtgcagtaaataatgacgtacacttctaattatataaaatactttgtacctataattttcagtatcttaggtagatgacctttttgagattctaaacatgcaatctgtc

SEQ ID NO: 419723 - DNA, 390 bp, Homo Sapiens
tacttttccacaggtcccctgattactttgtaagaatgggtgggagggatgctgattttcaatccttttgcagatcttctctcatagtaacacaatagaagatactttgccactatgttgtttgccaaactcactgtacctacttgactggtaacaaaagtcccaagagttatttgggagaagacacttgaaaaagtatttttctaaatatgggcaaggatgctgcccttccccaaactgttagtataccacctctctgaccaattttcccaaggaagatattggggtagggtgaggtgtaaagaaaaagtggtcatgtcaatactggtaataaaagctgttcactggcgtagagttgggttgcaactgtagccattctaaaaatgggct

SEQ ID NO: 419724 - DNA, 106 bp, Homo Sapiens
atgagtttatgaatagtagcactagcagtggtgtgttcttgattgagagaaatgattgcagcgagggttccttttctttcttcactggatatcatctaagagaccc

SEQ ID NO: 419725 - DNA, 168 bp, Homo Sapiens
ggagctcggtaccacttgtccacggttggctagtccatatattctcctgggcggaaggcatgtgtgcctgttgtgacagtgtcctggaaattcttttctatacgggtgagtgcatgttgaaggtgctcacacgtggtttcctaaagtcctgcaaagtggcagttagga

SEQ ID NO: 419726 - DNA, 462 bp, Homo Sapiens
cccggttggctgctgggtccctaaaatcccttcttaatgcatttctctgttaaataactcccaaaggccccctctgcctcggggttccagctccttagctccagcattcactgctcccaagctttggctcaatcttcttatctaaacccccagccccctcaaatcaggctctcttccccagccggtttggggatcacaggctccagagtgttccctgggcaattctgcatctgctggggtggtccccctttcctagagagcaccccacattccagtcccagccttctcccccgctgtaaaggattcgcaggatggcaggtccaccccactcctgctcattgacaagaacaatggggtggggatctgacagacaccaggtgacattcataacccagggacatggactgtgggggaacttgggggctgagcaggcgagatggcctcagccaaccgtggactagt

SEQ ID NO: 419727 - DNA, 196 bp, Homo Sapiens
cataattatattatataaagttgctaaataattagaagctgtacccaaatataaagtaataaataattgatgaacaagataaaaggtgaaaacacacttgtcttctacacgcaatgtatattcccttaataacttttggtgagtaaatagacatggcaatgtcttctttagcatcatggatagtgaaataatcttg

SEQ ID NO: 419728 - DNA, 179 bp, Homo Sapiens
aatgttatccaaatgctcggtgagcgctgaaactttaatcgtgctttgatactcagatgcactaaaatcgaccgtactacctaacatctcaagcgcctgtgacaattgttcactgctacgcttttgggtcgattcattgagcatttccgcagttaagcttgccagtcccgccttttcga

SEQ ID NO: 419729 - DNA, 145 bp, Homo Sapiens
aaagtgacagagagtatagaagtccgatactatcagagcacagaggtgcacgagttttcagtcgacagagtgcaataacagtcagagactttgatgacagaggcatcattctgattcaggttggatatttttcgtgttcctagag

SEQ ID NO: 419730 - DNA, 520 bp, Homo Sapiens
ttccaaggagatatgtctttggcaggaggatagtattggtaccatcttagatcacatgcaatatgtaaccctctatgtatggagcttccctaaattctgaagttgaggaactcccacaatcacctgggatgcattttctaaaatagagatttttcaaggaacttaacagaggattttattcactaggttatggcagattggcatcctgtactttaaaagagatcactccttcccccagaagatctaatgcccagtcactttgtgactagtgctatcaactcattgatttgacctttgacctccaaaagctgaggacttaatcttcatggtgaggatttttgttttttccttgcagtgacatgtacaacttgataactcacctcataatgcttctgcattgaaagactttttttgataataaaaagaataattattaacttgctttaaaagaagttgctccattatgaaaggactgaaagacaatgtaattattctattagatctacccttcatccctgtg

SEQ ID NO: 419731 - DNA, 147 bp, Homo Sapiens
  misc_feature (76)..(95): n is a, c, g, or t
gcgatctagaggatcccaaatattggtttcaggaaatagcagagggttttaagagtcaagttgatatgtagtcaannnnnnnnnnnnnnnnnnnnattaacctttcctatggtgctgagataaatactcaatttgatgtggagataa

SEQ ID NO: 419732 - DNA, 316 bp, Homo Sapiens
aaaaaaacaggagggagaaaaacaaaagaaatgctaagagcctggatctccataggttctataattagcacttgaataattacatgaatccatgtacagggattacagggagaagcctccagaggccccttatatatggtgactgccatatgctaattcatgtgtcctccccggtggcacattccaaagtatgaccaggaacctacagcatccaaacgggcattcagtgcagtccatccagaatggactctcttcctaggcagtgaggtcagctcctgagggagggaggcttccatagaacatcttgctttctttt

SEQ ID NO: 419733 - DNA, 126 bp, Homo Sapiens
ttttctcgtttacatcgccatctgtggaacaaaatgctaactatacctcacatagggctgtttgaaaaatcttaatctgcaatcaaaattaggagctcgtgtttaagatttcaaaacccctcgaca

SEQ ID NO: 419734 - DNA, 516 bp, Homo Sapiens
actactttccacaggcgtactttataaaaatggccttctgaaaacatgagcggaatatcttttctcccagttgctgcttaccctggactggtttatggtgctctctgccatgaataagttattttatcacacatagtcaattgcatcaaatttattagttaggacataaactcagctactattaaaacaaaaatctaaacatagcaatggcataacataaccaaatgaaccaaagttcatttctttctcacacacaaaatagtctgaacactggaagtccaagactggtaagatgtttccacgatattgggaagccacactctatttatggttcagccatcctcaacccatggcttccatctcatattctagggtgacaggtccaaatctcatccaccacatccacactccagccagtgggaggagtagaaaggaagcacagagcacaccccatttctttcaagagtacatcatagacgctgcatactatgctcctctcagatccccctgtggggg

SEQ ID NO: 419735 - DNA, 231 bp, Homo Sapiens
taaaataatccacacaatactttataacactaaatgtaccataatatattctgtggggctactagatggatgctatatatttattaaaagagcttccatcagtgagcatcactgataactctattggatgtcataatataggctgcagccactggtagaagctaaaatggaaccaaggattgatcactaagtttctatcagcacttcagactttattcttttccctcatgg

SEQ ID NO: 419736 - DNA, 212 bp, Homo Sapiens
tgggcgacggctgagcactttgccaggacagagagatatcttcggatgacctagtgcgccttagagagtgtggcggagtatccatatggtctccaaggtgtgtatatggttgccagctgcgatgacagcttcaaatattgttgagatgaattctaagccaccaccgggagcgaacgcagcctctgagaaggaacgcagctcatccattgcag

SEQ ID NO: 419737 - DNA, 168 bp, Homo Sapiens
ccagcagtttggacaggcccatgaaggacatctgtgtatagttagcaaagaatgccagtttacatgcttaccagtagtgaatgagaagaatatgtgtttctgcaccttcatcaatagtagatattatttttcttgttggctcaatttctgtcagtgaatgaagagaag

SEQ ID NO: 419738 - DNA, 124 bp, Homo Sapiens
tgggatgtccacagggcagagctaatcctgcgatgctcctcagatgttgatcataagcaatatgttcatcatggcgtaacttcaagttaattgataaaaaagctttaaaatttttctgttttga

SEQ ID NO: 419739 - DNA, 232 bp, Homo Sapiens
  misc_feature (178)..(179): n is a, c, g, or t
  misc_feature (210)..(210): n is a, c, g, or t
cgggatgatttcttgaaatccgcgactgcgactcgacacgtcggacactgtccgacgaagcgacgtaacggcattgacatagttagcagtgtttcgtgatgcaacaggccagtcacccgaactctttcccagctcctagcactgtacctatacctacgaggatacctaacccactccnntaggcaccccatacaaaccaggatgcgcagntacccatgaccgcagatacctt

SEQ ID NO: 419740 - DNA, 455 bp, Homo Sapiens
aaggtgctaggaacatatcactattgtgtcatcaagcagaaatctgtgactgagtatgagatctcatatagtcggattgcctatgttctatgacttagcaaagtgacgctctatttgcaaccgtttatgattgacaccacccggagaggttaaggatgacagcaacaacaaaggcccaaggcaaagatacaatctgaagaatatggtagacaatgaatccttaactctctatcaatggttctgtaattttatctaaatttggaaatatttgttaagagctgataaaatttcatggtacatttttggtatatgattagatgcagtgcttatacgcatccaatgtttacgtatagatgcctgatcgcagaacatcttcggaggactattgtcattttgcaaggcaattttaatggtgttgaattaatcagagctagattttcactgttgtatcagaa

SEQ ID NO: 419741 - DNA, 179 bp, Homo Sapiens
gaacaacaaaaggcttggcaggtaggttcacatcatcatttctcagatgggagagcagacaagacagaagaagagacctgtctaacatcacagagtggggtcaggagtagatccagggctcctggtacctagtccagagtgtttccaccatcttcaaggtctagatctttgggtgtcca

SEQ ID NO: 419742 - DNA, 444 bp, Homo Sapiens
ctcctcacagtaggcatccaatcctataatttacgtcatcctctccactccattctcactacaaaagccttagttcaagttcatttttttcatgcagaaacatcaccacctttctgtttacgatcgtcatccctacctcctccaaattataactaatatccttcttcatcttaaccttgacaccaccttcttgtgtttaaatcctttcaattcaccacttcagggaaagaatttggcttcagagaagggctcacaaggccctcttgacctggcccctaagcccagactcaagcctcctttctcattccccactccccacttagccttgccaatcttgctgtcctgtactactcagtgtggacatctccatcctggaacctcgcctccatcccacagaatcgggatctgggacctcacctccaccccacagagtaaggtcctggg

SEQ ID NO: 419743 - DNA, 104 bp, Homo Sapiens
gcccgtcgtggccgagcgggagaccaagtccgtcagcgtcgagggcacctacgacaccgacctgaccgaccgcaagctgatggccgcgctgctcacgcggcagg

SEQ ID NO: 419744 - DNA, 190 bp, Homo Sapiens
ccgtttaggcgcatggactgtattagtccgtctggtcgtccaggagccatgtcatcggtcttacgcgaccaccaacgtggtatagacaaattcgcaacggaccatggacagcctcacccatcaccgccgagaacttcctcggcatagcccttgtcatcaatcgctcgcaggatggtcctgcctttgtgtt

SEQ ID NO: 419745 - DNA, 417 bp, Homo Sapiens
cttttccacagggagggaataaatacttttttctgtgtcccggagtgtgggtgggattcgtggatacatttctctggttcactatttcaatgatatgaaggagcctcatgttgcagcacagaagatttttcatcgttggaagttaaggttagttcaccttcattgattcctccctacactggactaaagcatttaatctagaaacacttaggtctctatatagcttgtcataatctctatgcatagaaaggggctttctagaacctgtcagcatattgtgaaatatctcctatatcaactgataataagaaatcagaattgcttaattgtggcattaataaagtatcacctagattgaactaagcaggaaaattttagatgagagtttaccatcacaagcaataaacacacaacagt

SEQ ID NO: 419746 - DNA, 151 bp, Homo Sapiens
tacttttcccagggctcctatacagaaccaagactaaaagggtcgaggtggaataaaatgttcctatagttcgtaagcagccgtagtttggagtgctttggcatgtatcaatggaaagccgggatagtgtggttaggaatccatactctgt

SEQ ID NO: 419747 - DNA, 582 bp, Homo Sapiens
ttccacagtgactagacattttttagacatttgctgttcttgcttagttttaaaaagggttatgggtatttagcccacatttcctcacatcttaccttgcctctaagtacaaactggatcgtaaaaacagcaacacaccatatttttctgcctccactccacccataattgtggcacctctattctcctgaatgtgtagacattcacccttttagcttcgttggctgtcaacccctactccgtgccctcccctaaaatactagaaaaacatcactgatccatcaaagtgaagtatcttatgagacttactgcagtatgagagaactctgccttaatggtgtctaggcagtgtctcagaggggaaatgacaggataggttattagggactaagttgggtggtttcagggcgggtcttgcaaggcaggcctctaatagggattgggtagattttgtgacgtaatagctgtagatcggtgggcatagcaggaggagaatattgaagcaagttttgatggggaaggtggtattcttgttaagtaaactcttttagttggtttacaattttcattttcaggaaaaag

SEQ ID NO: 419748 - DNA, 420 bp, Homo Sapiens
tacttttccacaggttggtaggttgagagtattttctctttggccgaaaccatcagtccatactgatacttgattttgtgctatgccttagatatgaacgatggagtggtcaggatagccatggatgccattccaaagttttgtgatttgaattttcataaatcatattttaaccaaagcattactacttaaaggaatcttagggtgaaccctatgaatccttcagtgcgcttggattttgatatttggggtccatttaaaatggagtacctgtatgtatttggattcagctttaacttggagataatcccgagtcatgctttaaagaagttccttctgagatcaggagctcaggtgtttggtgaactctgggaaaactagacactcccctttacctgtatatagttctcccttctggag

SEQ ID NO: 419749 - DNA, 126 bp, Homo Sapiens
tgcccttgaagggctccgtagggctccagtataacctcaacctaccacacatggccatcactcggaaattagctcttgaattggaaggagcactagaaaagtatgtgtttaaaatacactggaatg

SEQ ID NO: 419750 - DNA, 112 bp, Homo Sapiens
aatggcaacgtcacattgcggggatggttctcttttcatgagataacaatggaggttacatttgtgtgtggccaattctgagtctgcgagtgagggacacttgttgacttct

SEQ ID NO: 419751 - DNA, 169 bp, Homo Sapiens
catgcctacctgggtccagttgtgtcctgtaactcctgctttcctgggacaggcaggctgctccgtgcctcctggccatcctactgggtgctggacgctgtaggctgctccatgcctgttggccattccctttggtgctggacagcactcacattgtgagatccactgg

SEQ ID NO: 419752 - DNA, 493 bp, Homo Sapiens
aacaccggagaactcggtcatccgcttgggagccaggacatgctgagctggaaaacctagccttgggtcagaactgggctcccatcaatgcctggtacatggtaacagaaggtgctcaatagatgtctaccaagttgagtgaaagggcatctcactgtttgagcgtgctttaaaaagccttatggtgtgtcagatggaggacgcattgggagaggctgtggtggagacctgtgttaacagcctgtcacaacgttgcaggcgatatccaagcccaaaagacatgcttctccctgtgtgtccctgggggagtccatcaggtgcatggtaatccagtatgaaggcattggcgttatgcctgcattttctctcactaatcatgttcagctctagttggagacataggtatatataatctgttcctttccatttaaagaaattggctactggtgtagaaattgtacatgaacaatctcatttatgaacatcataatta

SEQ ID NO: 419753 - DNA, 153 bp, Homo Sapiens
caacaacccccctagcaatccccctcgcaatccccatattcgtaatcatcggattcactccactcgcgctagggaacacactcgcatcgcacacccacaacccttcacacccccaaactcttcccttctcatcaacagcgctattcccctccg

SEQ ID NO: 419754 - DNA, 139 bp, Homo Sapiens
aacgttatgcaataagtcatagatgagaaaattcggaggtcttaagtgaatagatcttaggcattaagtaaatacattctacggatgatttatcaaaagagaaatagtgcagtaaatgtatttacttaatgcctaagat

SEQ ID NO: 419755 - DNA, 221 bp, Homo Sapiens
gccagtccctcaccctacttctttgtaactccatcataattatacctggtgtgattctctgacatgtgtgttctaagatgatctttgataaacgcctacttgagtttaagattcagcacaaatattactcccttcattaaagccttgactacaagcagctaacttataatctcctctcctgcttcaaattcaacatagttctatttagtaattatttctta

SEQ ID NO: 419756 - DNA, 428 bp, Homo Sapiens
ttaaggagactcactatgaatccctttagtaaggtaaaatcttttgtactgcaattaacttatctcaaattatttagttttaagatcacattttatatgcccacttctcctaaaatacagcactcctccacttggcttcaactcccaaataagaatgtaacaaaccttctatttacactgcacttacttcagatctcctctttcctctacccccaggagatcagccatagtgaggagccctctttctagcaactcacacatttggaggcatcaaactaagtcactttgcatttttcctgacttgtgtatctacccaattgctcttctactctgtttttcttcaaaagacctttgatattcacccagcagctcccctacaaggtaatctcccgttcaggccaaatgaatgggtttccccttccaagtta

SEQ ID NO: 419757 - DNA, 349 bp, Homo Sapiens
cgttgtatgctccccgctcctctctcctctcccggactgaagggcaggtctctggccctacatggtccacctctgtcagccgccaccacactggctccgcctgggaaaatcctgcccgccgatgtgtaagtgtgtcactgccaataatagtgcgaagcctccaaatctgagggcctttctaggatcgtttcctgattaattaggtcagcatctccaaaatcaatttccagcgaagtcgcgccacctggtagcgccgttccctgcccagccaggcgagggagttggcacgggaggcaattccctggcctctggtgcagttcaggtcttgtctctacctcatctcttctgt

SEQ ID NO: 419758 - DNA, 166 bp, Homo Sapiens
gtgcagggagctgtttcatctgaatgaagtctgtttgggggaactgaaaggattaactgatcctctagagtagtaagccttgaagatggaattccctgtcctttcttccagtagctgtctcggggggatgctttgcttgactgtttcctctgagcacccctgtctt

SEQ ID NO: 419759 - DNA, 184 bp, Homo Sapiens
tacgcacacgcgctttcttccagatcgtgaaacactttttagctcccgcgacttccattgctccggagggaccttttttggtacagtcatagttttgtttaggcttactttttcttgtcttacatgtgtggcagtatttttaaagaacttccacatcaagtatttttcctgtatctatacttga

SEQ ID NO: 419760 - DNA, 232 bp, Homo Sapiens
cccctaatctcggctgatcgtcccgcgctaggcctcccaagttcctgagatggcaggttccaaccatcgtgctcagtttatttcactataatattattcgtaaagacctactattactcctgtcgcgcagggagttctcagactcctgtacactcgctgtgctgtcttggaatcccagaatggtgcgatgataggcatgtttcacgtagtggctggcccatgttgattcttg

SEQ ID NO: 419761 - DNA, 145 bp, Homo Sapiens
ggtagatcgagccggtacctacttttcacagggagtaatgtagtcaacatgctcacacagagactttccctcttctcacaacctgctcctgaaagcgagttggagaataaaaggttgttaaataattgtacaagttctgaggaaa

SEQ ID NO: 419762 - DNA, 456 bp, Homo Sapiens
actgctaagactagtaaaacaccgcgggcaggaaagaatggaggattactgaataaagccctaatgcagacagaagttactactatgtcactcccacaaggaaacatcaaacatcaccactcccaggagcctcctcagaagcaacctgccagccctgggctggtcattctctgatagtaacagggccgttttgtcccactttcctccgtggacttgagctcactaagggcagccttactgcaccctcccccaccccatcctcagcacccagtggtgtgcagcagggttgtgggaaatatctgccagacagacatgcttaagatgtggcccgagtcccttcccctttctggagaggcctgcttcactgggaaggcaactctccaatgccatagtacaaacccctagagagcctgcatcccttccagtcccatccctggcagacactgggaacgcaga

SEQ ID NO: 419763 - DNA, 223 bp, Homo Sapiens
ggagctcggtacccatcgggactgaggtcacgtatccaattgatatcgcagacattgcggagcgtcttaaggtgcggttgtagacaaatccacacccatgtcgagctaaggtgaagatgacgctttggcgcgggtcttggcgtcaggcttcgactaccaccacagttggtctccatggttctcttgtgtaagtacattcaattataatattggtcaaacgacg

SEQ ID NO: 419764 - DNA, 304 bp, Homo Sapiens
gataaatggcagctagtgataagatactcaccataagattttaagcagtcttgtggttaattctgttatgctggaagttgatattgtatacttctaagttttaagagcagaagttgattaaaaatgaaaggacacactcaaaactgtgacctgaacttcctgcagcatgaatgcaggatgagccatctgcagatgctgcattcatgatttactgcttttgtaaggtcaagaatatatatcaatcattttgtttgcattacaaaattgatgctttaggaaagcattatgccaaccctgtgaaaag

SEQ ID NO: 419765 - DNA, 402 bp, Homo Sapiens
  misc_feature (340)..(362): n is a, c, g, or t
cctttccacagggacagtctgccttttttttctccccttctcacttctgactgtccaacaataaacactagtagcaatggcaataaacataactcttagtatgtgccaggtaatgttcaagcactgttttaagtgtttttcatatattaaattatttaatcctcagattaaacaataataaatgtgtatattgtaatactagtaatgtagacattaaatcacttgcatgtctaataaaagtaggatttgagcccaggtcgtctagttcccagagtctgtacttttaactaatctgccattctgcctttcagtaacactcttctttaagtcaagtcactannnnnnnnnnnnnnnnnnnnnnnaaatgtgtcttttaagataccatttgccctgtgaaaagta

SEQ ID NO: 419766 - DNA, 115 bp, Homo Sapiens
gtaccgtagtcaatatgcagtttttttaatcgtactccttcctgacatctccccgttccgagtctccaaagttcattgcatctctctgtatgcctttgggcactcaaggcttagt

SEQ ID NO: 419767 - DNA, 124 bp, Homo Sapiens
gtccctaggtagcagaagcagctagaaaagctcagaaagaacgttaagaaaccgctagctttaaggataaaaaatctcttggacaaaaattaaaagaaatttctactaactttaagaacatcaa

SEQ ID NO: 419768 - DNA, 112 bp, Homo Sapiens
ggcacatgggcaggtccaagaatgatgctgagttaaggttaggtggctattcagaaagctacttcgacttgtatcccatattatggatcaaggaccttaaaaatagccatac

SEQ ID NO: 419769 - DNA, 189 bp, Homo Sapiens
taccggcaactggcacgtcttaatgacccctccacactctgccaggccctgggtgtctccaccagcatacaggctgtgtagaaagcagctctcctagtgaccagggtcactgctgcagtttcagtgtttctccacaaaatatggccctcgaagaggctgctcagcttacagaaacctggcaggtggcct

SEQ ID NO: 419770 - DNA, 165 bp, Homo Sapiens
  misc_feature (34)..(34): n is a, c, g, or t
tagaatcgagctcggtacctacttttccacaggnttagtagggatgactggaggagagagactaattagtttattaagcatgaaagagttttttcttctttgggaagctttttttatatatagctcagtcttctaagaagtaagttcacaatttttcctttgttt

SEQ ID NO: 419771 - DNA, 543 bp, Homo Sapiens
aaatcgagccggtacctacttttccacaggtctacaagttgctcatgatgttgggtggtaaatggctatgaatagagctggcctagagataccatgagatatgatggcggaagcctgacccagaggcataggcatggccagcagccctgtgctcatgcttcccaagtgtcacatgaaagatattaagggatgtgacttaaaatcttatgtaatttaggacaagaaagattaaaaaaatataccattttttagtgggaattctgcctctctctacccctctactcaccgttgaggaggtaaagtgacatctgattggtaaatctggggggaaaggctggtctcaacttgcatatgttcctttatatctttagttataattaatccctagcctttaagtcataggtcctttgagaaggtgatgaaagctatgggtcctctccctcgaaaaatgtacatacatactatacaatgtcagtgtatgcactgtccccttctactccccaaatctacccacataatttatagatccacatatctcaggtt

SEQ ID NO: 419772 - DNA, 538 bp, Homo Sapiens
gtgaacggagccttcccctgccctgcatttaaaacttaaacagaggttccagcaggacccctctagaatctggaggcacctctctggtacagaaggttgagaaagtcaaatttagggatcgttactgtgcaccttgtcacttttttccttctattctcccacttccaccttgggagacctgttaatatacataggactcatgctcctcaacgtaccatggggttatgtcccaaaaaaacccatcatgagttgaaaatatggtaagtcagaaatgcatttaacatacctaacctaccaaacatcatagctcagcctcacctaccttaaacatgcacagaacccttacattagcctacagctgggcaaaatcatttaacacaaaacctattttatttttttaaaaaagtgttgactgtatcacataatatattgaatattgtactgaaagtgaaagaatggttgcatgggtacttgatgtacagtttctactgagtgcatattgcatttgcaccatcgtaaagacaaaaaataagtcaag

SEQ ID NO: 419773 - DNA, 229 bp, Homo Sapiens
cccccggccggtcctactttcacagggatactatctatggagtctaagtgtaggctgcgtgcagtcaccacttcggagagacacagagaaagacatggttgccagagtcccagctgtttctgtcttcccacatctgtgaataataaaggcttcaagatgatcccagacagcaaccatcttactgcaacatcatcagagatttagactcgattcacccagctgagctcct

SEQ ID NO: 419774 - DNA, 383 bp, Homo Sapiens
gatgagccggacctctttccacaggaaatgtatggagggacaaacgttcatctaatggaaggcaggtcagataacctggtataaaattgtgctgaaagctccattaacccactacatccgtgactgcgtcctatttttctggttatatcaccaaacttaataccccaaattagaagcacagcatttcagagttcaaagagtacttagcgcctaattcggggcagccctgctgctagtggccattgtggtctaacctccccacatcctgaaatggcccctgctccccgactcccactcagtgtctccgcagctcccgttacactaactcccacgtctcagtctgcctgctggggtcacacagagagggtcaaatgcctctccac

SEQ ID NO: 419775 - DNA, 170 bp, Homo Sapiens
gtcctacttttcacaggcgctgaaaatgctaagaggctccacggtaaaacaacctttctcaagttgcattaatgttcctaggctctaggttccttcaaatgagagaaacaaatatttcatttgttttcggattataatttccctcaactccgtgtgttatttgtttccta

SEQ ID NO: 419776 - DNA, 519 bp, Homo Sapiens
ataaagacaggagtttcaactatagttcccaacatgtgtgctaataactcttaaacacgtcctaagatgttaaagtatcaggagagctcagcctgaaagagtgaatatagaatgatcaaacaaaacaatgtatgagtcttataaatgagtccactaaggattatagaggacatcttccttaggcattccttctataatacagtaatgcttacttttggaaaataaactttctgagagctattcaactcgcagtacatttttccaccaagttagatgccaagaataataaatttgtatactgaaagatgggataaaagaaccattcattactcacttttacttagaaatcaatgaattaactaaagttctttcagaaatatattttatatcatgaattacatagtattttttgtggcaaagcttaagaatctagctctcatataagcacttgctcagtaaaagttctgacctctaaaatatttttgaaatatcttcctaaataatccagaaagttacaat

SEQ ID NO: 419777 - DNA, 177 bp, Homo Sapiens
gctcggtcctgtgtattcgggtgtgacctattcgcaggcgggttatgtaacttgaccaacgtactaccagcaggacccagcgtcctaccagtcctactctcggcaaacgattgcagtgccttcctacgtccttcccgtaggtcaaacacatcaccgttgcattcagtgttactagta

SEQ ID NO: 419778 - DNA, 252 bp, Homo Sapiens
  misc_feature (34)..(34): n is a, c, g, or t
ccttcctttcctgagcggctggtgacccagcttntgctcatcgcccggggtcacactgcatcataaaggaaaggatcattttttgttctggccaaagcaaaatacatgcaataaagcatagacattagccactctgcttagcactcaatatcaaactggcaaggtttagatttaccctcagatgggccctgtcatctttaacccaacctctgactaggagttttaacacatggcttttgggcaagatggcca

SEQ ID NO: 419779 - DNA, 287 bp, Homo Sapiens
tttcacgggattaaaagacactctttcacattgccacagtcaggaactttcataaccttgagatggttcatctctgttccagcagaaaccactagtcatccagcaaaagcagcaagaaaaggaaaatgttcaccattctgttaatttactggtcccttgcaactaagtgattaatctatgatgagagggaagagagaaagaggtacctggaaggaagagtctttgttagatgcttgtttgatctccataatcctgcaaaaccaattgcgtatctttttcccctccag

SEQ ID NO: 419780 - DNA, 440 bp, Homo Sapiens
  misc_feature (101)..(156): n is a, c, g, or t
gtttacagggttataattactattcatggtatatcatttcttatctctctaaagatattcatggtaatcattttaaagatttttccccctccctgcagagnnnnnnnnnnnnnnnnnnnnnnnnnnnnnnnnnnnnnnnnnnnnnnnnnnnnnnnncccgtgaaaggctttcctccaatctctgataatattcagttgttgttcatctgtaagagggactacaaagctgtttggacgctttgatgtgtgggtggggctagttgacactgagcttcactgtagggtgatctggctgggctgtttgattaagaatcagtgttggtatcttcaggtctttcctcttaggcttctcagacttcagagaagatgcttatcatctgccacctgtagagtgaatggccagctgccattttcactgggagccagcgaagatgagaggg

SEQ ID NO: 419781 - DNA, 362 bp, Homo Sapiens
cctttagccaagaaggggctagaaattgctctaaggaggacattctgggagagctacagcctccatgagtaaattagactgagaggtggcaatgtttgcatgttcatttcccagatgtgggatgaataatttaacctgaaaggtgaaatgctcaggaaaagcaataatttaacctgaaaggtgaaatgctcaggaaaagcagatggtccagagatgccatacttctcatgcaacattgcttccattgcttgaaattggtgtctgattttttcatagaaaaaatgttatgaatattactttggaaaattgtagtgaagtcatggtcacacttgtgtgtgtggtccagttctttggggttctct

SEQ ID NO: 419782 - DNA, 535 bp, Homo Sapiens
gctggagtgacctcagtggttggctggaggggactcctggtttggtctggggcagtcgtagaatggctcagtagcagtgctggtctgtaggttggactcagcttggattattatgcctgggttcttctcacagtgctggtctgcagccactgtgtggtctgtgaccgtcctttccctgtgtctcagtctttgagaatgatgatacaccccccaccacatccggtcatggtttgcaccttgggtttcaactcaatgactgcttttcaggaggtccctctggggctccttagggttatggctgctccaggctggcaaatccagatcatgcaagaggtggcttaaccctctccctctcagggacacgaagaagatctgttgcttccagattgcaccaacacacatgcctagaaccccagtaatgaagctggaacctctgctgtgtggtcagacaaacccaaggataaattgcccctgcttcttgggatgacactaggaattcgccattcttcactaggcagtcccccctgtggaaaag

SEQ ID NO: 419783 - DNA, 115 bp, Homo Sapiens
atttttatcttctctatgctatactctatagccaaagcagctctgtataaagcacagatctattcatatcattctccagttgggccacatttaattgttcttattattaagaaag

SEQ ID NO: 419784 - DNA, 178 bp, Homo Sapiens
  misc_feature (64)..(128): n is a, c, g, or t
cttgagacataaagagcctccagatctctggcatgctgtttacagatcaacagacgtcgatggnnnnnnnnnnnnnnnnnnnnnnnnnnnnnnnnnnnnnnnnnnnnnnnnnnnnnnnnnnnnnnnnngctcaatagatacacccggaaaactcattgcatacaagattataacctag

SEQ ID NO: 419785 - DNA, 175 bp, Homo Sapiens
gtcggtaccgtgttagtagctggaactgaattgttttgatgactctgagatcaatgtgagtcagtctgaatgctgctggtgctgatcgagttagatagagcccatgacatatgccatgcttttttgatagaagcctttggtgctcctgaaaccccagtgtttgtctgccattgtg

SEQ ID NO: 419786 - DNA, 204 bp, Homo Sapiens
tttctaaaattcccttttgattagctcgaatcagctcatctaattggactctttcctgtaactggtgttggaattgagacctggtgattccattcatactgtttgtcatattactttattgccctgaagtctggtatgtgtagtctagtgcccttcttttcattttccctttgtagcacctccaaaattcaccttaattctggt

SEQ ID NO: 419787 - DNA, 165 bp, Homo Sapiens
  misc_feature (24)..(24): n is a, c, g, or t
ctactttccacagggctaccccangaatctactgttttatcagtgattacgcataaatatgtacaaacagtatacagcattcaatctgttgactgatttccattttagcaactcgcatttttagtttccctgatgttcaagttttgaggtattactaaatactat

SEQ ID NO: 419788 - DNA, 284 bp, Homo Sapiens
  misc_feature (56)..(91): n is a, c, g, or t
acacagggatcaattcaaaccccacttccaccccacatctgtgcgcaagaatgttnnnnnnnnnnnnnnnnnnnnnnnnnnnnnnnnnnnntttctgcaatatttcatcttcttaggccaggaacttatcatgacgaaccaaatgcaatacctatttcctgaccaaagctgttattcaatatctctatcatttgagaaatagtttgatttcacgttgacaagggtcacactgaggtcttaagagaagtaacaattacaaagcatcctagtccctgtgaaaagta

SEQ ID NO: 419789 - DNA, 282 bp, Homo Sapiens
ggtgtggagcaggctggggctggcccctcattagtttcccacctgattacttaggtggttggcatctttatcaaatttggacttgcactgatttgcccaacgtttcccctttctacgtcgggggcatatagaagggggttcttttgctgagttaccttggtctctactagtggggcactgcctcttcttatgacctggctctccacacagaaaccaatttggggttttctcccttttcacttcaggagactttattgccatggccaatattttggctttgtg

SEQ ID NO: 419790 - DNA, 463 bp, Homo Sapiens
  misc_feature (54)..(63): n is a, c, g, or t
  misc_feature (126)..(166): n is a, c, g, or t
tgctttttcctaggtacataggtcaccctttattgtttatctgcatgtctttcnnnnnnnnnngttgaaaactggacattttaaataatgtagcttctctaaaaatcaaatcctcctctttcccannnnnnnnnnnnnnnnnnnnnnnnnnnnnnnnnnnnnnnnntatttagtgacttttccaagctaattctataaagtctgtaatctttgtcccacatggccactgaattttctcttccctcagctactgactggacagagatgtccttaaatgactgaactaaaaagtctcctggtctttactggacctctacctgcttaatgtggtactcagccaggcagtttacaattctaccttagcctttgccttttgcttgtgcagagccccaagtttagccagaggtgagcttaggaccttctcaggtctttcctgagcatgcacacaattctgaccttacat

SEQ ID NO: 419791 - DNA, 105 bp, Homo Sapiens
tagccagacggggatgtaacgaaatggcttgtgcacaagataaggtgggagagtgttacccgaaaaaaatgaacaagtcataactatagaacaatactaacccaa

SEQ ID NO: 419792 - DNA, 241 bp, Homo Sapiens
atgccaaccttggaaaaagtaggtcaaggaagaaatcagaacaaaccctgtgaccattccagcctccttgcatcttgggcttgggttgggaaactgaccagacgaagctggagctgccatcacagagaaacatcaaagcaaaagggttccaggaccagagattaggtaactagctacaggccagaggaatgcttccctctctagatcaacaagcccctcctttcactctgaaaaaaagtaa

SEQ ID NO: 419793 - DNA, 118 bp, Homo Sapiens
ggcagatctgctttatattacttacttcctcctctctattcataaattcatgtgaaagagaaaatgcaaacattttcctagacaaagtgaaacatgtcctcatatcttactttaaaaa

SEQ ID NO: 419794 - DNA, 539 bp, Homo Sapiens
  misc_feature (454)..(454): n is a, c, g, or t
tagtaatgtcatccaggagctggggcctggaatgggggtctcacaactctggccagtgccccatcctactgtggctgagctggtatccaagaggtaagacaaagtcctcctcagtcttccctgtcctgtcctcaagtgaaaggaaggggtctcattctcattgctgcgagctgcactgtctggggttgggggaggagtggtgcaagcactcccttagccacccctgctggtgtctccctaagtcacatgccaccctagtacactggttctaagcttagcacagcactaggagttgcctagaaattgcaatccttgtgccctagactgcctttcaagtttacctagaaccccagagtactttggcctgcgattggtgaggttactgagaaacttaagttcaagctgctggcatgagcgattcccatctggttagggctgatccaaatgctcccgncatgcctgggtgcttgttgagcatagcacaactttgttcccctctgtggcagggcagcactaagttcaatgtaaagccccccagt

SEQ ID NO: 419795 - DNA, 405 bp, Homo Sapiens
  misc_feature (278)..(319): n is a, c, g, or t
tggcagggaactgatggagagtcttccccaaggctcctattctagccccgaacaaagcctaatttgtaggtctgtgtgcagacatatgctgggacagccaggcacacagcctagagtttggctcaaattccttccttctgcctgggatgtgggggtggggaggagagtccactccctgcacatccttttccggcaccagagcaggcaagagttagacttcccgggttccagtccctcttcacacttccttatctgtgtggctttgagtgaagtccttnnnnnnnnnnnnnnnnnnnnnnnnnnnnnnnnnnnnnnnnnntaatgccatttctcagggtggttgctgagagacagtaggtaaaaggcttagaaaagtgtctgtcccaaagctgttatcgatgctgt

SEQ ID NO: 419796 - DNA, 424 bp, Homo Sapiens
gggtggggtccctggggccttctcactcaccctttccctgtggtagtgagcttccactgcctctgcgccagttccaggtgggtggctgctctgcttcattcctctctgttctccatgggtcccgttgcttctgttacgagtcccaatgcgttctcgtggatgatccatttgaagaactagtgtttactagccattctgtttcttcttcatgagagcagagcgcactacctgcttctagtcagccatctttattctctactattatatcccacttttattatttttgatatgaatacatatatttttttattgtggtaaaaagcatataacataaaatttaccattttattcatttttaagtgtagagttcagtactgttaagtatattcactttttcgtgaaataaatatccaggtataaattt

SEQ ID NO: 419797 - DNA, 157 bp, Homo Sapiens
acgggatttgaccaagtgacattatggaccaccagtttctcatcttaacatgaggtcaacaatgccaacaagatacagaattaaagcatggatatagagtaccagcacagaccttagcacgtagtagtctggttccttcctttctcccctgtggaaa

SEQ ID NO: 419798 - DNA, 508 bp, Homo Sapiens
ggctagctttttatattgccttgcacacacagttcccccttggattcaaagtgctctgtgtatgaaaaaggaagaacggtatgcacttgaaatattatcttattaaattgttttagttcttaactctcatacccatggggttgataggaaggaagcagcgttattcaattataaagttactctcttcttaaacaaatgctttaaattataccaaggcaatttttttcattggtggcatttaagtggaagttatatacagccgtctcctggggcactatactcttgtcttctacccttaatttgacctgaagaaatttcccacagccgagttagctagcaggtgaaggaagcagaaacatgccaatgtgcccattaatcagaactctagacttagagaacacatatatcaatgttttctaaaagctcttcctaatagggcctggaaaaaggcagaagcattttttcctctacctaagaattatcttccttaaatatgcttattttggaa

SEQ ID NO: 419799 - DNA, 311 bp, Homo Sapiens
tacttttccacagcggatgatcatattctttctacgtatagtggaaatacaaaacgtaagcgtttaaaccaaggtgaaattatgctcttaaacattaagagagatcttatttcttttggcttagccaatcaataaatattcactatatattccatggagagcatcataatacgtatgcctctgcaacgctacagaaatctataactaagttactcaatctttcattaggccatcagccacacaagtcagtatttctaagctcttctacagaggtactcccagcactacaggagacgtttatatgccctgtg

SEQ ID NO: 419800 - DNA, 481 bp, Homo Sapiens
attcaacttaattcccaacatgtaaatgacacaggctttgattgtgttgtctcccatatgctttaaaatttttttaatataattcctctgatagtatttaggatttaaacaaggactagggtgaagcaaaaattatttctagacactaaacttataaccatactcattaggatcctggcctctatggtacttcccacactgtgctacaaagaaccacgaatatttccaggtgctcgttccaagagaaaaaaatgaacacatcaattcactccatatcaaatctctactgtaaagacctaattttccacattcgatgattttaaaatcagtatgtgttctacaaaacatgttaatatggtaggggagttttcttccttcaaaggtaatttcttattaaattaggagtggaccttttaatatatatgaatgtaggtatgtatacatatatacataccctataagatatatctccctgtggaaa

SEQ ID NO: 419801 - DNA, 454 bp, Homo Sapiens
  misc_feature (271)..(271): n is a, c, g, or t
aatgaaacactgttgagatgaactcttcccttaaacggagcagactggatagggagatgctactgctgaagggtgattactcagagtgagctcatgaggtctccatgttattttctgaaaaccaggattttctttccctttcctgctgccttcctccaatgtttttattcctggatgatcctgcatgattgtaactgatattatcagctacgaatggtcccctcagccctgggaataagcaggaggtaaaagacataattccagttatagnggtgcttatacttgagttagagaagagcttgaacgacttattttctatcctcttagggagttcatttccaagatacagacagtatattttggtcgtgtgttgtaggatcagatgcttccttggttctctcaatgaatcttctgtttgtttttgtaaatagttggcaggaaatctcagcttctt

SEQ ID NO: 419802 - DNA, 287 bp, Homo Sapiens
  misc_feature (57)..(96): n is a, c, g, or t
cgtcttctatcgatctttctttggagaagcattttccaagtatattccatgaatagnnnnnnnnnnnnnnnnnnnnnnnnnnnnnnnnnnnnnnnnaatggaaaaatcttgggatctgttgacctgaaattttgaggagtgctagctaacatatttaaccctgaggatcaacagtgcacagctgcacattacaagttctaagaagtttgggtttgttagcccactgtttcctaaatcgttgtgctcagaaaaactccctttttaaaatattagtattctgtgaagtc

SEQ ID NO: 419803 - DNA, 132 bp, Homo Sapiens
cctacttttcacagtggtggtgatgtgctggtgagtaaactggctgttgtaccggaatccaactccaaaccaaaggcccctagggagaaacaggagacggcccctgcgagccctggctgctccccagcaggt

SEQ ID NO: 419804 - DNA, 354 bp, Homo Sapiens
cctactttccacagggccagaactttttttaaaagataacaaaataagtaagatactggaattgatttgaggaccctttgcaatctctttatgttctctgctttctaggtattcactaccagacctcgccaacctaaattttaactctctctttagtcttgttgaccaaaatgacttttcttcaatctaaaccatactgaagctgaattcaatctaactataggaagacattaacatggttcaaataaagctttgcataataactgtttctattatgttgatggtcttggaggtaactaactgttaattcatctttaactgaagaattattatagaagtattctgggggaggtg

SEQ ID NO: 419805 - DNA, 291 bp, Homo Sapiens
acttggcaaaagccccgaggacattcatctgaattggagatagctcttgcgttttgtcatgagtgctctgaggtaacaggtagaaagaggatgatgctatgtccgggtccttttatttacactgacctgtgaaaacaatagaaaccttgtgtgatgcaaaacaacataagctaaattattggacatggacgggttgaacggaaatctttgtatgcacatacagttatcagacagctaaccttcataatgttttaaagacctcataggagaaaatcagaaaagcacaaatcc

SEQ ID NO: 419806 - DNA, 177 bp, Homo Sapiens
tacgatcgagctcggtacctattccaatcagagagcgggataaagacagatgtagaaatttcaaactccggcacatcagaaaatattacctcattaagtttttatcttctgatggaatcacgttcaggaatctgtctttccgtaattccggaacaagctacagcagaatactaagca

SEQ ID NO: 419807 - DNA, 184 bp, Homo Sapiens
tcccggtcttagatgcgcgttgcccaccatgatgcggcgggatctggcgtagaaagtgccgcaacacgcgagcaaaagttaagccgatcgcttcgttcaccggtacctgtacgatgccttcgaggtcgtattcgaccggctcctctgcggtgatcagtttcgaatcgattgtgttgatcttgcg

SEQ ID NO: 419808 - DNA, 275 bp, Homo Sapiens
tacttttccacaggctcgcaactccaggtgttctgctctattgaagtataaaatgggttatcatgtttctagagaatatcaaagaagtcaggtgggaagtggatttcagaaatgacatactacccaaccaggatctggttgttcctgacactgactggatgtattgtagtatcttcagattggagcacctccctggatttgtttttgggattcttcactattagaaggactgaggggccacattacaagtggatattctgcattcagcctaaatc

SEQ ID NO: 419809 - DNA, 295 bp, Homo Sapiens
  misc_feature (139)..(139): n is a, c, g, or t
tggtataggcattgagaaatcagggaggttatgttgttggaaggttatgcaccctttcagagaacggtgggaaggtcctgcccaggcttagaatctggaggagaaaagaatgtacggtgtgtgggagagtctgtagatnggcgttacccccagaggtcggaggtgctgagggcgattccctcccatctcatccttcggggctctgctagggtggcacctcctcccagaccctcccaggttccctggtgcctgttttgagagtctctgccttgggtttggtcgcctctctgtccat

SEQ ID NO: 419810 - DNA, 308 bp, Homo Sapiens
tacttttcacaggcatacaaatatgagggtaccccggatctgtagtgcctattttatagacgtgctggtgaattctagtgcattttatttttatggttacgcagaagtgagatgaataggttttatttttcacctgccattcctttaaaaaccagagtataaatttcttattgtctgagccattccagtttaactactgttgtgttcatgtaacctaaaataatttcaaagcctaatacatcagaagaaaaatgccctaatttattttttgtctgattccccccttcccctgtggggtaccgagctcg

SEQ ID NO: 419811 - DNA, 151 bp, Homo Sapiens
aaagctcacgacttagttcataaatacttttggttcctggttgcagagcagctgtgggccaccgaaacaccctcttgaaggcttggacagagtatcttaccccagttcaggccaggcaactctgtgatttctctgttcgggtaccgagctc

SEQ ID NO: 419812 - DNA, 198 bp, Homo Sapiens
cttctaagtgatccctctggagcccacttgaagccctgagtgttccacactgagaatgacatacaacccagagagaatggcacagagaagggaaccagatttgccagagggagggaggaagccatggatgggactggtcttaggatcaatttcttgcctgatagacataagctgatcaagtttttgattgaaacgttt

SEQ ID NO: 419813 - DNA, 383 bp, Homo Sapiens
tacttttccacaggccacctaaactattgccacgttcttccttgctctttggacgccccttagtttgctagttgggtctcgaaatcatggtctttacgttaattaatggccggcacagtgtttgggagaaaaacagaatctgcagctttacatctcatcactttccatgggctgagcttgtctcccatcgcctgagtcgatatttccactttttcatgtttccaaagtgtcctgtcatcctggtcttctcagtgatggctgagacagtgcgaagaccgcttgcacgccctggatgtccaagggctgtctaagtacagctgtcatagctgtccatctgcagatccagacctgggatggctagagcagagatacctgtgctctaa

SEQ ID NO: 419814 - DNA, 118 bp, Homo Sapiens
ctatttccacaggtctaggtaggctcacacaaaaatgagtgacatatgatgcaggagaacatagcaggattatcatcacacagaacgacaaatggaataaaggagagagatacaattc

SEQ ID NO: 419815 - DNA, 115 bp, Homo Sapiens
ctgggtctaacggagacacagcgtcatcgtcgtgttcattggggaggctaatcggattgtcgtcgtgttcataggggaggcaacggaatgcgtcgttttcatcgaggagtgcttg

SEQ ID NO: 419816 - DNA, 228 bp, Homo Sapiens
tctgaagctcatgaaactccagattatcagagcccggtcatatacgttatcgagaaaagtttctgatatcgttgatcgttcatctactgaaggcctgtacgaaacgtgcgctcgaacttcagggatcggacatgattgtccccaaagatctgccccgcgtggtatcaggcaagcgctttatcttgcctgatctacatgccgtgcctgaagcttcgaacactgcataaa

SEQ ID NO: 419817 - DNA, 277 bp, Homo Sapiens
actctgagatgctctatgacctggtctctatttatctactatgcctcatctctagctatttagtccaatattttatgttaaaattatgtaactgtttatcattcctcgtcacatatcatggatctatgccttgtttcttacggtttctatctagaacacctttctaatcgtcttttacctagtttgcagccacttgagtcactgagatgacacctctgatgaggcatcatctccaggaattcattcctggagttccaggttgagtctagtggccttc

SEQ ID NO: 419818 - DNA, 138 bp, Homo Sapiens
tcgagccggtcctactttcacagggagatgcaaactgacctgactcattttgaatatgtatcctggatctgatcctttcttactacctctctctcactatgttgtttaattcagtatcttccttccctgtgaaaagta

SEQ ID NO: 419819 - DNA, 244 bp, Homo Sapiens
cttttcacaggggcgacataacttctctctgttagtctaaacaggacaagttatgaaccaccactgaagaactgagaacatagtcactctattttctgtcttctgtggttcagagaagggatcctgattgaaaaagtcatcagctctgggatggtgcctaaactgatgataatgtttgttttcgaccttatttctaaagtagcgaaatagctactgctccccaaacaggaacaaagataggctg

SEQ ID NO: 419820 - DNA, 325 bp, Homo Sapiens
tttcacagggtgaatggtagtaaagatcagtctgaagcaacatttaacaaaagttgctttctagtggctagatttcttgtactataaaacagaggcatttaggtgaggtctactgaatggaaacagccaaggatgaagatggaaagcgctggttattgcacttaatatatcagtcttcctctctttcaataagccagcacctactgagcatctaccatgtgcccagccatgggaatacgatgatgaacaacattagtcctcaccttcacagaacttccactctatgattttaccttccaaaattttgggtcacactccaaggatt

SEQ ID NO: 419821 - DNA, 198 bp, Homo Sapiens
ctgagtgtgcttcgctggtcgaatctgatcgcgctcgtctgcgcatcggtgcggcgatcctcacgtggccggagttcttccgcctcgagcagaccttcccgctggcgcaggtgatctcgttccgcgcgatcgtgctggttggcttcgccgccgtctttgtggtgatgctgctgctgtgcgttgcccgtccgatccgca

SEQ ID NO: 419822 - DNA, 392 bp, Homo Sapiens
acttgattgtggtgcattactttttaaagtgctgctagattcaatttgctagtattttgttgaggatttttgggtctatgttcatcagggatattggcccgcagttctcttttctcactgtgtcttcgctgtattttggcatcaggctgatactggtctcgcagaatgagttaaggaggagttgctccctctcaatttttttgaatagtttcagtataattggtagaagctcttctttgtaagtctgttagaatttggccatgaatctctctggtccagagctacttttgtttggtagatcttttattactgattaaatgtcagaacccaatattggtccgttcagggtttcaatttcttcttgattcaatcttgggaggctgtgtgtttcc

SEQ ID NO: 419823 - DNA, 148 bp, Homo Sapiens
catgatgtgtattctccgacttctgctaagaaagatcccctatgaaacacatttttgaatctctgtctgcctgaatatcaaatagtccctcagagtctcctctcactcaggatgatttgtcccatggggccctttcagattatctaac

SEQ ID NO: 419824 - DNA, 105 bp, Homo Sapiens
gttatatatggcagggaatgtaactgcacgttatggcagtgattattactctaaaaacagaatagggtagtgaggaggctggtaactctggcataatcaattgag

SEQ ID NO: 419825 - DNA, 426 bp, Homo Sapiens
agggggtgtaagacagtgtatctctgtgccattccaggttcatgtcgaagcagccctacctccaaagaccacggacctattgccagagaactgaatcagaaatttcaatgcttgggcgaaatccctctctgaatacatagaggtcagaggcagaggttggcagaaatgtggctcctgggtcaggtgaccgatatgcattacctaatgaaaatgacaccatagtgctgcagaccagagtctcgaaacggaggtcactggcgaggatgatggtgatgagaagcaggagggcacattttaaatggtgtcgaaggacaaatggcacggaacaaagagacccagctccagtgagtttaggattctgctctgtcatggactggacaggaaggctgatcagacagcttgcttccctgtggagaagtagggtac

SEQ ID NO: 419826 - DNA, 187 bp, Homo Sapiens
tcgaacagataccagcaagttggcactgacttctgaatgtctgctaggtaccctggtctagagtctcctctgtgtttacagtttgttctggctgagtcacaactgtttccaaagatactcaggagtagtgatttccctaagatgtttttcaagaagtatacagtaggaaaaattacatccagaatat

SEQ ID NO: 419827 - DNA, 462 bp, Homo Sapiens
gactcattgtcttcctctgatggcatcttaatggaattcaatacaaaggccaaattcctttgttttgaagccacaagaaaacacagccaatggaaaagccgtgttagtgctgcctgtcctattctgattaggtgaatacttgaaacgctatgaaagaagcactgagtactgctggacagtttgagttcatttggctggtagaattgagtggaagtcaattctcatgccatttaaagctggaagaaactgaagattctccaacccaagctcctctttttgcagattgtacaactgaagcccgtgtaagactgtagttttatagattaaaaagagccatgtgaatttcctaaatcacattacagtcggtttattatttgacatttatggtacattcaccttggagagaatgattataccttttcaggagagaataaagactcccaatttcctgtggaagagtat

SEQ ID NO: 419828 - DNA, 135 bp, Homo Sapiens
tacttttcacaggtagatatgctgttcctgatgggcccaagaagatggaggagtgatacgtaatcttagcctgattctgcagctgtaagtgagtggggaaaactgttaggagtccacagctgctggaataggcca

SEQ ID NO: 419829 - DNA, 394 bp, Homo Sapiens
ctatacccttcggtactgttctattgtgggaaccagagaatcaataactggctggtaatgagctcatagtccttaagctttgcgtgttattgattcacaagtacacttactgaaacgtaatacactattcataaacttgcaaagtccagttgtctcaaagtatctccaaagaggtatgtacatatttcaaaaagataatgttacctattttaaaccattttgatgttatgtctaggtgaaatgctgactcatagcccttgattggtgttttagagtttaggcaatcctctttaagaaatgtgcttgaggtacctggggagaataacaatttcaagtacatgaagggttattaagcagaaggtgataggcatctttgcttaatttccagagaggc

SEQ ID NO: 419830 - DNA, 387 bp, Homo Sapiens
actttcacagggcatcagataaaaaagtgagactctcagaggaatgctggactacaaagaattgtctttcaaaggtaattaaagtataatttaaacttatgctgctgtgtgtaccactttccctttatgaattatgagtctataaagacatggaagtttgcaactttaaatcactctgcagttgtcaattaaatgtcatactttggggcagaatataaatggagtatagcctgttaacaattattaatatagtatcagtgcaaattcatacatcaaaagagtcagtgataatcctaaccacctgtgctgatacatagtgtgaaatgtacaactactctttctcgtagtctcctagtctcccagaaaaatgaatgcgttgttgaacag

SEQ ID NO: 419831 - DNA, 141 bp, Homo Sapiens
ggcccagcggagaagtagggaaaattatcttacatttttcatcgaagaactggtattgttgatttaaccgtcttttcccatcaccattgttcctatagcaatttttagactgggtggaggaatctacttctcatttcaatt

SEQ ID NO: 419832 - DNA, 421 bp, Homo Sapiens
  misc_feature (161)..(210): n is a, c, g, or t
ttccacaggacatggctgtacagtacagaggacagttagttgtgtaatacacggcatgtttatacagtacagtggatggttgtacagtacagggcatggttgtacagtacaggagacagttgtacagtacagggcatgattgtacagcacaggaaacagtnnnnnnnnnnnnnnnnnnnnnnnnnnnnnnnnnnnnnnnnnnnnnnnnnngggatggctatacagcacagggcacggttgtacagtacagggcatggttatacagtacaggggacagttatacagtacagagcacggtcgtacagtaccatcctgctggttgccagatgacttggatgtaccacttcccctccctgggaggaggttacaattggtataggacttggacatttgccttgtttaccaaatggagtgaaaatag

SEQ ID NO: 419833 - DNA, 109 bp, Homo Sapiens
tgtaccgaggcacagatttctgttactgagtgtcagttagtgtgcattcgggctgccgcatttgtatttgtggactctatgctgtaaggacaatctagatgaggcagca

SEQ ID NO: 419834 - DNA, 234 bp, Homo Sapiens
  misc_feature (119)..(138): n is a, c, g, or t
gctcggtacctacttttccagcagggtctatataaccagttatattatggatcaaactcttcatcatgctccacttctccaagtacaccataatataattatatatacttgcttacatnnnnnnnnnnnnnnnnnnnnatgggcttgccatgctagaaaacaaagactccaaaaaccacaagaaggattaaataagaaggagattctaacacacagaatgaacttgataatatc

SEQ ID NO: 419835 - DNA, 184 bp, Homo Sapiens
ggaccaacatttactagtacacattgcatcaggcattccaaggtactcagtttcacctcttacccagcttgaacctgaccactatttcctattgcagttgctgccaccttagttcagactcacagttccccacttgtgttactgcagcagcctatagactggactccctgcccgtggaaaagta

SEQ ID NO: 419836 - DNA, 226 bp, Homo Sapiens
gggaggtttcttcaaaataaaaggctggagacattaaaaggaaactcataaaaaattcatctctgagtagtaattgcatcataaaaagtattgagttggtgtgcagatgcaaattgggccgtatgaattaatgatgtaaacagttggaatgagggtgcacattcagaaaatgtcctacaccgtcttcttcagtgtgtgaggcgaagttgggccaggtggcactgtg

SEQ ID NO: 419837 - DNA, 112 bp, Homo Sapiens
gctcggtaccactaataatatgtgaagcttattcaagtgtccagtcttcagcacttcccatcctttggaaactcctatctgcctccctcccaaaagggctgtttcttttatt

SEQ ID NO: 419838 - DNA, 306 bp, Homo Sapiens
catcttactctgccagatggtaacttaagatgacagcatctaggttctaggggcttattagtgccagtgcattggtgaacataagtcctcagttgtcatccattcaccctggcatctgccaaggcatccatcagtctgtctctggccttatatccatggcttgctgagtaattatctcccacttcagtccaagaggacccagctcaaatgaccactttagagcccctctctaaacacaaaaaaattattactccacctcagaaccatagagggctgtgaccacacctattaggaggtcacaggctg

SEQ ID NO: 419839 - DNA, 160 bp, Homo Sapiens
ctggaccaggctgatgtcctcattttcactttgggctactaggcctctgtttcttcaacacagagacaaatggcgtgtggctcagtcatcacacagcccacccgtccaacccattgtctgatgaggaaatacagggctgttcctttctggaaatgtgtca

SEQ ID NO: 419840 - DNA, 417 bp, Homo Sapiens
  misc_feature (77)..(315): n is a, c, g, or t
tctctaaacttcagatctacctggacatccaagacgtagatgtctaagaagcagagaaaattttacataataacgannnnnnnnnnnnnnnnnnnnnnnnnnnnnnnnnnnnnnnnnnnnnnnnnnnnnnnnnnnnnnnnnnnnnnnnnnnnnnnnnnnnnnnnnnnnnnnnnnnnnnnnnnnnnnnnnnnnnnnnnnnnnnnnnnnnnnnnnnnnnnnnnnnnnnnnnnnnnnnnnnnnnnnnnnnnnnnnnnnnnnnnnnnnnnnnnnnnnnnnnnnnnnnnnnnnnnnnnnnnnnnnnnnnnnnnnnnnnnntaataattacagtgatcacaatagcatctacagtctattggacactgactttataccaagcactatgctacatacattttaaatatcaatttatttttcttg

SEQ ID NO: 419841 - DNA, 382 bp, Homo Sapiens
cagtcaagggtattgactattaggacaggaaaaaatcccactaaagaatacagtaatagtggttattgggaacagccactatctctcaggctctaggagagtacccaaggagggaataactgagtagaacttccccctacccaccctccaccctactaagcctgaaagtaggcgctcattggaaataatatggctgtggtccacttaatgatccagaaatttaaggtgtcacacactgggctgctgaggaaaccatcagctgtgttttcagtaaaacttgctaggaagccattccactgacatgccagtggtactccatagaaagacacatactagggaactggccaaatttactgaagattatgtaacatggccttcttgc

SEQ ID NO: 419842 - DNA, 219 bp, Homo Sapiens
cgttatggcttgagcacataaagactgtatgcgctgatcctactttgctattccttatgccaagtgtttgacgcatacatcttgagattgctattacatcaaggatgattatcttatgagagctaacaaactttgcaagacggcgggggccgggtcacggagctgaccaccaagccgctcttcaacctcttctacccggaactgacgggcttcgtgcag

SEQ ID NO: 419843 - DNA, 475 bp, Homo Sapiens
  misc_feature (386)..(413): n is a, c, g, or t
cacagggtcttccttactctccctcattatatttgtatgtcctttctttggcatgagaaccttggcttccaaaaaaagccacacatttactcatttgctcaattctgtaacacatatcacatagtttcaggattgctttggtcagaccactaaagtggacaattgtttgctgtcctttcatccacatgcaccactttgccaagacagagggcctaagagtcaaatactatgttcaaaatttacttggattggtcctcccttctctccttcttatcattcatgtcttccttcttcattcctgtgctcatgtattcgtttgaaatctactgaggtttattgtttcaggttgtttttggttatagctccctctccttcacgttcttgtnnnnnnnnnnnnnnnnnnnnnnnnnnnnttaacttgctttcaaaaatcaaaattactcaaaaactcaactcccattttccttccaccctg

SEQ ID NO: 419844 - DNA, 250 bp, Homo Sapiens
gtgctgagggtaggatgactttagctgtagctggatatagagattcaaacaaatttcttttaggatctggttttatcctctccatctctcacctctacttttcaagggctgacttctttctcagacaacttttctttcagagtgcaaacttgtttcctccagccaatcagcgtgaggggtattgggattggatgggatgatgggcagaaggtaaaacagctggtggtgagtggccggatcaacttagagg

SEQ ID NO: 419845 - DNA, 164 bp, Homo Sapiens
caactacatatataccattttttgaatgcgtactggagaggatactctcagttcttttgagctacacattagaatcaacatctctccggagatctacagggtggggcagagtggactccctagtttcaatcagtcgctgaagagcgcccgcgcgagttagcgga

SEQ ID NO: 419846 - DNA, 538 bp, Homo Sapiens
tactttccacagggaaacaagaaaaatttcaactcaatattgctccataaataggtaagataatccttcagagatatagagcatactttttctggagccaaaatctatggacgtcttctcccatgaaaatgcctctgtgcataggcacataaaactttccatgaaatttcagggggagttgctgaaggccatccagggacgagtccagggggccaggagaccagctttagggagctgccatatggatctggagacagagccaggaccagtgctgcactagcatgaccctgagtgggtgcctcctcaaagtctctgccctaagcccttcctttgcttcactctagtcccagtcctgctgaagatggaaggttatgggtacatctgaaagtaataaatatccagtcacagatgtcatttcatattccatcataacctgattgacatcatatataaaagttggatgcttgtacattaaaaccttccctccaagtccctggtcataagggttaacatggtcccagcagcattgaattgcgac

SEQ ID NO: 419847 - DNA, 278 bp, Homo Sapiens
  misc_feature (221)..(234): n is a, c, g, or t
tcacagggtctgagaaggcactttgattgtgtattgcagatgataagcagcttgccgaagatcacccagaactagttagtaacagagtcaggattttgacctaagctctctgactcttactcactgtgtctttttctttactccatgctttagagagaaaaagtaaatttcgatagtaagatctgctgcttttgtgcgattctgcttttttaaattatggnnnnnnnnnnnnnnggtattgttctgatccaggattaccttggccaagttcctggtga

SEQ ID NO: 419848 - DNA, 201 bp, Homo Sapiens
aatcagctcggtacccctcggctctgctactctctagtttatattcatgatattctaactagactaccggtagtgtagggctccagttagttacgcacgtatttgatgtaggcactttatggtctattagatatgcaaattgggaacttcgtatcgtggttaaaagttaagttataacgatcccagaagccttttttgcgg

SEQ ID NO: 419849 - DNA, 176 bp, Homo Sapiens
tcatcgagctcggtaccgtttcttcgttctgcggtactccaggcctcgttcatcgcctgttccgtccaagccctcccgatgaacacgacgcattccgttgcctccccatgaacacgacgcattccgttgcctccccatgaacacgacgatgacgctgtttctccgtttcgacccag

SEQ ID NO: 419850 - DNA, 526 bp, Homo Sapiens
  misc_feature (353)..(407): n is a, c, g, or t
agtcagtcacatctcaggcaagcatttatgctgttatttaatagaaggggagaaacccaggttatcataacaactcacatgcacatggtaattatggagtatctaagaatacagcaagatccatacttttcacagtattttctaggggaaatgtgtaataagcacagatagcacttctccccattattatgcacaatgttcacctaattgtatcatattgcacagatgctaacattattccctgtacttcatatcaaatatgtttttgaaaataaagatgacactgaaggaacaaggcaaatacacttcttatattttaaatgattggtgacagcatatgtacttttctaggnnnnnnnnnnnnnnnnnnnnnnnnnnnnnnnnnnnnnnnnnnnnnnnnnnnnnnntgattatcacttgaaaaaaagaagaaagaatgtagaactaaagattttatttagaacagagctgccaataggtctggataagttttctctgaaataaaaatgaaaagagagctcattaa

SEQ ID NO: 419851 - DNA, 549 bp, Homo Sapiens
  misc_feature (73)..(111): n is a, c, g, or t
  misc_feature (194)..(231): n is a, c, g, or t
  misc_feature (353)..(412): n is a, c, g, or t
  misc_feature (492)..(500): n is a, c, g, or t
cagtttttcgttaatacttacccctaagataaagaatatttaaaatatgttataagagacataactaaactannnnnnnnnnnnnnnnnnnnnnnnnnnnnnnnnnnnnnnaagcaattataaagaaaacgggatataagtagagttacttctatgcttgacaggataacattcttttactgctactaaacagnnnnnnnnnnnnnnnnnnnnnnnnnnnnnnnnnnnnnntaggcaagagaacccaaatggcttttagaaactatcctagtctcctgagtgggtagaaaagttcattacaaattcatagttgtcaatagctccaagagttataggagcttaagtttaagttnnnnnnnnnnnnnnnnnnnnnnnnnnnnnnnnnnnnnnnnnnnnnnnnnnnnnnnnnnnncctctttagtcctgaatcaactgcttataattatttaaaatttatctagtttattttaaaacattctttctaataatgannnnnnnnnacatgtatcgtctagttaaatgccagggctactctctagattgtttgaa

SEQ ID NO: 419852 - DNA, 176 bp, Homo Sapiens
tgggggcgattaacgatacaattttccacttcttatgttgaccaagaaggacattatacatacacacagaatcactcatactcatatccctctcctaatcccatcatgtatgaaatgtgatagcccataaagggaaatcctaatcaaaaagctaacaaagagcaaaatatatttct

SEQ ID NO: 419853 - DNA, 337 bp, Homo Sapiens
  misc_feature (44)..(122): n is a, c, g, or t
ggctcggtaccgtcttatataactgtgatgacgtttccccatgnnnnnnnnnnnnnnnnnnnnnnnnnnnnnnnnnnnnnnnnnnnnnnnnnnnnnnnnnnnnnnnnnnnnnnnnnnnnnnngatttttttaaaagtgggcttaaaagcaagtggaataatattaatataatataccgcgtatagtattctctttccctcctctttttacctgaccttcaggtcaacctatgtttggtgggaaactcatggatgcatttgataaacaaaaatcttttcatggactgaggtttcctactggccatctcatttctttaccaacttaactccaccccctg

SEQ ID NO: 419854 - DNA, 207 bp, Homo Sapiens
acccctcaaagaagtcagagaagcctgcatgtctgcacaaacgggtcattctcattcttacaaatctcactgatccaacctggttttaggctaagttagtttaagttttcatggaatactgaaactgcattagaggacaaaggagcctaaaccattgttcccggggttctatcaattaaacctccatgaataaaacatgaaatcaca

SEQ ID NO: 419855 - DNA, 189 bp, Homo Sapiens
cgctggtcctatattcaatcagtgttgcgtgccatggtactgagatacggatgacgagaaataggtcgacagtctctgcgactccgctgtcttctgggatgacgtcccatgttaatatcagtactcccacgttaagtaacatagtttccacgattaaataacagttgtcgcctgtggaataagtagaga

SEQ ID NO: 419856 - DNA, 498 bp, Homo Sapiens
ggcatgtagaagtcatctatgtggattatttctgtgctgttggaattggaagctgaggcacagaaagcaaaaataatttactcaggaccacaagtgctgcttaacagcagaagctagatgcctatccatcataccaaagtgctttgaacataagtgttgtcaaaatccatctctcccaatggatcctaaaagatacgttttcatttgtttagatgatgaagaggaaattcattcttttaaaaactctttgtcatttctatttcccccttttatcttaagatgctccagctgcttcccatattatgttccaccactatgttttccttttattttaacatgcaccacttcaatttccgaaaacacagtgtaatttatcaatcaataaataaatctggacagaaacacaaagcacatttttctccaggagcattccctattcacaagcacagggagaggaaactcagtggcatcttgagcaaacatatgcatcaatacaca

SEQ ID NO: 419857 - DNA, 322 bp, Homo Sapiens
aaaggcattgttaggaccaccccatatttatttagttccatttttaaacttccctaaaaactcttgctagatagactaaagcttgtctacagagccacactgccaataacactgactggtcaaggtagtcatgtacccaggaactacccttatttccttctctggccactcaattgcctcttggcatggtgaagacatgcttaacactcacttgtgtgggattaaacagaatacagtgtgagtcgcaaatacagtgagggcaaagcagaaaacagctagaacagggaataaaaagtaggtatccatctatcatcccagccac

SEQ ID NO: 419858 - DNA, 322 bp, Homo Sapiens
gtcattttctagctagatgatctgttacgatgggagtggggtgttgaagtcctcagctattattatactgaagtctgtctctccctttagatttaataatatttgcgtttatacatctgagtgctctggtgtagggtgcagatgtatgtagaagtgttatagcctcttgatgaattaatccctttgtgattatataatgagtctctttgtcttttactgtgtttgacttaaagtctgtgttatctgatataggtatagctggtcctgcttgcttttggtttttatttgcatggaatatcttttttcatccctgtgtgaaaag

SEQ ID NO: 419859 - DNA, 276 bp, Homo Sapiens
  misc_feature (131)..(165): n is a, c, g, or t
ccacagggtctataggacatggggagagggagggtgaggcagcaaatgagctttcaggaatttcaaagcacagcatactactttttggtataaggactggcacttattttcaacctgagctctgctgaacnnnnnnnnnnnnnnnnnnnnnnnnnnnnnnnnnnnaacttttgttagaaggaatcagaataaaacataaaataagaaaacgattggtaatggtattattatacatgggtttgatttgacttgatcttattctcttggtctctttcc

SEQ ID NO: 419860 - DNA, 145 bp, Homo Sapiens
agagcagagttgaggcttgttcaggaaaacctgtgacgcaagagataccaaacgaaccttatatttggccacaaactaaagggctgcctgagctcttacttccatgaaactaattaaaaaataagaagagcatgccctgtggaaa

SEQ ID NO: 419861 - DNA, 132 bp, Homo Sapiens
attagaggatcccctactttccacagggcgcgaggctgtgttccgcctcctccagctcctcctgatacctttggttatcaggcgtcaacgtggagacaacaatcagttaaaatccagataaatttggggtta

SEQ ID NO: 419862 - DNA, 323 bp, Homo Sapiens
tgtatctcatctctcccagtcttaggtcctgtggagacaagctgtcatagggctgacacaaccaaatcaagaaagggaagagtagaatttatagtgaaaatcaggaagctacttaaaatggtgggtttctcagaatgtggtactgcacattttctgctgggtagtccctgaacagttattaaagaccccatggaagcagatggatgctggccagtaggcattgtccccttttatatttataacttcactgagcttcattttaactctaatagagatagtaccattaattggctggattctcccaacccctgtggagacatgta

SEQ ID NO: 419863 - DNA, 123 bp, Homo Sapiens
tcactggcagtctataaagcaggcaggaagaacacgaaagggccaaaggacttgccatcttatttatgaagaggtgctctcgctcaggagctcctgcctcttgttcataggccagagctgtgt

SEQ ID NO: 419864 - DNA, 148 bp, Homo Sapiens
  misc_feature (12)..(12): n is a, c, g, or t
acctaagtaatnggagtacagaaaaagaagagaagatatgacacataaaagatctgaagaaagaacagctaaaggttttcccctcaaatttggttaaaactatagtttacggattacgtgtttcagtgaaccccaggcagactattaa

SEQ ID NO: 419865 - DNA, 130 bp, Homo Sapiens
ctcatgttgtgatttattagagagatttgcacttcctataattctcccatattccctaaacgatattccctaaccgataatgaacacgatacgataaattttaggggttaaaataccgcgaaattttaaa

SEQ ID NO: 419866 - DNA, 170 bp, Homo Sapiens
tcggacccttttcacaggggctatacccataggtcattgtgcgggtcctctgcacccccaacacccccaacactgatcctgaaggtctcaacaatcttcatctgcctctctcctttcaccttctttacactctcattgatagccttggttttttctatacctccagtatt

SEQ ID NO: 419867 - DNA, 489 bp, Homo Sapiens
tctgtcagcatgcctgtcaatatcagaggctcatcgcccttgtattgatctttagaaccaaagaccattatttcaaaacaattatgtaatcctcatttttttcctttaaaaatgtttgtcttcctttacctctctgaatatgcacacagcttaccatgacatgcatattcccattgtaatgttctattctctaaaacaaataatatcttccttttaaagagcccctcactgttatttaggttgacagtgataatttcactcttcgattccccacaaagaaaatgtttaatcacctccactctattcaaaccactgatcctctttaaccatcacccctgcaatttgtaccatcaagcagatggccttttcctctttatgaaaaaaagacacatcacacagtgactccttcaaacttcctgatgcctgatttacatacagagcacctctggactcatctaaaaccgcccctataaactttataaaattaat

SEQ ID NO: 419868 - DNA, 422 bp, Homo Sapiens
tactttcacaggggattaggaagggtctgtggacagagaagtagatttcccaggatctaagaaaagaaggttggtttactgtgggtattctagctgtcattatactgtgttattttatttatttacaaagggatcatgagccagaaccaatcataacaatcaaatgaacccactcactgtttcagcctctgatggtggctaagagaaaacagcaagtggggagcaccccccctcacagtcgcctctattatgttgtaccagaagctgggatccagcaccctcaaacgtagaggcttgtactagcaagagtcacatggacagtgggaaggtccattctaattattttgttagtaattcagtctgttctatttattcttataatctagcacattccaaaacatatttgttttgagaatgataaa

SEQ ID NO: 419869 - DNA, 166 bp, Homo Sapiens
tactttccacaggggcgacatattctaaaaagtggaataagtatagaaaaaatagcaaagcactgtttcagatgaccatgttatatttataacatttaaacctagcaaaaatatcaaatgaaacagttttcaaagcaagtcatgaaaattcaacttaaaagaatgt

SEQ ID NO: 419870 - DNA, 523 bp, Homo Sapiens
  misc_feature (15)..(15): n is a, c, g, or t
ctacttttcacaggnatgaagacatcttaatgttaggacatgggtggttgtccatattccttgcagtatatgctcctcttaactagaatccttagtgtattctttccaccaaagtagtggaggtatgttcacataatctgctattgaactgcaaaaacttttacagtttcagagtttgagggaacccaaataggaaaattgatggagtcattttcctctgctggtgttcaagtcagatttgaaactcagacactctcagatctgttcaacagtcagtaaaaagtgcatttttacatagtgtttccctttagttttgcctaccctcttgattttgtacaatctagaatgtatgtaactcatgcgtaggtgatggaggcgctttttttcttagaatacttacaattatatatttggttttgctttgactagcaataggaaaatagacaaatacaagtgtaaaaatgagaaattttaaactcaaattataatttgtgttttatagtcgtttcataagtctgttgct

SEQ ID NO: 419871 - DNA, 153 bp, Homo Sapiens
  misc_feature (15)..(15): n is a, c, g, or t
cctactttcacaggnagctggtgactatacagccttatgtatgtagtagataatgtatgatcttttcctgccttttttgcaactaactgaatacaatagtaagtttatgaggtgactttttaaacattctgaatcttacaggagacgttcaag

SEQ ID NO: 419872 - DNA, 192 bp, Homo Sapiens
ttccacagggcagctgaggttcaggaagaactgctaaaggcacacagtctcagcacctagactgagaccctggactcctgctgtcattggccaaggcatactctgactctttatatttccatttgtctcctaaatttgtaattcccatgattacacattgagatgactatttctaagttttcctaaaaataa

SEQ ID NO: 419873 - DNA, 122 bp, Homo Sapiens
agatcgagctcggtccgtctgtattggcatcagggtaatgctggtcttgtaacgagtttggaagtattccctcctcttccattttttggaagagtttgagaaggattggtattagttcttta

SEQ ID NO: 419874 - DNA, 210 bp, Homo Sapiens
tactttcacagggagaatcacaaatccaccatgctcagtacagagggctcaataaatggctagtgtgtttacaagaccacagaggcgcgcagaagctaaggttacactactagaaaatgaaggaggaaagactcacacccaggcctcccagggtccatgcccttcacaggaaagcccccacttctatgagcatgtttagaataaacacag

SEQ ID NO: 419875 - DNA, 107 bp, Homo Sapiens
gtgagaggaactggattcactgataaatcaagagatacatcaagaagactcgacggttccagtccgggcccccggaccacgtccaaacttactcgcacagtgacaca

SEQ ID NO: 419876 - DNA, 126 bp, Homo Sapiens
acgcgacgggttgcgacctacgtcctgaccctgagcgctgccgccgggtcgccgagctcgcggtcaaccacgcccggctgcgccacatcccggtgcacgagcgccgcatcgcgatcatgctcagcg

SEQ ID NO: 419877 - DNA, 138 bp, Homo Sapiens
agattactgtacttgcaaatttgggagggaaaaagtggtaagtttgtagtctgtgaagatataataatgatttttgcttttttactgtatataactaagtaatgaaaaatgaatccaaccacttttaaagtatagaat

SEQ ID NO: 419878 - DNA, 157 bp, Homo Sapiens
aagaaagacggaagggcttgactgtaatttcctcgattttttgttacgtggatttatttgccaagagctggttaaatactttttgaagaatttactttgatgtaggtcccctcactctaaatattcattaatttagtatgagtggaccgtaactcaa

SEQ ID NO: 419879 - DNA, 167 bp, Homo Sapiens
tgttaacaccttgcattactggtatgaaacccgcttgaccatggtggattatctttctgatatgccatggattcagttagccagtattctgttaaggatttttctatctatgttcatcagggatactgaactacagatcaatatctttttttgttatgtcctttcct

SEQ ID NO: 419880 - DNA, 404 bp, Homo Sapiens
tactttccacagggctttcaaagcaatggggtagagcagtagctctggggagacaatggggtgaggccaaataatttttgaggaagggacatgcaaataaaaatagggaggctatagtcattagaggacctgctgtcctacttactcagcgtaaatcacttggagagcttatgcaaaggttcccaggccccatcccattctgtgatccccagaggttctcctggcaccattcctcggctcactggctgagaaatacggcctgcacattcaacaggccctgctccaagattccttccagcactcaatgtcatgattacttgactgagtgaagaagttcagaaaaatgacggcagaacggcccttttatgttgtcatcttattcctacatgtatatgagaatacac

SEQ ID NO: 419881 - DNA, 159 bp, Homo Sapiens
gcaccgagatgacggagtttgtcgtttacgcaaaaggcgcgggcttcgcctcagccgtctaaggcaaagcgatagtgccaatcgccgttgccgcaggcttcggggcgcgcggtatgcggttgaatgttgttttcgctccggtggatttcgcagaccacg

SEQ ID NO: 419882 - DNA, 122 bp, Homo Sapiens
agagagaactcagtctaattcagcggatccaacattctccttgaattaaggagcgagaatcaaggttttaggaaagacaaggcggctgaagtttgccgggcagtgcactgaagaggacagag

SEQ ID NO: 419883 - DNA, 103 bp, Homo Sapiens
tactttccatcaggtgtacttgttgcagtgtgcaaaggtgaactattatgcaaacagaccatttttccaagggtagggaataccacttaaaatacctgtcaaa

SEQ ID NO: 419884 - DNA, 200 bp, Homo Sapiens
gtagtattaacaccgctcagcagcaagcgatgaaaccacaagaagcatagtcatagcctgtgggaggcagggagcagagaaatggaagggaaatctttgctaatccagatggcacaaatgagtccctgatcagagacgagtggtgttatcactcagcctacctgtgccctgttcagtgataaactgagcagtcaaacccc

SEQ ID NO: 419885 - DNA, 515 bp, Homo Sapiens
tactttcacagggctccatgatctagcctctttagagagctcaattctctttttaatgaacacttggggcttggtctgttgctgcaagcaccctgcttctcttaagcttcaagtaataaagtgagtgtgttaaggaactatgagtagagaaccataagatactcgcccatctcccaaatatctcccataccatcatctgtcaaaggtacctgaaatacctttttgtctccaggaatctccagatgaaaatgctaacgtcctaagaaagaataagaccttgaggcttaaataagtaatatcagccaacaccttcctttggaagcttgggtttgtggaaacataatggaagggagatgatgggaggatgagcaggatgtgacagggactccctaaaagggaagtaggtgtgactgtatgcttctcagttttcttccatgcccaccctggctgataccacatagtttctgtttcttattttgaattggcagtaggaagtcagctgcattcctaggcat

SEQ ID NO: 419886 - DNA, 122 bp, Homo Sapiens
tgatcagaaaacctgtgttgttccaaacctaagcaagaccttgcatttgaaagtgcagatagttatttccggaatgtttaaactctgcctttcaattatccaaatatgttctctttcaattc

SEQ ID NO: 419887 - DNA, 135 bp, Homo Sapiens
gctaattttgggttttgttcatatttttctagttccttcaagtgcgttgttatgttgcttatttgaaatatttgtactttcttcatgtagccatttattgctataaactttcctctgagcactgcttttgctgta

SEQ ID NO: 419888 - DNA, 399 bp, Homo Sapiens
cctactattctacttggtatattgaatttttgcagctagcagatttatcgtatctgaggccatagtgaatagaagagctgcaaaagagctttagagactgcaaaaccagctcactaataaatgaggaactttattctaatttactaccaggggctgaagtagcagccaaagaaggagacaaattctaacttcatgatctctagttaggtgtctattttcctgcatttgctaaaggtaaaaatcgctacttatggggcttttgtcatacttcttaaccaaacttccctaacttctgaggataaaaaccataagggcaatcttattcttccaaagcagttccctggtgccactttcagaaacagagtattgaactatgggtctgacccagtgtggcactga

SEQ ID NO: 419889 - DNA, 361 bp, Homo Sapiens
  misc_feature (47)..(169): n is a, c, g, or t
tactttccacagggtggaagtcccacagggagggacagaagaaatcnnnnnnnnnnnnnnnnnnnnnnnnnnnnnnnnnnnnnnnnnnnnnnnnnnnnnnnnnnnnnnnnnnnnnnnnnnnnnnnnnnnnnnnnnnnnnnnnnnnnnnnnnnnnnnnnnnnnnnnnnnncaatatatttcaataaggctgattttaaaaaatccagcagatatcaggcctcttcacaaagcctcctgtgaaagaccaagccatgcaaatggaaaggtggcttagagctgaaggacaaaaacggacacaggagaaaatccttctgggatgtgggcagctagcctggaactattgttcctgatgcactcaggg

SEQ ID NO: 419890 - DNA, 113 bp, Homo Sapiens
ctatggataggtgtttttcaaattccggactctgtttagaacgaggagatagaatcacaaccaggtaagtcttcctgtgttctgagcagtggagaagagatgtatgtacacag

SEQ ID NO: 419891 - DNA, 160 bp, Homo Sapiens
ttattttctttaacaattacttagtaaaattattattactcttgttcctaatttgattgatttataaaatttatacttattattctttattaaccgctaaaaaacattttaaaacatgtcattccaaaaatagccaggtgtcaaaaacataatttctaat

SEQ ID NO: 419892 - DNA, 125 bp, Homo Sapiens
ctattatgttatgagcaaaataattgtgttacagtgaaatgaatatggacatatcactgaattgataaatgaattaaatgatgacttcatggaaacctcctgagaaagtagttatggaccatctt

SEQ ID NO: 419893 - DNA, 127 bp, Homo Sapiens
  misc_feature (11)..(11): n is a, c, g, or t
cttttccacanggatctgattgtggctgtatttgccaaaaagtccccacaatacccaacaagccttgcaatgatcatcagctatgtgaagttatcccacaagggaattctagtacagtacgttctct

SEQ ID NO: 419894 - DNA, 154 bp, Homo Sapiens
tctataggatcccccaagtcataaatttgactcagattttattgttgaagtacaaactctgttctcttttccctatgtcgggctggctctctatacagttaggcacttgtctccttgcagactccgtgctctccgcaaggtattcagtagtttt

SEQ ID NO: 419895 - DNA, 168 bp, Homo Sapiens
tttctgtacagcatacttgatcataaccatgctcaagaaccacccaaccatcaagggttaaatgctttttgccttgctggataatgacttttaagtcagccaaaccatggtctgccgcaactaaggcacgttcaggctcagttgctaagtcttgcatgtgggcatcat

SEQ ID NO: 419896 - DNA, 147 bp, Homo Sapiens
gtgcacattgaggatcggtggcgcacgctcgtgcctgctgttggtctgacggcgccgagctgaaggtctacgagggcagcggcacgcgttgcccgacaccgaccgcgaccgtctccacgccgagctgctcgccttcatcgactcctg

SEQ ID NO: 419897 - DNA, 243 bp, Homo Sapiens
tttacttgggctgtgttaagtttcagatgttgttagactttgaggtataaacatgtagaccattgaagatgtgagtctggagttccggtatagattaggtctcaatattctatttgggggtcacacattttatctttaaagaattccatgtattttcagaataagaagttagtttgatagaataaagaacctgtggtaatttgattcgaatgatgaaaaaaatttaaatcaaactttctcttc

SEQ ID NO: 419898 - DNA, 510 bp, Homo Sapiens
ggcaagttgtcacttcacctgtattcatgctttacgactatggaatcagtggaactgagatctttaaagcctgtggtatttcgagtctcacaaaatgcatctttcccaaaagataagtaattcctaaaaactggcagtgaagacaggtgtgtgcagggttccgtgggtctctagattccacactgtattgggcagccccatccaacccagtccagcccctcatgggtccagcgccttggtggtccagcttcttgatggctcatctgagagacatggcaccatctccctcagggtgcagcacagattggaggcttcttcctcattgcctgagaacttggctcatttacgaaattgtgggaaaactgaggagtgtggatttctccccttgattggcatatcggcatcaggaagcagtcaatttgagagcagaaggcttattctaagccaactgttagaattctaaaggagaaaaaataattcaatgaaagtgtgtataagaattaagcaagt

SEQ ID NO: 419899 - DNA, 467 bp, Homo Sapiens
tattccacagggaagaggtagacttggggaaatggctgtgatgtgtctgggaacattctgtcctagacgacagagctctcagcttgtggcaccagagccactagatcatgatggaggaggacattagagacccttctcatatttcctaggtatcaacgggccttgggattcatggggtaccttatgaaagggaggcacgccaagtgatgcttaaggctgattttgctcctgcaggatatgggctagaaccagacatagcctgatttaaaggaaatgaagcaagtgacattttgcacatttgggtttggtagctacaaatccatatctactataggagaaaagggtctttatggaaattgttttattgtctgtgtggcaactgactctaaaatcagttgtatatagtgtgatgtgcatgtacacgttaaatacacctcatatcccagaggtgatcaacataaacagag

SEQ ID NO: 419900 - DNA, 274 bp, Homo Sapiens
gtgataaaaatcgcaaatctatacctataacgccaggtgggagggcgtttttaaaaaaagccatgtcaaagggcattaagttggcagacatcagtttgtggggctagagggataaaaaacgctgtgtgaggtggcaaaatttaaaaaacgcaggcccacttggcgttttaaaataaccccggcccaggcagctttatttaaataaagctctgtcatacacctttattttccaccctagaactttgtaggtaatataattacgctggtttgtaaa

SEQ ID NO: 419901 - DNA, 140 bp, Homo Sapiens
atgccccctaaaacacatgattctccctaaaatgtccaatgtgggacttgtgccatatgaggccttcggttaacgaacggcgatgcttcactccactgaagagggcgagacacacactcgtctaaaggcacctgaaatat

SEQ ID NO: 419902 - DNA, 103 bp, Homo Sapiens
atcccatcccgtcagatgggacgatgtagcagaatgtgtttcttgacctattagaaaacatgctgtgagataatggggtaggagagattaatcccactggacc

SEQ ID NO: 419903 - DNA, 128 bp, Homo Sapiens
gtacgagtggtagttgccctaccacttacctgatttattaacataacattttctttatctgcacatttcctaacaagctcggtgacaaaagtcaatcttttgtcaatcctttatgcctggataatcaa

SEQ ID NO: 419904 - DNA, 208 bp, Homo Sapiens
gctacgtgactctagagtgatctctacttccacaggtggtagccatacaccaaattcccctcctttcacttttattacgtcattttggttcctgcgagtccaatctctctgaacacaaatgccacccccacttcacggctcagcatcaaagcccatgttcccatctgggaatggagggtcgtgactttttacctgctttcgtttgcat

SEQ ID NO: 419905 - DNA, 233 bp, Homo Sapiens
acagtgttctttcataacggttgcaagaaaatactgatcagtggattgaattctgtgtttcatccagcaaattgagtgattttggaatctggttaaaagcaagtgacctgttcttaaagcaaagtagcatgtttgcatcacttctatgaatgcagtattcattgccatatttgagacaataagcattcgaacagccagtgttaaactctgcctgaaatgccctgtggaatagt

SEQ ID NO: 419906 - DNA, 364 bp, Homo Sapiens
cttttcagggacatgtcaattactatctagaagcagcaggcttcccaggaggccctcttgacatgtgtccacagttccagtcgtgattcttccagtcccacgtgcatttattgaatgataagtgcaggccttagtaaccacctgagaccaggggcagaatatccatgatagatctgggtcctgaacgctgcctttgcccgttgcttccagaaaacagtggggagctctgtttcagctctagaaggagtggagcgggtgatgaattatctttactctaggctattcattttccctgggacacattttttaaatagagatttggaaaatgagacaaactaaaaataagaacataaaaagggagaaa

SEQ ID NO: 419907 - DNA, 170 bp, Homo Sapiens
tactttacgggactttgataaagaatgcaaacagatgcttcttgctctgaaatccaaacatctttcccactgtaaactgtccttgcggttattggcagcaccggagcttgattaaaggggattgtgcacctgaccagagtggcaaggaccatcttgagtctgtacaacta

SEQ ID NO: 419908 - DNA, 169 bp, Homo Sapiens
tgaatgatgggaggaatgcaatggatcattgcaagagactctgtaaaagactaccaaccgttctgcggctactttaggtccgtttgaaagttctgcatacaatttcttttatcctgctaatgttccacaaaatgaccgcatgagtgccttcgggtagtgatgcaagcat

SEQ ID NO: 419909 - DNA, 121 bp, Homo Sapiens
tacttttccacaggatttgtagcaaataagagattcgagtatgaagattttgatttgcaagatgcatattttttcttgacagaagaaagttcccttgagtctcaggggaaggcacagaagg

SEQ ID NO: 419910 - DNA, 280 bp, Homo Sapiens
tactttcaggaatttacttgttaaagctcccacatgtttcctaaagtgcagtctgtggcaagatcacagcgtggagacgcattggtcaagatgtggcccgagaaatagctaggaaaatgataaataacattcagcaggtcattcagggttcttgagaacagagaatgaccgaagggacttctgtgtactggcagtgcaaggcaaggtagcaacatagagcaaagggtttggagcaaagcaagcagaaatttgagtcctagctccagcattttgcccacca

SEQ ID NO: 419911 - DNA, 440 bp, Homo Sapiens
tcatcatctcctcgggaggagggacatcagctctgagagcctcatggatcaaggcaggggcagaggcaatgtcagaaaggtgactggagccagctggtgtcagtgtcagactgtctggacatagtctgataacaacgggaagccttgggactttgagcaggaattccatgtgtttctgctggatcccctacgacaacctgagttcctctggaagtcagactcccttctacgccaaagttacctatgcagacaggcgtgcagcttccatggaggatcagatggcaaatcctgctctaattacgctggtaattatgagctgacacttgcagagcaagaaagaacattccttctgttaggaaatgatcaactgggaagccagtcccagcctctcaaacagggaaggcgctgtgaatttacaaacagctgatgaaaggaggtga

SEQ ID NO: 419912 - DNA, 135 bp, Homo Sapiens
aaaaaactattatggtactggtaggtttaagcggggcaactattgcttcaaatttaccttacaacgatattgtgacttcagcttcagctaaatatggatatgacccgcttttaattcatgcagtaattcaaaaag

SEQ ID NO: 419913 - DNA, 170 bp, Homo Sapiens
tttttcctcagaaatctcagtattttatagctctgacgtaaatgaaattcaatttcatagtgtctctcagcacccgaacgtaaaatcctttcttatttcacgactagcgactacacagtaaaagcaacatctctgttcgaaatttcagctttctagtcgtagctatcacg

SEQ ID NO: 419914 - DNA, 284 bp, Homo Sapiens
ctcaatgtaagaggcagagtcatgatctaaagcttcatttagtcgttgccataaataattagggttgtatatgtaaatgatctctggcccagtagaagggataatgtcagcttctttccttctcttcaggtggaccagatttgaaaagctatcagaaataaggaagtggggaaagatggaccacaacagagagaacactgcctgcagccccaggtcaggaagctgggagcagaccctcaagaaagagtcacaggccccagaccagagagctccacacccacccc

SEQ ID NO: 419915 - DNA, 154 bp, Homo Sapiens
caggagaggtttttcctttcacatgctaatcacctgctcctggtgatatttctctccttgactgcagtcttggaattgaataatttatggaatgaattttgttgtaaatttactgtgtcacaagcaggttgtaatttcactaacagttcactta

SEQ ID NO: 419916 - DNA, 362 bp, Homo Sapiens
tactttcaggcgtcttcaagaatcatcttcatttctacaggagactccaggcagtctggcaccctccatctctggcccaataatgccttttgttgaggcttaaaacttccatgttataggaacctagcttttgtttgtgtccagccattcttaaaatctggaggaaagctgtttctttagtttagctccactgggttaagttagctctcgtgcctgaaatcttttagggaaccagctgggaaacagttattgggcacctcctcttgcctggcattatgctagcttctatggatttaatagtaagcaaaaaacagacatggtctctgctcctaactttgaaaacctgataaatctatacaccc

SEQ ID NO: 419917 - DNA, 465 bp, Homo Sapiens
agctgaagaagcaagggagaaaacaccagtcactagaaaaccagttggtagcagcaagagaaatggaaaagagaattacagaaagggagtacctgagaaacattaacgatgggacacccacagatgcacggatattcaaagggccaaactatgtggtccagaactgctctgaatccagaatggacttctaattccagcctctctgtagcctggagtttctaggactcactccctcaagtgaccctgcacttcttgagctggctttggtgactttctgtcccttaaaatgcaaggaacctacctagccaaagtgatgagggcatttttcaaaatggaagcctaatacaaacttgggccttctgcttgtgggaaagatagcactaaacaagggccaggcctcagctaattcctccagtaagtcttttaaatgtagaggtgaaattcacactgaaaagtctgatgagg

SEQ ID NO: 419918 - DNA, 117 bp, Homo Sapiens
tattccacagggatgtaccacattcagcttttacttttgcttttaggcactcaccttttagttacaaaatgtcagtcaactctcctctctctctggccctgctgtcaggacaagaca

SEQ ID NO: 419919 - DNA, 444 bp, Homo Sapiens
tacttttccacggaatttttatgatttcttcctgcccaacccccactaagaagcaaaggccctactcttgaccttggcatccccttgttgctttcttctcgtccatgacacctaggcttgatattctttaccttgggtattcttgtgaatatttgctgaattttcatttacaccaaatacaattcagaagacagaggctttccaaggtatgagtgtgtaagtatgttaaagaaaagctctcagcttgtctcatggtttaaagtcctcctaagatatctgagctgaatctaaggaataaagtagattggttcctccctgtctgatgagttttatcaaaatgtgataaaatgtggtaaagaaaaatggtgggccaacttcgttatagttctactgagggacactgtacaggtaaaccaggccataactcatttgtcctgtgacagt

SEQ ID NO: 419920 - DNA, 354 bp, Homo Sapiens
  misc_feature (99)..(167): n is a, c, g, or t
tactcacagggggaaggcagaattataaagtaaaagacagtgttagacaatctttccaaggctctccagtttgtaaagatttgttaatggatctcccannnnnnnnnnnnnnnnnnnnnnnnnnnnnnnnnnnnnnnnnnnnnnnnnnnnnnnnnnnnnnnnnnnnnccacaaataatgcagcatactggaaagggcaggtcaggacagcctaggttcagaatctggctttcacatactacttgtatgacctcgaactgatatgtttaactctttgaccaaacctccatttgccagtctgtaaaatcgcaagactaatacctaccctaatgaggttattgggaaaaatgagaaa

SEQ ID NO: 419921 - DNA, 180 bp, Homo Sapiens
tactccacagggatctggccttcaattctattagctgtggagcagtttgcctattacagtcttacagtagccactttttgtttttcaaaggatctgaaaaataagaatatgcttgtatagttttataaactgtaatcaatcttaacattctgggtaaacatttgtttactttcagcatta

SEQ ID NO: 419922 - DNA, 428 bp, Homo Sapiens
tattccacaggggctgcatcaaaaacggttggaattagatattagtcttttcatgcttttcactagtgagactaaagtactcctacagagctcagcttacatatgagaaaatataatacatattatcaaatataaaaggagattgctgaataactgttatccatatctaccacggacagaacaagaagatattggctcactctacagcacaaatttgggttagatgtaagaatgaatattctataaacgagatatcctaaaatattttgaaaaactggctagatatggtttgcttgagtttttctcctccatgctatccaattcctattctgccacttcggagcattggtctcaagctcagaacacaaccacctcttcccccttttcactcttttcctccctagtcttcattttctttaagccttccc

SEQ ID NO: 419923 - DNA, 459 bp, Homo Sapiens
  misc_feature (255)..(329): n is a, c, g, or t
tattccacagggaaaatgtcatattttaagacattaagtttgacagatggcctcacatgtaagacagggtctcggaatcagggaggggatacttcagggtcatcaagcccactctccctccacccactgggggattcctcttgcggtgttgatggacagccaccttgtcttcgcaggaccacttccaaagacaagcctcaggatggtcgaggctacaccggatgcttctgacaggcatacagctttctcccctcnnnnnnnnnnnnnnnnnnnnnnnnnnnnnnnnnnnnnnnnnnnnnnnnnnnnnnnnnnnnnnnnnnnnnnnnnnnaaaggctctgccaagttctcagccccttgctcactcttcagagccatcagctgtcatgcagtctgagcccttggctaaggtaccaatcaaggaggcaggcatggaggcacaatccagcctacataatctc

SEQ ID NO: 419924 - DNA, 436 bp, Homo Sapiens
tacttccacaggtgaactaacaatgtgagcacttcctttcccccccaacagaagaatccagtgtatgcacgtgtgtattcagtctgccttatgcttaaatttctattaaccatttgattgccaaacagattttgcataaaccccatgaggcaggactagggttcagattgctgcagcccttatggtgcaatggtaggttccaggattcactttccaaaaataaattcaggatcaagttctacagcacagccctggccaaagccctgccccatacaggcctgactctgcacaaaccagggaacattactcgagggtagggcattctccagtacactgtgggtaccacctgcttgcccatgattactgcaaatgagggtagtccatgtccactcccatcaggttttgctgggtggtgccatattgtcccctgtagaga

SEQ ID NO: 419925 - DNA, 133 bp, Homo Sapiens
attttacgcgagagaagggagatgagattgcccacggttgcctaacagatgtggagcgtggcatgcgaacccaagcagacctggctccaggagccacatcctttaattattactaaacccctatttatatatt

SEQ ID NO: 419926 - DNA, 415 bp, Homo Sapiens
aagggctatagcttacagctggctgggactggatcagttgagacagtctgaaatccagtgcctgccctctaaagtatactatgatgcctatgtgcctaatctcacagattcctaaatgtggaactggccgtgtttcgatgaccctgcctttagtgttgtcccactaagtctctctctccttttaaagctggcctcttagaactcaagaccacaaaataacctcctgttcctctgcacagaaatcaatgtggactagttgtacaggctatttgcatttcccattttgatttaattggttgattattttaattagccaacaaatttgatgaatttttcaccagtgaactcagtggtgactttcatgtatcttaaaaactaggcttagcctgctctctggtgaactcatgaaatagct

SEQ ID NO: 419927 - DNA, 126 bp, Homo Sapiens
  misc_feature (104)..(104): n is a, c, g, or t
cgcttgtggtcagttagaaaagtcttaacatcgttaaaagtgatagaacgccgttttgtagtcgtttctgcacccggcaaacgcaatgctgaagataccaaggntaactgatgccttgatcaaata

SEQ ID NO: 419928 - DNA, 148 bp, Homo Sapiens
tatgtttatgctgtgtaaagttagcaattagagtaagagaactatgggataatgattgagtaaaatctcagctccttttgagtcaattttgtagaaaaagatattctggggtttagtaacagagaatttttctttccttactgcgatt

SEQ ID NO: 419929 - DNA, 174 bp, Homo Sapiens
ctgcgtatttcacaggatgtaggttgaaaaataaaacactctctaatcttcccccagacagaatctagtatacctttacaaccatccctgcaaagcttcagttgaaatatgagcaggcgattgtaggcacctttggacaggccagaggagacacctgtctctgtgcaggcagtt

SEQ ID NO: 419930 - DNA, 181 bp, Homo Sapiens
tacacaggtaagaatttgtatcttgagaccaagtcttaaaatgactgcatggtggaaataaggccactttcgtctcttgaaccagagataatatgtgtcagtccattggacaaagcatagtactaattctaagtacagataatgagtaatcagaaagttagtggtgtggaaggttaacatc

SEQ ID NO: 419931 - DNA, 104 bp, Homo Sapiens
tatttcacagggaaattaaacaaaaatataaactaatgtgatctggaaaatgggatttcggtctcctgtctaatcatatttccaaggattccagagcaccgtgg

SEQ ID NO: 419932 - DNA, 162 bp, Homo Sapiens
cagtcaggctgtattcgtgagatgatgcgcaattggtacctcgattgcgatgatttatttgatgtcttggaagcaggcaaagcgtagctaaattgacagaaaaggaacctgaaatggttccttttttctttcatggttgtggtcggttttgaaatagagctg

SEQ ID NO: 419933 - DNA, 120 bp, Homo Sapiens
tttgaacgttggaaattatttcacaaaatgatatcttgtgcctcagccagtcccgtccctagtaaatcatcttgggtgtgtgttattgttgttgtcattcttaagctacttaccatttct

SEQ ID NO: 419934 - DNA, 112 bp, Homo Sapiens
tactttgtcacagggactcctttcaggatttacaaatgtgaaggagacagtcttctcatatttgatttaacactagggaaacagaaaactatacctgcggtcaagtgtgtcc

SEQ ID NO: 419935 - DNA, 408 bp, Homo Sapiens
tactccacaggcgaagtctactagctaactcgggctaactcatccaactggatgccggttagtttttttctcttgcctgatttctctggctaggactttcagtacaatattgaataggaatggtgaaggtggataactttgtcttgttccagttcttagaggataggctttcagatatttccctattcagtgtgatgatagttatgggtttgttgtatgtggcctttattattttcagatatgctctttctatgcctagttttgtgagagtttttatcatgaagggatgttgaattttatcaaattttcttctacatttgtcgagataataatatgatttttgtcctttattctgttgatttgatgtatcatgtttattgattcacttatgttgaaccatttttgaat

SEQ ID NO: 419936 - DNA, 144 bp, Homo Sapiens
tacttttcacaggggagggggaatttggagagattcaaagagtgagagagcctgaaggggaccacatggaaagcatgaaaaggactgtagtgcctgaaggctggcccctgtgcagataaccagccgggaaacgggggccttgtc

SEQ ID NO: 419937 - DNA, 291 bp, Homo Sapiens
ggtgagtctagaggatcccactgggagtatgagcacatttcataaacataattccagggttcgcctgtgatgacatcattccttttcacaaggtttatggatatccaccaagtgggccctcacgttatcccatggagacttttcccagctgagaaacagatgccgaaacagagacacaaccacttgggggaaacatgcaacagctgtacaaaggtgtcaaggggagggaaaaatgaaagtgtcaagggatgttgtcaccaactcagacagaatgggtcactagaaaaagtg

SEQ ID NO: 419938 - DNA, 329 bp, Homo Sapiens
tttgatacttgggcacatgccattattgatattcagaaaaatatcgcttggctcaatacagagcgagaacaagcctttacagattctggttttgattatgacattgctagcaccagtaacttcatgaaagtctcacgtaagcaaccccatatacttagcgactggctatggcagtttttttgggattcacccatatttttgaaagaaattgcacctgaagatgggcattttaagatccatatgtggcctaagccagcaagcaatgtggacaggaaaactatttttcaactttccagctgctttattcaaggtggtaaagtttcaaaaat

SEQ ID NO: 419939 - DNA, 118 bp, Homo Sapiens
ggccgggagggcagcgggaagtggtggtctaccgtcaccggcttcaactgtcactatcaagcctaaggctgcttctagttatttttctccactttgaactttttctcttccttcttca

SEQ ID NO: 419940 - DNA, 117 bp, Homo Sapiens
cacaggcttgctttgaattctctgacccctcatcctgaaactatggagacagccttcagctcctttcccttcttttagacctctgagtcttgctgaggtcctctaacagtctgatct

SEQ ID NO: 419941 - DNA, 523 bp, Homo Sapiens
  misc_feature (434)..(449): n is a, c, g, or t
tacttttcacaggcactagcgtcatgttaaagactgggtatttaggtaaagaggatctggggctcgtggtgtatcttcactgatgttccatgcactgtattaaagcatagtgccctgaacatggagacccccaaatcctctatgtgccaaagattaagttgtagagaattacatcaatgtttgctgttggtgtgcaccacagatgagaccaagcttcctggtccggctaagtggaatcttccatgcactgtgcaccactcagctagaaagtcaactaagcagaaaggagataaggaatggctatggaatacctgacttctttatcttggttatgtgtccacaattttcataaaaataaataatacacattaagtcaaaatctgggctcaaatgtgtaacaagaaaacaaaaggacaacaatctggtattccggnnnnnnnnnnnnnnnngggaaattcggctccaggtttgggccttggtcccctccactggcacaatctcaccatcattctgggagggctcc

SEQ ID NO: 419942 - DNA, 127 bp, Homo Sapiens
gtcttattaaagaagcatgaatgtatcactagctgttaccagaacaaacagctgtagaatgttatgacccatcctatttctaaatttacttctatcagtggataatttgtgtataggaaaaggtgtg

SEQ ID NO: 419943 - DNA, 263 bp, Homo Sapiens
tgtttctctattagcgctgcgatgttggataattggtcttgttctaaaaccaagcagtgttttactaataaaattgggcaaagatgaaaggggcaatcctttgacgtaccctgctgatgcgatagtttcttcttttgataatgatatatcgaaaacaagtttgtgcagaatccaaaccatcattctgggcaaatcttctccaacatgtaatttgccttctgttgcagcgtctgccaaaactttatcgactaaatgccctaata

SEQ ID NO: 419944 - DNA, 318 bp, Homo Sapiens
atatgaacctgcagtgtgcagttcttcctgcagcttcaggcatgtatggaagtaaccaaggatgactccgacacagagactgcaaagaaccagctaatgagggggctggccactatgctgtaattgaaggtggtaagagccctttacaggaggaaagtgggtgcagatatggtcagatttgcaaattatgttgcatccaatgttgagaggaattagaggttgtactctggggaggaagacagcctagaaattactgaggcctgaacagggaaaagcaccttatgagagatctttcaggatgagacaaaatccagttaa

SEQ ID NO: 419945 - DNA, 104 bp, Homo Sapiens
tattttccacagggtaaactatgatttaattttgatagccctgactcagcagcagaactagtacggtaggaaaaacgtatgtttgacgccctatgtaataactc

SEQ ID NO: 419946 - DNA, 218 bp, Homo Sapiens
ttctttaggttcctgccatcgtgggaactccttcgctcgtagggaggcgagcataggatatattttaccacataggctggcctataaatctgggctgttgtataatgttatcgtattgttgtgctcgaactgttcatgtgcttcgtaatggccagttcgactgccgcaatccgcggcggcgctatcgaagggctaccgcgatgaaagacacaacgaga

SEQ ID NO: 419947 - DNA, 108 bp, Homo Sapiens
ctcattgaggtatagtaaaagggagcatgaacttgagaaaatacgctttcaatcacaaggctgtaataatataggtcaaatcagattctgcattggagatagaaaact

SEQ ID NO: 419948 - DNA, 383 bp, Homo Sapiens
tacttcacagggagtgtttcagattggaagtttccatcagttagtgtctatatcatgcatgtgcgcaagtagagaggtctctaagactacaactgagaaatgtattcttgtggcgttggcctaggtacaagttcactggtgacataggaaagaacagtttcagccaagagctggaaggaatgataccaacattgtctttgtctttggtggatttctaagtccccaaatggaagttgatgataatctacggttctcctttgtgaaatgtctcagcaacttgaaagaaagaatctctacataaatctagcactctgttgttgcttagtcactgtcaacctgttttattttgttggtttgagttaccttaatgtttcctcgttata

SEQ ID NO: 419949 - DNA, 363 bp, Homo Sapiens
tacttcacagggtatgtatataccacccagtgatgggattgccgggtcaaatggtagttctattttcagttctttgagaaatctccaaactgctttccacaggggttgaactaagtttacattcctaccaacaatatataagcatcccctttttctccatagccttgccagcatctgttgtttttttgactttttcataatagccattcatttttcataatagccattctgtgaggtggtgtcccattgtggttttattttgcattatctgatgaatagtgatgtggagcattgtttcatatgtttgttggccacctgtatgtcttcttttgagaagtgtctgctcatgtcctttgctcactt

SEQ ID NO: 419950 - DNA, 221 bp, Homo Sapiens
tactttcacaggggctaaaatatatgtataatgaatctgtttcaggagtcagaaaggctttcttgggcaccaaggattttgaattctagctcaggggtgaggggactagagtaagatttaggaagtttaacagttcctctctcagccccagaaaccccagtgagggaatctcaaaagtctgggactcccaagaaatcccagactgtcaaagccaagaatta

SEQ ID NO: 419951 - DNA, 509 bp, Homo Sapiens
tacttcacaggtgcagataagaaagcacgtacaaagcaaacttaacacttgggcagaatgtaatgtatctgactttctaaaattctgtatgccagaataactggctgtttcccattccttgttcttgatatacagccaacagcctagccaggagccatgtcgaaaaggaggggaggcactcagggcagtggtttttcatggcctcattctttatagtacaatagttagtgtcccactattgcacttgtggaatgactctgaaatagtcacaccatttatgtgtaagaattgctacttctctttatttctccaattcaagcttaagttttcctgaagtttccccaccttctggagtggcaggaaatttagcaatttccttttctcataatggagctatatatggttccccagctagccacgacagaaaaacgtcgggatgaggatggttcttcagtcatggtggagacatattttctgtgggtcttttggctgtagtgctttgggccatg

SEQ ID NO: 419952 - DNA, 132 bp, Homo Sapiens
ctggactgactgggtgcgactggcctacctgacctgctggactgacaggctggactgactgggtgcactgtcccacctggactgcctgacctggactactgcggtggactgacacggaatggactgacttga

SEQ ID NO: 419953 - DNA, 567 bp, Homo Sapiens
tacttcacagggctgacagtgacgttcataaaaagtgattttctccccctgctgctaagcttagcatgtggttctgtatatggtgggaagacgagggatctggattcagggtttaaaatgcatttcagctggagccttgatgccttagtgtccgtgtggggtgagaaacacaagggatgacagacttccctggttcaagagagcatggggaaaccgcaagccagaatgtgtccaccgcccagactggcctacgtgggcctcggctctcagaccctcccatctcaccagccaggcctttgaggcctctcctgcaagcatctccccaaggtcccacagaggtccaagagcccagcatggcagcgatgcttacgtgaaatcacacttattacatgatctgccacagatctcttcctaggaggctacaaacttctacagacatgagctctggtatatcatcctagggatacaggaagccagccagccacagccctctatttcctgagcactgacaggtaacccaactgcacacagcccgcttctgaacaagggctatcctaaagccccaaa

SEQ ID NO: 419954 - DNA, 133 bp, Homo Sapiens
ctacaacttccgagggttattgaccacgccggggcacgatcaacctgaccacgagggtctgtttcctgcgagcaaacgaagaacaagcaagaaactgagattgcaatcgggatatcgcgaatataagatgaaa

SEQ ID NO: 419955 - DNA, 182 bp, Homo Sapiens
  misc_feature (128)..(128): n is a, c, g, or t
tactttccaggggattaagaaaagccttctacacaaagttcatcagctctccaaatgacacaaccactgacaggattttgagactcgcagtagtgatgcacatgcaggctggtaggaaatgggctganagtctgcagcacctagtgccattatcttgcagggtgtcactgataagcatccaa

SEQ ID NO: 419956 - DNA, 162 bp, Homo Sapiens
tttcacagggaaccacatgatcaacttctcagacacaggctttaataataactgtgtgcacctgtaaagaaaatatactgagaattgagaattcaataactggatttttaacactagacacagatgaaaaaagttgataaactgctatataggtcagaattc

SEQ ID NO: 419957 - DNA, 129 bp, Homo Sapiens
  misc_feature (77)..(77): n is a, c, g, or t
tataggtttgacactaaaaaacatagcaaatactcttttatatttagcctaattccgtgatgccttgttttcttaanattaattcatggcgcaatgaatgggggaggaaaaataacaacaacaaatatg

SEQ ID NO: 419958 - DNA, 172 bp, Homo Sapiens
tagagaattctagacatacggtcagaagtgcttagagacagcaaacgtatgacacgtgacatgaatgagaaaagtgattctaatgaacaggatgaaagtgtcccagaggaaatgccatatgcttgcaaaaataacttcatgttaaaggcactaccggagataattcacaaca

SEQ ID NO: 419959 - DNA, 372 bp, Homo Sapiens
gacaaggcagaaggaagcaaagacagggctaggcaaagaaagagatcaaaacattaggagtgggaaaagtgggcgagggacaaaggagtttcgtggcctcagtctctctagcctggtctccccagggtgttggacccttactttgctattctctggtttccatagcaacagggagggcagcgccaaatttgcatacacatttacatcctttctatttgaataattcaacaggtttctgtgcatattcatgagataatgaatgaaggtgactctcaatccctgctcaaaacctggctatggtatcccctgctttgtagtgtatggtatggctctgagcctggttttgtaggccttgacctctccctgccagac

SEQ ID NO: 419960 - DNA, 447 bp, Homo Sapiens
tacttcacagggttccctggtgttttctgtctcccctaatgggtataatcaatccctgcaatttatctatagttcagcccctgcccatgggccacatactcttaaaattaatggtccttcattattaggcacacttatatgtgtgaaagtttgcaggcaagacatgtttgacttatcttccactttgtcctaattaaatcctactgataggattctcacacaatcactctccccagtaaatatgcaagcatccaaagaacacatgaaaacgatggttataagaatcatattcatttctgagtattatttacttaagtctaaaaaaatagctgaatgatacataaaaatgcagagaacctctagggggaaatggcaacacaacagagtattaataaaatagaattgcaagtctgaaaaaaccctatgatgacaaagatggacagagtg

SEQ ID NO: 419961 - DNA, 410 bp, Homo Sapiens
tacttccaggggatacataattagcttacatacctccctgattacatcagtgtgaaatctttgggctacaaggaaatatctaaactgtagacaactctatagctattagtacaataaaatagatttcgagacaaggattttcatacttgataatgttacaggtacagaagagctctaaattcatagaatttacaaaagaaactgtgaaaatggaaagtattacagtctcaacttgcactttttttcttaattattgtactgacacgacaggcctagaaataccataatcaagcatcattttcttgtttaaccccacagtaatattccagctcccaagagtttatataataaccaagtcataaaatgtagaataatttcaactttcttttactcgatacccctgtggaaaa

SEQ ID NO: 419962 - DNA, 121 bp, Homo Sapiens
  misc_feature (75)..(75): n is a, c, g, or t
tactttccagggggaagattggagggaaaggtaggattgagagtgtttcagacagaaaaaggattatatgctgangggtaaagcacaagtacagagggttgcagatagtgcagaagtcttt

SEQ ID NO: 419963 - DNA, 231 bp, Homo Sapiens
  misc_feature (142)..(142): n is a, c, g, or t
  misc_feature (151)..(151): n is a, c, g, or t
  misc_feature (214)..(214): n is a, c, g, or t
tccaggatctcgtataagcgtttcccaagtcgatttggacatttttgcaaaaagttcttacctgaagtgtgattctaatggtgactgtacagtaatggaacaggaacggaaaattttacaacatgacgacaaatctttcgtntagttgaangagagtgctaataatgactattagtggtcgggaacatagaagacggtattactacggaaccgnctaaaaaactagaagac

SEQ ID NO: 419964 - DNA, 172 bp, Homo Sapiens
ttagataggtttttggtggaatacgtgcaattttcgacacgatatcttcaatattttccacggtaatcaaggtgtcatcttgttcagctttcagacgacgttgtgcccctgcttcatcaatgacatcaatggctttatctggcaagaaacgatcattaatgaactttgcaga

SEQ ID NO: 419965 - DNA, 565 bp, Homo Sapiens
tactttcacagggctattgatttatagactggactgggagaaaggacagcacccaggttttgggtctcccgctggactcctgcttgagggggtggtcttatacagagcacatagggcccccatttaaccccagccagaggaggggctgccttgagaccaaacattcattacccctgtccagggaagtataatgaacagtagaggtcatggaacattctcatgttttattcaactttgtggatcacttcacgtatttcaccacatagacagcattcccttgtgccatatttctgattactttgtgcccagtgaggatccttcattcatttattgcttctttccttcccagttacttgtgtttcttttgtctggacagaagaaagcggtaatgtctgccagtctgaggacagagcgtgtgtgatggtgccctgtaagactctattgaattgagatactgtctgcaggaaggccatttagtctaaaaccagttatcacttctcctgagactaaaagcattcagttctatcttctggtcactccagaagagattccatagtacaaggca

SEQ ID NO: 419966 - DNA, 169 bp, Homo Sapiens
aatacgccaatccttcaaccacaatgctgatcatcatacggtggtcagcatggacacggaaagtaagtagtaggataagtagtaagttctgttatcaagacacagctaatacaacttctcacttttctatacgttaaattttctggatttaaaaatatccaaaccatca

SEQ ID NO: 419967 - DNA, 203 bp, Homo Sapiens
cacataggatcttatggactaccgtgcaggttgattcaagtcccactctcaattttggctgggttgaagtaccagccacagagtttcactacactccccacatatacaacataaatggattgtacacccaagtgaacagacccccgtaatgaccaaacatggcccttatgcataggcagataatccaagtccaccattagaca

SEQ ID NO: 419968 - DNA, 568 bp, Homo Sapiens
tactttcacaggtatcatatgcaaatcatgtccatgaacagcgtgtgcagtgtttgaaagagatggtccctatgtgtatattcatattcttacaagtttccataaccgttaaaaggctccgaccctttcatcttagaggggagtaaacacctagtgtctttctctatctgtatagctctgctagagatatgcaatcgtaccactggtagttttctatggtgttaggctattatgttgaccttataacaagaaaattccaaaatttggcagctgaaaacaaacacttatcatctcacaatttctgtgggtcaggagtctgggagtagcttaactgggtgattctagctcagagtcttacatgaggttgcagttgaagctgtcaactggggctgcagtcatctgaaggcttgatcaagtggttatctgctttcaaactctcttacatgattattggaaggcctcaattcttcactggctataggctggagatctcagttccttacaatgtaggcttctataggctgttcggtgtcttcatgacatggcaactaacttcccctgaagaaag

SEQ ID NO: 419969 - DNA, 194 bp, Homo Sapiens
caagtgttaacttctataagcctcaagcttgtcatcaccaaatcaggattaaaaatagtgcccacctcatggtagttgttatgaagaccagtgattatccatgtaacagccatagcacaatcctgggtacatggtaagtccttggtaagtgttgcctgtgccacactattattatattacaggtgctgttgttc

SEQ ID NO: 419970 - DNA, 434 bp, Homo Sapiens
ttttcaagggtgtcccagactactgaaatactgatttattttgcgcctcacatgttgcgtatgccatcaggttacctgcaaggcgtgagttttaactctgaactggttcactctttcagaaacatctttagcctagtacccttctgctcagtcttttgttttcacagcagtacagtttttaccttgcataactgacattgtctgaaacagaagacatatactataattgcatagttttgttctgtgaaaccagcagaccttttttggtattagaaatcataggatctcccctctaatcttcatttactgttttgtttcgttgtttttcaccctttggcgggccatgggaccccccctttcggttatgattgcctatatggcttctcactatttactgggaaacccttagggccaggggctgatacctttttaaa

SEQ ID NO: 419971 - DNA, 517 bp, Homo Sapiens
gtacttttccacgtatatcacaaccaacctacaattcagcatgcagacttagtcccactctttgatggcaccagttttaaaagcgtggcttcctattgacttcagaggagaaatcacacatgccttttctactcagagtctgttggcagaacacatcacattgagcctactaattgcaaaagtgcttggaagagtaccttctttttactcaataaagagagatttgaccatgagtgtgcacagaaatagtttgcatagcacttgcctgtattcatattatattaccttagtctaaacattctctcatgacaagtattctatactttcttctttctcctcaactatctgacaaatacttcttaattcttactttcaactatgtttttctttctacagaacataggatcaacttaaaaactccacaaaagcccacagtcacatctccatttatgtgtgcttgtataaataattaccttcatatttgttgccataattgaaacttttattcttgtatata

SEQ ID NO: 419972 - DNA, 111 bp, Homo Sapiens
tacttccacagggtgtgtcgatatggtgtccactggactctgttccactataggtaaacacttccttcatgaagttaattatgtggaactactacaggtacttctactttt

SEQ ID NO: 419973 - DNA, 136 bp, Homo Sapiens
ctactttccacccgggaaaatcagttctttgatttgacacgagaaagggggtgagacgagaaaatcaggaagtccgttaaggtgtgtttgattctgcaactgggcgacccaactagctctgttataatatgtacgt

SEQ ID NO: 419974 - DNA, 186 bp, Homo Sapiens
aggactggtcatgtcggcacgcccagcggcggctcgatcatggcgccggccttgacggcgtcgggaacggcaggtcctcggcctcgacgcggtcgatgacggccgggtcgacctgcttgaggtgcaggtagccgatgcgctcggggtacttgcggatgatcgcgacgttgtcgccgcggtagtagg

SEQ ID NO: 419975 - DNA, 173 bp, Homo Sapiens
ctactgaacaaaatattatgtggagaaaagctgatggatagattgtcccagcacatcactctctattattttatatgtgcggtccgttggctgtcaaaagggaacatgctggggccgcaaaatgaaatacttgtaaatgtatattgtaaaatgttttgtgaaatttattatag

SEQ ID NO: 419976 - DNA, 224 bp, Homo Sapiens
aaaatcaggctgtattgagagggaagtaatgtgggaactgaaaagtgtgtcaagggcttgaaacaagcaaaagttcagctcctttgctgtcattgctgtgggctgtatctcctcattcttgcccagtcttttcatctacaggctgtgctactatgcatcacacatgtcacgtaagcattagaaatacctgaactaaggggctgactgtcgaggtaccgacgctc

SEQ ID NO: 419977 - DNA, 132 bp, Homo Sapiens
gagggggtgctgctgaaatagggtgagtgacacccactcggacatgtgctaccatttacacagaaatggagcagtttctgggtgtaagtttcttaagagaggctgcctggtaccagcccctgcagactagtt

SEQ ID NO: 419978 - DNA, 285 bp, Homo Sapiens
aagaaagaacagtcgatgtacgggctgtacagcactactgtcaggactttgggctttgactctgcagtgaaatcatgagctctgtagaattgtaagcaagacagtgccaaggtctgacttatgtttcaaaagaattccctacgctgctctgtacaggaccaacgatgggtgcaggaaagcctgaaggagtctctactgatgaaaagtaatggtggcttggagcagagtgagaccagaatttacgctgtgtgtttcctcatgtgtctcacgctgtttgcctatgta

SEQ ID NO: 419979 - DNA, 175 bp, Homo Sapiens
agctccggcacgactgaattcaggaggtgagtcatcgtctcgctcatctgggagcctggcttgaccatgccgtggcactgggctgttcaagtctggccttagggccggtcttttcctcggctagccacggctacgacaccttggactacttcactatcgaccctcggctaggcga

SEQ ID NO: 419980 - DNA, 133 bp, Homo Sapiens
tgtaaggggatcgcaaggaattcaactgccctgttcatggtccctctcccaggctcaatcgggacctcgagcgccgtcccaattagcgccctgtgaatgctgatctacgggacagcggggctatcgagcagga

SEQ ID NO: 419981 - DNA, 231 bp, Homo Sapiens
ctttttccacaggggtgtttatggtgattccatgtcttttctattgtgagtagtgctgcagtgaacatgcatgtctttgtatctttatgatagaataatttatattttttggggtataaacccaattatgaggtgcctgggtcccatggtaattctgtttttagttctgtcattgccacaattcctttcacaatggttgaattaagttatactcctacaggcagtgtatat

SEQ ID NO: 419982 - DNA, 461 bp, Homo Sapiens
ggaacttgcaggctagtgcagaacatgtaagaaagctgtaatctcagcaatgggatcagtttctttatgcaattgtacacacatagaatttctatagaaacacagaagaggaagagcacaacggccagtctacacctcagcaggtccatgcctgatgaccacctgagagcatgaatgcatcacggagggggggcctgtcaaagagcaagatggcagcaagaagaaatattgggacactggtgggtgaagtcagaagatagactttgcctgctttgcaattttattagagattgaccttaacagtgcagaacgccaagagtgatgcgaaatatagtctatgtgagaatgcaaatgtgttgttccaatcatttaacaggaggccatgtgaccattgccatttcacttcttttggtggcctcagcagcaggggcaatgagattcctaatgtttgataagtttgt

SEQ ID NO: 419983 - DNA, 150 bp, Homo Sapiens
tacttttccacaggaaactgagggtgtgttagagagggatggaagatgagactgggaaggtgagtgctcctcagacctcagaaggtcaagctaaaaagtaagaacttttaccaaattctcttactctctcacactgagatatggaatgac

SEQ ID NO: 419984 - DNA, 150 bp, Homo Sapiens
tacttttccacaggactgctatgctttggcatcaaggtttgcggtatctttacaaactgtgttacatgtattatttgaacaaaattggcaagtaaacggtacaattcacacggggttatagacgcgagcacagactgaagtataataaag

SEQ ID NO: 419985 - DNA, 155 bp, Homo Sapiens
ttcacgggctggtgttgagtgtctgcagcttttccaggtgcatggtgcaagctgtcagtggatctaccattttggggtctggaggtcttctcacagctccactagcctgtgccccactaggggctctgtgtgggggctccaaccccacatttccc

SEQ ID NO: 419986 - DNA, 128 bp, Homo Sapiens
tctaactctgtcctgctcctatttctcagtcccattctcccccaaggctaactatagaaactagaatctctcttccccaaggcaggtcatgaaaaccagaatgccttttccccaaagccagccatgaa

SEQ ID NO: 419987 - DNA, 200 bp, Homo Sapiens
gctttttggggcacggtaggacgagatctcttctgatgtttaaagaaaaccttgggttttacatggctagtacaaagctggagaaggggtactcggaggaggaaagacgggtgggagagaagagagactgcccagaagcgcctctcatcacattcaaccaacaaaacaagtattttttagaaaaggtttcagcagcattg

SEQ ID NO: 419988 - DNA, 152 bp, Homo Sapiens
atatcgtccgtgcgctatatgatcccttctgtaccgggatcatatagcgcacggacgatatccgtacaacgctaccccgtccgtcgccgtgacttcgcaaacgtgtcgaaggccaccgccaggacgatgatcaggccgatgatgatctgctg

SEQ ID NO: 419989 - DNA, 137 bp, Homo Sapiens
acttcttatttttctatatatgtacttccttacgtgggtatcattctattcggttggatctctatctgacctagcctgcctggttatctcttgtctcgctctcttgccttatgatgcccttttctgctttcactcaa

SEQ ID NO: 419990 - DNA, 131 bp, Homo Sapiens
cctcacttttccatcaggggagtatcatataagatggctgcagatcagtcttatcatgcagtcttgactgagtagaaccgtggcgacaatcataaaaaagcattccataacttggatggaaccagttaaat

SEQ ID NO: 419991 - DNA, 429 bp, Homo Sapiens
tacttttccacaggtactttgccactgcaactcaggtctatttccacatagtctatccttgaagctcatggagaagtggcaggtcagcattcgcttaacaaagagcctttattactgttaacaaagaatcttcagctacaagacagaatctttggttcccaatccaaatctgtttctcttgtaatctaaaacaactgggatttcctagcttcaggaagaaaggagcagtacctgctgggtcatcaaagattcttagagccacagagtttcatccccagcccaatggctcttccctactcctcctttctcttggttccaaaggaaaacccatcattgcctggtcaagggagaggagtaaagcgcatcaagataaagtgctagaggacatatggacagacaggaaaagaaggaaagggatgaagacaccag

SEQ ID NO: 419992 - DNA, 149 bp, Homo Sapiens
agctcgacgcatcatggagctcgagtcggatctgcatgcgcagcctgaacctgacctcggaaatattcgaaaaggaaaaaggcgcggtggtgggcgagctacgccgtcacctcgactcggccggcagcattgcgtgggacgagctcatg

SEQ ID NO: 419993 - DNA, 264 bp, Homo Sapiens
agcccgcaagtaagagccttcatacaccaggttgcagactatttcatagctttactggatgcaacaaagcccagcaaaacccagctgtgagacgtgctagttgtttccagtatatacccacatgggcttctgggaagaaagattcattctttgttccacctgttataggaattcctgctccttggattttatttttctattttacattcagtcattttgttttgtctcctcatccttgactttttaaatcactccctgtgaaaa

SEQ ID NO: 419994 - DNA, 182 bp, Homo Sapiens
ccaacaactctgataggtttcctcccgtagcaacactcttagacagtttaacgtacagtattgtgctatcctactcaattgcaataatgaaatataggaacaaacaggacggactggcagtttaaacgagtaacgggagggcattttacaaacttcagggaggtaccagaactcggaatgcg

SEQ ID NO: 419995 - DNA, 150 bp, Homo Sapiens
caggtcttatctcttcatacattgacagacccagatcctcatgcctgtaacagattcctacctcctcagacatgaagagactcagatccacatacctgtactagatttgtacctcctcagatattgaaagacccatatccccaaatcagg

SEQ ID NO: 419996 - DNA, 119 bp, Homo Sapiens
gtttaacgtccaggcccgaacactatccccgagtctcgacgatcacgggatgggacggttcgccgagagcgcggtaggcggcccgcgccttctccgcggcgacctctgccacgtcgagg

SEQ ID NO: 419997 - DNA, 141 bp, Homo Sapiens
ctggatatggtttcagggcatcaagagcagagcatgaacgtgcgtctttggtagacaatttaactctgtgtttctggcacccctcacttttgtgatcaaatagaaagaccagaggagcctttctgcaattctgccctcttt

SEQ ID NO: 419998 - DNA, 242 bp, Homo Sapiens
aatgataggggtggggaacacggaagaagagaaaagaaccagaggagagaagagagctagtgtaggtatattctctgacaacttaagggagtttaaagggattgctaagagattaaccaggacagataaggtaagggctacccgtttttatgtactaaagaggttactaggtgagctttatggagtaatgtccttgtgtatccatacctctcatgtaagagtgagatcgacgtaggagttcg

SEQ ID NO: 419999 - DNA, 194 bp, Homo Sapiens
ggggccaggaggaaagttgttactactacgataggggtgttggagaattactattatggacaagcccagcccaaggaaatcctcagtgaatctgcgtgactcataattgtgctgctcaatctatggtttctactgtgaaaatggaaacccactcacccgtcacagaagccacatgcttgatggagatgacctaa

SEQ ID NO: 420000 - DNA, 162 bp, Homo Sapiens
  misc_feature (17)..(17): n is a, c, g, or t
  misc_feature (39)..(39): n is a, c, g, or t
gacctacttttccacangggaaaaagtggccagactgcnttttttacttgaatccctaatcccattcctcctcagtggacaggaccttttgaccaggtttccagccacctgcaccagtgttttttggctagcaacagtttcaaacctccctggaacagagct

SEQ ID NO: 420001 - DNA, 194 bp, Homo Sapiens
aaaatcaggctgattgagagggaagtaagtgggaagtgaaaagtgtgtcaaggctgagacaagcagaagtgcagctcctttgctgtcattgctgtggctgtatctcctcttcttgcccagtcttttcactacaggctgtgctatatgcgcacacatgcacgtagcattagaaaacctgaaaaaggggtgactgt

SEQ ID NO: 420002 - DNA, 239 bp, Homo Sapiens
tacttttccacaggttttctgtgctaccttttacattttatctgttttccccagatacctaatgtataggaacaaccagcaaaaactattcttgaactatgtgaactcctaaagtgttggttaaatccaaacagcgtgagtagcctacgactgccaattcactaccgagtgactatcgacctgtagatttataatacagctgagatggaaggctggctgagttccttcatttcttattg

SEQ ID NO: 420003 - DNA, 410 bp, Homo Sapiens
tacttttccacaggcaggttcaggtttgcagtgctctgcagcagttactgacatcctttgctggtcgtatcttctcctccacttggagcctatgttagtttctgggtaaaatgcaccaccctttctcctggtaaaacagtaacatagaacgtaataggaaatgcctcctgcagcttggggaaatttagagaagaccgtttctgtaatattcaccccaattagaggatgtactgcccttggcatctgcagttcattttgcagttttgtgctgctcgccccactgctgaaaatggaaccctctcccttgtcctccccctaccttgaactcacctctcctcacactgtcttgtagcactcactcttcctcacacccaccctatgtcctctcatctggctctctagagaggccc

SEQ ID NO: 420004 - DNA, 162 bp, Homo Sapiens
cgcccactgtattgtacttgcaaaaaaccattctgagagagggcaagaaaagaaccaggatgttctttctccttcagggccagtgggccccagtgagatgtttaggctgctctagatccttatcagaactctgattattaatttctagtccccttgaaagta

SEQ ID NO: 420005 - DNA, 160 bp, Homo Sapiens
tgttgaacacgatttggtaaaggtagcgatgagaggccatgtaggagtacatggtgggttgtctcattgcagccgtcctcaggaactgagttctgtgttggttgatccatgaacagctactaccacgcattaggatccgggcgctccaagctctctcgac

SEQ ID NO: 420006 - DNA, 194 bp, Homo Sapiens
agtgcacagatacatcagggtagacttgatctaccctgatgttatctgtgcactggcacaatattatcttgcgtgcctttctagaagatgctgtatgacagggtaagaaatccaaatgttaattgtttgtggccagctgatctgggactagaaccttttgtctgaaagtgccctatgacagtggcctgatatcg

SEQ ID NO: 420007 - DNA, 235 bp, Homo Sapiens
tatatataacggtaatgctgctgttcaatttcggctccagagcgtttagtaacattagttacagcaagtgctgatgattacattgaagctttgtaaaatgataaaaaattagaatattggaaatgcattctgtattgtgtgcaaaacagcatgtatttatgccaccttttatggttaggaaatacataatctagaaagattcacaagaaacagaatactttgccctgtggaaaag

SEQ ID NO: 420008 - DNA, 518 bp, Homo Sapiens
  misc_feature (388)..(419): n is a, c, g, or t
caggatggcaagcctttgtagtgtctcctcgtcaatctgaacgtcagctataccatgcctccaccctcatgtggcctgaccggagatggttctggcggagatgccctctgtcaccggcccagctcatgagagccattaccaaatatgtgagtgttctttagagtgagggtgactcacgggaaattcacgtggttctgctttctacggcaaagtttgcattttcctcacctgcactgtttatgttctgctgtggtcctttgtgctggtggtcatggtcctcccgtcacagcatgggatagtagtggattaggaaacgaggtgttggttctcagaaaaggcatgatggaaacccagagcaggaagtgctttgtgcagacgacaaagaacnnnnnnnnnnnnnnnnnnnnnnnnnnnnnnnnctacttacctctcatccctttacagtgttatctgtttgctttacctctttcttgcctccaagccccaaaacatggcaggagaggatgtaactgaggttc

SEQ ID NO: 420009 - DNA, 139 bp, Homo Sapiens
tttgtttgcaggaagagagccctaaacactatttgcggcactgctgtttcagcgtgagtctttcaagcaagttgcgaaaaattgatattttaggtgaatgtgaaaggttggtaataagtggaaggtggatgctcgttat

SEQ ID NO: 420010 - DNA, 149 bp, Homo Sapiens
  misc_feature (135)..(135): n is a, c, g, or t
tacatctgttatagagggtagtgtatgtgagaatggtgccacagaaaacatgctaaaactgtgtcacccatcagaaggggtagagcatcagctctcagccctgtgctgcaaggtttgaattgtggttgccttcanacaaaatgcttgac

SEQ ID NO: 420011 - DNA, 484 bp, Homo Sapiens
atgtcagattgatatttaggtagagttctggaaaacattaatctacaaacatatgcctgatagaaggatatttgcagaaatggctgcaagtgcaatattgttccagctggtgagtgtggtccataaaaattcagtctttaaaaattatagtatagtctaattgtaggactgtgtgctcagtgaaaatgcactttacctatagatagggttgggagaaccaccctgtcttaccacagtgtatgtctgctcaacacactgccatgacctgggaagagaactttagggggacattcttatgaagcccttccctatacctttttgttagttccttataatcccagaaatttttattagggtagataaatgaccataaaacgtttccaccccgttgaggatgtttcttaggacttcttttatgacaaccatctaaactcagccacatctgcctctggcgtgtctagtttggggccacctctttgcatcc

SEQ ID NO: 420012 - DNA, 123 bp, Homo Sapiens
tacttttccacatggatatagggggttgatgtggagagctaaggaccaggactgcctccacaagacaggatgtggattatctgcccaaggagcctagtgagttaaaaatgtcaagtacggata

SEQ ID NO: 420013 - DNA, 224 bp, Homo Sapiens
atatgactctccttcctacctgggccatgcccacagatgaaaaagtgacttatccctgggcccagcacacagggaatcttatttatttctcctagtctctttctacaggggacattgcgaagtatctcttagcccatcaattaattgatgcaaatctcttctcttacctgggatttgcccaaaggggatgttgtaacatatctcatggtccagcaagtaggaga

SEQ ID NO: 420014 - DNA, 494 bp, Homo Sapiens
tacttttcacaggacttgcttcccagtgcattctccctagtttagcaaggatgcctttttctccacaagaaccatttagtgtgtggaaccgcaaacgtgaacatcagtgcttaagaaaggatcaagtggactagggtggatctatctcctcccccattcagtaccttgtatcttcattaaggccacctaccaatatcctgttttgctatgtttgatgctttcattgtcctgctgacatatattcaatttgtaatcaactgaaatccataagccacctatctccccagtctcattgtgtacttttggtggtgtctgtacaaaactgtgatgaaaccccattgaatgttatgttgtagcctcagtctgattcctgtttaatggtttccctgaagccctcattcagtcacatactctgccatctctgttgctggcaaatgtgatgggtgtgactaatgcccacatcaaagccaccaatacaatattttcaggagagg

SEQ ID NO: 420015 - DNA, 286 bp, Homo Sapiens
gttacctgcagagctgaagatgagtggtactcacactggtttactatatttatctcactattacattctatgtggtcccaaactagttctctcattcacacaggcagcaagaaattcttcactagtcctaataaaataaaagacaaaattgcagcggaaagatatatcaagacagtaatctattggtttagatagatcaaatgcctgactatattgtttatgggaaataagtgttatccctactcctcacactttgctgttttctgaaatggatccactttgagat

SEQ ID NO: 420016 - DNA, 146 bp, Homo Sapiens
atcagaagggcttaaaggtttcaggcagtttcataaaccagaaggagggatccagaaaaaatagtgtttgatctcccttccgtcaggaatatgcaccatggtaagacttggggtatgtaatggctatgcttttcttttctaaggtg

SEQ ID NO: 420017 - DNA, 188 bp, Homo Sapiens
actgatggtttcgttactatgcagaccttcccatgggtaatattaccatgatgagccttcaggctgagtaactgtagggccggccacatggggaaacccttgacttcaactggtgatgaattcaacaatgtcagtctcagtttgcccaactcaaagagatttgggctcaaacttagggtaccgagctc

SEQ ID NO: 420018 - DNA, 289 bp, Homo Sapiens
gaagtaaaagtctaagctgagacccttaagtgtgaaaaggagttagctggaagaagggtgtggagtgtggagcggtaaggaaaaggagaagattctaggcagggggaactctataggtgaaggccctgtaaagaaagaaggtatgatgtatctggagggcaaaagtattactgtctggcgggaccacagcaggttggggagatgaagctggagaaataggcaggggcctgagatgatggacttgttcctgaatctgtctggaatatcagcacccttggctatcagaatg

SEQ ID NO: 420019 - DNA, 156 bp, Homo Sapiens
cgaaaattactgtttatgacaggttgagcatcccagtttgaaaatttgatatctgaactgttccaaagtccagaactttttgaatgccaacatgacactcaaaatttcagatttgggattctcaactgcaagtataatacagtattccaaaatctg

SEQ ID NO: 420020 - DNA, 106 bp, Homo Sapiens
accataaaggtctacactgtgctggtgtgaacccaaacagaggggagccaaggtgggaagcagggacatatagacgtggtcccctccctcacagagctcagggttt

SEQ ID NO: 420021 - DNA, 270 bp, Homo Sapiens
tcaccttccttttagaatgttccatacctttaagcatttgataaaagctatggtggtttccccagaaaaatgttcaacaggaagttttgcctacatttttggattcacagacctcagttcctatggcagtgttcatatacgtaagttcagctgttacgtgtttacaactcaaatccaatggctaccagttttcccactggacctctctggatttagcaatctctaaaattgtattcacttgattcttaataaaaaagcttaaatgcagat

SEQ ID NO: 420022 - DNA, 299 bp, Homo Sapiens
  misc_feature (51)..(94): n is a, c, g, or t
ttttccacaggggggataaagcatttagactgagcttctcagctaggaaannnnnnnnnnnnnnnnnnnnnnnnnnnnnnnnnnnnnnnnnnnnagataaaatgatttgttcaaccaaactaagttctttttactgtatcacattcagcagttcaggtgacttacctcagctgagtttcagtaccctgagaactctttttgcaaaggactggagtttagtaagaagtccatttcttgatctatgatgttttcctcaattcctggctaatgcctggtattgtgtgccctgtggagaagta

SEQ ID NO: 420023 - DNA, 207 bp, Homo Sapiens
gcggacctattggggatcgcctggtggctggcgatcaccaagctagcaagtgatcttccgttcttgtcatcattcacagtcgtgacactgacgctgcgcacaggagtcttgaacttgataagaggatgggtatgattatgcctgttgctcgggtgtgcttcgcagttctggcagaaatcggtatcgtggcacactgcgcacttgtag

SEQ ID NO: 420024 - DNA, 226 bp, Homo Sapiens
ctagttcaaggcagatgggtcactagtcattgcacttttgatggtaggaggggccaaatataacaacttgtacttcatcttggaagggatgtcttaacatgccccacacctctggacccataggcatttcactgaggtggaagacctgcattttatcagatttgtttcctgcactcttaacacacaaatgtcttaccagtaagtctggagtagttgctgcttctca

SEQ ID NO: 420025 - DNA, 174 bp, Homo Sapiens
atgatgatctgagaggaggatgttttcttgacttgagtatgttgggtccatttttctcttggctgtgtggacggcagtctcagtggttaacagcataaaatagggttcttcccagggtggcttgaggtttttctatgttttgataaggacttggttttcaggctggtgcttgtg

SEQ ID NO: 420026 - DNA, 293 bp, Homo Sapiens
  misc_feature (71)..(115): n is a, c, g, or t
gtgtgtgatgtcggcgattaccattcttgttgttggtgataggatgttctaaagatgtagccaggaatctnnnnnnnnnnnnnnnnnnnnnnnnnnnnnnnnnnnnnnnnnnnnntcagacttgtagttctaatattttctcgcttttgcctctgcctctggtcatacattggattgtttttctgcttttgttccttggggtggcatctgtcttcaggagaaatcactccatagtcaaacacagattgctgaactgtggcatttttgctgttactgttatcctgaatttactg

SEQ ID NO: 420027 - DNA, 154 bp, Homo Sapiens
taaatgttcaattagatagctctaagatgcctttgagcgggaaaatctaatgcacaatgactctgttttatgagtatctgcatgaattcttctggttttgagtcttgacagtgttttataaattaacattctgcagcatttagctccatttgtt

SEQ ID NO: 420028 - DNA, 154 bp, Homo Sapiens
  misc_feature (13)..(13): n is a, c, g, or t
ccgtcgcccggancgtggctgactgcgccgcgccgacgccgtgatggctgggctgaagagcccgcgccgctcgacgccctcccggtcgcgggcctgcggatcggcgtgccccggggcctgctgttcaccgagaccgagccgattgtggccgagg

SEQ ID NO: 420029 - DNA, 127 bp, Homo Sapiens
atcatactcgtaccgatagttgactggtatgatggagcaacacacctaaacgttctcgctcttcctgagggcaatgtcagtccagcatagagttttacaatttgatagaaagtacctcgtccattgg

SEQ ID NO: 420030 - DNA, 459 bp, Homo Sapiens
gtttccttggtccctacaatcacttcataatctcctcgaatacatcctctctcaatggtaattctttgccaattagcatcacctgaattcaggtctgcctattgcttggcctcccattgatctcctatccaaattgctacaaagatcatctttctagattctagagctggttgtgtcacaccttcatcagcacctcactgcctcactgcccagggatgtttattgcaagtacagattcccaaacccaaatccataaccagagaatgggaatttctagggcaagctgagaagtggtatatgtactttcaagtggctcggtgattggctccacctgcctccccaggcacatctcgagccagtcctctcctagtaccctgtggtccctttacagagaataccctgcccctgaacaaacagatccagatttggacatatccattcccatctgcctggaattcc

SEQ ID NO: 420031 - DNA, 211 bp, Homo Sapiens
tcttgaaatgacagctgtgcttctcatgatacccatggtttgtgcgtcagcttttgatttctggttaaacaaggcactggctgaatagttagttgtcttgtaattctcttcccactagagtgcccctttcatcctgctcagaaggaaggactgtaatgttacctctttttaggactcattgtttctccctctcccagagtgaccagcattt

SEQ ID NO: 420032 - DNA, 303 bp, Homo Sapiens
aagatatgcaggcgagcttgaggggaaaagctgggttaggaactgttgaaactgaaatcctgagggctgtgccgacagagagacagccggtagaaggttgtctttgcctgtctgtggttccaggtaacttcatcgaaagagagtttcaggcagtagaaataagagcacccaggacaaagccccagggaagagaaacatctgacggaggacagaggaagaagggtcaggaatgagactgagcaggtgtcatgtgtctgacaccagagcctgacacatagtacgtagtagacactcagcccctgt

SEQ ID NO: 420033 - DNA, 151 bp, Homo Sapiens
ggttgctggccggatgcgaaataaccacacatgtactacacttgtgctcttctcttgggtctgattctgggctgctgtgtaccattggttctttccttccttcaggcctctgtagtgagctgttccacatctggtaaagagaggcctgtcg

SEQ ID NO: 420034 - DNA, 411 bp, Homo Sapiens
ttttcacaggtaacaggcacgggtctggtatggttagcagctgccgtagttcacagccagcggcccagttctttttaggagagcacctttgcttgcaggtgactccactgtggagtttgcccgaggtgcagctgggcagtaagtgtggccccttcccttccacatctcggctgttccaacaccgagaagctgctttcgtttctccaccaagccccctctcccgggcacttgtccctccaggaccctgctgcctggggctgtcttgcccaccgggtaagacatgtcctagcacagaggaggagagagtacaggtgcccacgtggctagaggtggtgctggctccctcacgggcattcaggccaatgcccactggatgcagacatgagcgagtgagttctcctgtcctttccc

SEQ ID NO: 420035 - DNA, 394 bp, Homo Sapiens
ttacgaaaagcaggccatttaaccagtggggtcttctctgattgctggttttctgtctgcttcacggacaccgttagtgtttcctttcttccaagcaaaggagggctctgagggcaattcctgggctggtgctctggaagaaagctctagttatagggatagagtgaaagttactcagagatgttagaatatagagtagagaaagattagaaagtgaagaatgcaaaggtaagcttggaatcaagtaaaacaatctcaacacgtccatttgatggctaagataatgaaactggaaccaaggcaacagaccaggaacctgggccctagctggagaggtttttgagagcattcctgcacactttgccttggaggaagttaccttaatgctacaagt

SEQ ID NO: 420036 - DNA, 123 bp, Homo Sapiens
tcacgctcggtacctgggagctggggtatgagcaaaaaacttagagctactgggcactacgtatgtgccagccctgagctagtgtgcattcaccatccggaaaaaggagtatcttcaagagcc

SEQ ID NO: 420037 - DNA, 244 bp, Homo Sapiens
  misc_feature (20)..(20): n is a, c, g, or t
acttgacagggctccagaancaagtcaatactacgtcttccctgtttatagtcccccagttagactgctggtggtcttctcctattcatagtcccccaattaggctaacaatagaccaaagatatatttagttccttacatttttagaaagtaattccaaaaattccttttacacacactcctcgacttctgacgtattttttgcacttttctcccattggaagcatttttgcatgcttgccag

SEQ ID NO: 420038 - DNA, 347 bp, Homo Sapiens
cgcgctgtgcagaatctcgatccttatttatgtccatgttcgtcattgtttgctgctgtagaaattcttttgatgtcttagccataaattccttgccaaggctaatttccagaatggtatttcctaggttttcttctagaactttatagtttgaagtcttagatttaagtctttgatccattctgagttaatttatatatgtggtgaaaggtagggggccagtttcattcttctgcatatgactaggcagttatcccagcagcatttattaaatagggactctttcccccataggttaggatattaatgaattttaaaaccaatgagattctactttacatccagtg

SEQ ID NO: 420039 - DNA, 284 bp, Homo Sapiens
ttcatatacatacaaaggattcattctatctttaggtcagttcacattaaaccatcactgccatctttcactcctacttctgttgtctaaaaaaagtaccattcaagttcagaaggcagaagtgaaatccagatctggctgattccaaagcttgtgatgttaggagctgcctcaatttccttcttccttaccttccacatctaaatctatttccagtccctgcaaatttcatgctctaaatatttcttgaacattaattctacctcccaatccttactactaat

SEQ ID NO: 420040 - DNA, 298 bp, Homo Sapiens
ccgagcatcagttctgcgatcttcggattgcactgtcttgtggttcttcgttatggactctacacttgttgtgaacgaggatcaagccatcgaagaagttgacattgaaaaataaacctgtgttgtcatttatgatgagtatgactggggatttgaacatcaactcgtggagaaggatgacctccttctatccgtgcctcctcctctgtttcctgacatcttttgtgattcttctatctctcattttccttgtgtaaatccttccatggatgcatctgctttcgatcattcgtacaac

SEQ ID NO: 420041 - DNA, 448 bp, Homo Sapiens
  misc_feature (65)..(190): n is a, c, g, or t
gactttcacaggtaatccactaacaagaatccacccttggagctctgtaaaaatacatgacacannnnnnnnnnnnnnnnnnnnnnnnnnnnnnnnnnnnnnnnnnnnnnnnnnnnnnnnnnnnnnnnnnnnnnnnnnnnnnnnnnnnnnnnnnnnnnnnnnnnnnnnnnnnnnnnnnnnnnnnnnnnnnttgtgatcattttaaaaattgtaaatgactgcagtgtgtgtatagagatgatcactgtggcgagtagtggaggcactggaggcagcctgcaggcctgccctttatacaccttggttaatcatggtactaatgtacccacacagctaacacaatggaatgacaaatcctacagttagacatggaaggagcatcagactatgttgtgaagacagaaagaggatcttgtaggataaaattcctattagcaaaaagcaaaaa

SEQ ID NO: 420042 - DNA, 426 bp, Homo Sapiens
gttgtacagattatttcatcagctcaggtataagcctagtacccaagagttatttttttgctcctttccctcttcccacaccccccaccctccaccctcaaggaggtcccagtgtgtattgctcccctctgtgttcatgagttctcatcatttagctcccacttgtaagtgagaacatgtggtagttggttttctgttcctgcattagtttgctaaggataatgtgtttttcattaagtaaatacatatcgagtacttaccataccaggctctgtgcaggctgtgggaatacaacataggacataacggatactgtcctgacctccggcactcacagcatatgaaggaggagagaaaaggacagggcacaggtcattaggacccagcgcagtggggaaagatggcagaggtgcttgggaaccccta

SEQ ID NO: 420043 - DNA, 426 bp, Homo Sapiens
atggctgctcctacttttcacggctaggatgaatatttaaatgcattgtttccagactgatgatttttaggacaaacctgaagctagaaatagtactaatactcaacaccaagtatatgtatgtgcagaggcttggggaggcatataggatttaaatttgaaatttgttgctaaactcaccaaaacagaatgaatcatgagacctgcagaaggaatcctactcgagaaatggtgaaccatccaagagtcaattaaaaataccctagaataaaactaagttgtaatctagtagattacatctaaggtgagaaaaagtattaacttagactagattgtcttcatagtgtcttagaaacagaaagccaaatagcaagaaagggggtggggctttttcacaggaaggaggacaatgttctgtgatgtgag

SEQ ID NO: 420044 - DNA, 205 bp, Homo Sapiens
  misc_feature (40)..(40): n is a, c, g, or t
cctactttccacagggcacagggggcagcttgagtctccnggctagggtcgttgacgcaacaaaggaaaaaagaatttacaggaccattcagaatgtattaatggaagtcaggagtgaggttaagggtatatattctggagttgggagtcaccaggatccgggatggaagtaatagtaaatgagggctgtgagagacagtaaaga

SEQ ID NO: 420045 - DNA, 177 bp, Homo Sapiens
gctgtcaggcggcgcgttggcgaccctgggacggtgtgccgcagcagatcgaccaccggccagccaggccgcggccacgcatgttgtccagcgccgccgcgttcacgatgtgtcgctgtcccggcccgcagcacggagaggaacgcctcgcgcgacttggacgtgccggtccggaag

SEQ ID NO: 420046 - DNA, 398 bp, Homo Sapiens
acagtttccagatgcagttacaagggttacactgccacggaggtgtgttttccttaacacctgactcttttaggggaaaataacattcttactttctgttacagtgattataatttaagttcctggagagcatgcctttcagcctaattagcacctaacaaagaatgtgcccgcagataccaaatgattaatactactaggttacatagctaactgagctctttagctcagatttgaatcctgattcagttctgcttattgtaatatctaagttgaactcctgagaccagatatgaaactcttcatctaccacagaactgtgagcttctaagagaagctcctggcaaggaagtaaatgttgaacgaaagaatggaggagggaaggaactgaagccccc

SEQ ID NO: 420047 - DNA, 408 bp, Homo Sapiens
ttttcacaggggggaatgagcagttactgcagagaggattataggagtgaaaaattctgcatcagagcagcaagaaggattgttatgtgaatgatcaaactgcttctgctgactcctcagagcccgcctaagagcaggggccttcatctgacactcactccacttccggggaactttgctttcctatttgttttaaccctgattaacagcgcagagctatgggttaggtccggccagccactgagagtccatctttgtgttttcaaaagccaggcctggttactgtcagaaataagagaaacaactggaaaagacaggcaaggtacgcagtattttacgggctctgattgtcatttagatttcgcatccaagaggggtttgagacttggggttctgttagctccatgt

SEQ ID NO: 420048 - DNA, 161 bp, Homo Sapiens
atgcagcacagtaggtgatagaaataaaatgcttactacagtggctattacaaggtcctatgacatagtatgatgtgcaactatatgacagcttattatttttaagactaccaattactgatatttctagttttattgccttgaaccctgctggaaaagta

SEQ ID NO: 420049 - DNA, 411 bp, Homo Sapiens
tactgatttttcacaggtatctcgctccagcatggctctttcccagacccaggtagcatgaccctcccttcctggtaggagaagatggcaggaagataggcctccactggggggcccccgtttgttcctctgcaatgtggcactggagactgccagcagacccaggccctggggcatcctcctggctcaaaggcctgaccttcgaccctagctaagcccagcctgcctctgcatcccccaaggggaaccacagggcaggtgctggctccaaaatgtatgggatcatgggactccactcacctggagacccagagacggagcagggaaacagactgggctggcactgggttggtagccacaggaaccttcctactggcttatttaccaagcatgactttacctgttttctta

SEQ ID NO: 420050 - DNA, 153 bp, Homo Sapiens
cacaggttgatgtgttaaaacaaataaatattggctctctgagaataatacttctgagcttgttctcgatattacagaacaaattatttctgaactcaacaccatattctttcaagcaccaaaatttattgtgtggataattttcctctgcag

SEQ ID NO: 420051 - DNA, 143 bp, Homo Sapiens
tgggacggtcctactttccacaggtatctattcactgaaatttgataaaacattaaattacaggagacattggtgtatttctttaaaaataacttctacatgacagccgctctatttttctctgagggaaaatacttcccata

SEQ ID NO: 420052 - DNA, 126 bp, Homo Sapiens
cctacatctcgcgagggtcagtgcgccattcgcgtcgctggcgcgggaggcgctttcggacatgttgtgtgatagcgatcacatgaacgatggaagccaaacgaaacggaatgatgtcgacaggca

SEQ ID NO: 420053 - DNA, 108 bp, Homo Sapiens
tgacttttcacaggccacagatgcagcctgctattagagaacgagacttcaggtcttaacttcctctgaaagccaatgatgacaggagcaacttcgtgcaaaccaatt

SEQ ID NO: 420054 - DNA, 233 bp, Homo Sapiens
cggatggattggtgacacatcactcactacgtccttgagtaatctaacgaagcattagtgctttttctgccaactcaagtcgtttatctaaaatttcaaaatatcgttcttcactaccgcgagctagaatgccaatttgaggtaagtttaaacttactacaccaatgttaaaacgtccatcaaacttgtattcaccattttcatccttccaaggagataagaaggatcgacag

SEQ ID NO: 420055 - DNA, 135 bp, Homo Sapiens
tactatccacagggtaactgttttgataagctttattacctgatggattgctattttattggttatttctacacagtaaaggtgaatcttcaaaaacatacacaacttagaacctggaaagtactttagagatta

SEQ ID NO: 420056 - DNA, 378 bp, Homo Sapiens
tttcgcaggagggtatataaagaggaatgatcatggacgagggatgatgcagggacactctggtgtccaaataacggaaatcctcaagttacatcaggggacaaaccaggatgggtgagtgtgcgttggagcatgtgcgaacgtgatcctgatgtgtgcaagcagggggtggagtgagctgcatgttagaccctctcgtcctaatgtcatgtcgagcacagccgaaaatgatatctccagatgggcagtgagtcaacttcttctctcatagggtaagtggctatggatgcggagaagggtgtggtgttgtcctgctgaaacctctaaggaaggtcagtcaacttaaaaatcagtctggagtggttctctgatcagcta

SEQ ID NO: 420057 - DNA, 218 bp, Homo Sapiens
agtacagtacaaaatcactcaatttgtaacagaggaaacctttttgttctgcatcgagatgaatgcattgcctggcagaatattaaagtgcaagaaccagtttttcttgctctttacccctgcaaggattgatcagcacatgaaggtctccttgacttcaaaggcatttctggacttggatcagcctgattgagttcagaagagaaggaaacactagc

SEQ ID NO: 420058 - DNA, 264 bp, Homo Sapiens
gactatcgtctcaacttataaaaggaatgatactcaaaagtaagttagatatgctggtcattctgcagatttttaatgagctctacactgggcatgcctccctattatcaaatccacagtatgtggaaagctagcaaagaaaagttcagcctccccagattaattatatacaagtaaaatgttgttaatatgaatacatttcagcaactgtttacttttcaatttggatagaaacatattcacgttcatgcataaagactggca

SEQ ID NO: 420059 - DNA, 150 bp, Homo Sapiens
gtagaaaaaatcgggtgaggcacaaacactctgaacgtgtgtggagatccaagcaaagagacttttgttattgggggttgagggggttgcaccccttgtcctcagcaactctttgacttgtttcggacacaaacagctttctaagttgca

SEQ ID NO: 420060 - DNA, 280 bp, Homo Sapiens
agtggtatgtcgacatgtaaaagagagacaaggatgaagcctcaacagatatcgatattagctcagagaaaagaagaaaagcaaacatgggttttcacggaggcagcaggaggagcagaggaatacagcgacctgggggtcaagattgcaaagcacttcaaggatggaggcccatcatgccacaccttcaaagcaactgtgttgaagaaatgaaacgatgagtcaatggtaaggtcatggttgaccttgacacatgtcctgatggaagttgatttgcaat

SEQ ID NO: 420061 - DNA, 248 bp, Homo Sapiens
tggcgcgggcgtggccgtacggcatcgctcggtacactgcgcacctttgccgccgccgcggcgccgctttgcgaggtctgcccatgtcccggatctgggaatcggggctgtaggcggcccgggccaggaacttgccgtcgtcggccaatacctccaccgtgtcgccgggacgggccttgcccttcaggcggccgacagagccggcgaagatccagggatggcggcgcagcagggagcgttccttgccg

SEQ ID NO: 420062 - DNA, 473 bp, Homo Sapiens
actgcgagtatcagctaatggtcattatttatgtataaaatgaagatgtctgcacgaaaatcaattcacattgagttcaaatacacactcaccttcatctctaagtaacttattcccccactacccccatggaggattttaacaaacccaagctgggaagatgaatttacaacccaatttgttcttttctccaaattgaaatatcaatgcatccaaagagagatttaaaatcaatgacacttctaaattcaacacagatacgctgtctagcatttcaagactagaacttattgttaaagtgagtactgtttatactgtttattctgtttcagagcaaaagctatacttaaaaaagttgagatccaattcattcatgtacaggaagctaccctgacaggtttcattgggttttaaaatcagagttgagtggtcgcttcaattttacagaaatggagtttataaaatgtaaaccc

SEQ ID NO: 420063 - DNA, 399 bp, Homo Sapiens
tgataggggagaatgcaaagtgtaagggtatttgtcccaaaacatgagcgtgatgagaaagctaaagttgtaaagcagatgtcctgactattcttagtgatttcatagtgttattttgtgttacactgtctattttatgttccgagctggaatttacaaagcaagacaaaactagggtagaactaaagagggtttcttgaaggtgagtggtaagtactttggtgatgtaaaggaagaaagaaagatgagtaggaaggcttacagacgggttttgaagtggaatagaacttgccgttttgtttatggcccgaaatcatcctttctctttaagcatattaaaaccattctacattatacttagccattttcctgctgaacgttttactcctaataccactg

SEQ ID NO: 420064 - DNA, 501 bp, Homo Sapiens
tggcgtgctgtgctcttctagggagaggcttgaaggctagcagcaggcaagcaccagtttccaggcaagcagcagcttcaggtggcaggcacttgaaggctgggtaacagcaaataataatcatgtaatcaacataatgcatgcatatactttttaaaaatcccaggagcactaacaggcttataatgtatcacagtaacactttacttagtcttattataaccccaatctcactgatactcctttttaaagcaggattcttttggtattcatattgatgactctaaacatgcttatttagctctcttgtgattcatcggttttaggcattcatttaatgaattacgctatctgttggtacaccagtatctgctcttctcactggctactatccctcccctcctgagtccccattttttcgttaaatttacattccccgtttatgatattatgaacatgcacatattctcggctgaataaaatatgtattatgaccctcag

SEQ ID NO: 420065 - DNA, 183 bp, Homo Sapiens
gccgcgtgacgtgcactgcctgataggtgatccagaactatgacattggtttttaaatgaatgggccaagaagtgaccctcttaaaggaatggggtcagggtaaaacacgagacaattatctttgccattcttctgtttgaagaccacctctaggcatggagcctccacggggagctgaggtg

SEQ ID NO: 420066 - DNA, 494 bp, Homo Sapiens
  misc_feature (362)..(439): n is a, c, g, or t
cgtggaccagaggggaggagtaaagggagtagagggagtttgtgtctagaaaaatctgtgtagaagtcttgttctttttaagagcaaattgtgtaaggtcaatggctcttctaattgtgcaattcaagacaattaagtcattctgaaggtgaagataataagtgaaataaaatggttcttagcacctcaatgcatatataactggccgtgataaattatactcatggacaattcatatagcctcatatagctacatgttcattcatgaaaagatcctgaatgttattctgatagagtagttttaaatctgaaaattactttatcacacttgaaagtttattgttaatttctcccttcactgnnnnnnnnnnnnnnnnnnnnnnnnnnnnnnnnnnnnnnnnnnnnnnnnnnnnnnnnnnnnnnnnnnnnnnnnnnnnnnggcccggcctgggggaaaggtgggggatcctttaaattggaccggcgggcttgca

SEQ ID NO: 420067 - DNA, 508 bp, Homo Sapiens
taagggtatggtagatggttggtcttccaggcagccaaggacttgaagggaaacgcttctgggtcacacagcaactgcaccctgaaagtcagaagagtggccactccttccgcgctcttgggtctctgtggattctcttggactcacccttcttgcatgaatctatctgaccttccgatctcactcccagcagctgactggtctagtgcccaattccaattctaaggagagaggctctgatgggctccttggtcaggtgtctgctctggtccaatcggctctcacctcacccagacgcagcctcccactctcactcccacagttggctgggctgagggcaggttctcttagaaagggttggactcgaatcggaggtcagagactgggccagaggatgcattactgaagaatactgcagccatattttgcttggctggcatagtgtcttgaaagacctagaattggaatgctttgaggtggggcacgctctctccagccgaccccaggc

SEQ ID NO: 420068 - DNA, 148 bp, Homo Sapiens
gtatggctcggtacccttatatgagacataatcaggtgtagaaaaatctgcctgtagggcacttccccctagccgaaattgaagtgcgtcgcggccagccgcccagagatccatggcaagcgccatcgtttctccgaccgtcaaccag

SEQ ID NO: 420069 - DNA, 486 bp, Homo Sapiens
  misc_feature (255)..(269): n is a, c, g, or t
catctccttgactaaatttgttactaggtattttatatgttttgcagttattgtaaatgacattgctttcttgatttctctctcagctagtttgttattggtatagaagcattagattattttgtatattgattttgtatcctgcaattttacttttaagtttcaagatttttttgtggtgtagtctacgtttttctcaaatatgatgtcacttgcaagacggataattttactttctctcttccaatatgatannnnnnnnnnnnnnncttgcctgatggctctggctaggacttctactactatgttgaatatgaatggtaaaagttggcatcttagtcatgtttcactttttagttttttctcattcagtataatgttagctgtgtgtttgtcatatatggtccttataatgctgagatatgttagttctatgcctaatttgttgagagtttatcatgaagagttgttaatttattaagtggg

SEQ ID NO: 420070 - DNA, 283 bp, Homo Sapiens
cggttttgttgcgtttcgcctgcacgctaccgctccgtagagatgatggcccaggatgtgccgcgccacgggcggcggcaccaggtcgtcaatggaaagtccagcggcgatccgctcgcgaatcgtcgttgacgacacgtcgcgcgtcttcgcctgcacgagcaggatacgcgtctgcctcgacaaatcggccgcctcgggtgcctcgcaggcgcggtactgcagctccggcgtgcgcgccaacgcctgctcgagcgtcgttcccggccgtgcgatcaccacg

SEQ ID NO: 420071 - DNA, 483 bp, Homo Sapiens
attctgacattacattgaatgcatgaaattaaaatattacacgccccccaagttctgtatgacaccttgtgtgttttatcagattcatgtcagtcgaaaataaagccagcgaaggggcacaaaaataggcaaactgaatcattggaaaactatgtagagcacttttcttttatgcacgtcatgctttacttaaaatcagtcgaaaaattgaatcaaggatggttcattattttagtaccatcctacgtctaagttggtacatatggcatatgggaaatttcaccatatgtagttctatatccaatctattttgtcattgacgcctgctatgattttgttgtgagcacatacctccttaacataagaggacaggatgcagaactcacagcagaataacaggaaaggtaacctgacagccccagatccagctcagtatatctttcagaaaacctcagctcaccccccagagcatggcaataacag

SEQ ID NO: 420072 - DNA, 331 bp, Homo Sapiens
atacagagggacaactgtactaaatttggagactggattggcatgcctcagtgtcttccacagtcacctcttttcttgttaggtttcatagagaatctttgtgcatcttgaaagagaaatatttagacatgtttaaagagtttttgacacatgatctttgccatgaactattaggtaattttataagattcgcagttcatatggtaaattattttctcccaaagagccaaattaagattgtcagctggaaccaaatccttgctttcgttttaaagcatattaaatctgtattattgttggaaaatatatatagttattttccagcttgttc

SEQ ID NO: 420073 - DNA, 323 bp, Homo Sapiens
  misc_feature (251)..(251): n is a, c, g, or t
  misc_feature (292)..(292): n is a, c, g, or t
atgaattgcaaatgttcttatttatatacttgcattgatggtttgactgtgtactttgttagttataaatcatttacctcagcaattgatctcctttacttttagcttccagcattgctcttaaaaaagctagaagccattatatgtattacccccagccctccagctgttacaagtttttgaaggtcttcatacctgactattttgaaatttcacgtaggggtttataactccttttatacttattttantgagtagcttcttttgacagtctggttatgctctttttagnccctgtggcacagtaggggatcctctacagt

SEQ ID NO: 420074 - DNA, 606 bp, Homo Sapiens
  misc_feature (420)..(456): n is a, c, g, or t
cacaggtactcgctggcctcataaaatgagttaagtattgcctcacctttaatttttttgaagagtttgagtaggattggcattagtttttctttaagtgtttggtagaattcaggagtgaagtaatcaggtcctgggcttttctttaatgagaatctttacattatggcttaaatcttgttacttgttattggttttttgaggtttctttgtgtattaatcttggtaagtgatatgtgtccaggaatatatgcattacttctaggtttccaagtttgttggagtataattgttcataatagtgtctaatgattctttgtatttctgatgtctcagttgttacgtctcctttttcatttttgattttatttatttgggtcttctctcttttgtccttagcatagctaaaggtttgttgannnnnnnnnnnnnnnnnnnnnnnnnnnnnnnnnnnnngttcatattctgtattgtattgtcttaatttcatttatttctgctctgatttttattatttctttcctactactaattataggctgggcttgtacttgcttttctagttccttgagatgcattcttaggttgtttatttaaagtcttttt

SEQ ID NO: 420075 - DNA, 257 bp, Homo Sapiens
ggcggtcctactttccacaggatgttgatacctgaatattatgtcagtaggtacttcaaaaatagagataagaagactgaattctgggatgttgctgctggacactcttgaatttatatcttagtttggaaatctcaaaatagttcctttttaaaatttcacaattattctacttttccattaaacaaaaatctagttttccttgatgagcaaattctgccaatagtcttatttttgtttaatgtccttatactttt

SEQ ID NO: 420076 - DNA, 118 bp, Homo Sapiens
gccatttaagagcttacacaatcaaggggcacgtgagtaaaccagtaattgtggcataatacccttagagccatgatgaagtagacataggacaggtccactgagctcttgtaccttt

SEQ ID NO: 420077 - DNA, 189 bp, Homo Sapiens
agatattattaatcataacctcttgagacagttttcccaactctgagatactatttcaagtgatgtccaacttctaatgaaaatacacaaaacctgaagatttaataatgctttataatgtcaatatcatatagaagcagcaacaaagtcgatgaccaaatgtgacatttttaaaatgccataagatca

SEQ ID NO: 420078 - DNA, 225 bp, Homo Sapiens
cggtacctacttttccacagagagaagtcaggctaactccacgacctgaaggctgatcacttactttcaggacaggggctgagagaggactgtcacggggaaagattaaaaatgagaccaaagcaaccacgaccacaacaaaaagagagagcaataaagagagacttagaaatgaacacccacttgctttcagatgaaaagcttgagtcaaagtggtgttaagga

SEQ ID NO: 420079 - DNA, 303 bp, Homo Sapiens
ctctaacaacaaatacaaatagattttgagttgcctaaagggagagatggtgtccaatccatctttttatcacctcccattcttctctccccattctttcctaaggaaacccctagaccaaacacctcttctgtgctgaagacccatagatctgactgtagatttaacatcttcaaatccactggaaatgtaatgtatccaagcctcctcctccatgtgactaggagctcttagtgaatgacatcaaatgagtgaagtaagccagaaaactggggagcatccttaacatctcttcctctccac

SEQ ID NO: 420080 - DNA, 202 bp, Homo Sapiens
cacaggacagaaaagcaatcagaaactgagaaaaatttgacaaagaaattgaaatcattttttaaaaatcaaataaattgttgaactatggaatgcatttgctgacctgaaaaattcactagaggttcttaactgcagaacggatcatgcagagaaagaaatcagtgagctaaaaccacctatttgaaaatacagtctgagg

SEQ ID NO: 420081 - DNA, 179 bp, Homo Sapiens
cctatcatattgataacgatttgtcacatccatggggccgaattagaacaccttatggtcgccaaggttcgcagtgattttgtagacgctatcgtttcgcctatggtcattgcacctcaaccgtccattacacataagccacattcaggcaatggcgatgctgagacttatcgtccgcg

SEQ ID NO: 420082 - DNA, 184 bp, Homo Sapiens
tttgaccctaaataacaaaggcatctgccgtgaaagtttgccatgactgctgagatttcaggaataatataactggcctttctagaagctagaagcggtggtatgatgtgctgtgtcaaggaataaagagcccacttctccctggaagagtcacagatgtcttcaaagatcagcgtgagccgag

SEQ ID NO: 420083 - DNA, 473 bp, Homo Sapiens
tacttcacagggctgtgtccaactctactgttattcgttatatgagtctgaacatgttatttgaacttcagctctttcatcaacaaacatgcaattagcacttaaacatgcaattagcacttgccttaccaaactatgatgaaagatttggccaaataattcaaagtgtaaacagccaaacataaaaatgtacaacttcattaataatcacagagccaaattaatacatgttgccatttatgaaatgtgaaaacagtaaagcagagtcagtacatattgggactgtgaatcaaagattttggcaaaatgtaccatggaccttaataacagtcacatcctttaacctactaattcccttctaaggactcatgccaagggagtaattaaaattgcttacaagatggttcaataaagtaaaaagatacgacctaaatgttctgcaatagggtaaatatattattgtatattcataa

SEQ ID NO: 420084 - DNA, 145 bp, Homo Sapiens
tacttccacaggggaaaaaactaatgggaaagaaaaatcctcttttctttttcacactatgtttttctttcctacctcattctcccttctcctctactgtctccagtacctaatttttttaaagtgttaccttatccagaaatca

SEQ ID NO: 420085 - DNA, 454 bp, Homo Sapiens
tacttccagggattgacttcccttacttaactgccctgcattgtttgttaggtttaaatatggttcatttattagttataggatattttgaaactgatttcctcaatgcacatgaagtattttcaaaactgatgatacactgactgctggtccacttgaggcattctttgtctttctttagctattgatggtttctgtagacctattattaagagagaacatttgttttctcaaatttctaatccagtgtgattagaaatagggataaaggagctttaatttccaatatccaggtttacccctaaacactggagcaagatgagtgaagaaatatgcctgttatatttgcggcgttcatccttgataagagtagttttggttgtatgttgcaagtagaagaaaaagtggaatggctggacaagtgaaagagatgaaggaatggaaatagcatgtg

SEQ ID NO: 420086 - DNA, 515 bp, Homo Sapiens
  misc_feature (80)..(80): n is a, c, g, or t
tatttccacagggtccacgatagaaccgcttccggccctcgctgtcgcctctaacaagttctcagtcaataccaatgatngatgctgactcagccctgcgtcactgatgatgtacatgatgaaacaggatgccagtgtgatgtgatcagtggatgaccatcaccccaccaataaaaactgtgcatccgagctatcagaattttgaaatttcatgttgctaaccggaggttttgggatgcattacgtccatttgatgtataagatgtcgttgaacaatattctgctggtcatctagggcatgttgtgttgaattatatgccttcaaatcacgtgttgatcaaagtcttggaaaagggtcgaatcacatcagatgataagagccgatataaaatagcagctgaccatgagaccacatacgatctcagtatgctcggccggctggtcaaggttgaaaaacaggtaccctgcatagaattcaagctggacttgctactatacctctatcaatgggtcct

SEQ ID NO: 420087 - DNA, 173 bp, Homo Sapiens
agcgcctcgatcatatcgcctgctcgaggagcacgactttcgcgagtataggtcgcagtgaaggccagcgacgtgttccttgccgtcgccgcttaccaggaactggcgagccaggtggattgtccgctgcatctcggaattaccgaggcgggcggtctcatcggcggcacggt

SEQ ID NO: 420088 - DNA, 192 bp, Homo Sapiens
tatttccacagggaaagtgggtttgccgtgtagccagatatatgtacatctcatggacactgccatctgtttagatgcctagtgtgcatgtgataagctctaaatttcttagactactgggttcactgatgttaccagacataattttatatctttcccccttgaaggtctggatgtacgccattaacttaa

SEQ ID NO: 420089 - DNA, 121 bp, Homo Sapiens
ttctcgaaagagtacggggtcgaggacagagcgtgaatgttacagagtcgtgtgtggtcaacgcagaacttccaacgattcaatgggatcacgatcggctcacgagtgggagacaatgaga

SEQ ID NO: 420090 - DNA, 333 bp, Homo Sapiens
tgaaatctttggggcttgggaaagtctactctacatcacttggggcaggcatgacatagcatatatttgggatacacatgcctgacagcccagtcttcatttgaggaatctgggatcaatacatgatccaaatcttggtactgtgggtcttgcatttggatttccatgtggatttcatttcggccagggctggagttactgtccctgttcatgatggtggtgctggtgacctatggggcatcctaacttccttcccaggcagatgtccctgctgcattggtcaacatgtggctccaaaactagacttaaaaaaagcataaagatgttcccatc

SEQ ID NO: 420091 - DNA, 441 bp, Homo Sapiens
tattccacaggggatgaagagctatatggctagagctgtggtatgtgcactaattgagctatataacattatcgctgttgtcatccccacagcttctctgagtgatcaagtacttgttcctcattttggaatgttttgcagaatattgaatctcatagaggtgaggtaattgatccaaggtcgcatagcccagaagcaacggctataggacttaagtcttggactgtttgagcagtgtatcatactgccagtgattgccagtcatgtgccatgtatctttgtcaaataagatccttattcgtcgagtctggattggagctactgaaaggagttgtcagggtgagtggtttgcttcccctcttctcatatgttgcagagcgttgagggaatgagtattcactctcctgcttcttgtccctctggctacttcagttcaccaca

SEQ ID NO: 420092 - DNA, 553 bp, Homo Sapiens
agaagtacctgatacacctgacattagctgtcatgtcatcatgttgatcatcactcacaggaattgaaatctcccctgtattgcccctggaatactagtagtcaaaaacatgttgatttaattggaaatgataacttatctttatttatgttctctttggacactagtcagtccttagctacagttactagaggcaactagactctaagtgaattttgctacttgtattttattgcatgacaataatggttaagacctggcttaagcaaaagtgtgatgcaagttaagttcggcatacttcatctctcttttctgcacttttctcctttttgtgggctttctgatactcagaccaaggctctatttctcccattatggggagaagtgtcttatagacaaactcagagttgtttgttaatgactttaagtatcatttctcaggaatgtttaaatttcatgacagggtactagagagggtaatgcttagcccgaaattcagaatatctaagagtggatgctgttgatgtgtggtagggctgggagaaagttagca

SEQ ID NO: 420093 - DNA, 389 bp, Homo Sapiens
ttcaaggacaagaacgccagttcatttgcttgacttacaataaagccagctctatcttggtaaattccctaaatacagtatggtatctaggacccaatataaagttatcatattctttaaaaatattttaggacgggaaggattatattattctgtaatatttattattattgctctaagtaagtgtgttgtgtttagtattgaatacttttaaaatacaggtttatctagtgtaattttaatagctcccatagtagaaaattgagaatttttggactgtagggaaggcagagaggcttttgatgttccacaatgctttagagcacaggtttggggtcaggcaaagaatggaacacatttaagctgtgatacttatgctgcaatgagta

SEQ ID NO: 420094 - DNA, 282 bp, Homo Sapiens
agtcagcacacacagtcagaaatagtttcttaattggtctttgtccccatttgtatgtctctacacatcaaccacagggataaatcatatctcgctccactacactacttaacacctccccaccatcacacacccaatggcttcctggtgtcatcagaataaaattcaaattcctcacctttgacctaatggccctttctggtctagttcttgcctataatctattttctacttatttcccccttgttgactgaatgctaaccacacaagccttttttctgt

SEQ ID NO: 420095 - DNA, 454 bp, Homo Sapiens
tactttccacagggggacagggttctgtatggtagttatgaaggcacgtgcccaagtcacacctatgttcacacgcagattgtcaaaggaagggtgggttgggagaagtgatggacttcacctgcctcactagcttcttcatctcactgaactaaagggaatacaaacctccatttcctgtatatgtttggaactttttgagcattgtcacctctggcagtagctgtgcccccttatcttgtctgggctgctcaggtgttgctgaatgtctttgcatacaaagagaatcttatgtcagtcttaagctaagcatgacattactaagtcctgattgcccatatgtcgtaagaaccttcactactactgttttaaggtgatttggggaagtttggtttgtttgaaggagtccccatcctttggagatggtgctaagggagatacctctggggtaccg

SEQ ID NO: 420096 - DNA, 566 bp, Homo Sapiens
  misc_feature (124)..(491): n is a, c, g, or t
tacatccacagggcattatcaaattattaggacagtgacaattccagtgcaacgataatagcagtgctccattaactccatctcacagtcctaggtaggtttcacgttctcatgaggaaaccannnnnnnnnnnnnnnnnnnnnnnnnnnnnnnnnnnnnnnnnnnnnnnnnnnnnnnnnnnnnnnnnnnnnnnnnnnnnnnnnnnnnnnnnnnnnnnnnnnnnnnnnnnnnnnnnnnnnnnnnnnnnnnnnnnnnnnnnnnnnnnnnnnnnnnnnnnnnnnnnnnnnnnnnnnnnnnnnnnnnnnnnnnnnnnnnnnnnnnnnnnnnnnnnnnnnnnnnnnnnnnnnnnnnnnnnnnnnnnnnnnnnnnnnnnnnnnnnnnnnnnnnnnnnnnnnnnnnnnnnnnnnnnnnnnnnnnnnnnnnnnnnnnnnnnnnnnnnnnnnnnnnnnnnnnnnnnnnnnnnnnnnnnnnnnnnnnnnnnnnnnnnnnnaagataattaatgccaatttcattgggagagcacttgaaccatgatatataacattatctgtatagagtcttccc

SEQ ID NO: 420097 - DNA, 156 bp, Homo Sapiens
  misc_feature (56)..(64): n is a, c, g, or t
aaatcacaatattcttttctgtgcgtaatttaaagtttaaattaccccactctctnnnnnnnnntgcttttgttggcgtccaaattttccgtattatttgttcgaagaatatcaaatgtagaatactcatatacgtatacaccatatttctgaaat

SEQ ID NO: 420098 - DNA, 110 bp, Homo Sapiens
tacagtggcctgtctatatatattctttacagcatgtacctaactatatactaagttataaccaaatgacttcagaatacacgaggacatcaagatgatacaaagtagtg

SEQ ID NO: 420099 - DNA, 342 bp, Homo Sapiens
gtaactatgagtcctgcctagtatgacagtctgagataggctctccaaatgaatgcagaagctgagattgcactgcctaccttcaaagagaagtagttcttcccactctcctatttttgtggcccaaaatgtgcgcactcttagggcgtaagcataaattcgggttctgctggttttctggtggtacacagggtcttcgtgtgtagcacagattcaggagcctgaaatttgactacccacaaatggtgaaactcattctgagatgctatcattagacctgttttgcgagctgtgcattgtgtcggtcccagaattgtaaaacctggataactccctgcacta

SEQ ID NO: 420100 - DNA, 431 bp, Homo Sapiens
  misc_feature (342)..(366): n is a, c, g, or t
ttccaggtaggggatgtgtggagtgccaagatatcagtttagttaataaggtgggtggaactgtagcccatgtgatctactgggctattaactatcactttatgccagattaaatacttggggcatgcagtctatgtctgatcccacccatagactgggattctaatcaaaagactggacccacctggcaaatgaactagtaaaatacacctgggtatattatgagaatacagatatgtgtacatttctctaataaaatgaaaaattagttattttcttccttaatcatatagaagttaaattctttttttcttcttatttactatcttcctaccccaaagnnnnnnnnnnnnnnnnnnnnnnnnngcctaaatctttgcattttaactgagttttggtgttcagaaaactgcaaagttatattttgagac

SEQ ID NO: 420101 - DNA, 173 bp, Homo Sapiens
tacttccacagtgcatcaagcccagagtggcagctggagcacctgaccccatctgcaaagtctagatatatagcaggagaaaagggcacctctcaatccacacacccttagcaaaagcttttctcaagtggaaactagtcaagaggcttcaggaaaatgaccaatagaaaggg

SEQ ID NO: 420102 - DNA, 145 bp, Homo Sapiens
ttagaaaaagtattctttattcctagttctgaactcaatatcgtctttaataatactatatatgtgaagctcaaaacacttaacactattatcaatatttggttggctagggatcccatataaagagaaatctacaagaggtaag

SEQ ID NO: 420103 - DNA, 202 bp, Homo Sapiens
agcagggtgcgtggtggacagtcccattaaaacacaggtgactgtcgttagcaaaaggtcagtcattggttcaaagagtccatattatgaatatgtttttattccccagagcactctctttcctgaggaacaaagcaaagcactttgctctctcatgtatttagaactgtttattagtagatttccaagctataaacctgaa

SEQ ID NO: 420104 - DNA, 416 bp, Homo Sapiens
tacttccacagggaagacatgttaacaaatagttagaagtgaaatgagtgttacaaatatgcctgtataaattagggtgtccaatacctggtgggctctcaccattgcaggctctcactgtaatcccattgcatcttcctaattttctgcaacccctaagccgtacctcttttcctaggagttcttcctatttcagaaaaaaacagtcatgcatgaatgaactctctttgctttctcacctcctgctctgccttagaagaaaggcaccatgtctctgtttagggtgatccacccccttgggctgcacatgccatccctctttgctccaaggaggcctggcttcatcactttccttttctcttttcctgtgtcttcacctcttcaagtttgcccccagttctcctttcttcctaagt

SEQ ID NO: 420105 - DNA, 136 bp, Homo Sapiens
ttctcactcacagctacttaggccttttggccattcctcaaatttgccaggcactttgtacagctgttccatggtattcatgagggggttggttccagagcctcttaaagatacccaagtccgcagatgctcaagt

SEQ ID NO: 420106 - DNA, 196 bp, Homo Sapiens
ctctataggatccccagaatcatggatgctctacgcctcctatgttaaccgtgtccatgtctttactactttgatccgcgcatgatgtggttttgacgaacttgccatatactttcttcaccaatctcttgaagacgatggaacatgctgagaaactgacgaatgctgcagaactcaaacgagtaggctaatcttc

SEQ ID NO: 420107 - DNA, 128 bp, Homo Sapiens
tatttccacagggtgtggcctctatttttttattaggttgtcacaaagagttactgcggttataggtcatttcttttgtgcagccaaataccgcaataactttagcaccaaacctaaataatttatat

SEQ ID NO: 420108 - DNA, 166 bp, Homo Sapiens
cttatgtaaattccagcatataaaagaagagcactgcactagaagtccagataactgccttctagtacttgggtttgccagcatcctgcacacaatgcctggcaccaggaaggtgctcagtaagatgtgcatgaatgtgtacataaaatttatatgtgagagaatg

SEQ ID NO: 420109 - DNA, 213 bp, Homo Sapiens
caaatataacttacccacgcaagcgttttcacatagctatcttgtagaaatggactcagatctgtatcataagcaagttgttcggggtcttctggggagaggatccacttctgtagggaatgaccggctatcacaatcacttgccatgctcgctgtgctagattaccatgtcttgtgttaatcattcctaccaggtttcttttgtcagaagca

SEQ ID NO: 420110 - DNA, 215 bp, Homo Sapiens
gtcgagctgtcatgtatgatagtctagtcgagtgatcagtggactatgtatgggttctgacttgctaaacactcgcggtgaaaatttaaagaaacgatcgacactaaccctgcacatcggcaatcaacctaccaaggtgggaggaaactaaaagagcccggtgggtcctgtttaataaaaacgcatcatataaaaaggcagattccccccctgtg

SEQ ID NO: 420111 - DNA, 244 bp, Homo Sapiens
tactcacaggactctgtgttttccactcaacaaaggatagcgaggggccaggtgggggtaaactttataaaatttttgcttggggacctgaatttaaatctattccatggatgagacagcaagttaattagttttcaccctataagtagtctaatttccagggctagtttaaggaactgtaaataaatgtacactttaaatcttttatctcttaacccaatacaaactatggtcttatgctttc

SEQ ID NO: 420112 - DNA, 109 bp, Homo Sapiens
tgccgcgacatcaagtgagatgacggtgccatcctgggatgcggtacctcaatgtcatccgagcccgaccgatcgtcagggccaggggccctttttcattcacgatgat

SEQ ID NO: 420113 - DNA, 351 bp, Homo Sapiens
tactttcaggcactatttacatgagaaaacttaagttaaaaatatgttacaaaaactaccattaagtgatgttgtctcatttatgaaaccacctaattgctttagcgcatctttcaaagaatttcaagcttatcctagaagtttcaactttacactagcagaactatcacccatcatttcttgtctatttttcagctttccgtcatcaactgaagtggaactcatcataacatttttaatcgtcttttttcttttggagcatggaactctcgctcgtgctggcccagggttacagtgccggtggcgcaactcacagcctcaccgtgcagcctcgaccttcgtgaggctcaa

SEQ ID NO: 420114 - DNA, 433 bp, Homo Sapiens
  misc_feature (278)..(300): n is a, c, g, or t
tattccacagaggagatgatggtaaagccaacacagaagtaagactcatggttgggtattggagttggtccaagacctagtgcaatgtgatgctgacatgaagagggcagagatgaagctccttaaatctttcctggggttaggattgaccccaaaggctgatgtgaggctggacttagatacaagtcaagaatgtcgagtaccggaagaaaagagtggagggactaggaactagcaaaatctgacagtgaatctatattctgtctttatgatcctgnnnnnnnnnnnnnnnnnnnnnnngcattctaaccatttcaatcatgaaaataattatgacaaattcataaataacagattacatttaaaaaaactggataaaatggaatttcggattccttattgttttccctttgatttttcagtatttttttct

SEQ ID NO: 420115 - DNA, 311 bp, Homo Sapiens
aaacactctatgatttaaggatatttcaaaatcagtcaatcacacttttgataaaaacttggcaaatggaattagataaaggaacatgagtatagaagacatcaacaagaaacttaccccatgaaggtttgtttatagtcagttgcagcatcccctttgcttgtgaaggatgagtgactattgggtatatctcaatgccatatgtattattgaataggtttgttacagttttatcagagggaaattctatgaatggcagccagtgcataccttgaatgattgaacaaccaaagcatcctccctgtggaaaa

SEQ ID NO: 420116 - DNA, 164 bp, Homo Sapiens
agagtctgggcatggttgttgatactactaataaaccgtgcagtcattctgccaggtcgctcggagaattttaccacaatgttcagaaaatagagacacttccggtatctctgagcacaacggcccgggagcatgcattaacctgcatagagctcgcgatcgag

SEQ ID NO: 420117 - DNA, 563 bp, Homo Sapiens
  misc_feature (410)..(418): n is a, c, g, or t
tacttccacaggaaacacatttatgttcaactttcatatgaggtatgaatgtgttccatcgtaatgttttatttcaagtctaattatgaagtaaatggaggaaaaataataaataaagagataacattgtatatattacataattttctttattttgatttctctgcaactgtgctactattgtactccaatattccttactcaatccttgtctgctattccagtttcctttttactagcacatgactatgatcctaccagagttttaagatgttgatagacatacaaaagcacttattatttttgcatgtgatattaatagaaagatagaaaggatctcactataggagaaaaatcaatcaaggctcaaacttatcattaaatgagaattctggccagaatccaatacnnnnnnnnnaatgaaagaattcaaagccttacaatttaaatttcatcatcaagctatatatagagaagatgggaggccttggctcagcagaagatcatgtaaaaatttcatatctagaatattaaatgactgctgagcaggtttctggttgata

SEQ ID NO: 420118 - DNA, 508 bp, Homo Sapiens
aggtagtggcatgctttcttttcatcttcattctcagtctttcagagcacagtgttgtagctaccaagtcattggtcgctgtgttgagtggccgagtgacctgctagcttaattcacaagaagccagttttcagaggtaggtgcacttatgtttgctcaaaaaggcagcaatggtactctgagagaactttattcattgtatctggtccctatttgcccaattttatggattttctttaaaattccttccataattcttgacctttggactataacttcaaatgattatagacactggcctgtgctgtctcacctttctttttatatatgaaaatgaacagtacaaagcacagacccaggtcttaaaataaataagctcattcaaaagaaatcaagctacaattaagtgaagacatattacaaatttaagaacatcaccatcgcactagcagcacattaaggccaccagtgctcaaggatcttgggtatcccattgctttgacattga

SEQ ID NO: 420119 - DNA, 477 bp, Homo Sapiens
tatttccacagtgggaagttggaagtcttatggtccagactgtggctgggctatgcatggtggtggcatctctgtgggccccagggcagcttatgtcaagtgccagactaatggtaagtaggaacaagagtaccaaccacagaccaaggagcaggcccctgacctatttttctgactctgtataagaaacagaggctaaaataagccatctggtcaaccaggtagaaccagatttagaacaagagcactgttactgccaatcccacgggattgcttctaagcaatcataatgccaatcacattgcaaaatgtttgtggattgcagaagctccaccaagaatggagactgaagcaaatgggagaagggagatagtggaaatgggagaactaatcaagccttcagtcatcagggacacatcatctctgcttatcccagagaacatcatcctttgtggccatttttctagggtcaacaag

SEQ ID NO: 420120 - DNA, 339 bp, Homo Sapiens
atcggggcgacgtggcgacacgccgtgccccgatgacgccgaacgccccggaaatccgcgtgtttccgcggttctctgctactttgaaggcggcctgatcggccacgggggcggtcgaacgatcgtttccgagtactcatcgatagctgtaccgaaacagcggaaagtccgaggaggacattcaatggctgacaagtcgctgaacaagaccgagctcgtcgcgaagatcgctgcgtcgaccggccagagccaggccaccgtcgacgccgtgctcggcggtctcttcgacacgctcgccgagtccgtcggttcgggcaccaaggtctccatcccgggttg

SEQ ID NO: 420121 - DNA, 108 bp, Homo Sapiens
tactttcacagggacaatgggcaaactcttttggctgtattgcagttaactgggagagaggactgtctggatgaatctggataaacgcaatttctacctaataatttg

SEQ ID NO: 420122 - DNA, 116 bp, Homo Sapiens
tacttcacagggactgtggcattttgtgttccaatcagtgatgtatggggggtccagtatcctctacctcatttgtgactctagtccatcccaccacggtgtgaagtggtatctga

SEQ ID NO: 420123 - DNA, 140 bp, Homo Sapiens
aagatcctcagtgatttgtttgtgcgttaaagtctgagaagtactggctgaagcctttggaatattgataataacagtttcactttctttcagtatcaaagaatgttcctcaccctgagaataatagtaatagggtaccg

SEQ ID NO: 420124 - DNA, 201 bp, Homo Sapiens
agcaggggtggcgtggtgttcctgttgtggctcagtgtgtaatgaatcagactaggatccatgagggtgcaggttcaatccctggcccctctcattgggttaaggattgggcgttgatgtgagctgtggtgtaggtcacagatatggcttggatctggtgttgttggggctgtgatgtctgctgtgagctgtagctccact

SEQ ID NO: 420125 - DNA, 215 bp, Homo Sapiens
  misc_feature (184)..(185): n is a, c, g, or t
acatatttcaaatatcaattgatttgttcttgccctatgcaagtaccactcctcgcttccttaacagtacccgtggcagaattgtaaaacggggcccaccaagtcgcttgagtgattctagctgacatcctctttgcataaatgaattaattagccacgagtggtaccggagtctacagaattnncgtaatcatagggtcatttagctgggtttc

SEQ ID NO: 420126 - DNA, 123 bp, Homo Sapiens
aattgttccacaggtcctctgggcactaatccctagccagctttcctacattaccaggatatccccttaaggacttccttcattcaaaataggcagaactctgatggtttactagacccaagg

SEQ ID NO: 420127 - DNA, 133 bp, Homo Sapiens
tattccacaggcaagaaaaatacctggaaaccataaccgctgcttttagtttccagagattttgaagcctctttctctttgtttttcctctaaaccagttacaattagcattgagggatataattacgttgtt

SEQ ID NO: 420128 - DNA, 221 bp, Homo Sapiens
ggtataaggaaggagtacagtttcaatcttctgcatgtggctagccaattatcccagcaccatttattgaataaggaatctttcccattgcttgtttttgtcaggcttgccaaggatcaaatagttgtaggtatatggctttatttataggctctctattctattccattagtcaatatgtctggttttgtaccaataccatgttgttttggttactgtag

SEQ ID NO: 420129 - DNA, 413 bp, Homo Sapiens
cggtacctactttccacaggctttgtagaatagtgctttatctcagctactacccagccgccttttatttaaagtgttcagtggaccattatttgggatgaataaaaattcgatgttatgccacagaaaggtaggattttggggagaaacaaatacaggaaacaggtggaaatagatacattgagaagaatccttttgagcagggatttttgtagaaaacattaaaccaaatcgtgtatcaaactctctggctggtggtcagtctaatcacaagcatttattcttaagtgtcctacagagagaaaaagctgtttatggctgtatcttgagttaaatatttggatttggactgcaagttaattttagggagaaaacatctgtctttctgaaaacagtatgcctttaaaagtgat

SEQ ID NO: 420130 - DNA, 208 bp, Homo Sapiens
agccggtaccctctatgcaatctagagacagtatatgaatcatttaatactacagcatgaaaattgtattaggcgacatgaatgcgaaggtgggaaaagagaggatgtatagaccaaatctaggaattcatagtctacaccaagtgtcaaatgataatggaatacgcctcatcgaatttgccctagctaaaaatctttacatcaaaag

SEQ ID NO: 420131 - DNA, 135 bp, Homo Sapiens
ggacactgctgtgaccgtgctgcagacatgtgacatgtgtctccacgaagggaagaggctgccgtccactgtcgctttctgcagtgacactgtgccctggcccgggctctctgctgggttgcagaagtgcctggg

SEQ ID NO: 420132 - DNA, 577 bp, Homo Sapiens
ataccacaggtataatgatgccatcctgcaagaggcagtctgtgtgagaaaaagaaatcaaataatgtggatgttaaaattacaaaagacattcatttgcagtttatgaaaggaaaatgtagtttggatacaaagctgattaaattggatcaagaaatatgagaatgaaatgcgaaaaataatccatgcatttatggttttgatttttatatattcccagctagttgaaaatgatgattcccacaagaagcataactcagcttgtgtctgcttactgagtattttctactatggtatatattgataacatttcttccattatgtatgttgtataccagagttacagttactgtgggaatcataatttgaaattttgactcctgtgtttctggaatctttacaacaaatgttgcattaacatataacttttttcagttgactttaccaaaattaagcccatctttagtagatactgttttaacatgtgaaagaaatacgttataaacataccacaagatatggctataaaacaatgagatcagtatccatttttgctttcaagaatagagcttattgc

SEQ ID NO: 420133 - DNA, 463 bp, Homo Sapiens
  misc_feature (400)..(400): n is a, c, g, or t
agcagctcttgtgtgtgaaaaccctcgggcgatcacaccaccatacacattaacacccagtaaggaactgtttaaccaacgaatgaatgcaagtttctccccacaggtagtgggcagtcatgaaggacacccagtgctccactagggtttagggcaactccagagtggccaagtcagattctgcataaaccaagaagacattgctggaacagtgattataacatgcttcctacactataacactctgcaatttcaaaatacgagggctaatcactttccaatccaaacaaactgtgctttattgtgagtacagaaacagaacaggggtgggggagtctggaaatgacttcgaggggaccatttacatgaatgtagtctttgacattcaggtaaatagaanctctctcatttccaacacaagaagtcatcactgtggcaaccaatcgagcataaaaagttggaa

SEQ ID NO: 420134 - DNA, 131 bp, Homo Sapiens
gcatcatcacgagaacatggcctttggtttttaagtcatgaaagcctttatgaaaaccttcagctagctaggctgattaagggtggactagtcttctcactgtttaacgtcccctagccagacgaagtata

SEQ ID NO: 420135 - DNA, 102 bp, Homo Sapiens
tccgagaggtagatgattgagtacagagttgaaattctatgtcattacgcagcaaacccgtccttaagtcagttaggattgaagtgccctggtggaaaagta

SEQ ID NO: 420136 - DNA, 583 bp, Homo Sapiens
tactttcacagggggcagtggtaagaataatcagcaggaaggaggggagaagaagaaatcatggccatcaaatggtagcctgtttgtggctccttctgtctataccaccacggcccagagtgcttactttcaggctgagaaagagaactactatggtgagctttggcgggcatcttgggctaaggctgacagaatgaagctccacaacctgcccatgagggggactcactgggcaggtttctgcctgcctcccactctagtagatggctcatcggcctgtcctggaggtgagatgtgctaagctgtgctaagcgaacagctgtactcttgaaaaggaaacctgaggccactatcaatctgggttcttcacttgtaactacaacctgataaccaaggatttccagatagggtaaaatgtcctcaagtaaagaccgcaatgaacaaatcaaagattgaacccagaaaagccagataattcagggaacaaattattttagaaaatgttagcatctgcagctgatatctggagaagatatcacaagcctttccttccattaatagaccaggaattcagaaagacttc

SEQ ID NO: 420137 - DNA, 398 bp, Homo Sapiens
tactttcacagggtttgattcaactgaaaggggagctgtagccattatacaacctcagatgaggatggctgagagagatctagggatggtaaatggcgactcaaagactcctcaatgagtctaagcctagggaaggtgctgagtttgtggttcttaaagcaaaggactcgaggtcaccatcgctcagagatgagacaatctctcagctccatttcatgctgatatatttcctcagatccattacatgcgagcttaatttttttaaggtgaaggtttctgcaacctggaaaacaaagcaataatcttacaatacagaagaattgggcagaagtccccaactatctctgcacatcagaatcgctgagcacacttaataaaaacactacgtcttgggctcc

SEQ ID NO: 420138 - DNA, 110 bp, Homo Sapiens
actttcacagggattgttaagtatatgtaatgttgtcattctttggcatcactttggcgaattgctttgtttttacccatgtgaggaaatgtagcaaaaggacagtatct

SEQ ID NO: 420139 - DNA, 119 bp, Homo Sapiens
tatttccacaggcttgtcaatcgtgcctatgtaatgaagcctccataaaaatccaaaaagacagggttaggaacgcttctggatagctgagtatgtggacgtttctggagggtggcatg

SEQ ID NO: 420140 - DNA, 222 bp, Homo Sapiens
  misc_feature (61)..(147): n is a, c, g, or t
tacttttcacagggtttctcccatccatccatcagtgcagccaggatactgcagctccaannnnnnnnnnnnnnnnnnnnnnnnnnnnnnnnnnnnnnnnnnnnnnnnnnnnnnnnnnnnnnnnnnnnnnnnnnnnnnnnnnnnnnnctgggctagatgttgtctcagtgccttctggctctggggtctgctctgccctttcccaattcaccatggtcttgg

SEQ ID NO: 420141 - DNA, 203 bp, Homo Sapiens
cctattcctacactgtacgaagcgacactccacctgtaacgcgcgtaccgcacatctcggtcagattcaaggcatttctatacagcttgctacttgcagtcctccgtgctgaagaggaccgaacgatgcgggctgaggattgacaaacatggatgcgatcgtggtagccgaagctggtctagaggatcacgctcaaaatgacg

SEQ ID NO: 420142 - DNA, 464 bp, Homo Sapiens
  misc_feature (226)..(263): n is a, c, g, or t
  misc_feature (313)..(375): n is a, c, g, or t
tacttttcacagggatagaggtttaagtgggtttgagccacgtgttcatctgggcaacaacatcagtggctgaatgtctgttggtgactccttaggctttaaatattttgtatcccatgttggggtgggggcgtccacagcttccattaccctttgtcctctcctggagccttacctcttcccgctgggttgctgtgttggtggtctccattgacatctgtcaacnnnnnnnnnnnnnnnnnnnnnnnnnnnnnnnnnnnnnncctcaatagaacatatgttctgcaggacgcagctacatccagccatgatnnnnnnnnnnnnnnnnnnnnnnnnnnnnnnnnnnnnnnnnnnnnnnnnnnnnnnnnnnnnnnntgtaacctaactcgtgatctttggggctggaggttgctgagttatgctgtgaaaagtaaacattttccaaaaattgaggatcaaggtag

SEQ ID NO: 420143 - DNA, 132 bp, Homo Sapiens
tacttttccacaggcttaaagttcagaaggctgaggctaggagaggttgcagtcttgtgccttcagctcaggccagtagccagatagagaagctgaaatgagcagaccactccaccaagctcctgtgagagg

SEQ ID NO: 420144 - DNA, 480 bp, Homo Sapiens
acgggaactgtgagaaatataatactgtttgtcccactgcatcactaaagtcaacatttatgtcgaacttcatagaactaaaggcaggcaagtgatgtgcctattaaaaggaagctaaaagctcaccaagaaaacctgttctagaaatgtttattatgttcaaaagaatccagctgttaggagccagggtccactagacatgctgaacaatgaactcctttagcagagacttcccatttgggaagccccagtggcagtaaacagctcatcaacaggccccttcggctggcagtttccaaaagggcagctgttgagccagcataggttcctgtattgctacacaaaggatatttctctaaaatcgttctcaccctggaggtggctctgacagcctaaacacaatcttactatgttagttctagtgtgtgtcttccaggagctaatccataaaatcctcttgcccagttccaagaccgctga

SEQ ID NO: 420145 - DNA, 155 bp, Homo Sapiens
ttgagaacacacgagttccatggaccattgaataaagggcaatagactgacctgtgtatgtgtatacgtacaatacacactcacgcagtccaataattgaaaataggtcaaattagaaccagagagcagaactacctcgtacctacttggaaaac

SEQ ID NO: 420146 - DNA, 132 bp, Homo Sapiens
taattccacctcacataaaccttaccctactcccacctctgggaaaagagtgactcaatttaaatgattttctggaatcagccatatgtcagcccagttataaatggccttgcactatccacactctccttc

SEQ ID NO: 420147 - DNA, 523 bp, Homo Sapiens
  misc_feature (12)..(12): n is a, c, g, or t
cggtcgactctnagacggatcccctactgtttccacagggcaagctgctttgaaaaagaatcagagcctcctggctgctttaggttcctaatatacgattcttcttttcacggagtatgtgtggacgttgaataactgagatttggggcatattaccaatgctgcatctgccactggaatgctgggctactttaaaaggagttccacagagatggaattaacagctgggctaaaaaaatctgtttttcacatcctttgccctgctgcaccaaacctgcccaaacatgtgactcagctattttgcagacctaatggcatctccaagcagctcaccacagtgatgagttcctggcccacctgctcttttgtaaggagcaggatggtctgtgcctcattgttctaagaattcctcgagtgagatgtggctacttgtggagatcccaccattgacatgcatgtccccagttaagatgacccagataaatgctctgacctggttaccaccttgtggcaagcccttgga

SEQ ID NO: 420148 - DNA, 181 bp, Homo Sapiens
  misc_feature (52)..(111): n is a, c, g, or t
agaaccacagcacatgaggtaaatgctgtgattgaggcagctagagaggaannnnnnnnnnnnnnnnnnnnnnnnnnnnnnnnnnnnnnnnnnnnnnnnnnnnnnnnnnnntccagtaaaataaaaggagaaggttctgccgcttcccatcccaattccaaattccctggacgggaactct

SEQ ID NO: 420149 - DNA, 260 bp, Homo Sapiens
gctttatcttctactaggcgcacacaccttagtaaatcttggggtggaagcttgcttgggagaaattacagagccctttacagcagccctccagtcttttgtgggtcatgagtgtcagaatggtcggggataatgcaagatacccacagtggccatatctctgggagtgtctaatgaatatcatccccggggtcatctctgggagaacagcctgaggagtaagagtgtagcctctcagaagagcagctggatggcctagg

SEQ ID NO: 420150 - DNA, 104 bp, Homo Sapiens
agatccttacttaatcacatctgaaagaccccattttcaataacgtcactcacaggtacaggaggttaggaatgcattattgaactcactactcaataattttg

SEQ ID NO: 420151 - DNA, 307 bp, Homo Sapiens
tacttcacagggaaacagcagagtagccaaatgcccctgtaacatagcctgaggatccactgggcaatacaggatcttgctttgcattttctattttccaggatcctctaaatctatcagatccatggatttaggttagaaagaggctcgtgaagctgtagtgtcagctataagaagcccaggtctgggcaggttccaacaacccatgagtggtgagatggctctagccgttgccctcaaagtctttagtcattcacttaacaaagatattcttggtgcctaccataagccccatggtggtgttaca

SEQ ID NO: 420152 - DNA, 349 bp, Homo Sapiens
  misc_feature (194)..(219): n is a, c, g, or t
  misc_feature (239)..(274): n is a, c, g, or t
tatttccacagggtcacattcaatgccagtgtcaatattgtttacaatgttctggactgtctataaattgagagcacaaagggagaaactcattccctcatttccagtactacatgtagttctatatgatacaaaggtagaaatcatttgtctattacaccatttcccagtaaagtacatagttgacaagttgnnnnnnnnnnnnnnnnnnnnnnnnnnagatagtcttgctctgtcgnnnnnnnnnnnnnnnnnnnnnnnnnnnnnnnnnnnngaaattggtggttcttattcacagctggctttcagcccatgccacccttgcctttccccattccctgtggaaaag

SEQ ID NO: 420153 - DNA, 119 bp, Homo Sapiens
tactttccacagggtaaaagaagttgagttgagacgaaagatatattgaataaaggcagataatatttgtaaattgactaatagaaagtcgttaccatctttattagaagctgaacctg

SEQ ID NO: 420154 - DNA, 192 bp, Homo Sapiens
gggctcagcgactctcccacctcagcctcccgagtagctgggacaacaggcaggcactgccatgcctggataacctttttatttttgttttgtagaaagagggtcttgccatcctgcccaggctgctcaaattcctggcctcaagagatcctcctgcctcagcttcccaaagtgttgggactacaggcatga

SEQ ID NO: 420155 - DNA, 534 bp, Homo Sapiens
atagtcactggcttggtttgctggtatttgttgttgagatttggggcttagctgccatttggagcagatggaaggaagataagctgaaaagggtggcaggggaggcattagtgggaaatcctgcccacgcttcttgaatgctgtatttgccaatagtgtagatgctggatttaagccaatgagtccacctagctgctttatgtaaaatactttctgttgttgctcattgtgtttgggggcaatggctacctgcctgcttcacaggcttgctgtgaggttgactgaggcaacacaaagtcttttgagctccttggagaaaattcaccatgcaagtgcaaagtatcaccattgtatcatggtaatgagactcccaccagcttaaaccagttaccaaggagagatggggcatcaaacaagagaagccaaagctgtcccagtctcaatccaggcaaatgatgcttcctcactcaatactaatcctgccctggaggtaggtgtcagtagtcacagatgggtggtccatttgtgccccag

SEQ ID NO: 420156 - DNA, 164 bp, Homo Sapiens
aaaacatcccttttttaataaaccaaactaaaatgttagaaaacaacttttcaaggatgcttgtcccactatctgactatacatacataaattcaatagaaatacttttgaacactcacataagggtttaagtaaataggtaaaatctatttccagtcatcaca

SEQ ID NO: 420157 - DNA, 201 bp, Homo Sapiens
cttttccacagggataggggagtgagttttgacaacagctagactgtgagacttgttctttcacctaaatcctaaggatgatgtacataacatttagtttgtgcctaagtaaattgcattttttctcattttgtcttcaacgtttggctattttccagcttactacatcttccaatatagaatgatcagatacagtatggg

SEQ ID NO: 420158 - DNA, 409 bp, Homo Sapiens
atgagtgagccttgatcaggtgactatatgtcatccccagccccactccccaaaggccttttcttctaatggatccagtgagcatttattccttgtctgtcatgtgctccattttaatcatcctcccccaaagaccttttcttccaatggctcccctgagcatttatggagtgtcttctgtgtgttctgtatattcacacctcctccccagaattgttttcttaacagtagatccagtgagcacatatgcaggacctgttgttttggggagtacattcttcttccttacccctaggagagcctgttccaatcacaaggcctctcccaaggtcctttcctgtgataaatccagagctgagtttataatgatcacccctttcccactcccttcagtacccctgtggaaaag

SEQ ID NO: 420159 - DNA, 493 bp, Homo Sapiens
ggcccattgctagtgacctatacatctcccacttaacttttgaaggccctcctcctcagtcttcactatgaagctctgcgcatatttgtgcattataatgctatacctccatcctttcagccacccttaaacagcagaaacgtggattcagtgattgttgcaagttgtctccatcgcattatgtcctaacagctcctctggcctttgcaaacacacttctacctacaatctgggatcagtctgcttgagtccactgtgaagtccctaaagttacctgtctgtggtttttatgcaggtgccatgttagtgtgcagtgctgaccagcttcctttgtttaaccaatcactttggcccttaacccactttctcctaaaggctgctggagctattgcttcattctgcctctgtggtctggtcttaataccaggcataccaccaacgtatcctgagatctgcggacacctcagtttgggactctgaattctgcctcccc

SEQ ID NO: 420160 - DNA, 137 bp, Homo Sapiens
ccagaaccgccgacgcgcgaagcgcaaggacagggctcgggcttcctcatttcgtccgacggctacatcgtgacgaacaatcacctggtgcagggggcccgcgggtccggcacggtggatcgcgtcacggtgacgct

SEQ ID NO: 420161 - DNA, 102 bp, Homo Sapiens
ttggtagacagaccctgtttgagtcccagctttcagttcttacgggtatattcctagaagtggaattgctggaccatatataattctatatttaattccctg

SEQ ID NO: 420162 - DNA, 221 bp, Homo Sapiens
agatgagctcggtacatcattcaaaactaaaaacgaaggggctgtccgatatggatggccctttatttttttggttggcttcgaagtgaaaccatactgaaagtaatgtgaaagtatggttttactatgttttgcatacaaaaacatggtttaaggttgctttaaccgtgtttttagagcgaaattaaccttgtaactgctagactgtctcatttttttga

SEQ ID NO: 420163 - DNA, 109 bp, Homo Sapiens
  misc_feature (25)..(25): n is a, c, g, or t
tcgagctcggtacctttctctaacngtcgatgtgtgattgaatctgtcagaatacagaatacgcatctcaagaaagcgaatacggctcgttgttcctgatgatgtagat

SEQ ID NO: 420164 - DNA, 219 bp, Homo Sapiens
aaaacattatgagccggtcctactttccacagggacaatctggtgacctgggttggtgatgaggtttttgatacaacacacccaaaaacacaatctatgaagtaaaacaattgatcagttggactttattaaaattcagaacttatgctccacaaaacacacttttttatttgtagatatgcatggggtagaaatgcaattttgctacattgatatact

SEQ ID NO: 420165 - DNA, 140 bp, Homo Sapiens
tggaaaagttaagagcatgatgaatgttgcagtataatggtgtaaatcctcttaatttgttgcatgaaagacatgtgggatcatgtagcacctgttttgacattgattctcacgtatatgagttgctcctctgattttag

SEQ ID NO: 420166 - DNA, 204 bp, Homo Sapiens
aaagaattgggtggaatcaagaaagactctgggccaattacagttttagcaggtaaggtcccaaacaatgccagaccagacaaacagcttcaggctttgaaactaaagacagtggtctcaggttgtgtgacaaatagaattctatgcaatggcctgtctgtctatatagtctctcacatataagagcaatcattgccaataatg

SEQ ID NO: 420167 - DNA, 160 bp, Homo Sapiens
gggcttctaggtgatatcatttttttcctcttagagaataggggatgtaaagaccatatcagaacctctgcaggtgcacataaatgtttttgttcaaataaataaaggtaataatggcagataagaaattcaaacattttgttttaagcaagatggtatt

SEQ ID NO: 420168 - DNA, 596 bp, Homo Sapiens
tttcaatgtactttctccagatccatcagaggaatcactgtctacagcagctatagcccatgaaatgtatttcttaaatggtaagacttaaaagttgaaattactactccttgatccatggcatgcataaggggtgtagcaggcatgaaaacaacattaacctccttgtatatcttcatcagagctcttgagtgacttgatgcattgtcaatgagcagtaatattacgaaaggaactttttttcctgagcagtagttctcaatagtgggcttaaaatattcagcaagccatgctgtaaacagatgtggctgtcacttaggctttgtttttccatttctagggcaaaggcagagtagatttagcataattcttaagagcctaggatttttggaatggcaaatgagcaccggcttcaacttacagtcaccagctgcatttaaccgtaacaagagagtcagtctgtcctgtaccttgaagctttgaagccaggtatcgacttctcctctgtagccacagaagtcctacatggcatcttcttccaatagaaggctgttttgtgtacactgaacatctgttgttttgtgtggccaccttga

SEQ ID NO: 420169 - DNA, 118 bp, Homo Sapiens
caccatttcaatagctttggggtacaagtggttttcggtacatggatgaattacatagtagtgaattctcagattttagtgcacaggtcacctgagtagtatacactgtagccaatat

SEQ ID NO: 420170 - DNA, 267 bp, Homo Sapiens
gatgccggatttgaggcattcgtgcttactgtgtctgtctatggacttgccaggccaatatatagatcccatggatagccagtgaatgtttgatggagtagggggtgtgtgtactacccttgatcttattccaaattcagggatgaggcactatgaaaaatgtgggagggtggaataggagcaggatttggaatctcaaagtcttgggatgggaaatctcatgttcaattcttactagcagtatgaccttgaagcaagcccctgtgg

SEQ ID NO: 420171 - DNA, 134 bp, Homo Sapiens
  misc_feature (104)..(104): n is a, c, g, or t
gatggaccaagatcagtgtgcacaatcctggctgtctccagaggcaaccctcgcatgtcatagcaatggaacatgaagaggtggagatcttttggagtgatcangagaaaggattaaaacattttaaaataagt

SEQ ID NO: 420172 - DNA, 412 bp, Homo Sapiens
tccacagggatatgtgaccttatagcatcttcctgacagcccaggtaaggtaagcattattatagaaaaggaagctgagttataggaaatttaagcaatttgtccatggcccacagctgttacatggtggctgagctaccaaatacctgattccagggcccaaactctccctgcccctcattttgctttctcattctcttcctctccccatttctgttctcttaggcctgtgaatgggcattccttcctcctcaaagcttagctgggctcttacaccaaggttgctagccctggacctgataggagtgaggtggtctaagagctagagaaggacattttgatagtttatgacttcagaaaagtccctgagtgacccttggacgtgttctaccccacgtcagcagtatttcct

SEQ ID NO: 420173 - DNA, 388 bp, Homo Sapiens
agacacgggtatggggttgggaaatgttggtgtcttacatgtacaaactctatgtcaaactggatgttgagttgaagagaacaatattgttaatgtggctgaagagacaaagataacaattgaacgaaagaaattatagtgcaagtacttaagaaagtttagtcaatctgggaaaaggggaagagggagaagagtgggctatccctgccacacccttttttttaccccttccttactgaccacacatatggagctgaaaaggaaagaatgtgggtttgaactgaaaaggttgcacaggattgacgaattgaagttcattgtgggggcaggataaagctacaaatgtgattcaaactgcagccccaagaagcacctctctccatcaggg

SEQ ID NO: 420174 - DNA, 503 bp, Homo Sapiens
tacttttcacagggactctgggtgaaagggctttcttggcatgaaggaggataggataggatgtgatgtggtgtggtctgaccttctctggaaggagacccggggctgcagtggactcccgtagtagacttctctgaacctcagtttagcatctttgagaccatctctgcccatcctacttcatggggctgcagatagacttgaaaagatttaggaacattgtagagcactgttatgatgaataaactcattcattcttcaaacatctactgggcagtcgccaggcaccatccaaggccccgtgaatttagaattgaatctggccaggcttctgaaccatcttccaaacttgtgagctcccaaaagatgaaggacgccacacaagcacgaggtctctttattaagtgacctcctgcccacccaaaactgaatactggtcactgcccacccttgtgccatgctttttgttactaactctcgaccctctgtcagcttaggctgcc

SEQ ID NO: 420175 - DNA, 207 bp, Homo Sapiens
agaaggctgtaaacacgtttactgccttcgtcttctacttacctttttgcatcaagggtctcaatgtcgagtcaagtattaactgaaactgttattaataaactttattattcagatttttaccttttactacaaaaactgcacactatctgatactgcttggataactacagtctaacactgaaacacagctccttttaaaaatat

SEQ ID NO: 420176 - DNA, 464 bp, Homo Sapiens
ataattacagagcccatttcttcaggctgctgtgaggattaagaaggttggtatgcggaggtgcttagagctctgtctggcccataataagtcctgaacagcctccactgacattgtctggaagataaggaggcatcacatggcagatggggagatggaggaaagggtgttctcggcaccccgaagggctcacagggagatggaggaaagggtgttctcggcacccggaagggctcacagggagatgggggaaagggtattctcggcacctggaagggctcacagggagatgtgggaaagggtgctcttggcaccccaaagggctcacaggtgtgaaacaccatggggatgaggcagcttgggatggctaggaggagatgctcccagagacaggaggaaggccaggcctggggaactgtggagggtggcaggagtccttccctcaggagcctcttccctgggcc

SEQ ID NO: 420177 - DNA, 432 bp, Homo Sapiens
ttgttcctgcatcgcgacacccagtaatgtgccatgtgccatggtgtcggttgagaaagacatgcggcgccatagcatcaagacagcctagtggctgcaggttaaaaagaccagaagcgtgcccataatccatgcaggcaacagcagttgtaaccattccatcatgacttaagcttccggttcagggtgaatgtgtgggcgagcgtcatgctgacaaggcgttgcactatcaccatgtgcgcagtgatcatgatgatgttgatagaacacgcggttagtacccaaaaatggcttgatactcagggtgttgttgcacactttcaggcccgccactacaacaaatgtgtatatgcaaacacaccacacgatgagttccttgcatgacccactgtatatcatgtgaaagcatgagcacagcagaaccatatgtgg

SEQ ID NO: 420178 - DNA, 461 bp, Homo Sapiens
tactaaactcagcttattcctttctcataagcaaatttgaaaaaagtccagtttaaaaatttaatgtagattagaagtttattgtgctcaattcattggtgccattaaagtgtttttgcccttaccagaggagacgaaggctggctttctgcttttttatatctacgcttacgttggcagaggtgaaggaaggaaggaggtagcactctctgctgaacctcagactacactattggggcaatggcctccggggccccaggtacacctgacatcacaagagggtccctcccagtgctgagcaagagctgtcatcttgggaacagagcaaagcggctgttggagagccctgctgagacagcaggatcatcggggaggtctcgagggagactgaggaaaaatatacatgttttaatgggaccttgtcaaggtttctttagaaaacaaagctgtttttgttttcc

SEQ ID NO: 420179 - DNA, 225 bp, Homo Sapiens
tacttacacaggggatgcaaaggaaaatggttctggcagcaatttgtgtcaggcaagctaatctatagctttgtgcctcatttccccacatgaaaaaagggggtcaggagatgttaaaagagtgacaaataatgaaccgtcctaaagcttactgaaaacagcctttatacagccagtagcagttaccacccagcactgtattggaacacaggggaatggtgcaca

SEQ ID NO: 420180 - DNA, 193 bp, Homo Sapiens
ctaccaggagggaagggtcttgaatgtgggacatctgagtaggaaggtgtaaataatctctattagagagagctttataccttggtcttagcttttccttatctgcctccatattctgttttagtccagattttcttatctctatcctgtacaggcattacattatagagtgatatattaatgtggtagattg

SEQ ID NO: 420181 - DNA, 475 bp, Homo Sapiens
tacttcacagggcaaaaggaacacagcacaatagacactcggatattcttacaggaattcagaaagaagagaaacaactaatatagcagtcctttattttgcaacaaaatagtcacatttttttaaatggctgttttaattctttcaaccactggtttgtacctgcttcaagaaatgcacagatcaccttttccatttatgtaccactatcttccacctcttcccaaacaagttccaagacagtctgcatgtcacctctctagtacagtcccttcctcatggctcccaatctcacattctcagcaaggcctggccctgcaggaaaaccaaaggaagagacagacccaactagagggggtgcaggactcagcctctgcgggctttcacagggttcaaggagctgtgatggaaggcagcctcatcccactgtgacgctcccagtatcagctggagagatggccaccaagcccctgtg

SEQ ID NO: 420182 - DNA, 181 bp, Homo Sapiens
ggtcgtattctccggctcagacgcaacctggctttcgaccgtgatggttgggaaatggatagtaaaacagctgcctggcctttcacactttccaccgcgatgcgtccgcccatgagttcgaccaggcgttttgagatcgtaagaccaagtcccgttccaccataattgcgaatcgtaaggt

SEQ ID NO: 420183 - DNA, 204 bp, Homo Sapiens
ctacttccaggtatcacctgcgtggtttgtacgggccaagtacatgtcagtcgttcataatgtgtatagcttcaatcttagcaagactgtgaggcctctagatctgttgctccaaccttgagcctgaaatatactatactatattacgcacctcaagatcggtatcaagggcatgtctggagtctgttgtacataccacagaag

SEQ ID NO: 420184 - DNA, 119 bp, Homo Sapiens
cacaggatgttcaggattatgggggaagtaaggagctggaagccaccacccgtttctcatgtcttgagggcccaggcagccacctccttttccctcctataacatgtaatatacctgtt

SEQ ID NO: 420185 - DNA, 207 bp, Homo Sapiens
  misc_feature (110)..(110): n is a, c, g, or t
taccaggtaggctgaaagtcaggaactgggatctgaagtcaaaggacatggagaagaagtatctgatgccaggatctctatcagtctggctgaggttgctgatctctatnggtcctacgtgacacaattaccaatcacattattccgttacagatggcagctttggcattcacagggtaggaaaaggcctttgttattcagggctac

SEQ ID NO: 420186 - DNA, 518 bp, Homo Sapiens
catcaagggctcaagacctatccccaggggttcccctttgagccccttgaatgccaaagccccaatatccctgtgaacagctggaggccacagcccagctgagctgtgacagacactgctctttgcctgccagcatccgttcttctcatctgcctcactaacaagaatctggattttgtccagggacagcagtgcgcccaacgctttccagattaccacccacctagtggtcacgtgacctgcctctggccaataggctgcaagcggaggtcgaccacaattgctgagttttgctttcccgatgcaggtgcgttgcttgtccctgcctggactgaggctggaggtgaaggactatcacagtatcctgggatcctgagctgccctcagaataacacagcagaaaaagaacaaggagcctgggctccccaaagccacaatggccctagacttccaggggttcctgctactcttagtgtgaggcaatcccagctcatacactggtctcccagggctaagaa

SEQ ID NO: 420187 - DNA, 317 bp, Homo Sapiens
gtgactactacatgactggcaattttcattttttttaatagataccacaaatttcctccaggacctgaatgtatctatgtcaattctgtaactaggtgtactagttatggaatacagaagatcattaagccaccatagtcttctcaaaccctgaagaaatgatcaaaactcagatgtttcctcagaacccaagtttattctgctaacaagtaaacctcagaaatgggcctagaattttatctctgatcacagttatgtctactacagactatagaatccatgatttaaagacatattcttccaggcataaaagcaga

SEQ ID NO: 420188 - DNA, 207 bp, Homo Sapiens
gaagcgctgcgtcaaccctggagactcagttgaattatttttttaaagtcccatgtgggttaggattggagttggaactagtaagatggtttgaaggattaggcagcactgcccagcgccttctcatgcatgatgtctgtgcatcccttgcatatttgctcccttctcctctgtagacacattggcattgttcacacctagaattcc

SEQ ID NO: 420189 - DNA, 155 bp, Homo Sapiens
ctgtctatacataagtatccacaactttcctcaggaaaaactgagtatttctccagaaagtatttgtcctgcataattgttttttaagtacaaagcaaaacaagccttttgcttccttgaataaggaattattgcctacatactgcttccggtcg

SEQ ID NO: 420190 - DNA, 316 bp, Homo Sapiens
aaggcactgtcagcagggtaccaatgctcagaaaatgtctatgtcatgtaaaagagcgggtgaattccaggagatctgtctgcagtggggaggattcctctgaccacatggaactgcatgtctggatggaggcctcaagattagagtgtgggtgctgtcaggttcacaccatggacaagtgcagcacaggccaggtgccaagcagtaagacccagtgggtttttgtgtcagccccaagaactcaaactttgtcaagaagaggcagcacttgtcagctctaggcaatgactgtcacatgcgaatataggcccagtgt

SEQ ID NO: 420191 - DNA, 109 bp, Homo Sapiens
aacctcctaccttggcatctttaagtttaactatttagaacttaatattgagtggctttgtgtttaattgggtgaggaggataagagggaggctaaaggttgcttccgg

SEQ ID NO: 420192 - DNA, 618 bp, Homo Sapiens
ttcgatatgctaatggagtaatcatggcaggaataataaatgacttttctcttcactgttcccatagtcattcgccctgtgtggctggctacctgtccttacaaggctgcttctgttgtgggcataatgccacagttggtgaagccactatgggatctgtggcctctaacacaagcactgtgggttatttacaaatgtgccctcctaatttctggttgtgggacttttgggagcaaattatccagtccatgaatccacaggccttaaagtgctagcacttcggatgccgtcagtgccaagatggcttagtttctgggactaacctgcttagttcaccttttaggtgctctcttagcagctggcttctctcaaataaagtgaagcaaattcaaacgcattccttctctgtgatgaattcagccagtgtgttttatgctgctttctttcctcttgagggaaatcagatagtgggcagtgccagtctctccctcttgtggaaaacaagcccctagttggcctggcagtaattgtgcctgggcagacaaaggctgtcacagtgactgtcctgttcttagacttctgggtgctctagagccatcagtggagcttataaagact

SEQ ID NO: 420193 - DNA, 232 bp, Homo Sapiens
cctcagctgctattagagttattgatagtggagagagaaggttaaaattaaatcatcctgcagtttggtaataatttgatagagtagagacccagacttaccatcaataataagatttgggcatattttctgaagtttaattatctgacccttatgcgcctgggtaaatgaaatttagctgttctgtgaaaggggggccaaagctcattcacatttattttatgcctactag

SEQ ID NO: 420194 - DNA, 479 bp, Homo Sapiens
  misc_feature (326)..(359): n is a, c, g, or t
aaacaggtcatcagtataatgtacttgtatggttttgagtgaaatagcattgtcttgacttctaatgtgattgtgctgtcttccaagagattgtttgtaatgatttcatttctttgcctttgctgaggagtgttttactgctgattatgtgatcagttttcaaatatatgccatgcggccataagaagaatgtacattctgtttcttggggatggagagttaggtagatgtctatcaggtccatttgatccagtgctgagtttgggtcctgaatatctgtgttaattttctgtcttgattatctgtctaatattgccagtgggtgnnnnnnnnnnnnnnnnnnnnnnnnnnnnnnnnnntgtctctttgaaggtctctaagaacttgctttataaatctggatgctcttgtgtcacgtgcatttatatttaggatagttagatcttcttgttgaattgaacccccaccattatctaatt

SEQ ID NO: 420195 - DNA, 177 bp, Homo Sapiens
cccgtcgacggaagcaaacaagacaaagtatgaagccgtagagaaaagaaatttattctagcagatctgccaaagaacagaaaccattctaataatttcatagatctatcaaaagacaaaacaggaatgtaacctctcctataagtgaatccaccaaaccatatggagattgaagac

SEQ ID NO: 420196 - DNA, 474 bp, Homo Sapiens
  misc_feature (321)..(424): n is a, c, g, or t
gttcgacggaagcatataatataatattatagtattctgtgcaggtgtccagaatcaatagcacaaaggggcattgtgtgctgaagactctcatccagatggtcggctagctggcgcctcctagctggatttatcaagggtattcctttccaaacacggtggcctttctagaatctgctgtgaacagcaggacctgcagagacaccccagggaaaggcttatggtaatcactgagggactgctggcaaccagaggcctcctcatcccctttggttgtttgcatgtgatttgatgccggagtcgccactcatcccccagggnnnnnnnnnnnnnnnnnnnnnnnnnnnnnnnnnnnnnnnnnnnnnnnnnnnnnnnnnnnnnnnnnnnnnnnnnnnnnnnnnnnnnnnnnnnnnnnnnnnnnnnnagcatgcatggtcagactgaccttgggacaaatttgggtgttttatttca

SEQ ID NO: 420197 - DNA, 115 bp, Homo Sapiens
gagcatacacatagactctataaggtcttattcaacatgatatgcttgtcaatctactgctacatgagtgacgatgtattgatgtgtgacatcatctgcaggctgtgaaggtcac

SEQ ID NO: 420198 - DNA, 225 bp, Homo Sapiens
ttatgacggaagcattcaaaaatctgtggcggtaaaatttgtcctcgtttttataagctataccctgtaaatgaattgtagaaaaccagatagtgaaatcatctgactgggtgaaataaagcccaaccaatcaggataatgaatctgctttcttcactaggatataaagaaattagaatttggtataaactcctatgaaagggcatatgatggacccaaacaaac

SEQ ID NO: 420199 - DNA, 278 bp, Homo Sapiens
  misc_feature (171)..(181): n is a, c, g, or t
cggaagcatgtaactactgaggcatgggctcaggcaggatagaatatttacatttcagtccccctttgccttattttattttggattgggaatgagaactcattggccaatcggcagtatagtatagaggaaaggagggtgaccattatcagaatcagaatgtggtagcannnnnnnnnnnggccttggaaagctttttaaaattctattgagcctcagaattcattatagtaaggctaaatgggaattttaattaatatcttacctgcaaggagtta

SEQ ID NO: 420200 - DNA, 124 bp, Homo Sapiens
cgacggagcttctttagaagatgaggtgtagcactctgtatactgaggccgttgtaatagtcattgtcagaggtgccagcagatgaaaataccagtcactataagagatttctgaagaagtcag

SEQ ID NO: 420201 - DNA, 104 bp, Homo Sapiens
cggcagaaactgtgaagagggtacagaggggagtatacttctaacttgaatacattcttatcagcatatctacttatagatcaaaaggtaattatcacacagga

SEQ ID NO: 420202 - DNA, 430 bp, Homo Sapiens
  misc_feature (68)..(356): n is a, c, g, or t
ccgacgtaagcagagtctgtagagcaggtcccaccccggcacagactgatacttagctgtgggaacannnnnnnnnnnnnnnnnnnnnnnnnnnnnnnnnnnnnnnnnnnnnnnnnnnnnnnnnnnnnnnnnnnnnnnnnnnnnnnnnnnnnnnnnnnnnnnnnnnnnnnnnnnnnnnnnnnnnnnnnnnnnnnnnnnnnnnnnnnnnnnnnnnnnnnnnnnnnnnnnnnnnnnnnnnnnnnnnnnnnnnnnnnnnnnnnnnnnnnnnnnnnnnnnnnnnnnnnnnnnnnnnnnnnnnnnnnnnnnnnnnnnnnnnnnnnnnnnnnnnnnnnnnnnnnnnnnnnnnnnnnnnnnnngctgtagagcaggctaacctcaagaagagctgtgacttccttcaaagcacacagtgggccttaagccctcccag

SEQ ID NO: 420203 - DNA, 134 bp, Homo Sapiens
ccttatttaggaaggatggatatatgcaagtatctcacacataataggctcataatatttgatattatacataaagacataacaatgggtcaaaaacttgcaaacagtaacctctaaagagctaaaaaccaatg

SEQ ID NO: 420204 - DNA, 477 bp, Homo Sapiens
tgagtatcacataatggggaacacatggtttctggatttagaagatctgagtttgagtgtttttgatcaacattcccaaagtgtgaccactgccacgatcctttcccttcttatctccaattatctctgctataaagcacacctcctgctccacagatcatgcactgactattctcatgacaggaggaaggcagaaagctggatgtcacaactcaatcccaataaatctactatcactgaacatagagacagagtaatagttagacaccctctagtccagtttcctcaaataacgaaaacaacaattaaggaccagtaacatgaactcaactgcccataatcctaggcagatcccaggttttcagattcctagtccatctgttcatgagaacatgttatattctttactcttccataatccactcttctgagttttacccaagattggccctcaaaggcaagagctgataaatcagg

SEQ ID NO: 420205 - DNA, 169 bp, Homo Sapiens
ctgaagctgagatcacgagtcacacgtgcgcctcctgagggagttacaggatcagcaggatctttgcacacttcaggctgcgtgttgtggaatccaggctctcagcaagttctcctagctctgccttcaaaatactcgcctgtctacccatgactcccacctccaccac

SEQ ID NO: 420206 - DNA, 225 bp, Homo Sapiens
cgaagttagacggcaaaagagtgactgtgccccacctggctctgagcacccggcagtgttatatggtccctccggctgcctccattctgagccgagggcagatggtaaaagtaaagggctaccacacagagtgaagtctatggggtaaaaaagtatgtatttaattctagaaataaataacaagacacctagggcttttttcaccgtagaattctatcattagtc

SEQ ID NO: 420207 - DNA, 445 bp, Homo Sapiens
aggatccgtcgacggagcactcactctgcctcctgtgtcagcataatctccttggattgctctgttacatagtcacttccttgggggagcttccctgatctctcatgctaagtttaaacctctaaatattcaataccagatatcttcgtagcacgtatcacatttcttatttaataattatttttaatgatttgtgtaatgtctgattagattcttaagctctgtaaggtcacaagggtcatatgtcactgtgtcctcagtgccacagtgcttggtgcatactaggaacttagtgaatatcagttgaagaaagaaaaaacattgtgtcatgaagaatacttattaatatggatttttaaagaagaggattcttgattttgtaaaactcctttctggcatgttctaggatttcagaggtggagttaaagtagtttctattcatatt

SEQ ID NO: 420208 - DNA, 133 bp, Homo Sapiens
gttcgagcggaagcagtttaggcagaagaggggtgaagtcttggcgtttttctgcaatatctggtagtccattcctgctagtggttagaacaatgaacactaattattatttgtttgggccagttttacgtta

SEQ ID NO: 420209 - DNA, 183 bp, Homo Sapiens
ctggtatctagagatccgtcgacgacagctcagcattgtttgggcactcgcagctgcatttcagtgctaacgacacagtgggacgttgtcttttgctcaccttaactgagcagtggacgcagtgcctgctaggactgtgtctgagactcatacatacctcagatggaagctaaaaacgagacg

SEQ ID NO: 420210 - DNA, 503 bp, Homo Sapiens
  misc_feature (209)..(209): n is a, c, g, or t
gttcgacggaagcaagcaattgactcattacggccctggatttaaggaatttcttataaatacctgggcctgtttcacttacagttcagcccaattaaaagctgatgcagttgtcagggtcaggccagctacagaaaagtgagagtgtgttccatcactccattcttatagctttgaccaatatgccccttgattaacctttttatatntttactggctcctggcctgttgccaatagcctaaccttcaggtctgctgttagaagactaacagatttaaaacaacttttctttgggactgcaaattgtgaaaacaaattatagttgccagtcagacagtctggcttactcaaacctgtacctcccagattgccatcatttctacctggattcgttattgtatcagatatggtaataaatccactataatagtctgggcaatcattgtgtcctggtttttgggaatagggacttcaatcagtgtcccacccctgcttccggtcg

SEQ ID NO: 420211 - DNA, 116 bp, Homo Sapiens
gaggatccccatgaggtactgatggggcgaagcgtaaattagaggtggcaaaagaaagtgactctccactcagtttgcttctgcaagagaacaggtacagcccagaaaaggcagct

SEQ ID NO: 420212 - DNA, 258 bp, Homo Sapiens
aggatctcgttcgacggaggcacataaatcataaagatagtgattcttgtaggaatagcctttacttagcatctgacttccttttctgccttgcacctctcatcctactgctgtctggtttcagtccccatcccactattgaaaatgctctctctgttgactttctatttgtcgaatgaatatttctcatttcttccagaatctttcctcccgtggcttccgggacgctcatatcttctagaggtcttcctggttctc

SEQ ID NO: 420213 - DNA, 209 bp, Homo Sapiens
cagggtatatcccacgggatggcttctgtgggtcttcactcgccagcaggattcaaggggtcagcggaggagggcacacaacaagaggcagtgtatctgccacatgacaccaaggcctctcagtgcccggaacccacgtgaccctacgagaaacctccctccagcactcagccctgtgcgcactggggcctcctgtgcttccggtcgac

SEQ ID NO: 420214 - DNA, 202 bp, Homo Sapiens
  misc_feature (85)..(85): n is a, c, g, or t
tggtgacttacaagacagctggctgcctatgttatggcatttggaatcacgcggagcacatcatttgtcacagtgtgttccgaanataatgaggctgtctcccaactggcccatataatcaacgcagcccagccccacatagctactccaatgaataatgctttgtttgccaaatgcaatgggaacctaccacaggccaggg

SEQ ID NO: 420215 - DNA, 167 bp, Homo Sapiens
tatgttcaaatgaaagtagacctctcccactccaacgttgcgatttttatagaacaggtacagcccagaaaaggcagctgagttgccgcatctgtcagacgctgaggcctggaagactccacggagagcaatgggtgctctgacttctcactctcaatacgaaaata

SEQ ID NO: 420216 - DNA, 119 bp, Homo Sapiens
tccctactacagagcaagaaatagtttttttctaaccacaaatcagtttgttgtctatgtcaactgtcagattgttagaggtatgcttattatccgtatagaaaactactaatttggct

SEQ ID NO: 420217 - DNA, 218 bp, Homo Sapiens
tgtaaaaatctcacaaaaaaaggagattgcttcattttcttcttctctatggtctgccctccgtgctaatgagaaacccccagctccagaactaatatcctcactctccactcatgaatcataacggactcagtgaggctcccactctcatcctgtatccagtgtggtattgctatctgccctctgcgagacttgagtcaattcccactttctgcctt

SEQ ID NO: 420218 - DNA, 287 bp, Homo Sapiens
tggtggtaagggagctcggagtaaacactgttcaatatttagtctgatgtccatctgaatgtctgtgtctttgtttcaggagtctcttgagttccatttctccagagaccataccacctacctccggtgggggaagggttgtcagcaggtaaagacggaacgtcgagttataactgactctaacacagacttcaaataatccctgttttcagcctctctccttacctgtgccatcttggtgtttccagtgtctgaatatttccagagtttaacatggtgacttagct

SEQ ID NO: 420219 - DNA, 335 bp, Homo Sapiens
gttcgagcggaagcattataacttattaaatgatattacagacactgccgtgccctaatctgtaattgaaaataatttccaaatcacacaaagaatggcctcctgtgaattttcacaccttcaaattcagatccagttttaagacatttaatgattacattataaagccaattcatccagccagaaaagctgcctctctccattcttagaaccggagcagatacattagagacaaagcagagccctcacgaaagaagaacaagggtgatgactcacaaagctctatttgggagtctgaatttggggagaatcttgctgctgtagactgatgtatc

SEQ ID NO: 420220 - DNA, 708 bp, Homo Sapiens
  misc_feature (495)..(495): n is a, c, g, or t
tagaggatccgtccgacggaagcactgtgttaccatttctcaaggtaatatagctttcttaagcactggtttattttctctgtccctcgtgtaggaagagattcaatgctatctgaaagaatgtttttgaagcacttggcacagagtcgtcatcccagaggggatgttgaacaaatgctaacgcatcattacacaatacctctatgcctaaagtgccctgaacagtaccctccatgagtaactttaatgcgcagtggttgagttgagctgccatctaacatctgcccagcatcctttcactgcgtctgtgttctcttcatgttatcacatgcacttcaaaaaattacttactgacaccttcatcaggaacttccaggtgcaaactataggtagatctcagtacatagcgagtgctaagtaacttttctgaataaatgttacatacaggctgtgcctacttcttctgtccactgaacacgccacgtccctcccaanctccactatctctggaaaagcctccacaaaggaagttcccaccctctgtgcctccactgaacactggaacaaaacagtttccttaggtaagtccacggtatttgcatgcaagcatcattatggttatttaggtaacaaacaaaagatagagggaaagatgtccaactggctggtcctacctttaggaaatagagttcctggagccacattctt

SEQ ID NO: 420221 - DNA, 442 bp, Homo Sapiens
gccggaagcaccgtggcaggttgtactgtcgctggcccttgattgctggaaggattccgaggtgcagttttcgaagcgggagtttagttcgtattggttgcttagcgtgtgttactgtcgctaacgggaggtactcaacgtgtatgcattgggccgtttgcatcagttgggaccgttgttactgacctcctaggttgtgtgttgcgtttacacgctaaaaatccgggtttcacggtctcttagtactcgcatatttaagctcatcgcgcgtaccttacttctacgcgttcacggtcggttcgtccgggcctataaagcgccgctgattttaaattggccgtgtgcgctttacggtttggacctttacgtcggatcacctggggtccatcagcgccgtaagtttttgagctggccgggcgttctttcgagcgcttagatgctt

SEQ ID NO: 420222 - DNA, 242 bp, Homo Sapiens
  misc_feature (151)..(151): n is a, c, g, or t
  misc_feature (182)..(183): n is a, c, g, or t
ttatcgaatgcttctctgcgttcagtgaccagttgtatttagtcaccactaaccagccttgtacgttcttctcctccatgagagggggtgtgaaatcgtgaatcaaaaaaccaaaatggaagagacggggaaactcctttaaacgtgtaangacgtacatactttaatgtgctggtgtctannccagacgaagttactatattagctctctactcccagtggccgtgaatatacacgtgaaa

SEQ ID NO: 420223 - DNA, 232 bp, Homo Sapiens
tcttgccatctaattgaaagtataatgggtttcaggtttttaggagtctaaagaattacgctttccatagagaataagaggaagaatgttctacatagtggggagagaggatgagggttggcagtgtggttaaagagcaaaaacagcaagaaagagtcagagacctgaggatgtctctgtccgctgtgtacttgattctgagccagaaggtgacttgatattcgaacgtgga

SEQ ID NO: 420224 - DNA, 434 bp, Homo Sapiens
cttcaattagataacataccatatgacaaatcctagataatgaaaatctattttgccaaagtattgctgctagtacatgctattttggcgactgctgacttactaggtacctcagtagtggtatgctggtaatctgcctctagaaatggtggaagcaccccaacatttctccacaatagttaacattacttattatggttgctatgaattcctgctctatattgttatatcacggaaaaacttaaaatgctatgggtgggtgcatttttctagcatttcagaaaatgcaccttttaaaaaatatatttttctcaccatttattcttaacataccattgttccatatctgcctgctctataagcacaaattaaacaaggttgatccactctccttaaggaaaagaaagcatagggtaatagtgtctaccaggaat

SEQ ID NO: 420225 - DNA, 235 bp, Homo Sapiens
tcataccaaattcagaaaatctttggctgacagtctggtatcaagctcttctgtaagtatcctattatggtcggtaagtgtaaaaattgatattttcacatagatttcaactataattctgtagagctaaccatagatgcctaatgccaatgaataaacaatattactactttacttggaatattactggttagaaacaacgatttaattctaattgtagattattcaataatat

SEQ ID NO: 420226 - DNA, 137 bp, Homo Sapiens
tccacgctgcgaatatttcagagtgaaaaaatgaagtaaacaactgaaacataactttcaattgactactgtaacattaattaaataaagactagtatcatatctaaaaaattaagttggtcggtgcttgccaacag

SEQ ID NO: 420227 - DNA, 140 bp, Homo Sapiens
gtcacacaaactacttttttgaactagagtgtgttggaggcagagaaaaatcaccctgtgtgctggctttgcctgccgtgagccagtgaggagtccgagaagaggtgggcaggtcagtgatgggtttggccagagatgcc

SEQ ID NO: 420228 - DNA, 182 bp, Homo Sapiens
  misc_feature (47)..(67): n is a, c, g, or t
tataagtatatctttcccacaagtaacagatggaaaatctttaaatnnnnnnnnnnnnnnnnnnnnnaactagagggagtagaaggagaacagactgactatgtcaaagaaaagcaactatgggtacatactaggaaaaaaacgagctggtagaggactgccctttcatatacgcacgtgga

SEQ ID NO: 420229 - DNA, 115 bp, Homo Sapiens
aatgacatgttataggcaatcccaacaagtttaacttattgtagaactgtaattgaacagcccgtatataacgatgtttccacagggcacattcatagttattcttagttgtctt

SEQ ID NO: 420230 - DNA, 126 bp, Homo Sapiens
cgatatatatggtacgttgtgatatgacttctcagttacccaaatcagcctacaagacatggcatgtgtgtgggaggaaagaagattgagtgggcggagcctgtaggtaccaattctttctgacat

SEQ ID NO: 420231 - DNA, 128 bp, Homo Sapiens
atatggtacgtgtgaatatgacttctcaattaccccaaatcagcctacaaagacatggcatgtgtgtgggaggaaagaagattgagtgggcggagcgtcgtaggtaccaatcctttctgacataaaaa

SEQ ID NO: 420232 - DNA, 187 bp, Homo Sapiens
gatatacaaagaggcattaagaataataaagcatgtcttggatacccaccaaacagctggagaaattaaacatttatacagttgaaactccttgtcatccttccccacttgcatccctctttttctgcaactcctgaagggaaacactgtcttgaaattggggtttataattacccttcatgtcttt

SEQ ID NO: 420233 - DNA, 162 bp, Homo Sapiens
cctcacgtgcgactattataatagagaaaacaaagtacagagttgaaatacttgctctgaggtcacacagctagtggtgaagctagaagacagtccatatctgcttgcctatgagcccttaactctaaacaaacacatctacctttttgggcttattttcac

SEQ ID NO: 420234 - DNA, 166 bp, Homo Sapiens
agaggatccctcacgtgcgaatattcttaaataaaatatgcatttaatgtacctaatccaccaaacatcatagcttagcctagcctaccttaaatgagcttggaacacttacaatagcctacaactgggcagaatcattaaacacaaagtcattttacaatgaagt

SEQ ID NO: 420235 - DNA, 133 bp, Homo Sapiens
  misc_feature (37)..(37): n is a, c, g, or t
  misc_feature (57)..(57): n is a, c, g, or t
ggaatatatctacttttctcaaagtcaacttgttganatgttaattaatcccatctnaaaaaaataccttcacagtacccatctatacgtgatgttttggcccaaacttgcttgggtgtcatattcctagcca

SEQ ID NO: 420236 - DNA, 205 bp, Homo Sapiens
aggacttttacacgtgcgaatatgcctgtacgtacctggtaccatggggagcagtagatacaacagtggacagaggagatgtggccccgcccctcatggagttgatcggccttgtccaaactacataaacaggtcactgtaaaactttaattttacttttaaaccagaggcataggctgcacgtgtacagtgtgcgaactaagtt

SEQ ID NO: 420237 - DNA, 334 bp, Homo Sapiens
agataagatcacagaatctgtctggatttaactttcacaaacagactagggaagaatggctttcattctttctaatcaaaacacctgaatgaagtttaaagtgttttacagtgttgagtcagttacattgaaaacaaatgggttctcagaaccagaagctatattccctcggtacttatattctttggagaactgtttttgacaaaaacttagcaaaccatgaaagttgtacccagggcccttgtttggggaattcttaaacttaaaaaacagtgacatacaatctcacaagctattcgcacgatggggtaccgacgctcgaaattccgtaatc

SEQ ID NO: 420238 - DNA, 220 bp, Homo Sapiens
tgaggatcctgcagtgcgaatatgtggatcttaaactagccaacatgaactcattctgattgaccagcacacaaaaggcttttcatcacagtccaaaatacccccacagacgattccggatgtgaagtagccagatgttgaggtcctgggctgccgtggttacacgtggtttgcgactgcgaggttggtcagatctactgcccaattctctaaatcgaca

SEQ ID NO: 420239 - DNA, 158 bp, Homo Sapiens
tggaaaaaaacatatgttcaattaacatatgaagagctgctcagttttcatagtgatcagtgtatatgcaaaacatgatcagaatgtgatactattttacattcttctcgagtggcataaataaggaagcctaaaaaaatagtaaggggtgaagaaga

SEQ ID NO: 420240 - DNA, 451 bp, Homo Sapiens
gggtcgtctagaggaccctccacgtgcgatatatttaagagccctttaatagaaaagagtaagcaatttctggaggagttctgggaagggaggaggttaggtgataaattcagtttctcaacctgttggatagatagtaatataattaatttaagtggcagtgagatttaggaagaagttaataggttcatttgggatgtgttgaatttaggttgtccacagacattgtaacaattacattaataattgatataaaaatggtttacatactaataagtcattatatcaatggtaactatatttctctcctagtttttcttagtagttacaaaatgtattatggttagatttttaccccaattttagtaagtaactagagttgtagtatcatatattggaattctctaaacatggatgtctcaaagtatgtgtacaccagggaaaagacatg

SEQ ID NO: 420241 - DNA, 255 bp, Homo Sapiens
  misc_feature (124)..(124): n is a, c, g, or t
  misc_feature (131)..(131): n is a, c, g, or t
  misc_feature (150)..(150): n is a, c, g, or t
ttaagattggtgagaaaaacactacccaggggaaagaaggttcggacaaacaaaagagctgcagtgtgtaagtgggaggaaactgtttctcttgaaagtcagaagcttataattcaccaagatngaggctnctagaaaagtaataactgnattaacacagaagggaaaaacagtgagagaacccatttgcgaagaataaaaatacaaaacaaagtatgctgtttacaagcaatccttgctttcattattttagca

SEQ ID NO: 420242 - DNA, 163 bp, Homo Sapiens
tgacttagaggatccgtcacgtgcgaatataacttagtttgccactgtacatgtgcaggctatgctctgatttacaagtaaaattcaagtttacagtgacctgttatgtcagtatggacaaggcagatcaactccatgaggcggggcaacatctcatctgtcc

SEQ ID NO: 420243 - DNA, 119 bp, Homo Sapiens
acagggcagaggggcaatgcaggtatgactataaaagggcaacccgctgcatgggtgtggttatggacgtgttctgtgacagctacatgaacctacacatgtgctaacgtaggggtacc

SEQ ID NO: 420244 - DNA, 115 bp, Homo Sapiens
  misc_feature (78)..(78): n is a, c, g, or t
agcatggtaggttcaatatactaactccagaacacatcatttgctcaaaacaactggaggtgttactgtgcccacatntttgaaacgtatccagacagtgtgaagtgtacttggg

SEQ ID NO: 420245 - DNA, 242 bp, Homo Sapiens
gtgcgcctattagatatttctgaagtgcgcaaacattggtatgatactctgtgcacgggtgaaggtaataaatcattctggcttagttagtcaaggagcttttaaacaacacaatgttaggggtatagcttcgagagcctgtggttagcactcagcgtgtcatgcgagaggcacaaaggtagtttctgtcaggccctctgacagcaggggcctgaagagctgccagcatattcgcacgttga

SEQ ID NO: 420246 - DNA, 422 bp, Homo Sapiens
tcatctagaggatccctcacgtgcgaaatgtattggtgttattcagtaaggtcagaatattctgcaacaacccattaatagtttgtattcatttccactctcctaactaccacatgcacttattcatatatgttctctaatgaccaacatcttagaatatttgcaaattacaaataagtatcagatctctaaaactgtcccagtaaaatcattaattttataattcatattaagattctggtaaaacttgatttttaagaagacaaatcttagatgatattctgatgttaatgatcttagttaagcatgcggtattcaagtcaataatttactaatctaagattaaattattcatgtgcacatgatgagattaccaaaaaacaacagtggagtcactacagagctcagaactgagcagacat

SEQ ID NO: 420247 - DNA, 196 bp, Homo Sapiens
tactgagctgtgactgaagcaccatttgtgctaaatatgacagtgcacaaatgatattcctctataaaagttccccttcaataattctttaaactctcaaatgccttggaagtaatatgctggaatattactgagctgtgactgaagcaccatttgtgctaaatatgacagtgcacatatgatattcgcaggtgga

SEQ ID NO: 420248 - DNA, 151 bp, Homo Sapiens
acaatattccatctcttacccagagagagaacggggcgtgatgtgtcatcacagagataccagtctattgatctaagaagacccatcttgaattaaactcttggttgatactaccacctaagggtaaagggatgacagctactccatcctt

SEQ ID NO: 420249 - DNA, 145 bp, Homo Sapiens
ttccacgtgcgactattcaagcaaaagggcaagaatcacattatttatttgctgatttctgaaagagacatagtgaggaagaaagctacactcaactgtctgctacagagattggggggaaagtgatgtcaattcttccttaatt

SEQ ID NO: 420250 - DNA, 195 bp, Homo Sapiens
cctcacgtcatatccatataccatctgagtcagagctaaatacttctcaacacaataaaaatatgtatttttgttaggaaaactatcaatattactataataccaaaaacaacctaaaatgcaagttattaatttaaggcaatatcagtgtgtattctcatgtgctcttttagcatattaattgtcccaacaacc

SEQ ID NO: 420251 - DNA, 292 bp, Homo Sapiens
  misc_feature (205)..(220): n is a, c, g, or t
ctagaggatccctattgtatagttctaagaaggctttatctagaacacagtaataaatgtcaacgtgctatagtaggaagagttgaagataaatggttagatatcactttttatccatatgactttgtgcattagttttttgagcctcagttttactaatattccaaaggattagggaaataagcctaaccagagtgactctgannnnnnnnnnnnnnnngggatatattccgcaggtgtgggggtccccgagcctcaaattgcgaaaccatgtggccaatagcgtgttccc

SEQ ID NO: 420252 - DNA, 246 bp, Homo Sapiens
gattaataggacatgtattgtcatctgtctgtgctgaggacatagaccattcattaaatagtcttggtgataactgtgcatgtacttcttttaatcacttatgattcagatggcactgtaagatgactcgacacaagccattgcctgaaccccagagcttcctctgttgtatggccgttcaagtccaggcattgcaacacaaactcctcaaagattcaccacaacatgacaagcatttcctaactg

SEQ ID NO: 420253 - DNA, 256 bp, Homo Sapiens
caccttgcgaatatatcatatccataacccaccacacctgacctcgtaaaattcttaaacgatctatactcagttgtcttacagttgcctagattcttgtcccatttaaagaaactgaaatttgaaatcacaaatgtggattatggatatgatgggttatgatatgatatattggtaatgaatatgcaagagagaacatttgaaacattaattagtagaaatgtacttaaagaagaggccttggttttttaccgta

SEQ ID NO: 420254 - DNA, 258 bp, Homo Sapiens
aactgcttccaaaaagtcaattgttggaattatttccccaatggagcacagaagaaagtgcagagatgcctcacgctgaagttagcatgtgagaagatacaacaaaaggacaggttcagtcccaaacacttactgtctatgtctaccaggtacctacatttaacacaaggaataaaaatcacacatggtgagagataagaagtcactccacaggtgaccacaggtggcttacaaaagaatgccatggcccagaccatc

SEQ ID NO: 420255 - DNA, 293 bp, Homo Sapiens
gatccaggatttggcatacaccgcgcgtcgactggttgaccttttagaatattaggggaagagaaaaaatggagcatttattgcagtcatgtggaaactctgcttcaatatgatatgcaactcattacatttaaaattccatttgggtaactttcacactgtggcatttcttgagccctctctcacatgtcaaagagatgcatatagatgggaaactatttattcaggcaacctcaaatggtactataaatatagttgtaaaatgtcaagttatttgcacgctggttattccg

SEQ ID NO: 420256 - DNA, 410 bp, Homo Sapiens
  misc_feature (19)..(19): n is a, c, g, or t
acagtgtattagtccactncagctgtacgtctctcctcatgagagggtgtgaatcgtgatcaaaaacaaatggaggacgggaactctttaactgtaagacgtacatctttagtgctgtgttaccagacgaagtacttattagctcctactccagtggtctgaaatcactgaaacagctcacagtccagggcaagccacaccgcctcggtgtatggatagcatttctccatttctctacatgctgaactttggtttttgagtcacataaacatatctggcctttaaatcactcatcctgtgattaaactagaaaaatgacttaaacttattaggtatctaaagaaaaaacttagggttaggttaggtttctaaagaaatgaatgctcagtcacgctatgcagatctcagag

SEQ ID NO: 420257 - DNA, 127 bp, Homo Sapiens
ttcaccatcaaatagtcatggctttgcacagcaaggctgtgggatccagcatgctgccaggcaatgctcaggatgtggattgggttgcatgccgcattgtcaactcattcatgcagtccgtcagttg

SEQ ID NO: 420258 - DNA, 241 bp, Homo Sapiens
ctattaagctcatggatgaagatcttccgtcaatgcaggccaacagcacttctcccaggggtcccaaccatgtgcaagcctacagaaataacgtataagccctccgaaccatgtaggaatcatggtctaaacagacctttttagcttgttaattggcatcttttgtggcatccatatcttatgctagtcccagaactctggaatctgtagaactgttgaaccccataaaaggaagaaactc

SEQ ID NO: 420259 - DNA, 520 bp, Homo Sapiens
  misc_feature (119)..(404): n is a, c, g, or t
gactctaaggatctcaatgacgaacagtgtgacaggtgctacgtggatattattggcataaaaaggatggagttagatacatctgtacacagatgatcttgaaacagtatcctcatagnnnnnnnnnnnnnnnnnnnnnnnnnnnnnnnnnnnnnnnnnnnnnnnnnnnnnnnnnnnnnnnnnnnnnnnnnnnnnnnnnnnnnnnnnnnnnnnnnnnnnnnnnnnnnnnnnnnnnnnnnnnnnnnnnnnnnnnnnnnnnnnnnnnnnnnnnnnnnnnnnnnnnnnnnnnnnnnnnnnnnnnnnnnnnnnnnnnnnnnnnnnnnnnnnnnnnnnnnnnnnnnnnnnnnnnnnnnnnnnnnnnnnnnnnnnnnnnnnnnnnnnnnnnnnnnnnnnnnnnnnnnnnnaaaacaaacatcatggtcaagatgaaggaccacatcaagtcaaacacaacgacaatgttttaaataggttggtggagataatcgcacagtcatttgctggctcttttggcactgtt

SEQ ID NO: 420260 - DNA, 219 bp, Homo Sapiens
cgaggatccatgacgaacaatgtgaggtctgtggagtcataatactgtgatctagtatggtcttagtcagctcagagacacaaagcttctaggtcattaggcaatgggtgggggttttcctaagcacccatagacctggtttctttactgagctcgtttttcttttggaatggagtaacctgggggggttcaaaagaaaacgaggtcgtagacagtctg

SEQ ID NO: 420261 - DNA, 336 bp, Homo Sapiens
agcaatccaaagggaaatatgagggcaagaacccaagacatgagagatgctagaaaacacattgaatcgcaagcaaattagtgggaagaggaaaataatggtgcagagcaatagcattttaaaactgcaatttgtgttttgcttttataagatgtctgggtcatggtacacaggaagactactgtaaagtcaagagttgattgaacaggccactaacagataacctcgtaatatttatctctactacccttatctatactgatctgtgaaaaggagacctgcggtaataggagaggcaaagaatggatccattgttggcattgctgtactcattaa

SEQ ID NO: 420262 - DNA, 105 bp, Homo Sapiens
acaggttatcatgtggcaggatgtctcgatctctgactcatgatcgctgctcagctccaagtgtggatacaggcgtgagcacggccactatatgatttactaatg

SEQ ID NO: 420263 - DNA, 370 bp, Homo Sapiens
gaaatggaacgaacacacacctggctccctcctataattgtattgcagtccatctttccctctagatctattaatgtttgcatatatacttcagagctccactgttgtatataaatatttataattgctatatcctcttgctaaaatgacctttctcattatgtagtgaccttgtctctttttatagtctttgatttgtagtttattgtatctgatataagtatagctattccttgttctatttgggtttccagttgtatgaaatatcttttccacccttccactttctgtctttgtgtttctttataggtgctaagtttcttacaggcggcataaagttgaattgtttctttatctgttcgttccattt

SEQ ID NO: 420264 - DNA, 223 bp, Homo Sapiens
  misc_feature (63)..(63): n is a, c, g, or t
  misc_feature (89)..(89): n is a, c, g, or t
  misc_feature (174)..(174): n is a, c, g, or t
ccgaaatggacgacacagaaaaagagagtcacaccccgctgtgtgatggagcgtgacgttagncagcttgtgatggcagcatcaccagntgcttggagacgggcagcaattgacgcagtcttgtccatctcagatgaatagcttcttcagacaccaatgaatgctaatctcgtngtcagaaacacactcctctgataacagcatgccagctgaagacaatgtc

SEQ ID NO: 420265 - DNA, 458 bp, Homo Sapiens
agagctctgcaacgtctgttacaaattcttcactgaataacctgggctgtagccagcaggccaaaagacagagtagaagaggataaagagagcttccttgaggcacttagagcccattgtaggctgagaacaggtcaggatatttgagaggaaccaaactgaggcattctgtgcctccagtaagctgtggtttcagaacactgaagagagagcagaactcatgcgaggtaaacttcctgatccctaggaaacaggaggcctgactgctacaggctgtgccacagcagatgaactgggaaagatgcctggaggcacctggtactttccagagtatgaagcactgcagcgccaaggatatgggcggatgggaaggtcgagaggaattttcctaagtgtttttaaggtttcattgaatcttgaactgcagtccttcaaaggcataattgctcaggacagca

SEQ ID NO: 420266 - DNA, 408 bp, Homo Sapiens
ctatgctattacatagttatagcccatgttaataggagggactgtggtgctgcaacaagagctcttgaaagaaaactaaaagaattgagttataaatctgtcactgagactgtgaagttaatcctagaagaaagttttgtcacttctcagggcctcccatttcctcacctataaataaagtgaggatatgagactcaagtatttcaatagggatctactggcatttgaggaggcacaataatttcttatataggactgccctggcatcacagaaatttagcattctgacttcaggcacaaaagctacaactctttccagttcttataataactgtattcccaatgtccctatgcactactagcagaaaggagtggcttggtgacagcactgtagatgatctcaagtct

SEQ ID NO: 420267 - DNA, 245 bp, Homo Sapiens
cgcggggtatcgagtactgcggaaagggtggccgaatctgacccctatttagcacttgctgtgggtggtgccaggacaatcacttgcatgctgggcatgacagttatggattatcttcagggttcctagggcgctggcttgggaaagattccatccagtggttttgttttgttatgtctgagctgggaaagaaaggggtttacaagagcgtcaggaaaaggaagattgatagctctgcccagggg

SEQ ID NO: 420268 - DNA, 137 bp, Homo Sapiens
gtactccagaattgtttacctccattctcctaaagaagataaggcacagccatgatatctgttgtcctgataccatacccattcctttcagaatgagcatataattattcaaacatggagaaaggctgcccaagggg

SEQ ID NO: 420269 - DNA, 160 bp, Homo Sapiens
gccaaattttatttgatattcaagaaaaaatttccaatcttatacaacctatttaagagtataaacagggcatggtaggggtttgggggtggtgctctccacctgaatgaagcataatagaggaccatatgagaaaggaaatcacttgcaggtctcactc

SEQ ID NO: 420270 - DNA, 504 bp, Homo Sapiens
ttggaagagctctctctttttaggcagtggaatggcttagtgattaatatttctgtctgaggtgggggtgctttcttatggttattagtagaaatggtgtttggagttgtttagtttctgccatggggtataagtgagttgtctcttaaaactgactttgcacactggaaaaataaaatgaaaggcaggcctggctgagagaccagagcttctgtgccctttgatgtatcatttgagccctttggactaagaaaatgaacttcaacttccccgtcctctgcttcacaatttagttatatctagcccttctgccaaagagagtagtgtgtccttctgcctttgtgctctatattctctcaagactcctagaaagcttatcctagtatatctcccttctttttggctcttcagattccttttacccactgttgctttccctggtctgctggtggggtcctctctccccctctcatcttctctgtgccttgttcccccctcagcttc

SEQ ID NO: 420271 - DNA, 116 bp, Homo Sapiens
ccccttggcagagctccccttggcagagctccccttggcagagctctaaataaggcaaatgattactgctacaaataagttaactattagtagcagtaatcatttgccttattaat

SEQ ID NO: 420272 - DNA, 288 bp, Homo Sapiens
tatctctgtgattgtagcgtctgttgcagcgcctctgagatagcctccttctgaacagcctctctggactccagtcacctggtcgtcagaattccagaaaagctggcatttaccctgctcggtcattgcagatgctgtccatgttccgtcaggcaaactcctgaagtatcctccctcctcagttcttaaacaccttattcatagttctcatctacataggacttttcccaatcccttgtcacggactgcttatttaatacctcaaatagtatttttctcattgaagag

SEQ ID NO: 420273 - DNA, 551 bp, Homo Sapiens
agggcattattgctattaacaatacagaagcgattttccgtcattcccaaggcctggatgctgcgttcccatatgtggccccagctctgccaaaagcttgtcttcttttccaaagaaattccaatttttgcaaccagcattgacttctgaactgtgagtacctctgacagggtcatatgtcgctgaaacttcttcaacatccagacagggaaaggagaaaaacagggaggctgatttacagcgtctgctatctgaattgcagattttgacaaatatgttacattttatattgttctctgttctatgtgagggcagggaccatgttctctgtatgtcacagtcctacaccatgcccagtcattgattcaggactggactgtgtaatggaatggggaaataaccttcagacattcaagaaaacatgcactatattcagattaagttcattccaacatgagattagttcttccaaccctgcagaatgggcaggcacgacacctaacttcaaaaggggttggctttgaagagaatcaattgaagtacattcaggc

SEQ ID NO: 420274 - DNA, 413 bp, Homo Sapiens
gtatagttactgggttttcccttaaagaatgagacccctgggggggtctggaaattccacatttaagactcagactagaatgcttaggtgatatcttcataacttattgagttacttgcagatgttcattctatatcattctcaaaataaatttcctcttatctactccatctagttacaattcagtctcttccttccattcatttatcttcaaaatgtaactttatcgtcctccgctcccatgtttcccattacttcttctgtcctttgtgaatacacctcttctcttaatctcaactgtcttctgtaggtgatcctcagatttacatgtgcagatctcaaatctattctgagtgccgattcacatttctttacatttcttaaacatgtccacctgatgacctccggcctac

SEQ ID NO: 420275 - DNA, 158 bp, Homo Sapiens
agcactcagaaggatagaatacctgggttttaagggggatgcggggagtaaaatgggagatcgaacatggggcaggaagccttttcatatgagtccacagcccccaccaccatggaagggagaaagtatcatgggttggtatgataacggcatgccta

SEQ ID NO: 420276 - DNA, 241 bp, Homo Sapiens
tatggtgggtgctgataacggcatcagcagaagcaggaaatacgtgcagaggagggatctgtggggccaccttccgatagccaaacctcagaataaggggttctgagaatgccgtggaggcgcatatttgtatcacagggaaaggttctctggactcagagcagggcttccaattaagcaagggggcacattttaccttgctacgggccctgacgagtacgaaggctactaacttggttgc

SEQ ID NO: 420277 - DNA, 124 bp, Homo Sapiens
agtttctccctgacactacactcataaaagttaaatcatgtgtctaaggtgtccgagtcagacgctggtaagaaaacaggttcctggactctgcaccattactctctagcccgtccccggacta

SEQ ID NO: 420278 - DNA, 287 bp, Homo Sapiens
tagcggatccttataggcggaggaaggctcttttgcacatccctaggatagaggcacagcagcagtcctgaggagtggcagactataccacatgagaccccatgcccctgctaacttcttgtcatgcaaggcttgctggcttgggctcccatgtgcagcagccctgttcccacctggccagcgcaggccgtcacatgttctgtgttcctctggcaaagcagccatacttcacgcatgcgcaatccccgctacattctgctgctccgtcacagtcacacaggcttgga

SEQ ID NO: 420279 - DNA, 204 bp, Homo Sapiens
caggagcttggtaggcggaggaaaaaacttgagcgttatagtgaggagaggaaggtttaaataagaatttttatttgccttgatttataacatatgggacaaaacggaagctgtaaatgggttaaaaatttgacacaattcactcaactttgacagccttataatataaattagaacagagaatgcctggactctttactgtaa

SEQ ID NO: 420280 - DNA, 251 bp, Homo Sapiens
gagggagagccagctatgtggcacggaatggagagaacctttgttggcctcgtgttccaaaccacagacacctcagggctaattggtagcagtttctagaatgtcctcgggctactcggtaggtggagcaggactgtgcttcaccggaatcttcagaacgctcaaccccagtgactgaccgcgtgtggcgccggagctctgagttcactgcgcagctgaacatcaggggctgcgctgctgcccgggcgctt

SEQ ID NO: 420281 - DNA, 148 bp, Homo Sapiens
ctctatcggagaacattagtcatcttacaccagggcccgaagccctttctatagaacaatcacattaggactgaaaagagtaggagggtcaaagttcctgcaggctgtctattttcttcacatgcagtgggaccctgtgatgggagca

SEQ ID NO: 420282 - DNA, 151 bp, Homo Sapiens
gatggtttaggcgaggacctttcagaagaggcttaatggacgtagcacatcctctacagtccacgagaacacaggactgttaataccacccgtatttgtaagtgaaaactacgtgtatttcaaaagccgttcaatgcctgaaagtgaaccg

SEQ ID NO: 420283 - DNA, 293 bp, Homo Sapiens
gacccgttcaagaaaaatcataagtacatagaatcttccaatctggaagctaaggagtataggtagcaggtttaagcaaacaaacaaaaagctagtactctaaatgagaaacagaacaagcagcagaattagttggagttcatctaagctatacaagaagcatacatacagcgaataaatcacgcaaacaaaatcaactttgacagaggatgtggtcacttatcttagaaaaaaggatactattgtggggcaaattaaaccaggcaactatgtttcttcagggagttccccct

SEQ ID NO: 420284 - DNA, 378 bp, Homo Sapiens
tccccacattgccgcctgatgggatacaacaggaggatattgtggcagcttcctagaacctcattaacagactgctgatgcatgcccttggtcttcattttctgtgtcctttcctctatccctttaagcctgtaacttaaattgtggaactcaaattttggaagctaccataccaaccatcatcaaagtccaagagaaataagcttctaacatgcatgccactcttatttcatggctcactgccaaatctaacacaactggtatattggatttgcttagagtctagaaagagaagataggcataactccctggtatgcttcccaaatcttcccccatttacattaggttggacaaaacatgtatagttttgtatgaaa

SEQ ID NO: 420285 - DNA, 211 bp, Homo Sapiens
aggggtaaccgcatgtctcttgcaactcatttgtagacagcccagaaactagcagctggacttcatttttgttccagcagtcaccattttatagtgtttctctaagtcactgtgagtttcactgatgacaagtctaaaactccacaggtattcatatttagtgggttaaatcagagagaaaggattatgcttaactttctataggttcatg

SEQ ID NO: 420286 - DNA, 264 bp, Homo Sapiens
actctaaaaaaggtaaatacgacaaagagcctggcagccataacaatgaggtggcatgttatttccacaaaggcacttgacactgtttaaaccactgataaaggaaccaagatgacccaaatgatccaagaatgcctactactcccacccatgtctcatctgctcatcctgtcaacaggcatgagtatcttctcacctctctctccccattttcccagaaacatcatttaccccattaggcttgcagaaaacaaattcgcagaa

SEQ ID NO: 420287 - DNA, 271 bp, Homo Sapiens
  misc_feature (143)..(211): n is a, c, g, or t
agggaatccagtgataaagaaagaaaaagtctgagatattagcaagccattacagcaatatatttgaaaacagtatatactgagtctactgcaaaagactcatcattagatatgattacttctattttcattagtaaacactnnnnnnnnnnnnnnnnnnnnnnnnnnnnnnnnnnnnnnnnnnnnnnnnnnnnnnnnnnnnnnnnnnnnnccaaaaatggaaaataatttactaagccttataaaactaatcagtccaaaagggagttcc

SEQ ID NO: 420288 - DNA, 334 bp, Homo Sapiens
tgagtaatacagatgacatcacactttgtcactcatctacaatgtgctaggcactgacctgggtgtaaaatatttctgaaacagtgttccaatgtccattctccagtttgctgggtgttatgaggcagctattcctaaagcaatagcagtggcagcttcctagtcctgaatagtagctatatactgtttttaaaacagtttactggttccattggtggcctcacacataaaagctcccaaagaaggtcagttctacaacaatgttctaagcatcattattgctcctctagcctctctaaaaatcatttctaagcacctacatctcatattgttt

SEQ ID NO: 420289 - DNA, 122 bp, Homo Sapiens
tgaggggaactcctaacatcgaccaatctgtagattcttactaagagaagcatttggtactaaaagccatattatctctgttctctcacttacttctaagccaattaagcaaaagaggagtt

SEQ ID NO: 420290 - DNA, 162 bp, Homo Sapiens
agttctgatctcatgcagatgagtgatttctttcctgatctcgcgttctgagtcccaactggcactagtgcttccactcttgtggtgtctgtctgttcctgtgacagtgagtgtctcagggcaggtttaggtctgtgggtctgttttcccagtttctggctc

SEQ ID NO: 420291 - DNA, 226 bp, Homo Sapiens
cagaggacccgtatatggggagcagagaactccagtcacaggatgcaacctcagccatcctctacttctccaaaatcctcatctctcattccagtcagacactgcagggttccaaatgaagctaaactacatgcagaactgacataggacctgataaagtggtaggacttgagaaaaatctagtgaaaggctggaataaaagatcagagcaatgaacaattgtaaa

SEQ ID NO: 420292 - DNA, 394 bp, Homo Sapiens
  misc_feature (184)..(332): n is a, c, g, or t
tgggggacccaggcttcaccgaacaaccaaagaggtctggaaaattcttggactttaagcacagcatattcttacttttttaggttacaggctactaaatgctgcatagtaaatttactgaagagactacttatgcaattttttgcatgtataagagcacaagcattgcattttatttttcacnnnnnnnnnnnnnnnnnnnnnnnnnnnnnnnnnnnnnnnnnnnnnnnnnnnnnnnnnnnnnnnnnnnnnnnnnnnnnnnnnnnnnnnnnnnnnnnnnnnnnnnnnnnnnnnnnnnnnnnnnnnnnnnnnnnnnnnnnnnnnnnnnnnnncattaccattaatatttcataatgcttaatattcaccaataacaatctaaactttcaacagg

SEQ ID NO: 420293 - DNA, 283 bp, Homo Sapiens
ctaatttgactcacttgttacgtaggcgatgatggcataaagtcagcaacagaactgatgaataaatatggcttgcttccctgtgtcggagccctagctatgtgttatatatttaataagctagggtaagaaaatcgttcagttcatattagagatacagaaagtggtaagcactgtgaactagagactgaaaaaagtctcttctctccagctttattccacagtcacctctgggtctagaccattctttgtagactggactatgtctgagactatcttcggg

SEQ ID NO: 420294 - DNA, 156 bp, Homo Sapiens
aataacgtggacaggacagtcaacaaaggaaacatgatacagactaatctgaagtacccttggatccctggaatgtccgtaggacactcgtacaggtgtactgatcccacaagatctctaacgttctggccgagggcaaactagggtcatcaagct

SEQ ID NO: 420295 - DNA, 374 bp, Homo Sapiens
tcggcggtaccgctactacacacaacaacaatacacatatcaactaacaacatgcatcgacaataataacaaatgcatgcaacaatagtaacaactatatgcatacaattacaaaaatatgcatacaatatgcataaaacaacaacaaaactatgcataccacaatagcaaccatatacatacaataatactgacagtagctatattactgagcgcttactgtgtattttacatagaggttgctttgcactcatgagtaactattatccctaatttagaaaccgagacagcaagcaaattgctggagatcacacagctacaaagcagaagagccaggtttcagattgtgctcttaattataaccctactatgcc

SEQ ID NO: 420296 - DNA, 358 bp, Homo Sapiens
ctggtagatgtacaggctctctctgaaatgatcagttctcctaaatcttctccactcgtgatagtacgtacactagaatttgtacacctcgggtaggaagttggtgagcttccttcttattccacatatttttctgctatgcttctctctagttgcctcatcattttcaggtcatcgctttggtataagactcacagcctcctccactctagatcctgctttcaacctgcaagtcactctgttctctctgtttattgatctcatgatctccaaaaacattcactttaaaccatcctctcctatgtccatgccttggatcgtatcaacattgtccagaaccacttcacatctgaattat

SEQ ID NO: 420297 - DNA, 145 bp, Homo Sapiens
agaggactataagctgtgtgtcttggatgctccttagaaacatacaggcccctaaaatacttctgtagaccagtgcctctgttatgggagattgtaaatgcttccttctctggcatagctgtcctaactgccttttcagaaggct

SEQ ID NO: 420298 - DNA, 216 bp, Homo Sapiens
  misc_feature (135)..(171): n is a, c, g, or t
tgcaccgaaatctatagtatatgtgcttaaagaataatttatacttatacaccataaatcccttgtacattttatattaagtgattccctaggcactttgttattcattgctaccgagcacgtaatttttttcannnnnnnnnnnnnnnnnnnnnnnnnnnnnnnnnnnnnttctaattggatatttctctcatataggaaagcgactgatctatg

SEQ ID NO: 420299 - DNA, 276 bp, Homo Sapiens
cctctatctccagcatacatccattcagttaccaccctagctaagcacccattagctctgcctcggttaccctaaaaaccttctagctggtccctatttctattctgccaaattcccactcccccggttctattcttcacaagtagttctcatgattctcttaaattctaacaggctatgtaacttcttgactcaaaatttcccgtggttcctcatcaactgaaataaaacccagtatctttccatagcctacaaagttgtgacctaggtcctccc

SEQ ID NO: 420300 - DNA, 545 bp, Homo Sapiens
  misc_feature (168)..(249): n is a, c, g, or t
tagtggactcagcatatcgcacagcagtgggctccaattatgtcctattttaacgccctgtcacggagcagggaagagaaacccccttctcttattggttgagtgtattgtgagagggtggaagctgggggtcctgtgtcctggattggttgggagctaggacattgnnnnnnnnnnnnnnnnnnnnnnnnnnnnnnnnnnnnnnnnnnnnnnnnnnnnnnnnnnnnnnnnnnnnnnnnnnnnnnnnnngtgtgactcaggaagtggtgttgaagggaagggtatgtatctatgcttgtattgaaaggcagagtgagttgtatgtgtgggtttgccaccttccagctatggtctctggcaagtttactctctttgaacttcaatcactctatcgtgtgcgggggagagagtgtgggtatttacttcacagcagtgtggaagaaattacgtgagatagtggctataaagtgcttagccaggacatagtacctggtgagtgctcaatacgtggaacacaattttattactatctcattattacggaa

SEQ ID NO: 420301 - DNA, 163 bp, Homo Sapiens
tgggagaggtcagggaacatcagaagtgcagggcctgtctcttgaagataaagtctggctagatcagcttttcagtgaaagaagccaaagtctgcagccagatcttcatttttggtgagcccatcacagattccaggtttaggatgaggggctagaatgaagg

SEQ ID NO: 420302 - DNA, 257 bp, Homo Sapiens
ctcatgtcagccagaccttggccgggactcaatttattaccaggtctccaaatacttcctctctaacgaaggccgtgatgatacttcaggcctctggttatcaatgccagctcagacactgtgtcttacagtcctcaggatatttgggtattcctcttttcccatttgccatggtgctgcacagtccttcttaatgaggagccaggcttcttctcaatcaatgggttctggatctgaaaactacctcaggtctgaaa

SEQ ID NO: 420303 - DNA, 150 bp, Homo Sapiens
gggggatgctctagagtggagtggcagctgtgtcagaccgtgatggagataggaatcagacagatgagagccagtgagaatgcatgctcaggcaaagcgacagaactgggatagcccactgtgtcgagggcaatgaagggtcctcagctg

SEQ ID NO: 420304 - DNA, 142 bp, Homo Sapiens
caaagcagagctgacgtccagtccacgcctcatggcactttggaagtgcatctgacaccgtttgcctgccatacacaagccacaaagactttttgaggcgacaggttatgccaaaaattaagtaaaaatgacacagcttcag

SEQ ID NO: 420305 - DNA, 101 bp, Homo Sapiens
cccacatttaataagaagcgtttgtttagaggctccacagggtcaggacttggatccatgtgcctgtagttctcttggtccttcctcaaggttacaaaatg

SEQ ID NO: 420306 - DNA, 161 bp, Homo Sapiens
ataaaacccagctgctggttagaatgtagattaagttccaaatttggcaaaattcaagtggctatctttaagtttaccttgcttaaatttcataacctttttgtaaatatacaaatactacctgggatcccattaatttatataattaatagtacacaaaa

SEQ ID NO: 420307 - DNA, 266 bp, Homo Sapiens
ttattggatacacatgtgagaaaatcctctctgaaagtaatagggatgatggatttgtgaaagtgaacctgcaggaaagatgaccagttaggtgcccatgcaattgtccaggtgggaaacatgatggcctgaatgagataggagcataaaagtgcaaacaggtggagagactgacataagtggagcagaattggctggacttgatcactgatgagagatcagggcgagtgaaggagtgcaatccaattaggctcttgcatgtctaa

SEQ ID NO: 420308 - DNA, 141 bp, Homo Sapiens
aggaggatattctaagataatatccctctcccaaggagtatatgtgaactcagtaacaggagagtgctttgaatctttaaagtactgagtagctagcaaagagctgccatatgcagatctcaaccagacctgaccatttgg

SEQ ID NO: 420309 - DNA, 505 bp, Homo Sapiens
tagtggactcaggagttcaagtcatggcactggattattcataatatcatacaagagagggcgagtggatgtggaggaaaagaacaaataagtctcgtaagaagcacacacaggtatttgttttctttggtcacaaaatgcaagaaagaaaataggaactattgtgactgtaaatcacattttaaattggaggctgtcaaattgtgcggtagagtggcagtgcttaatctttatttaacaacaaaggcctctttaatgatattttcacttttctctctgcgtctgcatctgtccgtgcttccccatgagtttgggtctagccaatttctgtccagcagatttcacctctaggtcataattattttctgtagaagccaaaatgtgggggtgctgcgtgccattcagtcctctcagtgtttgtatctatgcttcctctagggtacaacttctttctcagccttagcaacacgttccggaaggatgctattatctttcctggctttaa

SEQ ID NO: 420310 - DNA, 176 bp, Homo Sapiens
  misc_feature (30)..(30): n is a, c, g, or t
ccactaaggtcatctccggtgtctacttgntttttatcctgtgtataagctgattaaggctacaagcttttacaaggaagctgagcatcaagttctccatgtgtgatattcggtggcctttgtctaatgtagagaaccacaggattaaataggaaaattgtccattctcctattta

SEQ ID NO: 420311 - DNA, 391 bp, Homo Sapiens
cagacagcacaacgcaagaggactacaggcgccaggccatcaccccaagtgggagatgaggacaccctgggctgccacccatgcagctctcgacatttcctctccacccactgctgccagcaggaccttttcctgctttctccactccaggcccacaccaccttaaacccagcagccctcagtggaaagaacactgggctggaacataagtgccctaattaaggccatgactgcacaccgagtggtcatgaggtcttgtgcacaacctgagaaggtggtcacttacctttttccaggtctcacttacaggtgtgtgcccgtgtgggtcagtggctctgctggagggaaccgcatgaccccactgaaggctcacattacctcccatggccgc

SEQ ID NO: 420312 - DNA, 130 bp, Homo Sapiens
taatggttcagtgcagcgtggaaacatgcagcagtagaagtgacaaaaggtatgttggtagcacggaagatgcagtgctagttccgtgtggcaaagggtgaaggtgtcttagaggactcctttggccgaa

SEQ ID NO: 420313 - DNA, 187 bp, Homo Sapiens
aagaagcatccagacatagggagaacgatggaggccagaagactcagccagatctagtcctttctagtgttcttctacctgcttttattctggcctcgctggcagctggttagatgtgcccatccagatggagggtgtgtctgcctttccagtccattgactcaaatgttaatctcctttggccgaa

SEQ ID NO: 420314 - DNA, 104 bp, Homo Sapiens
tcagaggaccctaacgatacatcagtatatatctgggtacccaaacaattcgatggccttcataatattttctctagacttaaagtgttttctatcttctatag

SEQ ID NO: 420315 - DNA, 469 bp, Homo Sapiens
  misc_feature (335)..(349): n is a, c, g, or t
agtgcggtcgattaaccaagtcgtgcattggataacacatctcatgtgtcaagtattgttttgggtgcaaaggatagatcaataatatgacatggttcttgagtcagtttggttatgactggagttggtgagaatgttagactcacattcatgagtggatttgataaatacaatgtggctgacatgatgtctgctctcaccaagacttccatttcagttctttgatttcccctttgctttcgttaggaatggcctatattgggtacaccaaaaatttacactaattagtgagcacttctcctactttaacagagaagctcaaacaggaaagaatnnnnnnnnnnnnnnnatttttttggtatgagattcaaaattcctagaaagcttatgacaaaattatcaaatttgttgaattctcaaaattgctaaatttctgaataatgttcatctagctacagtacttattatt

SEQ ID NO: 420316 - DNA, 298 bp, Homo Sapiens
gcgatatcctcacatagttgatcatgtatgggtggtagagaacgactttagatccgactcggcatatattgcaaggaatatattattagccatcatcactacctcaaatcttgaaacacaagaagtgaatgtggaagtcaatgcccaatggccagtatttttccccttgggattagggaaaattagggattacttacctagcaggaggaaaaaaacagacttattctttcatctgtgcacaatttcccaacattcactgaagagcagcagttttattgcttttgactacacagaggga

SEQ ID NO: 420317 - DNA, 120 bp, Homo Sapiens
aagtggggtatgtccaagtgaggaggtaaactcttttgggatatacccctgggggttccagaaagatagggttagaaaagggtcacgtagattcatctatagagggtcataaaggcgggg

SEQ ID NO: 420318 - DNA, 466 bp, Homo Sapiens
  misc_feature (81)..(143): n is a, c, g, or t
  misc_feature (183)..(235): n is a, c, g, or t
gagaggaggaaaggggattaaatgtgaggaacagaaattagagtcgtggagataaaaatgagaaaatatgagaagacattnnnnnnnnnnnnnnnnnnnnnnnnnnnnnnnnnnnnnnnnnnnnnnnnnnnnnnnnnnnnnnngagttacaaggaggtggggaaaatggtataagagaatgannnnnnnnnnnnnnnnnnnnnnnnnnnnnnnnnnnnnnnnnnnnnnnnnnnnngcaagaaatcgagcctaagtgtccaagtgagagggaaaataaatgggagcagagaacagcagtttgaaagagtcgcttatgctggagtaaaatagaaacaaacctgataaacttgtcagactctccaggagtaccatttactcaccctcataaatcttatttccataaacatactaactcacatactctcacatcctcacatgcactggcacttccatgctgtaagaacca

SEQ ID NO: 420319 - DNA, 455 bp, Homo Sapiens
tataagtgtggaaaatgaacttgccatctcactagaactgcttctcttcctcctgtgcttcagatttcagtggatggccccattatcttcaatcacccagtcaaaagcctggacacctctatactcctcccctcacttttcacctgactttgagtgactttttagaattcttgaggaaaatccctaataaaattttatggggaaaaattacctgaaaaaagtcatagctctgcataaccatctgccagtactcatactccctactaaccaaaaataatagacagtgtgccatggttgagaaagtacttctgtgtgtcagaagagctggcttttcaggctctgccactaacaagctctgggacttcaagactaaatgaaagcattaggcactgtgttagttgttttacataacctcatttcattcttacaatcagtgaggcaggtgtatcactggc

SEQ ID NO: 420320 - DNA, 369 bp, Homo Sapiens
tgcacagtgatatcaagcagaattagcatttgttggataaagtttgagaacattccaccaacatcctacggtagttgtcaaggaaatacaacaacaaatatgacacattcctgatcatctgggatgtagcccttttactttatgtagtgaaaaaagcacaaggtttatagcatgatttagagttggaaaacaatgtattccaaaataagtccatagaaatattcatcttgaaacggcagataataaatatgagtgttggaacttctgtatttgtctgaaaagaagacaatgaagctttggattatgggttaacagttgaatgcataatgcattccttcatcccctttccacagggtaccggagctcgaa

SEQ ID NO: 420321 - DNA, 149 bp, Homo Sapiens
aggatcccgagacatgatcgtcgcgcaggctgttttgaaattatcatccgttgtagttggaagggagagtgagcactctctcggcgagtgtgtcttgaaattatcatccgctggaggttggaacgggagtgagcagatactcgggaggt

SEQ ID NO: 420322 - DNA, 109 bp, Homo Sapiens
ggtggttcctgtgtcccactgaatctactattgtgggttctttgagccttccttacttccagcatataaaagtccatgtgtcatccctacccagcctaaatcagcattc

SEQ ID NO: 420323 - DNA, 428 bp, Homo Sapiens
tgtctgttgtggggtcagttttgttccccttcttcttctttgtacagacagggtcttgctctgtctcctcctgtcttggtctcccaatgtgctagaactacgggcatgagacactgcacctgctcttttctagttttatttgtctatctgaagagtttattatttggctaagctcacatggcaaggtaggtatcatgaagtgttaaaacccagcttttctgctaatgttcttgtgagataaaccaactattagtaaagatacttgcttcctaatcaagattacttggaattgttaagagagtatgtatgtatgtataagttaactttttaaaaacttctctgctgactggaggaataatgaaatgacccaaagggatagaagcaaaatatttcagatagtacataacgtatatacttagacttgtgcg

SEQ ID NO: 420324 - DNA, 549 bp, Homo Sapiens
tatgacgtgtggaaaggagtatttcaaaaactttaaataattgtacataattggagcaagtgagaagacaagtgagaggtaagctgttttgagaataggggtctgattgtgccagctttgtataccattataaggaacttggactttgtcctgaaggtaactgggcaattgttgaggtcaccaccatctactgtctggattaccgaggaaactttctaaatgtcctctccacttccagtcctgctcctctcattcaatctcaacctaataattcagagtagttctgaaatagataattcaacaacaacaaattggcaaataatgtagcctcttaggtgcataagactgtggtggcataaaaagctttaaggagcttttaactgaataggcaaaaaccacatgtgcataccatgaccaatgtgacctttccaagacataaatttaatcgcaccatgacagagccatttaagaggctttgcaatacctttaggagataagatccatactcctaatgtggccatcaaagccttttatgatgtaacctctggt

SEQ ID NO: 420325 - DNA, 119 bp, Homo Sapiens
taagtgtggaagaagtatgtgggatattttaatgaaaagggcagtaaagttagggataaagagacacaccttggtcaaaccaagtaataactaatatgactttagaaaagaaagcaact

SEQ ID NO: 420326 - DNA, 215 bp, Homo Sapiens
ggcagctatacaagataagaaaacggtgtttaaaagcagacctgcaatcaagatcaactgatattccgacaaatatgccaagttattgaatggcaaggttattcaatgagaaaggctacatttttttaaccagttaccattaaactggaccaccatttttaccttggttttggattatttttttagaagatatgggttcctgtgggttcccgaag

SEQ ID NO: 420327 - DNA, 184 bp, Homo Sapiens
cgcagtaacataataacagacccaccaccacagaagtggccaaacatacccaaaccagcattaaccagctactggctggctggtgtacaccaggccaattctttatgagaatatattaaaagtcaccccatgatggattcctacaaagtacttccccttgcggggaggggagaggcttactgtc

SEQ ID NO: 420328 - DNA, 158 bp, Homo Sapiens
aaggcatacattataatagtgcacattattagattgctcatattagatatctgagcttatagctccttcccttaatttactttatattttagttatcaatgcaaattgcaaatgttctgaaataatattataagaaggccatacagacagtgatcagt

SEQ ID NO: 420329 - DNA, 156 bp, Homo Sapiens
tagtcactctcactacaaatacacctcagttgagtaatcaatggccacccttcgtcttgaccttaagggctaggggaggtcggacattcagacatgtggtgagcccggtgcttccctttaccgtagttggcttagcttaaccctgtactcttctct

SEQ ID NO: 420330 - DNA, 508 bp, Homo Sapiens
  misc_feature (412)..(412): n is a, c, g, or t
taactgccatatttcagagttcctcaggtttccttttccttttccagtctctgtctatgaattaaatagtatatagaatgacccatataaggcaatatagttaaataaaaccaggttaaatgatttcctttgtatctgcccaaagttgatagcacacgttactttttcaaaataaagctaaaactaccaaaaagaggatgaaaactttttcctcattatggagtgaagttctaggtggttgctttagaagttggcagtgcagtgctcagaaggaactctcaataaataacatgtactccttggacctgtgagttttaggaaactggaccttttctgaagaccttagaatagggagttggccttaggacctaatgtcccaacttagtgttggacccttttaatataagatatngttaattattagcatacctttcaaaacctttgaaatagttactgctaacctgataaaatgttcccattaatctatcattagtctgtttctctgaaa

SEQ ID NO: 420331 - DNA, 160 bp, Homo Sapiens
cccagcatttaagaccctgtatagatgaatctacgtgacttttttctatccttatctttctgaaacccaaaggggtatatcttaaaagagtttacctcctcacttggacatacccaattttttcacaggtgtcctggacctcattctcctccacttttta

SEQ ID NO: 420332 - DNA, 521 bp, Homo Sapiens
gaagatggattcatggggaatcactcagcgtatattggccaaactgggctgtagaaatttaactggttatgagcattatctcacaaagtgctgttatatcatttaactctagtaattaggtgtaattgaatataataactacaaaaactacttactttccaccagaatttaactgatgctgttatatttgtttgcttatgtgctttgtattcagagctgaggccattgagatacatgtgtgaccaaagagtaatgaggtggatatttgtttgtgtcctatatgcatgttctcattacttcataatgagcctcatatgtggacgtggctgcaaaggccagtgtgggaggccagctgttacaacggacatgaagatgtgtgattattttcagtaggcagacatctaagtaagccctaagtcttgagttaagagtggaggggaagttgatatgaaatttcatctttttatttttgattggtttacatctaccacaccatctcctacaagaccctaaaggaacag

SEQ ID NO: 420333 - DNA, 353 bp, Homo Sapiens
cacatttggccttgaagctccacccaacatgacatttccaacaaaatgcctgctgcccaagactaatgaatggaatataggtcagccagaagctagagactttgaaaagccagaggttccccccagcctcatttgtttctgtttgcccagaaaatgtctgtgcagtcctaaaacaccctaggaaaaagttgagcaccatttaataataaaattgacaagataagagtgattcattcacatgttctgcttgtagaaaagtgctaaagaatatgaggaaaaaccctagtctataaatagagcaatgcagagccgaacatattacttattatggcaggtacgcattaattatctcc

SEQ ID NO: 420334 - DNA, 191 bp, Homo Sapiens
attcagtgaatacatatggcatttatggtacattttaaggacataaaattgcagtgatattattgggagtagattttattgccatggctttacaacacagacaaacaaaaataataactccattagttgttgaattgaactggcaggaagcagcacatcaaaagcgcttgtgagcaggcaggaggatgggg

SEQ ID NO: 420335 - DNA, 171 bp, Homo Sapiens
agatgaagtgaatctcaggtctcctttgtggtttcccaggacaatcaataagggatgcttctgcatgataaaaatgtgatgatgaatgcatcagtaaaagtttaaatctgtgaaggtccctcaagctcgggccccctgcctatcttcctagtctttctctcaccttgtcat

SEQ ID NO: 420336 - DNA, 345 bp, Homo Sapiens
tctaggtggcatgcagttcatcttacaataaaagcccattcatttaaaaactcagaaatcatcccagtgcctgtactcctcaaaccaatttccctaagggaagactggcacaccagcccaaagagcaggtgcttctcttccaacagaaacatggcccctgacagggcaccagcattagggaaaccaatgtcctccgaatagctgccatgagaacatttcagatgctcaaactgaaaattcttaaaaccaatattaagcatcagcatgctttaagtgtatgatagccctttggaatttacaaacacatgtgcagctatttccttcttcacagatatgatgtactca

SEQ ID NO: 420337 - DNA, 216 bp, Homo Sapiens
  misc_feature (159)..(170): n is a, c, g, or t
cggatcctgtacacctctaggggctcagtaaattagtactttccataagataagatgaacccagagtagctaccagtggagatatttaaccttttatctgcagctatttgcttaggaacaaaaggaaaggcagtttcttgcatgactcaactttcagcnnnnnnnnnnnncccttttggccttattaattggggccccctaaagttgtcgggtccc

SEQ ID NO: 420338 - DNA, 162 bp, Homo Sapiens
gaataggatgtgtctttatatagtagctgcagagtctgaggacggtgggagagcacatggtcagactgagattgaatgactaaacagtaggaaattaactttggtggggcatcatttatctattcaagtggacactggagaccatcatttggttggagtgag

SEQ ID NO: 420339 - DNA, 136 bp, Homo Sapiens
aggggtacaggtctgggcaaggcacttacattcatctctgaacaactcctaggagtgtgcactgaaattccatatcagatgacgagactgaggcccacggtattcacataactactccagcgcagaactgggtcag

SEQ ID NO: 420340 - DNA, 153 bp, Homo Sapiens
gctgtgacacacagccagtggagtatacagcggccttgggcatgggtaaaggaacttaccataccctttctctcatctcacagaacaaaagcaccttatgagggaaaaggagcacaaatactgttgccgtctgaacactggtgaaaagtcact

SEQ ID NO: 420341 - DNA, 275 bp, Homo Sapiens
cgcggtgactccgaggatccgacactctaggggcaatgaccccttcaaaatagggcttttttccacctcccaaccctgcgccaaccctatcagagcataaatacagctaatcaacctgggtgcagttgatgagctcaataatgtctcttggtcaagtgacagcattgaaaacaattgcttggcttcttgattctcactcctgaaaatagtcctctcacttggtttctcccttgcgttttgaggacagtcatagagacactttcctcatgtctgat

SEQ ID NO: 420342 - DNA, 202 bp, Homo Sapiens
ccagagtattcgacactctaggggcactgatttagattcagagaagaaataattgccaatcttttcttagcaacagaaggggaccaacttttctggggctttccagaggctggggacggccatagtgtgggaggatgtctagaggtgggagggatccataatgaagaagcccgcccaggaagggtccatgttgccagatgct

SEQ ID NO: 420343 - DNA, 441 bp, Homo Sapiens
tttgcctgctatatatatttacatacttctttcaaattttccatatccttaggttttagttgtcatcatttagaatagccaatgtaaaatatcatttttgctgatagttagcccatcttgcataagcttctggacacatggacgctggaaggtccatctggaccatctggaaaacagaccttgaggcaaaagttcatgtgttacaactttcttgaggcatagaattttcagaaacgcaagaggacacggaaacattcaagactaaggagtctgtccctagaattttttattcgcagccttgcttgacagttgattgctaattgttgtaggaagtctccagagaggctatatgcaacatattataaaaaataatttacaggaagggatggcaaacatttatttgctgcccccctctgttttctccctttgattggttaacgt

SEQ ID NO: 420344 - DNA, 428 bp, Homo Sapiens
gacacagacactgggatactcacatattccagcaccaacacggggacgctcactattccagcaccgacaaggggcaccgacacgggacgctcactattccagcactgacaaggggtaccgacatggggacgctcactattccagcaccgacaaggtggcaccgtcacgggtacactcactattccagcatcgacaaggcgcaccgacacgggtatgctcactataccagcaccgacgcggtggacgctcactattcccgcaccgacaaggggcaccgacatggggaggctcactattccagcaccgacacggggacgctcactattccagcaccgacatggggacgctcactaataccagcactgacacgggtacgcttactattgcaagcaccaacaaggggcaccgacataggcccttagaggtgt

SEQ ID NO: 420345 - DNA, 385 bp, Homo Sapiens
aaatagagagattatagctccgatatgaatacagatttacttctggcaggatatctggatgttgaattaatccagcgttgagaacgcccaagttcagagaggagtatgtcctttcgtattgggcagactgatggtgcagtgtgtgctcctcagcagacagtgttagataatctgttcttcataagcctcaccactagcccagggtagagaggacaggagctgttgggtaaaggagtggggacacttgggttggagaactggctttgctattacattagtcccatgaggattcactctgcctccttggtcctgtttgtaaaacgaggctggcgatcatttccatctctaaatactgtagtctgtcgccataaagcaacagaattgg

SEQ ID NO: 420346 - DNA, 195 bp, Homo Sapiens
atccgtatcgaaggctttaaggacaggtggtgtgtggtggcttggtattcttctcgtgttacatcggccataattggtctatggttagtgtgtaggttagatcaggctaatatgaggcgcgttatggagtggaagtgacatcacatggataggccggcggtcattaggcgggctgagagggcccctcagaggtgt

SEQ ID NO: 420347 - DNA, 153 bp, Homo Sapiens
ctgattgcttgctgtaccctgaacaataagtggttgagcttattccagtcacaggactattcctccagtttgttagcattgctatgctttgtccagttagttccgtatcttagctcatatgtcataccctctacctaacctgtcccgtatcaa

SEQ ID NO: 420348 - DNA, 141 bp, Homo Sapiens
cccctgctaagttgctcaggattggtcttttgtggatatgtttacattggtgaataaagtcagagtactttagtcattttgcttcagtagtgtttttcatactgtggttgggctatattagtgggtaatgaaatcaattta

SEQ ID NO: 420349 - DNA, 141 bp, Homo Sapiens
  misc_feature (75)..(75): n is a, c, g, or t
atctaacatggtaaatgcatcaggtagctcaggggaactcctctgaccagacttcaaggctgacattcaccaggnttccctgccacccctgccttcacattgatcttctcatcctttatacttcccctgagctacctgatg

SEQ ID NO: 420350 - DNA, 249 bp, Homo Sapiens
tccccgggtaactccaggggaactcccaaataccttcctaggcaaagtggctttttcagtaaaaacaatgactgaccacctaattcttaaggctgctctggtccactccttgtgaatatccacctctttcttgaattcagcatttccgaagctgacctcaccaacagcccagcctccaaacctgctcctcttccattgtctccctttgaattacagctccattctctcttgcatgctgtctgaggagtt

SEQ ID NO: 420351 - DNA, 209 bp, Homo Sapiens
cgactctagaggcatcccctttttcttctcctggagtgccatgtgggagtggatcaggcattcccatcactctcacatctgtcttcaacgtgtttcaggaaaaatacactggaattcagatcagaatctatcttcacctcagaatctgtgttcgccctctcctccttcttccctccaatgcttccgaagcacaaaatggtttacttcct

SEQ ID NO: 420352 - DNA, 116 bp, Homo Sapiens
acctaggcccacctggcaagcagcagagccaggctggtagccttggtgaagtcattcatctctttctagttctggagagctgagatagtaatgccagctctccagaactagaaaga

SEQ ID NO: 420353 - DNA, 414 bp, Homo Sapiens
ccgggtaaaacccttaaattttgtgatagaaaagttgctcacttacctcttcctagccctgctcttgggttcactgttcccctggaaactttaccccctggaagggattaggcttgagacagaagatgggtaattaacacctcactggacattataggattcacagaaaaagggctttcatttaactctggatactatctaatcagctatatagagtgttgctacaatgattgctactgcggttatgtcttctgtcatgatagccactctcatttacatgagtcttaattcctgacccccaacatcttgatgttaatttgatatcctacaaagacattactgttaatggtacatttgttttcagaacaagccatatatcacagatgagtggcagtggaaacaaggagtagtggc

SEQ ID NO: 420354 - DNA, 236 bp, Homo Sapiens
ttagtaaaactttcatgtgtgggtaacaaatccttgcatgtcaggtggtttcctaaattaattgcatttcacagaattgaaaagatctaacaaactgactcattattacaatgaatttctatgattaccacgtgctttgtggcatgtaagaattcaaataatagaaactgctatagcaaaactcttaccattcttacctttattttgttaatttatggcttctcaacatttacaca

SEQ ID NO: 420355 - DNA, 107 bp, Homo Sapiens
tgtctgactgctttcttaaacaaccagaaaagcagggaatcctgttatatctcatcctcctttcatccaactcccctaccctcccatgacaaaaggccactctgaat

SEQ ID NO: 420356 - DNA, 425 bp, Homo Sapiens
  misc_feature (265)..(280): n is a, c, g, or t
gttgcactcgtaagatttcttcttgcatgtctgcacactgcagacttctccagcacaaaacaaagaattacaacatcctccttaccggctgccactgattacttgattaaatcgtcacctctaatttaccctgagcacctgcaaagttcttctccatgcaccagatagtcttcagggtcggaattacatattctctgctgccttctcaagagcttcactccaacatcagtgtctccacccctccctctcatcctcaggactggannnnnnnnnnnnnnnnccttcaaaccattgaccatttaacaaaagctttctgttatttttaattggctagccctacttcaagcgacagccgttgttaatgggtcaagggtttgaaggaattcagtctctaacagccagatactacatcccggctccgggcc

SEQ ID NO: 420357 - DNA, 147 bp, Homo Sapiens
  misc_feature (76)..(95): n is a, c, g, or t
tccccttacatcgtaagaaaatatatttgtagtcccaaaccatctgtttaaaaatgaacctttgttgtgtgtgtannnnnnnnnnnnnnnnnnnntgtgtatctttcataagtcattgcacactatacacaatactgtgcaccttgc

SEQ ID NO: 420358 - DNA, 418 bp, Homo Sapiens
  misc_feature (149)..(178): n is a, c, g, or t
tttcttgctctgaaacaaacaggacatttttagtcgctgaagtagctttccgcaattaatttgttgaattctgaaaaagaatataccctctattggaaaatcttagtgaaaggttcagacttgagaattcaacattttattagcatttnnnnnnnnnnnnnnnnnnnnnnnnnnnnnnctataggttccaacttatttccaaaatctagcgggtgcatcccaaacctaaaaacatgcagtggaaatcaccatgtctgtatacacgtcatggactgaaacagtgattttaagtatgatttttccggtatgagtaaacttacattcaggttttgaatacttaaattttatgtgggggcataatttaatgctacccaattgctatgtctctgcattaacaggagcatctctaaaaaacacc

SEQ ID NO: 420359 - DNA, 429 bp, Homo Sapiens
agaggtgcacttcagagagcagcctcctcaggaggtcttgttctggtgagcagcaggcacctcttgcagcccactgaccctgtccttctaagggcacctgtgccaccatttcccaggcctggcaggaaatgcccccagaacacctgaagcttccttgcccatctctgagctaggccagggattcctctgatatttccccaggccaggctctgtaagcacagctgatcccaccctgaggggtcagggaggcagatggccactgatcaccagagcccaaggagtgggaggagcccttgtctcagggatctgagccacctttatgccacctaccatcatctggagtttctgacttcatggttgggacaacccttgggacctgtcccatccatgctcatgtggggctcattctatggtgggttgcaggcagga

SEQ ID NO: 420360 - DNA, 194 bp, Homo Sapiens
gacaggcctgtgcctgttggtaggttaaactggggctttgtcagaactgactgtcaaacatgcagcagagggcctctaggagggagggctctaggagcttagattggctgatggctgttttttagattagattccataggattaatatgggatttagggggaagtctagtgaccacattgataaaatttttatg

SEQ ID NO: 420361 - DNA, 449 bp, Homo Sapiens
  misc_feature (99)..(175): n is a, c, g, or t
gatccccagatgcacttcgtagacttaaccttttaaagacattaccatttgttgcgcctggcacagttgtgctcatgcctatcatcccatactactttnnnnnnnnnnnnnnnnnnnnnnnnnnnnnnnnnnnnnnnnnnnnnnnnnnnnnnnnnnnnnnnnnnnnnnnnnnnnntgaaataaaaaaatcatatagaatagttcaaatgttatgctggcttattaacaatgcttagtacgtatgtactcagcgtaagacagatttctttcaaccatactcattttacctatcgggcactagatttaagatctctacaaatattgaaactttttaacatctttaatagcaacagatatttgaagctctcatgattaattatctcttatcaatgatccatggtaaggtcagtaatatttgaaatgctaaccagttcccacttttttcaaaa

SEQ ID NO: 420362 - DNA, 414 bp, Homo Sapiens
ttcacttcgtaacgtattgtaattacacacataagatgtatgtgataacctatcatcaatttattttgttgatctccattctggagtattctcacagttctggtcctatggacgagaatggctgcatgtaaggctgctgcacaactggcattctggacttcattcaccccagaaatagccagctcctgtgttgtatcccgtttcatttgcatgacttactctcctccatttaggaggagtgtatcactcaggtgcttcctgagaaaatccaaatggaagacaaaatttgagatcttgagtatctgacaatatctaacttttcactcaaaacttaatttattatatatttattttttaagagagggggtctcactctgttatccaggctgtggtgcagtagcacaatcatggctc

SEQ ID NO: 420363 - DNA, 209 bp, Homo Sapiens
atcccccttccttcgctggattgacagatctcattcctttacttgctctttgagcatgtgatcctgccagcatgagtaggttcacgatttgaggtcgtgctgagtgctgtgtcacgcttgtatcccggcattttggtggccgcggtgcgctctgcataccgtcctcaaattcatactctcttcctagctattccagtgctgtatccact

SEQ ID NO: 420364 - DNA, 326 bp, Homo Sapiens
cagtcagacgggaagttcgggaagggatgcagagccagctcggttacacgtcaaacaaaataaagactgacaaaaactctgtcggatttagccagctagaatgtgaccagcaacagtgtcagccagcaccacaggtgacttgggcgagtgatgggcaaaaaaggcagatgagaccagggcaacaagcacagcgtcagcatgcaaacacaggcaggggcaactcctgcggtatggcaaggcaccactgtctcggcacagctttcagcacgcaaacgcacatcaacaccaggggcagcagcactgaaagcaccatagcaggcagagca

SEQ ID NO: 420365 - DNA, 141 bp, Homo Sapiens
cagaggcgtttagtctgaatacagacttaaaaccaggaatccagactaaacactcaaacatggagtccatcgtggccccagggcctttgcgcgtggcattctctccatctggaacactctgcccattgtgttagttgttct

SEQ ID NO: 420366 - DNA, 200 bp, Homo Sapiens
tccgaggatccgcagaggcgtaggtcaccttcggaattagtgaggatcatgacaaattttcatttcatgtagaccaatgaaaactggcagctggattagaggtttaggttatcaatctgtatttctgcctttgatgaatcatataagctttgtatcctgggtttaccttgcttcaaaatgagtgagttaaattagacacc

SEQ ID NO: 420367 - DNA, 173 bp, Homo Sapiens
cagaggcgttagtttacctttgtttctaaaattaatctgaggtgcctttctcaacttctctttatcatcatccatcttctcatgtcacacactcgaagtaaccggtttaacacgttgttttgtctcacggaagccgacaaggacaactcaacaatttaattggcggcaccacg

SEQ ID NO: 420368 - DNA, 283 bp, Homo Sapiens
aagaccataagatagagaagagatccaaggactccaatatgaaggtcaaggggaggagatgccagcaataagtcagtgacgtaggagggaaatgactagaatggagaacccaggaatattctttcatgcatgcctccattctgagcgacccctcatacagagttaggcatagtcttcaacccaagggtcccacggttcattccagattctgaaagaacccatgtgaaacagcagcaagtaatatgagagggtgtctctttaagaccatgctgtaaggttcaga

SEQ ID NO: 420369 - DNA, 475 bp, Homo Sapiens
  misc_feature (196)..(315): n is a, c, g, or t
  misc_feature (327)..(343): n is a, c, g, or t
aatacagatatctgtgtgtgcttccaggaacgcacggagactaatatggataaaggtagttatcaatgagaatacctgtgcattcaaataaggatagcagaaccaaaaactgtgaacaatagatgcctctggggagtggaatttagaggaacagtaagcaaggggctattccttttaaacataatcatatggttannnnnnnnnnnnnnnnnnnnnnnnnnnnnnnnnnnnnnnnnnnnnnnnnnnnnnnnnnnnnnnnnnnnnnnnnnnnnnnnnnnnnnnnnnnnnnnnnnnnnnnnnnnnnnnnnnnnnnnnccagccttgaannnnnnnnnnnnnnnnnaacactaaaaatatatacaggtgcttgggcatataatgtgagggtacaattgactgtagatgacggacacagggggctaatatcggtttggcaaaataaccaaatccatggtgtaaggggatgcttaaaact

SEQ ID NO: 420370 - DNA, 186 bp, Homo Sapiens
acagaggcgttagtgaatttgctgggttttagacacccggtaggccagcctttggactcctgcagtagcagtagtgggctgagtgtgcctgtccttggaccctagggcagtgtacactggtaccattgttagtgagtccaggcaagccaattttgggagtcccaggtggcttgctcaggtggttgg

SEQ ID NO: 420371 - DNA, 265 bp, Homo Sapiens
ttcgtaaacgtggccagaattgtgcataggctgtagctctaggattacaggactatctacagatgtattactctcatatcagaagttatttgttcaagttatggtatatcctaaaattaattatcttgaggtctctgtgtttaaagctcttcatatatcacattatttctctggaaacatctaaagaacaaaatttgtttaccagccatgctgcctatttctttaagggcctatttgcaaagcctaatagaaaaatttggattta

SEQ ID NO: 420372 - DNA, 259 bp, Homo Sapiens
cacacgcacagtgctcatagaacgacagagaagggaatcttgaggggcaacagtacatcggtggatggatgggtgggtgaatagaagatgacttgatgagtggatgaatgggtggttagatcggtggatggatgagtagatgactagttggatggatgagtgaatggatcaatccatcggtgggtgggtatagacaaattatatatccttcctaggtatacttcaaagtgagctgatctattccaggaatcatattcaa

SEQ ID NO: 420373 - DNA, 131 bp, Homo Sapiens
agagtttccggcagcatctactgtccggagattcaccggacagcatctactgtaccggagatttcaccggacagcgggatccttacatctactgtaccggagatttcaccggcggcaacatcatccccata

SEQ ID NO: 420374 - DNA, 179 bp, Homo Sapiens
agattatgatatggtctctgtcctcagtagtttctcaagagggacagtcaaacccaaaagcccaaataaactatgtgctcgtctttgtaatacagactatcagagaaaacagaggcaggtcatagataagagaatagggggcaatctcctttaaatggcgtgagcaggtctctctctct

SEQ ID NO: 420375 - DNA, 356 bp, Homo Sapiens
agacttaccggcagaggggggcagagtgagctccattccctgtggactctatcccatatctgggctttgcagggtgttgtctatcaaaaggaggaattgcccttcacagggagagtgttagagccactgaggcagaggtagccatctcgctaagtgctcacaagctgcttctgtgaaaggccctcatcagagtccctgcagaccctgagagaatgcagccctggcaccttgttttggtgacttaaagacaaggcagaggttctaacatgacagggcacaagaataaaactcagagggaggtggggtctattctgttcttttgctctatttttgggacatggattcccactttgtcc

SEQ ID NO: 420376 - DNA, 122 bp, Homo Sapiens
tctaagattacacacgagaagtacaacacatcacacatatatctcattcatacaacatttaaacatcccagaagaaactccattagcactcctctcccatctacagtaccgggggtaccgag

SEQ ID NO: 420377 - DNA, 226 bp, Homo Sapiens
agatttaacggcaggcagagaagccctacttcctcatcaaccaccagcaggcagcagcttcatgctgtagttctttttttcctttaagtagaataaagattgtggccacactttaataattgccaaaaatatgtgttcattaagctttttaagaaatgtgatcgaaaaatgctgatgatacattgtgtttaatagctttaataaaaaactgataaagcatctaata

SEQ ID NO: 420378 - DNA, 418 bp, Homo Sapiens
gaggaccaccccggttacagtagatgggcggacagacaaaggaataaataaagtggacccatctggacaaaaaagactttggattcaataaggctcataaagtgccccaggcaccctaacccccaaccaggtgtaccccataagattacaggattgccttccgattgtccctccctgatagggatgaaaatactgccaaaatgtattcctatgggtaatgtatgttcaggcagtaattgggcaattctagagactccaatcgggaaacacagggcctgctgacagatgaccttgagagaagcaagagccaagtccctggaccctgatcataccctcttcctgagaaactcactgagtgcaggtaaggaagagggcatgcctggtcctgaaaactgtacgcctccatcctgctcaataa

SEQ ID NO: 420379 - DNA, 173 bp, Homo Sapiens
ccggtaacagtagatggggtcagggcactgtctcttgcaggcctttgtgagggctcagacttggacaatgcttgagctggggagacatgggaggttctgaggccagataacatggcctgaattatattttaaaagagtcacattggctactgtggggagaacagactctaggg

SEQ ID NO: 420380 - DNA, 275 bp, Homo Sapiens
actttagatggaagtaatcacagagactggcactggctgcagaggggcaaggcggaatcaagggtgaccccaggatcctggcctaaagagctgggagaatgaaatgccaggtactgacggggcgtgggggccagcggaaaagcagcagagatgaactcgtgggtcccgctgagcatgtgtctggtttgaggggcttgggccacagccaaggggaggcaactggtcaacactggttagaacattatgaccgagaatgtgagatgggtgtgtgaggg

SEQ ID NO: 420381 - DNA, 108 bp, Homo Sapiens
tccagagtttcacggcagcacgagaacttgctctcaagaagttttctctctactgaaatgtagcataaactctgcagcaggccctaggctatttgaaaagtattgact

SEQ ID NO: 420382 - DNA, 130 bp, Homo Sapiens
tcacacacagataactgcatcatggcccagagaacaattgtagcacacaaggagcagggctgtggctaaagtgttggcatctggagctaatagttctaaaaatgatataaggtagaggtagaaaaacaac

SEQ ID NO: 420383 - DNA, 183 bp, Homo Sapiens
tccagattacggcagtgatgctgtgccaaagaaattggtcagatgatcccccactgtgccagaatgttggaggaggaaacacaaggtcaggcgagccagcgtgccctgaaaacccctcaatctcctggcttctctcagtttgcattcattccctcaccctgtgtgactgcccccaagctctct

SEQ ID NO: 420384 - DNA, 338 bp, Homo Sapiens
tgacatgatgagataccttatattcacttatcaggcagacagaaatctagtatgacattatgtgtaggaaactcagtcatgctctttggcaaatttacatcacatcttaagtggttgtcactcagtttcaaaaaagtcttaattaatgggtgtaacctttcctctctggtttaaaaaggtcagaaaaccatcacctgtatttattgaaaataagtagctcattcttgacaagtacatctggatgatgagaagtagaaagaacagcaaattaaccactgcttccagcttctgatttaaaacttttacttgactcttcacagttgtgagtcatctactgt

SEQ ID NO: 420385 - DNA, 338 bp, Homo Sapiens
ctgcatgaatctatagatatatacatataggtactttcagttgaaacgatcactggagatatttaaaaatatttatatcaaggatcacagctacatcccaaagatatagctaactgaaatgaatatccaagatcccattgtagggacggggggagctgtgtaactgatgatttggcagcatcttaagaagactactaatggtggacatcactaccaatgaatttatttaagtgccagtatgtatctaaattacccagaaaataactcctagcctcctctgaaagcaaaaggggtagacacgccctccatacctttccacaaatttccatctactgttc

SEQ ID NO: 420386 - DNA, 142 bp, Homo Sapiens
ggaaatgtgctgctctccttcacgctcccgtcgcatcctctgtctcctcttcaatgcccctcacactgaatgttaattgcctcaatacgtgccctgtcccccactagggctccctccgggccgaagccaagtctttttcatc

SEQ ID NO: 420387 - DNA, 238 bp, Homo Sapiens
gggcagtaatgagggtctcttaggcaggcttctagctctaacatcactgagtttctttgatatgttgggatttcttaactctgttgcttgcttagacagtggaagtgcagctcacagcgttactcatattagggcacgatacatttttattggttagctgaggaatcaaaatatgagtagtccgttgagtggccctgaggtaccactgtcattttgatttgtttctacttcacagaga

SEQ ID NO: 420388 - DNA, 268 bp, Homo Sapiens
gaacaccaagtctgagatgctcgggactgaatatgcctcttacatatttatacattagtgattttctcctttccaaatcgggccatctatctttagctgtgacactgaacgagccaccaccgcctcccttccccagtgggattgaacatgcacttcctcttacacaaagcacaacagtcctgaccaggcaggacgggggctgtgtgcagagacgctccaggctggaagttggaagtggtactgcacagctttcctatgtgattttctc

SEQ ID NO: 420389 - DNA, 203 bp, Homo Sapiens
cagatcttgtgagaactcattacacatgtcacgagaacagcaaggggaaagtctgcccccactgattcaaatcacctttcaccagacccctcctccaacacgtggggattacacttcaaatcacatttgtgtggggacatagagccaaaccatatcagactccaaacccacaccccagaaccagattacccaaagtgctgcca

SEQ ID NO: 420390 - DNA, 181 bp, Homo Sapiens
tgtagtgcatagcattccaagtagtcacctgattttttttccttgctcacctggcatctgttcttcccttatcagccaaagtgaccctcttaaaaagatcatgccaatcctccatccagtactccccaaaggctttctatctcactcccagtaaaaatcaaagatgttgcaatagctccta

SEQ ID NO: 420391 - DNA, 348 bp, Homo Sapiens
gggctctgtgtggtgtttcaatgttctcagcgcagctggggagagtattttcggctggtgaatattctagccctccttccactcctcgtgtggtaggtcatgtctagcagccagtctgtatcttctgggaccttgtcagatgtgctgcatctcgctaccttctggatcagaatctacattgtagcaacgatttcctgtgatcatccttgtgtatacagaagtttaataagttgtgtcatgagcactcttttgagatcctaggcccaggatagcaaataccgagtctgcatccttccactgtcctgcggtagtatcagacattactagctgatctagccgatccatttt

SEQ ID NO: 420392 - DNA, 294 bp, Homo Sapiens
ttctgaggtcactctagaggactccccaatcagggatagaatgaatgataacgttactaaaaggtacggggaccaccctgatgtaggctgggcctaaacaatgtcaccaagacttcccttctctttctgtttgtgcattggcttcactataggcagattttctcttcagattgatcagctcaatcacccagcgaacaaaaaccagcttctctttctcagtagtcacagaaaacccttataatttagtctcattggggtgactagagttatatttcatttccctttagtccagta

SEQ ID NO: 420393 - DNA, 407 bp, Homo Sapiens
tcccgaggtatagtgactcagaattaaaagctgaaaactagatatttttctagcttgagttacaatgttactttgagattataatgtcattacagtcacgcctagtactcgcccaaatctgattagcggaagcttaaggagactaaacacccttgcccttatgctgtggtggcgacttttgactagttctagccaatggacggagatgtgtacaccgtcaagcttagctgtgaaaagcccacacacatttctccagtttatcttccctcacttgattgaataggagcccacttgtttccaatagtccaggtcatagttacagcatcctattgacctggaataacaagttgctgtacagaggacagttgccttgtggggtgggggtggtcttgacactcagtggacat

SEQ ID NO: 420394 - DNA, 338 bp, Homo Sapiens
tagttggactcagcatctccgtgtgggagaaaggaaagtcataaaactggagtgagatcatgaaaggtttgcgaaatgttcaggggccacctcaggtaaccatcaaaagttatgtatctaatatgccacctcatccaaatgtgttttgggcaatactttcttcatagcatgatttcaggtaagaaataaacattgtggatgaagccacaggacatgtaggaagttttgagataaaaatatttgcatctccggtcttgtcatgacggacagtaacatatagtggtaagaactgaaaacctgcagtaaacaaagctcggtttctgactaagtccactact

SEQ ID NO: 420395 - DNA, 346 bp, Homo Sapiens
  misc_feature (238)..(252): n is a, c, g, or t
agatagtgaccagcatttctagtgttttggggacattcagtatcctttcttctttatttgaaactacataatatattattgttaactatggtcatcctacagtgctataaaacagtagaagttgttcctcctacctagctgtaattttgtgttattgaacaaatctctccctatcctccccttccctctccagcctctagtaacctctgttctgcttttcacttctatgagattaacnnnnnnnnnnnnnnnaacatctaactatgagtgagaacatgtggtgttttaactttctgtgcctgacttatttcatataacgtaatgttttctagttccatccatgtca

SEQ ID NO: 420396 - DNA, 191 bp, Homo Sapiens
atctcccttgaatctcaaaataataaaacttgtattccactttttatctccttccttcacaacatttgaaattccacagtaattttcccttcggttatttgcctatttcctttttaatggtttccattgttatacccagtagattaaacaacattcttctttacttattgaattgatatagtaagatctgc

SEQ ID NO: 420397 - DNA, 383 bp, Homo Sapiens
  misc_feature (65)..(129): n is a, c, g, or t
tccgtatgacgtgtggatataaacagatctttttgaaggaataattcaacccactatagcatccnnnnnnnnnnnnnnnnnnnnnnnnnnnnnnnnnnnnnnnnnnnnnnnnnnnnnnnnnnnnnnnnntgcatcagtagcccgttgtgttagaaaagaagggaagagggtcttcgctaaaaggaaatatgatttgtatctgatatatggccctaaggtcaattttgggaaaggatttcacagttcatgattgctttcataaattcctttcaattagtatgtgaatcttatagtatcttatactcttgttatagggtctattgaagccgccctccttccaaaggagaaaagcaaattactttaccaggagaaattctaaaata

SEQ ID NO: 420398 - DNA, 302 bp, Homo Sapiens
tgacgtgtggactgtcagttcagccacaaattcacaaaccatatatacttctttcctctcatgtactaagcacaataaattttactcaataagttgtaatctcatagattgttatattaaaaaccaagcgaaattttaagataaaacatgattgcagataaatttgacatttttcattgagaagctgcaggctacactctcaagactctctcaaagccatcaagcactgatgtatacttcctcctctaggaggcgtactttgggaaatcataaactcaaattccacactcatacctcagttc

SEQ ID NO: 420399 - DNA, 173 bp, Homo Sapiens
ttaacatacaaatcttgagcatttgagatagtggatatctttctaaagtggaaaccctcccccacgaccatctttttaaacacagtaaagcactggcataccaacgcaggagcagtaggagtggtctgtctggggtgcaaacaataagagggtagtgtgtagagaatttaaag

SEQ ID NO: 420400 - DNA, 383 bp, Homo Sapiens
  misc_feature (155)..(295): n is a, c, g, or t
cccatcgagctcggtacctggtgtatcgccggagaaaggaatggtaagggggccacggagggtctctttgggacacgctgtagagagagacattgggagtgggagggggagctggatctgcaggcctgatgctcgtgagaggggtcagagttagnnnnnnnnnnnnnnnnnnnnnnnnnnnnnnnnnnnnnnnnnnnnnnnnnnnnnnnnnnnnnnnnnnnnnnnnnnnnnnnnnnnnnnnnnnnnnnnnnnnnnnnnnnnnnnnnnnnnnnnnnnnnnnnnnnnnnnnnnnnnngagtccgtacctgactatagttcattctagtactaaagcaagaaacgagagacgcagagaggcgaagagcgtgtgccatgtgcaggag

SEQ ID NO: 420401 - DNA, 291 bp, Homo Sapiens
tttatcagtgcctttcctcagagtacattgagacagcggagctggccagctggcacttctgacactccatgacacagagggaaccccatccaactccgcttttcatccatctatttttgaatccttttaacactttatgagagagaaagaagaacagaacaggcaggcaggctgtgtttaaccccacaacaccaccatagagcctaaaagcttgggagtaaatacaatttctttggcaccttgtaataaaacatgaacaatgagtttctcaccatgttattagtctctgga

SEQ ID NO: 420402 - DNA, 214 bp, Homo Sapiens
  misc_feature (72)..(126): n is a, c, g, or t
aaaagtatacagatattacacaatggaatacatttagcagtgcaaaagaacagggtaataatacaagctagnnnnnnnnnnnnnnnnnnnnnnnnnnnnnnnnnnnnnnnnnnnnnnnnnnnnnnntgtatgaggctacagggaagggaaatcagaaggaaaatgcttaatgactagagtgttttctctttactttgaagtgatggaagcattt

SEQ ID NO: 420403 - DNA, 417 bp, Homo Sapiens
cggttctccaggatttttcctatggccttgatcccagctgcaccacctctgtcgcagccccatctccgggcctggaaagaacccaggtgcctcggggcccagcaggaaggggccaggacaaagagttgtttaactgggcaggctggtgaaggagagtgaagagggtgtcgcaggcggaaaggtcattcatcgcccaaggcttgtgcagggaaaggcagggctgagccccgaggaagagatcctgaaagtcagaggtcagtggcggcaaatcctccaccgccatctctgggaccttggagcctggaagctccaggacttataaatactgtcacctagtgttcacttaggcaactgcagacactctccctgtccagcctggtttcttgccaacatagagcaaaacacctactgagtgcc

SEQ ID NO: 420404 - DNA, 396 bp, Homo Sapiens
agagtatttcctggtccatcataatccacccccaaactctccatccaggtcactccttcaagacaaggatccatgagaatgtatttcgaaaggacaagggaataatgatggagaacagcgatacgtcaaacactctattgtccaactgcattctcacaacggttctacgaaagtgtactgtctccatttgacagattaataaactgagagaactggagtgacgtgctcactttcacatgagtactttggccaatttacttttgaactcaagtccacctgccacctaagcttctctcttctcctccaccagggaaagccacccattagatgccttagttagattatggttgaatgaggatagtggctccttgcaagaccatgagagtgacagccaac

SEQ ID NO: 420405 - DNA, 314 bp, Homo Sapiens
  misc_feature (41)..(212): n is a, c, g, or t
taaggagtctatacaggtaggattagaaatagagatgggannnnnnnnnnnnnnnnnnnnnnnnnnnnnnnnnnnnnnnnnnnnnnnnnnnnnnnnnnnnnnnnnnnnnnnnnnnnnnnnnnnnnnnnnnnnnnnnnnnnnnnnnnnnnnnnnnnnnnnnnnnnnnnnnnnnnnnnnnnnnnnnnnnnnnnnnnnnnnnnnnnnnnnnnnnncaaaccaacaaaactcccaggtaagtcttttgtaactcttcctctgtccccaattcaacatgctgccctccacccctaagcctttcatcgatcggggtaccg

SEQ ID NO: 420406 - DNA, 260 bp, Homo Sapiens
aatacaggagtgattcccaataagaggagggcatcttgtaaacttccttcatgaactttaatctgcctccttttttcttgatcttcattgtaccttttacttaaaatcacatttagattggtgactctttttcagaactgatgtgtatcattggtaccaattgtgacaatagataccttgctcccaagttggggcacaccctagtctctctttcccttaacgttcatttatttttctgtactccatagcctttcatcgat

SEQ ID NO: 420407 - DNA, 339 bp, Homo Sapiens
gtccgcatagtaacgacacagggagggaacttgatatcccctaataaagtcaatactaagctagtagatggagaactctacgaactaaactgatttacaccacagaattctgtaaaggcttaggattcagcagtacttggttgagacactcttatcttatgcagtgattatctgttcatatttgagaattgagaactctcaggggaacttaagccagaccatgaccagagatgctgttcagcttaatttcacctgaaacttccagctatcaataatagtggtaatactgttctttctttacacagctagatgtgtgctcgctactcagttatcatattt

SEQ ID NO: 420408 - DNA, 187 bp, Homo Sapiens
ttccatctcttcgacaatgtgataaataattatctgtaagatacggtaacaatgactgaaatctgccaaaaaatacaggatctaaattctttctgatttaatactgaacaagaatattttagactagaaatacttgtagccatcttgcaatccaaaaatataaagcttatccccagtgtggagagag

SEQ ID NO: 420409 - DNA, 139 bp, Homo Sapiens
ttagaggatcccgggtctgactgtgacttccttctggctcttccaaacaccatgagatatattctggatctggagtgacctttgtcacaaatcgagataaagttaaaatgtgtattatttaaagccagtgtggagagag

SEQ ID NO: 420410 - DNA, 224 bp, Homo Sapiens
tctctccacacggacccatcttatctgccgtcccttctgttctaatagtagaggaactatcccttctatcctaggacagttattccattccatgctctgggactctattacctgcagtctagctaggaatattatattaatgattattccttttgtttgtggacattcaacatctctccctctcaattatacatttcccattactttttaaactggccagtgtg

SEQ ID NO: 420411 - DNA, 417 bp, Homo Sapiens
ttatcgtaagctaagaagaaaagaaactcagtgcgtcgactacatatagcattcatttgcatatccatgcatatacacacacaccttattttacattaaatctgtctccatactatttatatttatacccatattgctgagtccaaatatctggccatttttgaattccatcaagtatccttatagaaaagtattcttaagaagttatacttggtaagactttgcaacaaagctgaattatggtggaaatcctatacaaatgctcaatctttccagcagcaataaattacaatgtcagaaacataaggtgctgacctcccagtgtgaacaaagagtgtggggtgggtgaaagggatagaagagattgatttgatttagcaggtgttatggtggcacagggatctgcatgttaaataa

SEQ ID NO: 420412 - DNA, 399 bp, Homo Sapiens
gagcatattcagtgtttccaacgtagaggcgattatatagaaaataatggttcaatcactgtcagtcactgtcttatttcatgccatctcgtacagtgacatccattatgcattttcacaaagtaatattagattttatttcttaactaacttattttaaaaactgtaggcaattctcatcaaatgtgtcatattaatatgcaaaggaacagttgtccattgagtcaaaatgttagagtcaaaacaccctgttttaccaagacctgcttgtacacataataggaatctcaaactcaacataaacctatcttcccttctgtgttctatgtcttatggcatgacatggccttcctttcctcagttatctaaataagaatcatacatatattagttcattcc

SEQ ID NO: 420413 - DNA, 381 bp, Homo Sapiens
cactaattccattaccttctagcttccaactatgttattaaagtagacaatcttaagataattaaacaactttacaaattattcttctatatgatcttttgcctctaacctgctcactttacaagggaactgaagctcaagcaggcaaatgccttgtttaaagatatacagctagaaaggagcacagcccatgttatgtaaacaggacaatatctgatgcaagcagtacttctttacatgacagcagatgtcactataagcaaatacctgaattcacttaagctgtcaaatatcaagaactgatgcagggctgaacacaggaacagtaagaccctaagagatgccacatcatcgctatcttgcacagtaagatagagatgt

SEQ ID NO: 420414 - DNA, 319 bp, Homo Sapiens
tagccggacctctctccacactggctataatgacaccgtcccttacaaaaactacctctggaattagttccagtaaacagagtgtatgggaggggggagagtaaatgtgaccaggaattcctcattgcttttccaggcaaaaaagttcccctttgattcacctcagatctcaaatggtttttcacattcaaaaacgtgattttaaagcaatgcctatatctctaagatgataattggcttatactgcagttccttattatggtcctaattagtgtgcaagtttctgggtatcaaatcttagtacccagtgtggagagag

SEQ ID NO: 420415 - DNA, 329 bp, Homo Sapiens
atcagccgtacctctctcccactggcatggtacactcaatgcttgggtgagaacttggggaacaaatgcctactgccctgaggacagcatagcttgatatgttttgataacttaattcctccagcaacaatccccgctcccactccatctaatcaggtcccacatccctgcgattctttcttgcaagtagcttccaatctatgtcttattgactattccttccctggataagactttcgacaacagcctctgccttcagtctcttcctgtccaattcatcctatacacatctaattgtgactccctactggccagcccatcccaaatag

SEQ ID NO: 420416 - DNA, 724 bp, Homo Sapiens
  misc_feature (306)..(673): n is a, c, g, or t
atctactccacactggggaaaaatctatgcactagaagtaagccctttttcagttttggttctctgctgcctttgactttccagatcatgctgatttacttgaaataaattctataagccacatgtcaaaagggctgcaaggttttctcctgtcagacattcgtttttaccatctctcttgtaaacataagtgttaagcacagattttagagttaaatggaccgaattcagtcccagcttggtcatttaccaactatctgaccatttcaagttaaaatgagaatagtgctacaagcataccccttnnnnnnnnnnnnnnnnnnnnnnnnnnnnnnnnnnnnnnnnnnnnnnnnnnnnnnnnnnnnnnnnnnnnnnnnnnnnnnnnnnnnnnnnnnnnnnnnnnnnnnnnnnnnnnnnnnnnnnnnnnnnnnnnnnnnnnnnnnnnnnnnnnnnnnnnnnnnnnnnnnnnnnnnnnnnnnnnnnnnnnnnnnnnnnnnnnnnnnnnnnnnnnnnnnnnnnnnnnnnnnnnnnnnnnnnnnnnnnnnnnnnnnnnnnnnnnnnnnnnnnnnnnnnnnnnnnnnnnnnnnnnnnnnnnnnnnnnnnnnnnnnnnnnnnnnnnnnnnnnnnnnnnnnnnnnnnnnnnnnnnnnnnnnnnnnnnnnnnnnnnnnnnnnaataggcagtgggagaaggggatctctgagtgactgaggatcagctgagca

SEQ ID NO: 420417 - DNA, 162 bp, Homo Sapiens
aaaatactcagctcggaccatactggaagcatgcagcaagtaaaataaacctgaaagagcactgggttcaagcccacgttccgtccatcccagagggccctcgagcaaggcctcctgcccaatcacatgtttttatcataatagattcttccagtgtggaga

SEQ ID NO: 420418 - DNA, 135 bp, Homo Sapiens
tgatagctggtacctctctccacactggatactccagctgcctccattgtcttattgtttttctctgtttacaagataataaaagctcattgttttgaacccaatgatacggaatgctatcaagaaagaaaggaa

SEQ ID NO: 420419 - DNA, 141 bp, Homo Sapiens
ccgtctctcacactgggtgaactcaaatcactgtaacaaatgcttaatacatacacacacatatcccatatacgttttcctttatccatccttggggtttcatttttctaaaccttatgtgatcctgaaaaaaatattaca

SEQ ID NO: 420420 - DNA, 149 bp, Homo Sapiens
atagggattgcattatgtggtgaatgctaggaggagcacactggaagcatgtaatgagtgtgacatgttgagtttgaagtctgttacacagctgggtggagaggtccagcaataagcagttaagaaaactgggccagtgtggagacgag

SEQ ID NO: 420421 - DNA, 388 bp, Homo Sapiens
tcggctcggtcctctctccactggattgctcttctttacttatgcaaatttctgcagccagcttctatatctccccagaaagtgggtttttcttttctactacagggccaggctgcaaattttccaaacttttacactcttattcccttttaaatattagttccagtttcagataatctttttgttcacacatatgagcatgcacgattagaagcagccaggccatatcttgaatgctttgctgcttagaaatttcttcctccagaagaaatcatctccctcaagttcaaagttcaacagattcctaaagcaggagcacagtgctgccagtctctttgctaaagcatagcaagagtgacctttactccatttcccagtgtggagagag

SEQ ID NO: 420422 - DNA, 165 bp, Homo Sapiens
tatacactgagcaggcactttgcgatgcaaatgacatgatatccccagtaccatagacacagagtggtacccagaaaaatattatgacaattactgtgagagggaaaaaagttccttgggagtgggaagtgattactttttcttaggtggttgagaaaggactca

SEQ ID NO: 420423 - DNA, 138 bp, Homo Sapiens
acaccgaagagtgaggaccacagacacactatttctaccccccaagctgtcaaacaactcataaatctgtcagtcttgtactacatacctgtgcctaaaagagatgcgccacgcgcactcagattgtgtcccatcaag

SEQ ID NO: 420424 - DNA, 133 bp, Homo Sapiens
cacaatttgagacaacaaagccatacttattcagcaatggctttagtttatagaagaagacaatttctaaatgagtggtatgatttggaatataaatgctgtacactcaagatgacttcagcctcttttaaca

SEQ ID NO: 420425 - DNA, 408 bp, Homo Sapiens
ggtacgattctttgactagtggtcttacttaatttacacaccaagtccataaggtatgagttgtccccattgtctaggaaagcaatcacagaggttaggtatgttctgtggccatggccagaaaaggagatagctgagatttgaagagacttgtgtctaaccctagtcatgctcttacaccactccaaaacctggcatactgaaggacatttgtaagcatctagccttggtttaaattgaagctctattggtttgccctttagaaaaaatcggaaaatttccatcttcagaatagaacacttcaatcgagctagtggcaaaacttgtcatcacgatcctaatgtgtgtcaagctcctgggactagaaactctcttctgcccgctgatagaactttgatttcctgtttg

SEQ ID NO: 420426 - DNA, 331 bp, Homo Sapiens
  misc_feature (103)..(201): n is a, c, g, or t
tctctccacactggaggtgaacgatccgagcatggacctgaacaagttttcttcagaactttcagaacgctctgacttacgtgctgcaaagacctatctgaannnnnnnnnnnnnnnnnnnnnnnnnnnnnnnnnnnnnnnnnnnnnnnnnnnnnnnnnnnnnnnnnnnnnnnnnnnnnnnnnnnnnnnnnnnnnnnnnnncagccttaaaaaacccaggaaaacaggaaagaatttattagccaatttaggctaatactgggagcttactctgggattatccaatttgatttgtatcaccttgtccatctgatggttccagagctgcagc

SEQ ID NO: 420427 - DNA, 113 bp, Homo Sapiens
tactgactacgatgggcctatcctatacactgatgtcttgtaacacgatggctacctgcagacagaggcacatgggggaaggcatataataatgacggccagtgtggcgagag

SEQ ID NO: 420428 - DNA, 144 bp, Homo Sapiens
ttacaaaatgagctgtgtatttacaaatataacacaacaatttaacttttccttagaatacaaaaagtcatgcatggtctggggaactatatgcttttccatttttaagtcaggactgcaatactgattccagtgtggagagag

SEQ ID NO: 420429 - DNA, 177 bp, Homo Sapiens
tatcttagaacaagctcagagagcaaggggactgacttagtacaacctcatgatctgtgggcatattttaactgtaatcttcaggaatgacttttctcctgaaagtaggaattctctttctgctgttaagtgacagcatgtgctggagacattggagaaattacccagtcatgctta

SEQ ID NO: 420430 - DNA, 426 bp, Homo Sapiens
tctctccacactgggaaactgggggagcagaagattttcctgaggctcttatctcaataaaggcaattggtaactttgctaatacatcctttatctatttctatattcattcttcttggggaatgcctgctagcaaatgtcatttggaaggtaaagataaaagctttcagagagtacagttgctggctctgaggaggttcctccagcacctgtgtataagcttcacaaggaattccttcttgttcacactctatgtagacggttccaggctgtgccctgctccacagtgcttctgactcagaacccagggtgaaagatgcacgctaacctcagacatgctcagacatggataaatcaagtttactcacttttcatttggtcaaagttaatggggcaaatatatttttctccacactggcattatga

SEQ ID NO: 420431 - DNA, 140 bp, Homo Sapiens
tctctccacactggggatcctggctactaagtctataagatctgaaggggatggatgcaactgatgcttctatgtatctaaatttaaacattattggtttaatgttgaggcttattccttcattatagctatttatgcca

SEQ ID NO: 420432 - DNA, 269 bp, Homo Sapiens
cttagaggatcccacactggtacagtggatactcttggctggcagtgacgagatttgcccgggaaggaaaaggaatatcagagctatatctctgaggctctgatactaccaaatgaaagttactaccaaatgaggtctggcactcagagccctgcttgggttgacatcacagagccatttattcacagaagctttccagccctgcctgtcctaactgggagggaaaatggggagaaggtagccagtgtggagagagggtgtggagagag

SEQ ID NO: 420433 - DNA, 139 bp, Homo Sapiens
gaagggtctgagtacgatacttccgcatacacaacatatactcagaatcgggacagcaccatgaacatactcctctcgtttcatgattgttcctgacagcgcagcaagtcacctgacatgcctgacaaatcctcatcct

SEQ ID NO: 420434 - DNA, 162 bp, Homo Sapiens
gcgtagtttctaccttagtttctggatgagtcaaaggccaggaaggcagttatggagagctcctgcagctccagctgccccacagaaaagcctgcaaggagtacttccaggcacaggcccgtctcccacccatatatccatttgctaagcacagggaggctc

SEQ ID NO: 420435 - DNA, 242 bp, Homo Sapiens
ggctaagaagggtatccttgaaatacgaataactgctacatgaaatgctaatacttttaaaactgaaaaagctgtgaatgtgtatagggaaaaacaaagcttttgaccaaagttcaaggccaagctttgctcctaattgggctgtcatcaatttagcctgggtgggaagcattcaaatggagacagggggatgaggtgagtacacacaacagggaaaaatgttgcactgaccaagttgcgtg

SEQ ID NO: 420436 - DNA, 182 bp, Homo Sapiens
ctctcagaggatctcctcacacgcacttgggtaaaacgtgggcatttttcagttagacatttacctaattttaattgaaaatacaatgaccctagaacatcctgcccatgattctgcccaagtttatgcaaacagaaaaaatttatttttggaaaaaacctggagtcttaaacttgaaattc

SEQ ID NO: 420437 - DNA, 568 bp, Homo Sapiens
  misc_feature (260)..(290): n is a, c, g, or t
  misc_feature (353)..(405): n is a, c, g, or t
  misc_feature (417)..(470): n is a, c, g, or t
tacacacacatgggcaatggagtagccactgcaaatctccagtgcgagctggtggggagaagtgtcatgagctgaatggccagtggtctcctgagtgaaaaaaataaatcttagagttttatttcggcctcatttagttattaaaatcatgggtttctttgtcttggtttccccttaactatcacagcgttaaaactcacccttcagagtcaattcacatcaataagagactcaaaatcttcagttccttcatgttcatnnnnnnnnnnnnnnnnnnnnnnnnnnnnnnngatatacatccatgcatatggatgtatggatctctgggttcccccccacactctgggttgacnnnnnnnnnnnnnnnnnnnnnnnnnnnnnnnnnnnnnnnnnnnnnnnnnnnnnggcatagatatnnnnnnnnnnnnnnnnnnnnnnnnnnnnnnnnnnnnnnnnnnnnnnnnnnnnnnggccaatggcagtagccactgcaaatcttcagtgcatctttctggggggctgcagaggtattaattacacctctaacctgagcaatctacttctccag

SEQ ID NO: 420438 - DNA, 144 bp, Homo Sapiens
taacattctccatggctcttttaattcggatggcctttatgccatctctttcactcccttggagagcactgagtcttatatctgggacatcctcattcattttcctttatctgtgtcctagtcctgtgtgcgcttttcctaaca

SEQ ID NO: 420439 - DNA, 229 bp, Homo Sapiens
gtgaatattgtcatcagaaaggcaactgatggtattgatgtcacaaagctcagtttcccatcccgtggaggagtattgtccttccctgccccattgctatcgggactggacaagagatttacccagctaataaaacgtaaatggagatgaggcatgttacttctgggtagaagctatagagccagctcgtagctgatcctgttcccttttccctcaactacaatatcag

SEQ ID NO: 420440 - DNA, 151 bp, Homo Sapiens
acagcaaaagacacactattgtgctcagagattaggtagcatataagtaaaatgctagagttacggttctgggtacattcaatcgtgttgatgctcagagacctctattggacccaaaggattactagtcactcgtgattattcctctatc

SEQ ID NO: 420441 - DNA, 269 bp, Homo Sapiens
ttttgtaattggtttttcatgactttgttcccccaatagcctttcactaccacaagaagaatgaccctatattttattccaagacagtcctggaccattgggccagtccagaaggaactgcctaggtgatagatgtgctctcaggagagcccttgtccgcgcagagccatagttagcggtagtcagacaccagcagccaggacagccagtgtatgacatgtctctcacaggctcacagggtacaagtcactggatctcgtggtactcga

SEQ ID NO: 420442 - DNA, 282 bp, Homo Sapiens
catctagaatagcataacaattcctgcagaggaagaatatagccatcagaattaaagtgctcctgtttaattagataggttggtgcataccaagaaagctaaggtgacattcactatgtaaaaataacctaagcagagttggctgcacctgccctaacgtgctaccataacaggaaatggtgctttttattgtccaataacattttcttcaagaaaaatgtatttcaattatgttagatgtcttattttttcatcagattataatgaaaggagggatgagca

SEQ ID NO: 420443 - DNA, 673 bp, Homo Sapiens
cttatgctcatccctccttatgctcatccctccttatgtcatccctccttctcatcatcaccatagttgcccgtgcacaactctagtatcaaacacaacttctttagtgttgcactggcaataatgtagtcaagttagtaacacagaaacaacttttgtggtgctaaacagaaaaggtcttctttgcaccaaataaaaaataaacagtaaaagcatccagatgggccaggggtttgttcatgtacttacagaacatctaggttctcatcgatattttctgttctggctcattgccttcctggtcagacttgggtttgggaaatgtctctattcagcttcatctcttgaggccatcgggaggcataagacttgggagagaaaatgccattggtccagggggtgtctccagatgatcttcccggaaagccatgaccaattctgaatgtctctctaggagtaaatacatgaaataacacagctgcataaatatttcacttatcgtatgcagcttcagcaggattaattatgctctaaaattagacgtgtaaagagcacagtgctgagcagtacctaattattcatcctctagaatggagtgttatctcttgttacacagtagcttcgggcacgattatgagtctaatgagtgtcacagtataaaaatttccaatga

SEQ ID NO: 420444 - DNA, 677 bp, Homo Sapiens
gcacagtcctccttaccaggggaaagcaccaatccattcatgagggatctgccctcatgacccaaacacctcccactagcctccaccttcaacactggggattctatttcatcatgagatttggagaggacaaatattcaaaccatatcaagcaggtctctagaacttatcatcttgtataataaatattatatccattgagcaaccattcctacttctcccttgctccagcccctggtaatcacaattctattcttggcttccatgcatttgaccattttagatatcagatgtaagtggaatcatgtagcgatggtccttctgtgacacgtagcataatgtcctccaggtccatccatgttgtcacaaatggaaataaatgtggtgaaaaatgtaaaagagggtaatggcatataaaatggtgagaagtgagtgatgtttagataagcgtgattaaaaatggcctctgagaaagtcatccttgatcagagacattaattaagtatgggaaataaatgcatgaagatctggggtagagttttcaaggaaaatgaaacaacgtgcaagacatctcaggctggaaagaattgggcacatttaagaaattgctagaagggtgatgtgtctagtgtggcatgaatgtgggagacagggcagcaagtctacacttctgaaat

SEQ ID NO: 420445 - DNA, 309 bp, Homo Sapiens
  misc_feature (97)..(160): n is a, c, g, or t
atcgttatgaccatccacaccttatgctcatctctccttatgacatccctccttaggcacatcactacacttatgctacatccctccttatgctcannnnnnnnnnnnnnnnnnnnnnnnnnnnnnnnnnnnnnnnnnnnnnnnnnnnnnnnnnnnnnnnccttatgctcactaccaccttcactcacagaccacaccttcgccaaaccattccacccaaataacgtcatcggcgatagaaatagaaacctggcgcaatagatatagatacgcaagagacagatgaaaaaattataaccaagcatcata

SEQ ID NO: 420446 - DNA, 271 bp, Homo Sapiens
cggacccatcctcctggtgatccggtgcagggctcattgctgtttgtaatgcagcatcttcaacatccatggagccaccccacttactatcttcataaaccaacatagatgaccaccattgtttcctagcaatcaacttactatgatttatgtttcagactattttgtctttcctgtatttttttgttctctccttgcgtttatttaacccctcatcatttgcaataaggagggatgagcataaggagggatgagcataaggagggatgag

SEQ ID NO: 420447 - DNA, 277 bp, Homo Sapiens
tcgaccccttatgctcatccctcctttgagaaggccaggcaccagagcagaatttacaatccaccacaggaagcaagaccctcatctcatctcctgtgtttgcaacttcctccaactccaccccagctgggacagcctcaaagaccccagtcctcctgacgccagaactctgaggagttctattgtttaggtggttttcggttttgattatttaatacagtcatttctggttttatattcacagctttggtcagctgggataaggagggatgagcat

SEQ ID NO: 420448 - DNA, 150 bp, Homo Sapiens
cttccttgtgaatagtaaatcacactctagtgaatcttggtcaaggttcttgccctattttgcagtgttgactggctgcaactgtttaggcctgtcactgtgtttaaaaaacatttctaaggtgttaactggtcttgctggtactaaaat

SEQ ID NO: 420449 - DNA, 519 bp, Homo Sapiens
ccttaacatatatagtattgacttaacctacttgattcaccatttgttgttataaaatattgccttaattaaatatttcaaatcttaaaggtttttccattatatgaaattttttaaggaatgcttttcaaaaatgaagactgcagtaccttttgtgatttggtacatataaccaaatcgccctttttattgtgtagttacagttgataatgccacctgaaatacatgaatgtgccagtttcattgcagttttaccatagtggagtgttaaagcagcaacaatctaattatttaaaatcctagtggtagttggtaatgtcatcatatctttgatagcatagctggaagtacaaggaattgctactgtctttgagtaaacaaaactctaactttgaatgagccgtaaaaggatagtctctaacccaagagagaacaaataaccccatctccctatatcctgaagcacagctaaaacatggctggagtatttgcaagaaactaataaggagggatgagcat

SEQ ID NO: 420450 - DNA, 132 bp, Homo Sapiens
tcctgcacatcctccttctaagctttcctcatggatgtcatttaccaatcccctatcaatgaccaatcacagctccacattcgttatatagttttggctcttgattcacaaagttcctccatcgctactggg

SEQ ID NO: 420451 - DNA, 311 bp, Homo Sapiens
  misc_feature (143)..(212): n is a, c, g, or t
gcgtaccatgccatcctccttatgtttcattgaacaaaacatgctggctacgagtggctggtaaataaagcctggttgaatttccagcccatgctggacaccctggggttctcctgcactgaacttatcacattggaatttgnnnnnnnnnnnnnnnnnnnnnnnnnnnnnnnnnnnnnnnnnnnnnnnnnnnnnnnnnnnnnnnnnnnnnntatgatgcctgcctcagagtgacaaatatttttcaaataatgattaaatacatgcacttatgattgattcatggacatatgattacatgaaggagggat

SEQ ID NO: 420452 - DNA, 157 bp, Homo Sapiens
gtcaccggaccatgctcatccctccttagtggtgcttctaactttgtgaatacataaaatttaaaaggcaaaatgcaaagacagctaaaaatggaaatctaggtgagccccgtattttagatagtggaagacagaaaaggagctcacagaagagata

SEQ ID NO: 420453 - DNA, 287 bp, Homo Sapiens
  misc_feature (100)..(202): n is a, c, g, or t
  misc_feature (205)..(247): n is a, c, g, or t
cgtgtttatctcaagagtctagtatcccaatgtaaaacacaactcacaacagtcctcatcctaattacctccaaacactgatatgagaaatggataagtnnnnnnnnnnnnnnnnnnnnnnnnnnnnnnnnnnnnnnnnnnnnnnnnnnnnnnnnnnnnnnnnnnnnnnnnnnnnnnnnnnnnnnnnnnnnnnnnnnnnnnnggnnnnnnnnnnnnnnnnnnnnnnnnnnnnnnnnnnnnnnnnnnntcacaggcatacgggggatcctctacgacgtcgaccctgc

SEQ ID NO: 420454 - DNA, 413 bp, Homo Sapiens
  misc_feature (334)..(353): n is a, c, g, or t
taggcggaccatcacctccttacaattttaattaatcctgtgtacatgtctgggtttttgtatgtacttacacttgcttcacataatgttgccttccctcacttaggcaggtaaggcttctcctgagtgaaccattcctcttcacatgccacctgaaaagggactgtgcttattctgtttcttccctaggaacgtccagccccatcactttatcttcaaattgacttcccttttacccaactcaaatgtcacctcctcctgaattcatccctaaccacccatcttcaaataacctttcatgactttaagcccaatgacacattcatctctaccnnnnnnnnnnnnnnnnnnnnaaaaaacggggcccctgtttgtgccccaggttggattcaaggaggcctgagggggatccc

SEQ ID NO: 420455 - DNA, 285 bp, Homo Sapiens
taggccggaccccttatgctcatccctccttacattttcacccactgaactggcaaatgttgtaactgtattaccttatgaagcaagaatgtagttgaaaagattcaacacagctgttagtagaattggtacctcttttctgatgcctgtctggtggacaatcaggcagtataaatcgaaagcttgaaactagttcttgccattggagtcataattccacttttcagaattttatattgagggaataatcagagatgtaaataaagatttttgtacaaggaggga

SEQ ID NO: 420456 - DNA, 100 bp, Homo Sapiens
gtctagaggatcccaaggctcccaacaagatactcagcctggcgaggcttacaaatgagagaaatgaagcatacttgttaaaataccagaccttcagggg

SEQ ID NO: 420457 - DNA, 299 bp, Homo Sapiens
  misc_feature (167)..(181): n is a, c, g, or t
tgactctcgaggatcccctcccaacaagattgtgtgcggcacctaaaatgttgctagtgaaaggaaaaagggtgacagtttattcggcatctactatgtaatcaactctgtgctacatgttttcacacttcacatgtgtttgtttttaaggctcttctttcttatcnnnnnnnnnnnnnnngggaaggttccgcttggtcttctaggctatagggcagtagtgcaatcagggcctcacggcagccttcaacctccggagcctcaggggatcggggacaccgagctcagaatcgtaatca

SEQ ID NO: 420458 - DNA, 394 bp, Homo Sapiens
  misc_feature (311)..(340): n is a, c, g, or t
tctctccacactggcccagtaagtataattagctgcagctgctcctgcagaacatagtgagacttaccaccattgatacaatcattaaagctgcaagcagcatattctctggagtttgtgttacccttgtgtaactttaggcttttttcagctaactgtgtcagcttctttagctgggcccaggtcggcggcttcgcttttttggtggatggcaactttttctgtaaggttgtaggtacccaaactggaagctgattttctcctggtgaaacacaagcaaaacctctcccccacgttatcaccttctctannnnnnnnnnnnnnnnnnnnnnnnnnnnnnaccaaatcagtttttcctcatgtgggctgttctttttaccagtgtaggagagag

SEQ ID NO: 420459 - DNA, 208 bp, Homo Sapiens
tctctccacactggctacagcagcaagtgtagttgctcacacagagtactaataatgtcattttacacttaaacagtattttcatgcacagaccactttcatataaatcaaaactgagctaaatcgttccaagctcttgagaaaacttgaggcttggaggggtgaagtacttcactcaaggctgtggctaggaccagtgtggagagag

SEQ ID NO: 420460 - DNA, 351 bp, Homo Sapiens
tccacactgggatgatctgtaggaattcaggatctgagttttttattttggcctttacctgcgatggaattgaatttgcatgtagaatggcagctggtgcctaggccgagggatcagagaagtcagcccactgtcaggtctggagaacgacgtctaggcaggtgatgaaattatggaaagaacaaatgtatgcgcaagggatggaggagggaaaacagatgagacacttttgcttctccccaggagcacagcctgcaccgtgaaatgtgctatttccacatattttcacactgaaaatccacggcccttccacctccagtgtcatgggctcgctctaattaattcagttca

SEQ ID NO: 420461 - DNA, 162 bp, Homo Sapiens
acacctggggaggtgatcggggagtgtgttagaggctgagctgggtgctttggcacacaggtaggtctcctaattgacagggggtgagtgtccgctatgcgcctagctgtgctccagcacacctagcagtggacttccagtgtggagagagccagtgtggag

SEQ ID NO: 420462 - DNA, 127 bp, Homo Sapiens
tagaatattgcatattaataattcataacacccaatctgtctgtggctcctcagattatagtctttcaagcaacttcttttgattagaccaaagactgattaaatcatggagactgggagaaaggca

SEQ ID NO: 420463 - DNA, 136 bp, Homo Sapiens
tctctccacactggtctggcccggttgaaagtctaactacatcttagtagtccttcatataatctatgatataccaggtggtattactagggtttaatagctctgggatattttgcccttctaaaatatatttcca

SEQ ID NO: 420464 - DNA, 137 bp, Homo Sapiens
aggtgactcagaggatcccctctctccacactggatgtgagagaattatatgtagaaaacaatatgtatttttagccaaatatatatttggtagtttacatatatatgacacagagtatcagagccatagaccattt

SEQ ID NO: 420465 - DNA, 189 bp, Homo Sapiens
tcaaaaatattttcctaagaaatgttattggcagtaagactatactatatactatagactacactgttattttggcgatacgactatactatatactatacgatttatacaatgaagcttatattctaacacctttccactggaaaatttaaacgccaaataaaaacttattggtattcaaaagatttg

SEQ ID NO: 420466 - DNA, 486 bp, Homo Sapiens
tctctccacactggctgggaaaagcaccatttaagaggaagaagactaaagacaggcaaagagactagaaaatacgaaaaaagataagactgaaaattatcaaggaagtcataatgcttggaaaactccattgctttcaatagatgcatatttaaattgacatctattaccaagacctcaaatagagtgggatgcagatgattcactgggctaacaaaatccagtttctttcacaagtcccaccttccaggttaatcagaatcctaggttaatcagaaaagtaatactccaaaatctcaaaaacctactgttactataggtataactgctctaagccaggggagatctaacctaggcaaatattctggaactttatagatgaggattatctattactcagagggtatatcatataaaacttcctaatatccaattagaaagcagcaactttaaaatacccagtgtggagagaggggtaccgagctc

SEQ ID NO: 420467 - DNA, 451 bp, Homo Sapiens
tctctccacactggtggttacactgcgtactgtgtcatgactaatcactggcatcgccaacagttccatttcaagcatcccacgctgtggtcatcacttcttctctctctagtcactccccttagcaccatcactccaaattggtaagttttcagcgactatcatcccccatttcattacttccctccttgaccagcttagcttctatggttccttctcataattattctcttgcacccatttccaaatcccattatgtactctcccagcactgtactactcttttgagaattaaaaagaaacaaatggcaactctagtaattttttcttactcttaacctgtgcctaaaaaaactaaacatgactggagaacaaaagaccaccaagttgacctgtgttcctttgtatttatatgaatatggctcacatgccagtgtggagaggggtaccg

SEQ ID NO: 420468 - DNA, 144 bp, Homo Sapiens
atgaacggaggggcgttggagggtgtgagatctaaaacaagagggatcaatttataggaagaggtctagaaccagaggaagttagtgaattctagaaccaaaagaatctggtagtcatagactatagagccagtgtggagagag

SEQ ID NO: 420469 - DNA, 662 bp, Homo Sapiens
  misc_feature (407)..(457): n is a, c, g, or t
  misc_feature (501)..(603): n is a, c, g, or t
actcgagactgggacacaggcagacgcaacatgtgcagtaatgtttaatttagatttgttattagagacaggattcaccatgtgtccaggctggtcccgaactccgggtctcaagcaatcctcctgcctggacagccaacatgctgagattacaggcatgagccaggcccccagccctgagcatatattggtacattcctttcctcatttgatcttcacatcaatcatctgaagcagagaacgtagttatccccattagacagctgcagggacgaaggcactgggaaggcaggtgctgcccagatcagagagcatcgctagcagagtcaggacttgaatcaagcatgtctgattctaaaacctacttgcctacccaccatgtgatgcccaggtcaattccacccaannnnnnnnnnnnnnnnnnnnnnnnnnnnnnnnnnnnnnnnnnnnnnnnnnngtggcacccaggtgaattgcccttggaaaaggctgagagaaatnnnnnnnnnnnnnnnnnnnnnnnnnnnnnnnnnnnnnnnnnnnnnnnnnnnnnnnnnnnnnnnnnnnnnnnnnnnnnnnnnnnnnnnnnnnnnnnnnnnnnnntcacattgcacgctagagtgtgagaccacggggaaaatgggcgacgtcccaaggctgat

SEQ ID NO: 420470 - DNA, 190 bp, Homo Sapiens
tggccggaccggataaactattgaggactggataaaataatgcatttttacttgttcctttcgtctgtttagacaaaaggctcattgtgctatgtgaacgctcaggtcttgtgtaacttgtgactttatatatgtacatatcggtcttgctagattaccttcatggcagttacttgagccagtgtggaga

SEQ ID NO: 420471 - DNA, 517 bp, Homo Sapiens
caatgtgcaggcgctcactaactaactggctaagggagctcactaactaactggctaagggagctcactaactaactggcaaggtgcgctcactaactaactggcaagggcgctcactaactaactggctcaggtagctcactacctaactggctcagggagctcactacctaactggctcagggagctcactaactaactggcaagggcgctcactaagtaactggcaagggcgctcactaactcaactggctaagggcgctcactaactaactggcaagggcgctcactacctaactggctacagggagctcactacactacactggctaagggagctcactaattacactggcacgggagcccactaactaacaggctaagggagctcactacctaactggctcagggagctcactacgtacctggctaagggcgctcactaactacctggctaagggagctcactaactacctggctcagggagctcactaactgccaacgcagctcactaac

SEQ ID NO: 420472 - DNA, 194 bp, Homo Sapiens
tccacactgggattcatgagacaaaggtatgtgtccggagcagagtttagagaagaagcttgtcagaatggaaggatctagagttaatatatatagtgtctagaatcctgcacggttatatactgagctacaagtgttggctgacataattattgtgattattatcaccacccaagaccagtgtgtgatgagag

SEQ ID NO: 420473 - DNA, 121 bp, Homo Sapiens
ctggccgtcgttttacacgggccgtcgtgtaacacgggccgtcgttaacacgggccgtcgtattacactggccgacgttttaacgggacgtcgtataaactggacgtcgtaaacactggcc

SEQ ID NO: 420474 - DNA, 226 bp, Homo Sapiens
gtgtgagcaccgtactggccaaaattacataagttatatattgtgttagtcttttgtgttgctatgaagaaatacctgaggctagatgtttaaagaaaagaagtttatttggctcacagttctgcaggctgtacagatagtatagggctgacatttgcttctggggagtcctcaggaagcttatcatggcggaaggccaaaggaagccagtctgtcacatggcaag

SEQ ID NO: 420475 - DNA, 140 bp, Homo Sapiens
tctcacactggggcaaaaagttgtgacactcacagtctccaatttaaaacttactaccaaattacaataataaagacagtgtggtgctggcttggggattggtttatagattagtggaattatagatttggtttatagat

SEQ ID NO: 420476 - DNA, 271 bp, Homo Sapiens
aacaaaacagaaagaatccttagacctgagagtggtcatctgggggctcagaccaccatgctggttcatgaggatgtaggctgcactccgcatcagcacaatgttaagtctatcttaaagcacattttcttttacacagttaattaaacaagtcagcatactgaatagttctcctactcgccaggaaaatcagagggcaagccttgaaagatagcaaacaacaaatgcagccacgtgctgttctcattctgtctgccagtgtggagagagg

SEQ ID NO: 420477 - DNA, 243 bp, Homo Sapiens
aatgttagaacgaatatcttcttatgctattgttacttatgtttcctccacctttgcaaaaagcatacgtcacttacttgaccttgacgtagacagcaacttgcaaatactttagtgatgaaacaaattgatgaaacgtcaaggctagtagagtcaacatgctgttctcaacgaagcaaagtcaattttctagcaaaggtggaggaaacataagtcacacatagcataagaatatattcttct

SEQ ID NO: 420478 - DNA, 358 bp, Homo Sapiens
ataacttctcagaaagaaacaaagcatagagatgaaaaatatggagaaacaaggtaatgaaagaagagcaatctaggaggtctaacatttgactaacaggagggcaggaagagagtacaaaggggaaggacatcatcaataaaataactttttaaagtactgagctgtaggaaatcagtttccaggatgataatgtccaccaagtgctcagtgtaaggtacgcaggcatatcattgcaaagattcctaacagtagagacaaaatccagtttctaaatagaaacaaaaaaggtcagaaaacagaggattacaaatcaaatgacttaagatttctcagcaacagtccagtgtggacagag

SEQ ID NO: 420479 - DNA, 229 bp, Homo Sapiens
ctactctgaggatcccagaacttgctcagatctcttaactgttgttgtctgttatgatatatttataggaacatgtggcagagtgtttctgtgagtttggtagcaaatacatattggatgtacttgcttagtcagttctgtgggccagaggacactcatggggagagatcaaggttactttttgcaggtggggcattttgtaactgaataaaacccagtgtggagagag

SEQ ID NO: 420480 - DNA, 454 bp, Homo Sapiens
tctctccacactggactccatccttacaatatagacctagtgcacccctaacttatcggatcctggggttgactcacaacctaatttccttggcaggaggtatttttcagacagtgtgacgtctgcctaataggtcacagctcccagcattgggaacatgaggacagctatgggctgagttgcccagggagttcgaaacgagcatgcggactgcagacatgttttgttcaaactgcatcatattggcccacactgtgtttaataaaattcaaattacccaccagcacataaatatcagatttcacctaaaaacgtggatattttcagcatgttgtaaaatctaaagatatagcaacacaagatccacactccttcatgacagcaattagccagagcaactgctcccttcagcctgagcatggcctcaccagtgtggagagaggggtaccgagct

SEQ ID NO: 420481 - DNA, 212 bp, Homo Sapiens
tctctccacactggcctgttacaaaaatgacctagaaatatttagtctaggtcctgtttacaagtgagaagattgaggtccaaaggcttatataaatgttttagtctggatgaaaaataaatgattaactctgaaacatgtatcttacatagagaacacagactcataaaacaaaagtaaattatatggccactttaccagtgtggagagag

SEQ ID NO: 420482 - DNA, 156 bp, Homo Sapiens
tgaagtaatctcagcaagtacgatatgtcatattaaagtcaagcaagttagacaagacctgagcgttcacatagcacaatgagccttatgtctaaaacaagacgaaaggaacaaagtaaaaatgcattataattatccagtcctcaatagttttct

SEQ ID NO: 420483 - DNA, 119 bp, Homo Sapiens
tctagaggatcccagccggagagatgtaactgagacactccccacacttctggctttcagcaacttgcactctttttctcctcctcttaatttatttaatgtatactgtgtgccaagta

SEQ ID NO: 420484 - DNA, 424 bp, Homo Sapiens
  misc_feature (356)..(368): n is a, c, g, or t
ggtgactctgaggatcccctccacactggggcgaaaaagaacttcctactttgagatatgaaagtaagatgttcatggttttggggctgcgtcataccatggaggagaaacggaaagttggggacatggaaacacctaaattcttagacagactcaaataccttctgaatcatggcagagacacatatcagaagggagaaaaccagacagagattaagcccactggaggagcagtctgtttgtagttaggccagagtgccatgtctaggtatcagagcatcactaggaaaatacaaagaaaacaaagacacagttgagactcagagccaggataaatgcaggagtgaatatttacnnnnnnnnnnnnncccctctcggacacaaagtccccccctgagcccgggcggcaaagaggaagagaccc

SEQ ID NO: 420485 - DNA, 144 bp, Homo Sapiens
ctctctccacactgggttctggagtaacactgggctagtgatggggaaattgttttcaccaggaaatcaggatgagcagctgaagtcttcgaggaaacgcagtgaaaacaggaagcagcttctgtcagaggccagctcctggcc

SEQ ID NO: 420486 - DNA, 414 bp, Homo Sapiens
gaggatccctctctccacactggagtgggtgttgtgactgaaggcaggagacaaagcaaatgaggcagagacagtgcctgctgctgaagtgctggtccatattctccacccgcatttgaatttgtcttttctctggctaactgcttttctgccctgatgaggagtcactcggggagactgaagctggaatttgtacaacctctttcagtccccttgattttaatcagaaatacacaattattcttttcctccaaatagagacactcaatccccattttaaattcaattattgtaattgcagcattcagaaaaatagcacattcattttctaataagagattgtggataccaaattactgcatatagtatgtcaaaacaggaaacttgagactggctaaccagtgtggagagcag

SEQ ID NO: 420487 - DNA, 131 bp, Homo Sapiens
ctcagatatggcagaatgtgatccaacagatttgagattagggtctcagctccccgggtgactgtacacagccacatttagggactgatgacctagagaactgggctgtgaaatgattgagatatctgtgg

SEQ ID NO: 420488 - DNA, 213 bp, Homo Sapiens
gaggatctcagacatctccctaaagatgacaaccagaaacaaaatgcagacctctggctcaagtaaagccattcccaccaagatttcttatttggtggccacacccatgtcagaagagcatttcaggtctgtggcatccacacccgaaacattaattgctgtgccctgtgcagctgtacattcacaatctctaactagccagtgtggagagag

SEQ ID NO: 420489 - DNA, 262 bp, Homo Sapiens
ctgcttgggaaatgatgaagacgttacctaaggcatccataagtgggattacagcggaaaagacagtgttccggcaatgatttggaagttttgataactagttggaggtaaagatgaataaagaggataaaaagaagagtcatttatgtcatgggtaactaattatatagagattcactttccttagaacgacgaaaatcacaggaactttggactagacggacgaccctgaaactgacgccggggactcctctagacgtcg

SEQ ID NO: 420490 - DNA, 130 bp, Homo Sapiens
tatgtgtatataggatactatatatcctattcgtactgccctctgagtagaaccctaatacagatttaggtcccaggagtggttctagaatattaaggatggagttatttccttggttttagagtctaat

SEQ ID NO: 420491 - DNA, 195 bp, Homo Sapiens
ctggccgtcgttttacactggccgtcgttttacactggccgtcgttttacactggccgtcgttttaaactggccgtcgttttacactggccgtcgttttacactgtccgtcgttaaacactggccgtcgtattacactggccgtcgttatacactgaccgtcattttaacactggccgtcgttaacactggccgt

SEQ ID NO: 420492 - DNA, 220 bp, Homo Sapiens
tgtcggcggacggccattcagtcataacgtagaaaagacttcattgacctgattaaattctcagaaccctcagttccttagggatgaaccaaatggctggtatcattgcttacaaagtatcttgaactcgatggagcttatgttaagaagtttatattttttacttttaccttttagttcaatttttccataaatttttgaagtccccacatacatcatc

SEQ ID NO: 420493 - DNA, 452 bp, Homo Sapiens
cgcagtattataaaaattcctctataaaatttcatcttgtcagatatggatgcctctgtaaaaatcatccttaagtatattctttatctaaacaactgagctatgccttctagcttcacactttgacaacatctgatgttcttatttaaatcatgtgtgaaagtgctgggttatgccaccttctgtttcacttagtcatcatcaattcatttgtgaagcccctttggttatttgtctatagctgggagaatgtcttgtaaataagaacattagggtgcctttgagttttcggcacttttctcattctccacaaagatttaaaaagtgaacatgaaccctgaaatacttaaatgcaataattagtttacatgtccatctctctacaagctctttgaagaacagaactacctaattcaaatatcagtaatttaaaacatttcttgggacatact

SEQ ID NO: 420494 - DNA, 469 bp, Homo Sapiens
agggaaaggataggctgagggttaaataatttgtccggatcatgcaggtagtaaaatggcaaaggaatgaaggaaatgaagttcaggcttttagaggattgttttcttcccattctcgtgtcctgcttcctccatgtctgttagatggtggccgtctttgtccagacagtcatgaggccttggagaggggcttttcgctcagccacctgtgctctggggaaatacacgtctcctggtcatgccaccctctccaatgctgtccacagcaaactgacaggctctcctttatgttttcagtagctctagcccttgtctcacagcttttctttattctcagtctctgccctcatcccgggtgactcaatattagcatggatgacccttacagtcttagtctctctttccctcagcttcccccagcccctaaatcatcgtgttcattattctttggaaacccactctttgttcc

SEQ ID NO: 420495 - DNA, 174 bp, Homo Sapiens
aacagcccggaccttctttgatgtcatggtacgaaatataacttgaactctaaatagctgttgtcttatctaatgctgatgataaaaaattttctcaacataaaagaagatatactataaaaattgacttaattttctgaagtatgtatatagtttagcaggcgaactgaaatg

SEQ ID NO: 420496 - DNA, 440 bp, Homo Sapiens
tagtattgctccctttctgcacttcatatacactttcccttagccttgaagttaatgtctgctatcgctctaccaaccttggctttagttttcaacttagatgtcagttcctgtgaaagatcttttctgtttttccaatatcaattagatctacctgacataatttcatggcattctgtacttctataacactgtttcttattttacttgcataaaataggtacaaacacatataaagttgtttaaaatctatgaagcagactacaacctccaagaggacagtattatattcttaaaattcaggttgcttacataaagtaaacaaaggagcaaaacttgtgctagatttgagagccaatctaacccttttcggaatacatccgagttctgttatagtctgatatcataggtaaaatcaagtgactattgcagaaatgtca

SEQ ID NO: 420497 - DNA, 445 bp, Homo Sapiens
ggcaatacagtttgtattcattttcaaaacaataaatgaaaatttaaaacagaagttatagaacttgggcttaaattataataaatggaaaagttgatcaagttcattttcatagtccatctgcacaattagttcattaaaaatatatattgatatcaactattttctaagcactcaagagaaaaaaagatgaataataacattgttgctgcccaaacttataatctagatggtataaacaactaatacaaacacatatgaacagttgtaaactattaaatgtatgaaagtaaaagggacatgatgaaatcagaaatttatgggtcttgagaaatttgatagtcaaaatttttacatcaattacgcagaactgctgctaaaattatcagttattctatattagccaaatagatgacttcagttttctttttgggctctcttctca

SEQ ID NO: 420498 - DNA, 169 bp, Homo Sapiens
acattcagttctgatgtaaaatacaaaatgtttgcagataaggtgcactgagtttgcatcaggaacaaggcattgagcttccttacaacacagtaaacactcaaaatttcaaagtcccctttcaagtgataaaaacttctcgtgagtacttaagttgtcagtaaatacc

SEQ ID NO: 420499 - DNA, 502 bp, Homo Sapiens
  misc_feature (282)..(331): n is a, c, g, or t
gcggtccggcaatttcagtcctatcactttgttgccctcaccgtactgttgcaccacactggacacaagtgtgctcttgccccgaggcctttgcagctgtgcacccatctgcctagatccacgtaatgcactcagttcatttaggcctctgttcatgtccccacctcacagaggaaggagttctctgaaagccttatctaaagcagcagtcctgagcattcttcattcctttaacacgctaaagcacttatcactacccaataaataatcctttaaaaacannnnnnnnnnnnnnnnnnnnnnnnnnnnnnnnnnnnnnnnnnnnnnnnnntctgaagttttctcatcagctaggatgtaacaaatgaccagtaaatatttgtttaactgatgaatgagttataaactaagggaaatttgtatttctttaaatgtgagatttactattcacatcaacatttattttgatctgtgtaggcaaaatgaaaataagaaaatatta

SEQ ID NO: 420500 - DNA, 239 bp, Homo Sapiens
tctgtgaagaatgtcattggtagtttgataggaataggattgaatctgtaaattgctttggtcagtatggccattttaatggtacaaattcttcctatccataagcatgggatgttttcccatttgtttgtgtcttctctgatttttttgagtagtgttttgtaatcctcattgtagagatctttcacctccctggttagctgtattctcaggtatcttattctttttgtggcaattgt

SEQ ID NO: 420501 - DNA, 348 bp, Homo Sapiens
ggtatgctgattctagaggataccagcttcctcatcagattgctgctactagtgttacatattgtactgtatgtaaaatgggtagcacagtgactgtcatgtagtaagtgtcattaagtgtcagctattattacatcaattttctttagtgtcagacgttggctgtagagttttgcttatggtatgcctctaggaaacagataacatctatagattctgttctctagtatattacttttttccccctgcagatgactttactaatttttgctcattagtaaatgacactaataagtattataaattatgcctgagcagatattcatgctcctcagggaaagctgtgca

SEQ ID NO: 420502 - DNA, 247 bp, Homo Sapiens
actagaggacccggctcatttcagttttatagatagatgagttgtctcagtgataatgcaggacatgtggattcagaaggatcagaaggatgactgagtctctgcttcacttcgcaatggggcatgtggccctggccaaactgtttaacatctttcagaaccagttttctgtttacttctttataaatgaaagaactgggtttgtccctgaagtttactgaatttcacttcctgtagctgtataagt

SEQ ID NO: 420503 - DNA, 105 bp, Homo Sapiens
gtacccggccgttaaacaagaggccatctaaagtccagctgtgggaaatagtcttcaactggaacacgtaaagacaatctacggatacaccttagaggaaaaagt

SEQ ID NO: 420504 - DNA, 181 bp, Homo Sapiens
agcacaggcgatccacggtggacatatcagatgtggagagaagttgcttaagagttctgtttagccccggtacgttctaacagcttcccgtctctctactgagagataaaagagtaatagaaaatagagtaatagaaactacttttatattcatcaaagccttaggatcatataaactctc

SEQ ID NO: 420505 - DNA, 105 bp, Homo Sapiens
ggtccagaactttagaggaatacttcaataactcctgttatgaatactactatcaagaaacacaaacaggaaactactgggggttgtaatagaaactgaaatgag

SEQ ID NO: 420506 - DNA, 183 bp, Homo Sapiens
ctcttaggacttccgggaaaaggtgggatcagtatatctgccctatctgttccttccatcactcagaccacagctagctgttacgtcctctgtcctcttttgcttgcacggagataaccaatgtagagtttaatctttacatagcctacagcttccccctccccgttaacaaactgaaatgag

SEQ ID NO: 420507 - DNA, 244 bp, Homo Sapiens
ctcatttcagttcactaaaaatcagtgaagctatttcaggtttattgttaggcctgccattgattaggcattgtatgggggcttaacatgaaaaataagttttccattaagtgacagtaatgcatgttctctatttaaatacttgcttgggagagacaggtagaactggacattgtctgcagtagcgtgtactctgaccattctcctaactgcacggtggaataactgggcaaactgaaatgag

SEQ ID NO: 420508 - DNA, 307 bp, Homo Sapiens
  misc_feature (165)..(178): n is a, c, g, or t
ctgcactgtcccagtttttcttacgaataccagtggaggctatgaaaaagagccagtaatttgggctaaactctccttgtatctgtggctcccaggaattctaagctatcacactagcccacacttagtctttaagcatttgttaaaatttcagttttcttctcnnnnnnnnnnnnnnaaattggctgctatctttaatccttgttctctgcccaaggcaaagttattttgtgaaagcaacgctttcttggcttttctctatcattaagttggaacctgaaattgacgccgggaactcttttagagt

SEQ ID NO: 420509 - DNA, 266 bp, Homo Sapiens
gacagaaatcacacatgctttaaaacaagttgcacaaaacaccactaggaactccaggacatagcctttaccttacggatcccagtataagaaatcatttcggaacaataaactatacaatgaattaaatttgatcacattcagaaaagccacacatttccaactttctaacacagactatataaagactcactatcggccttgagagaactaagacataaacgtgatgaccacaccataacactacccatataaagtaccagtca

SEQ ID NO: 420510 - DNA, 316 bp, Homo Sapiens
tgctcagaggatcccggcctcatttcagtttggggctggagataagtgatggagagaggctctcaaaatgcctggctaggcagtttgaattgaatcttctatgtaatggggagccattaactgaagatttctgagaaaaggacaaaaattatcaaagtttgtttgatgtaaagattcatcaggtaggaataggtagggcaggcttggggtccaagaagaccagtgagtcatacccaggtagaagtaacagtaaacagcaggctagcaaataaaacagaagagaagtcatggagtccaagaaaatgaagataatgga

SEQ ID NO: 420511 - DNA, 142 bp, Homo Sapiens
tatcagtctctttaaactttgaggactcttttctttgagaacctctcctctcccatcgccctgtggtcacgtaaagctgacgctgtccaaagttccagagattcacaagggtctcaggcctggacaaataccacatcccatg

SEQ ID NO: 420512 - DNA, 189 bp, Homo Sapiens
gagatgaacgatagagggaaatgtagtttattatgctttatacacatgcatgtgtgttgtgtctatatataagagatgggacaggcgtagaatgacgtttctgtcatggccagaatagggagaggcatttatgtggattttgtctggctgccctggggatgttcgaagaacctgaaatgagccgggcag

SEQ ID NO: 420513 - DNA, 162 bp, Homo Sapiens
ccaaccatatcgaaagcatgatttgttatccatatcttatctatacatttctgctttgacattttattaaaaacataaaatgagtacggtaacccaatttgaatcctttaactcaaaaagtttatttatgtatacataaactgaaatgagaactgaaatgag

SEQ ID NO: 420514 - DNA, 185 bp, Homo Sapiens
gtcgattctactttctaactcaccatcactgtaacacaggagatactcttattaggcaggttcacacaggatggacaatatctccataccttgttaaaaatgcaccaatttccacggaaatccttatgtattattgaaaaaaatggtctttttggagactttccccttgaaatgaaatggcaatg

SEQ ID NO: 420515 - DNA, 125 bp, Homo Sapiens
cagccctttccaccttggaacagagccctccataacccatgttgggatctgtctctctagccaagctgacttcacagcagaccccttggtgtcacctgtttatctgtttggaggaatgtgctaaa

SEQ ID NO: 420516 - DNA, 184 bp, Homo Sapiens
cgtagatcagaaacatgatacataacgcattaattcgtttatatcccagtgatcctgtggcctcagatcaggtagggcattcagtatgacagtatctgaggaggatgaggactttgtaaaaccagtgattatctgattgttttctctacatcttccacacagaaggtactgaatcagcagctgt

SEQ ID NO: 420517 - DNA, 150 bp, Homo Sapiens
tttatcattcattcactcactttgcatccgttatccatccaacactggaatatgaaagtaagtaacacacagttcctaccttcaatttgctcactctcaaccagagaagaaaatcagataattaactcttcacataatagggaaagtgcg

SEQ ID NO: 420518 - DNA, 343 bp, Homo Sapiens
aagaggatcccctttctattcatcgacttcagttctagtctctgaccactccccagactactagttcatgccttacctgcattctcttccttagttatcgctaagtctaggataaactatttcaaccactaaagaatttcaatgtcttgatattctgccattgccccttgcttatcccctgcccacaaatgactaattttagtcaagcagtcaatcacagagtctcaggatttggtagaacaagcactaggacataaatttcccgagtccgaagatgtattcttgggtgttcatgaactccttacggaaatgtatgcaatttgttttcattttgttaacctgg

SEQ ID NO: 420519 - DNA, 308 bp, Homo Sapiens
tagaggatccccccagcattctaaagtttcagacttatgaatgacatcagtcctcatgttttgtaaggtgctaagcagttttgcaggccacacatctcaatggacagcaacacattttaaacaaggactctaccttccaccacatcaattatatccattccccacatctcatttaccatcagatattcaacaatattattgtaagtaggttgggaactgaactgcttgggaacaggcagaggtcatgcctcatttatttctatatttcttgtactcagtagagaacgaagtttgcagatcattttcaa

SEQ ID NO: 420520 - DNA, 545 bp, Homo Sapiens
  misc_feature (349)..(357): n is a, c, g, or t
tcataacagttcttgctctcccatttattaaaatggtataaaaccagctatcttaatgagatgggtatatacataggtatataatttctaaatatcagattctttgcattttgttttttccctacaatagactcccaactatcccttggattagttttctgaacaacttatataactttatacatctttgtactatactttgtcctcttcaagtatatttcttgagctaattataatgtttagttatttaatatcgagtaattccctttagagaagagttttccttatacaaagcatgttcaaactctatcaccatttcctagtgccatttctttcactcaaactacannnnnnnnnccttcattacatctaatgtagaattttaaagcaaggcttctgaacctgagattcatagagtccatggaatggatcctctagtccttgggccccctgaaatacatgcagaattttgtatgtatgtatgaatacgcaaagatggtaccatagtattaagatgtccatggctttcatgagattttttaatc

SEQ ID NO: 420521 - DNA, 287 bp, Homo Sapiens
caggatagttttgagggttattaagtaatgaaagccaggctgagtgtggcacctggcatacagtaagtgcgtaatacaggatagctctttaactggtagtgtgctgagtcacaagctttgcccttgacttcaacccagtctgtcttttcacctgctagttggatgaagatgtgtaaggcgtgctgctaagatttgctgatgacacagagctttaagggggagcaaatctgttggatggtagaactgaaattcaaaagttgtttgcccctggattgaactgaaatgag

SEQ ID NO: 420522 - DNA, 236 bp, Homo Sapiens
gtatgtggaaatgggacgaggaaaagatactatcagaaatcaagctaggtaaaatgaggacactgaaagcagcaaagcacaaaagcataggcaaggtactttgaggtcctctctggcaggatgccctcttgttctgctaagaattgaatacttaaataatcattagttctttaaacccatttatatgtcagcatacatggtggatgcgttttcacatgtgactcattcccagggat

SEQ ID NO: 420523 - DNA, 428 bp, Homo Sapiens
tattaagtggctgcgatttctcgcagaaatcgttactataggtcgtatcccataatatgtgcgcatcatttaaatgtgctaggctcaaagtgcagtggcacatcatgtctaatttccagttctctccagttgtccatgtataccttaactcccaacccagactctaaatttctcaagacaaagctaatgcctgtcacttttctcttccacaggctgtggtgtaatcgggacaacaatgaggcaatcctaaagaggtatcccaaattagggaaacccactgccccaactttacattaccaaataatggttccaggatgaatcaagatgatatagatgtcacagtgcaatcatcacaatgtcaacatgaccacaaagaagcctattctagctagttaagtttctcagaatctcatctatacagttggaga

SEQ ID NO: 420524 - DNA, 573 bp, Homo Sapiens
  misc_feature (81)..(81): n is a, c, g, or t
  misc_feature (387)..(406): n is a, c, g, or t
agagttctattcagaagcacttcaaatgcatattacagacttagatttatgactattccctgctcttatatacttcagggnccaactttcatgttccattttgacatcccagatagaatattgagatatgtttggcattggagatgagaggttatgaggaaagaatttctacaaaagcaagttgaaaataagctttcttctcattgtgtacaaaggggaggaagggctgagaaagtagctccagagagaggagagatggtattcctctacatcctggatctcccaggaaggcactgatttcaaactgcaccaacactcctgtggttgcccaacctgaatttagaaaagcttcagtaacagcgagaaatggccagaaaccagctgggnnnnnnnnnnnnnnnnnnnngggtcaggtttggaaaatagcacaaatataactgtagctggattcacaaattaatccggcagaagggactctcaattaacaacacctcctatccctcacttcagtctgaagaacgggggaggaatggttaaaccgcatggtcttaaggcacggagaccaacgagtcc

SEQ ID NO: 420525 - DNA, 141 bp, Homo Sapiens
  misc_feature (42)..(42): n is a, c, g, or t
ttatgtgagtttgggatagggtcggttagggtcccgtgggtngggcgtttcctctaattagtggtttctcatctgtttgtgaggagctagctaaaaaggattgggaagctgagaaagaaaagcttcatcagttcatatatt

SEQ ID NO: 420526 - DNA, 132 bp, Homo Sapiens
ggctcatttcagcttcctgactcccaaacatcacacagaatacttggaggaggttcctgcagacctcctgcctgagcgatgcacaggcatttgtctctctctctggctgcctatgcactggctcttcgggtg

SEQ ID NO: 420527 - DNA, 275 bp, Homo Sapiens
tacagacattagagccttgatttcctgatccattgtcaattctacaaacggtggagcaaagtgccagatactgagacagtcattggctctctgaagctaaataagatactgttcctgcttttgaggagtttaggttgtaatgatatcttttctaaaatgaatagaattagctgaggtggttctccctgtattgagtttgggttggcaggcagggaaatggagttatgcacaattggctcaacgttcaatgggcacaaaatcttagatgaaaatga

SEQ ID NO: 420528 - DNA, 124 bp, Homo Sapiens
gaatccttcccacactggccctctagactctcctactggtctccaagtttctccagacctgttgcatctctgggtcatttgaggacaggatgagggtctagagggccagtgtgggaaggattct

SEQ ID NO: 420529 - DNA, 423 bp, Homo Sapiens
gattcttccctcaggggaggtgtttgtattttccttttaagatgtaaggcatcctggccctaaaataccccctgaatatccatttatacccttgctgcagggatgtggctaaaggggaggagctgagctacaccccacttgatggaacgcaaagactgtggtgaggttggagagcagtgctgtgcgtccttcctcagccttaacgagtgcggggcaaggttaacacagatttctacacccttttgctgcatacacagacgaggccacctgcagatgccaccactgctcagtgtgagttgagtgttggatgggagagccatctgctccatacacctcagggccccttctggggcccaataacctcatgggaacaggtaggggatctcctagccttcacaaaggcaacaaactgaaatgagccgg

SEQ ID NO: 420530 - DNA, 140 bp, Homo Sapiens
acggcgttgtcagtgtaaagatggtctagggcaatacttgctccaaagatctatgatctaatgctttaatcacacaggatgcatctagttactcaaatcagagattctagaatcaccctgagtgttctcaggtaattgca

SEQ ID NO: 420531 - DNA, 261 bp, Homo Sapiens
aggcgttgtcagtgttacttttagagtctggtaaatagggtggtcagtactgagggaggtgctgtaggatgtaataagcaggatggagtagtggagaaagagctagattagccatccagagacttgccactgactcctgtgtgatcttgagcagttcactccattgttattctgacactgactcctgtatgatctttggcagttcatgccactgttctgtcactgattagctatgtgatcttggacagttcactctactct

SEQ ID NO: 420532 - DNA, 224 bp, Homo Sapiens
atagcgttccgaggattaaggcgttgtcagtgtctacgggtgcattaattctaccctatggcctttctctgtgtctctgttcagaacaaaaacactatcatggaggcaaacacccattgccaataactaataactaattgccaataactaatcatcctgttttcttctgtatctgagagtttctaggggaggaacagagaaattttcgagcagagtagcctaag

SEQ ID NO: 420533 - DNA, 194 bp, Homo Sapiens
agcgcgtgtcagtgaagtcttgaggcgataggttctactcgtgaatcctttgaatgcaaggaacagaaatcctagaaacgggaactagaaaaatcagcagctggagctagtctggagatcctaagtgtcatatgatctgtctgacatctgcatctgacagagtgctctgatcttctgtgccggccggctcttta

SEQ ID NO: 420534 - DNA, 124 bp, Homo Sapiens
gatacggtataacatagctaggcttgaatgaaggttccagcccgtttagttctgagtgtatgtgtagcttcattcaaagcctagctatgttataccttatcccagcctgaggttgagctacagg

SEQ ID NO: 420535 - DNA, 176 bp, Homo Sapiens
aggcgtgtcagtgtaaaggcagttgggaaaatagacatacaaaatagagctgcagcctggagctctcaagcagctccggctatcttagtcggacttgcgttattctctttcagttatgaccaaattatttttctaactttctaagttagcagtgtggttttttattcctaagtctg

SEQ ID NO: 420536 - DNA, 130 bp, Homo Sapiens
ccgcccatgtgcgtggattaccagcttcgcacagagccagacgctgcagcagataacggggcgccgggcccacctgctgcccctctcctgtgcatagggcgctctctccctgccccgagcttcggcttct

SEQ ID NO: 420537 - DNA, 374 bp, Homo Sapiens
gtactttattgaaaaatgctttaagggatagctggttagagggagttataatacttacttagatcagacggagttatatattcgtgagtgttagagacaatatttaaaaacatcacttgatgctactcagatggaacataaggaagtcaccctcacattaaataaggggacattagatgtgccctaatgagtagcacttgcagacataacctcgcgtgataaattgtatccgtaagctatgtacatggctgggttcggggtaggttatgatacacgacaaccaaggggcatcagatagtgcagatgagggtgtacagggagtcggctgcagcgtgcccgaaacatcagtgacaacgcgctgagaaccgagctcg

SEQ ID NO: 420538 - DNA, 562 bp, Homo Sapiens
tcgtctcgaggatcccaggcgttgtcagtggagtgtagggacagaagccagaggggagagaaaggagagttgaggaatgtgtgggagtttagtgtgagttggggaaggccagagggtgctagggaccgggagggctgttttaagatgtgaaaaacttgagcatgtttaagatctgatgagaagaacaaagttgagagtgaggctgaagataatagaaggaaggagggataagtagaatgaaatttctgatcagtaaagagtgggtctaaagcacagggagattggttttagatgtgattagtttagattgagtgattctgatgccaaagttgaggacattccattttcttcttagcctaaatgcttgagggtttggctatttctacttctttcctcctatatctttaactgctttaactcactgctgtgttttagagtctttattttactggaatttcttgggtgaaggttactacagatctccaaaaattgccaaatgtagtagatactgaagtccttgtctgggtctttcccttatttgatacaactccacctctgacct

SEQ ID NO: 420539 - DNA, 121 bp, Homo Sapiens
aggctggtggtggacactgccacctctcggtgatgtcactcaagacaccacctctaggcatccccaggttgtggtgtcacaatggtctgccttagtgcaatctcttctaggaatgaggaag

SEQ ID NO: 420540 - DNA, 120 bp, Homo Sapiens
cctagttacccagaacttgggtaaacctggaagtatctctggcttctctataacaatgtttaatgttcaatcagttgataaagtctcaatcagataaatcactaacaccactgacaacgg

SEQ ID NO: 420541 - DNA, 128 bp, Homo Sapiens
ggtgatctgaggatccaggcgttgtagtgatgagcagaaaaagagacagcaaaataaagcaaggtcagaacaaatctgtaaggcagagaccaaaacgatatctgcaaaggagtctgaatttaactgga

SEQ ID NO: 420542 - DNA, 174 bp, Homo Sapiens
gccaggcgtgtcagtgcagttttatttcattaaataacagtttaaatgaagtagcacaagacagtatttcattacactgctgtatgtgggctttattcacctttattacagctgcatttctgttgtgaggttttttataaaactctgagctagaaaattagtgaagattgtact

SEQ ID NO: 420543 - DNA, 271 bp, Homo Sapiens
agagcgttgtcagtgctgagctgctactagggaaagaggggaagtgggtggaacaaaagtaagtcaaacatgaaaacccctggttttcataatttaagtgatcatgagactttcactcaaagtcagtagtttgaccatatacttgctgttacctattaacagaaccattataatgaaacaacttctacgcattcgatagacaaaactaaaatgttttctgaactaaactccaaaatctaatagcaccagctctgttccaaatcactattaa

SEQ ID NO: 420544 - DNA, 427 bp, Homo Sapiens
cttataaatggcggatgaactcgtcaccaaaaatatacgaacttattgtgtatctgttttattgaaataaaccgattaaatttctattatatgccacttcaaaacaaccaaacgtgacatctttaaagcaaatcaattatttggttcaaaagtttgaccctctgactttatggtcatgatgtatgatataatcatgtatgctgtccaatgcaataaataaggggttgtgggcaaaagcccaaccacatggcttaataatggagcccaggccccatctgttgaaaaaaagtagataggtatgaaaaaagggactcaagggtcacttccattaagagaggcagagaggacaagctgactggaggaagatgagccctcacaggttgagccccaaaatcatgggatgaagtacttatggacactgagctta

SEQ ID NO: 420545 - DNA, 318 bp, Homo Sapiens
attcttatagccttcctgcggagatttattttttggagacatcgctcacattgtttactcctctaggttaaatgtactaggccatctgttgttaattttgtagttgtattaaattccatcctttggctggattataagcaccaaaagcaaacttagacagaagcaggagcatttgcaaattacatagctttgagcctaaatggtggtttttataagtgcagttttcaaatgggctgagattctattttgagttttgggatcagtaatttaaacacagggaactctacgagttctctgaaaaaaccaattttgagacct

SEQ ID NO: 420546 - DNA, 249 bp, Homo Sapiens
  misc_feature (44)..(162): n is a, c, g, or t
actacagcttcaaactcctggcctcaagccatcctcccacaatnnnnnnnnnnnnnnnnnnnnnnnnnnnnnnnnnnnnnnnnnnnnnnnnnnnnnnnnnnnnnnnnnnnnnnnnnnnnnnnnnnnnnnnnnnnnnnnnnnnnnnnnnnnnnnnnnnnnnnngaccttgctctgtcaccccaggatggagttcagtagtccaatcatggctcattgtaacctcagatttccaggctcaagcaatcctcc

SEQ ID NO: 420547 - DNA, 403 bp, Homo Sapiens
agagtgatctagaggatccctccctattagaatcatactgtaagatgaggaaatggtagatgagcagaaaaaggtggctgaggcagaatagggcagctaagatgattaacaagttctggcttgagtgaatgaatagataaatggtggaatcattcactgacagaatgtggaagagtggtgacaaggatagttttaggtacttgtggcatatccaggtgaataaatccaatagtcaattagaaggtggcagagagaaagagcaaaagaaaaaagatttgcatataacctgcattaagtggtattgaaagttctcactatgttaagtgctaggaacataacaaagaacaaatcacagcctcatacaaggaagcttatagaagatgactgtaaaacatcaattaca

SEQ ID NO: 420548 - DNA, 267 bp, Homo Sapiens
tagtaacaaaaataagaatctaaagtatcattaaccataataatctaagaaataagtaaaaatgcaaagtcctaattacgcctagaagctaaaaaacacaatctgacataaatatctaatcagcaatatgctcgctgtaaaaagctcttgatgtcgtcccatgaagttgaagggaaggcaggttcagataaccactgaaagtcattatccttgtcacagcaataaaaataatcaaatgaaggcttatttagctatatttttatatcg

SEQ ID NO: 420549 - DNA, 592 bp, Homo Sapiens
  misc_feature (136)..(445): n is a, c, g, or t
aatgaagtcaattatttttcccgtcattggggggaataagaaataaataatcaaatgtaggaaaaggaagtgaattacaacacttatgatgatgaaaatatgtttgataaaacttttaaaaacattatgatgtaannnnnnnnnnnnnnnnnnnnnnnnnnnnnnnnnnnnnnnnnnnnnnnnnnnnnnnnnnnnnnnnnnnnnnnnnnnnnnnnnnnnnnnnnnnnnnnnnnnnnnnnnnnnnnnnnnnnnnnnnnnnnnnnnnnnnnnnnnnnnnnnnnnnnnnnnnnnnnnnnnnnnnnnnnnnnnnnnnnnnnnnnnnnnnnnnnnnnnnnnnnnnnnnnnnnnnnnnnnnnnnnnnnnnnnnnnnnnnnnnnnnnnnnnnnnnnnnnnnnnnnnnnnnnnnnnnnnnnnnnnnnnnnnnnnnnnnnnnnnnnnnnnnnnntatgatgtattaatatagctaaataacatgctggcagtttgccaaacatgatgttctctttcacacttggtcccctctatgcatgttgtttccttggcctggttccctttcctcttttctgctgatgtatagcttttcatgttagag

SEQ ID NO: 420550 - DNA, 550 bp, Homo Sapiens
taggttcttaggatcatggaaacgtaaattggaaagagcttggtggtggtgggggctggagtgggggtcatctgaagaaatcttctagccattcttctagcaagaatctttccttaggacataacaatcattccatattccatgcctgacttaccacttccaggtatgaaaggtgggctcattacttctgaaagctgcttcatttctccaattaggaggaactatctttctaatattgagctctaaactgtctccctgcggcttctactcatttgtcctcatttctctctatgaaataactcaaaacaagtcaactttttctttcactcagaaccgttcaaggatcctagcatctagtaggaccctttgctccatcctaggcttcttttttctaggaacatgaggcccagcctgtccacttgttcttcccggaatgtacactctcgtttatgttttttttgaccttcactccctttttcatcatgtgcattgcctcctcaacatcttaatcactctaaaagcatggtgtctatagggggtaccgagctcg

SEQ ID NO: 420551 - DNA, 217 bp, Homo Sapiens
cctccttctcataatctttacttgggaagaattacattgaattcacaatcaggcttattctactcttcccaaaacaatagtggaaatgaaataatatgtatagcagcataatgtcaattcacagttacagtaatgcttatgaatgtggcatttagattcctgatagatgtttgcctgtgtaattgtttagaattatattttcaattgctttttttgt

SEQ ID NO: 420552 - DNA, 251 bp, Homo Sapiens
ctacgaggatccctccctatagacatcactctaactaataaacgctgtgcttgggctatttttatgttaacatgaattattcttagcgtatgcttaaaagattactcccactatcttgatggttaagcatgcaagtgttcaaggttacatgtacacatgtgcactcataaatgtgtaagtgagtatgtgtactattgggccatctgaagtggaatttcatccaagcatccagactattaaaaaagtgacta

SEQ ID NO: 420553 - DNA, 645 bp, Homo Sapiens
  misc_feature (531)..(544): n is a, c, g, or t
cattcctgccagtcatgaccatggtccttagatgtttacagctaaagtagcagctgttaacgcctgcaaggacacactcctacaataacagaaagtccagatgtcctgatatccataacagtatgtgctttgaatataattgtagttatggtttgaggtactcacacactagaatgtcgaggatagttttatttaaatcagtattacacattttgtcatgctgtctgctcaccctcatgtagacttagcttagcttagtctttatatacataagaccccctacataagaaaaacttaaagcaaagatggtgcgttcctctgcttgccttctgagggtgctgtactctggaagggagtagcttctaaataacttgcttctttcactgcactctgtgactcaccttgaattccttcctgcgtgagacccaagaaccccctcttggggtctggatcaagactccttttccggtaatgaatccaggaggcgaaaagataaggacatttaggaatcgagcaattcagtaaacattnnnnnnnnnnnnnncacccacgtgcatacatacacttacgtgtagaggatctagaaagatctttatattctttgaatagagaagatacacatttcccatatgatcatagtacttt

SEQ ID NO: 420554 - DNA, 162 bp, Homo Sapiens
atcttataagtgggatttatattcactatgtaattgaagttttttccaatgaagcaccgtatatagtttatctgggaaaatggctgaagaataaaatgtgtgatgttattcagtgtacagtttctaggtcatcagaagataccactaccttcccactactgg

SEQ ID NO: 420555 - DNA, 101 bp, Homo Sapiens
ttacggctatgctactttttcaggtcatctattctcatattttgtactatctataccctgacaattcctaaatctacatctttaggccagcctaactgtaa

SEQ ID NO: 420556 - DNA, 185 bp, Homo Sapiens
ggacctcccagatgagacatcatacacgttacaagatggagataggcaatgtacacaagatgattagaggtaaaataaaagactaagtgcaataaatagatccagtgtattttaaggtaaaaatttccagtgtcatttcagtggcctctgctttttcctcactctaattctgacattgattcttt

SEQ ID NO: 420557 - DNA, 423 bp, Homo Sapiens
  misc_feature (151)..(212): n is a, c, g, or t
tttgagatagaatctgtctgtgtcgcctaggtgggagtggcataactcaggactcactgcggcctggatctcctgggcttaagtagtcctcccatctcaggcaccgtagtcacgggaaccacaggtgtgccccaccccacctggctattgnnnnnnnnnnnnnnnnnnnnnnnnnnnnnnnnnnnnnnnnnnnnnnnnnnnnnnnnnnnnnnatgtgagacaggggtcgtagtatgatagccgagggtgggtacaaactctgtgggctcaatgtgatcctcgcgttgtggtcacacagagtgctaagaatacagatatgagccgacacacccaatagaacttgtcttatatgagagtttctcacgctgtcatatggtatataataaacttaactatgagctgtacataatagggaggagactc

SEQ ID NO: 420558 - DNA, 128 bp, Homo Sapiens
cctccctatagacataggcataggtaggctccacatacaagcagagacatgttgtctagttccttgcaattgtgatcttaaagcctagcacatgggcatgtgcttagtattgttaagtggaaggatgg

SEQ ID NO: 420559 - DNA, 238 bp, Homo Sapiens
  misc_feature (141)..(141): n is a, c, g, or t
ccggaccatatagacatcgttgaggatttgccctatgttcatcaggatatcagtctgtagttttctctttctgttatgtccctccctggtatgggtgttagggtgatactggcttcatacaatggtttaggcaaggatccnctctttttctgtctttcagatatagtgtcaatatggttgggtaccaatttctttttgtgaatgtctgtatagaatttatctggtgagtcgtgtctgg

SEQ ID NO: 420560 - DNA, 520 bp, Homo Sapiens
cggggggtagagaggaatatgagtgaataggaagatatgggcctgatgaaaagtgagagaaagggggaccagagagtataggaacagtgaagggtgctaaataccgggctctaacaacataggcaacatcctttccaagggtaatgacttaaaagtgtgaagaacagagtacacaaatatgttggtattgctcctccaacataggaggaatactattcagggaaacaccagagaaaccctcatcaattccaacagcctgcagctgactttgagccagcaggatagaagctggctgggttattaatggctttcccagttgctggactctgtgcatctctgattaactctcagaggggtattcgggacggagtagggggaaaaatactttcttatcacagattttaccagaccaaaaaacacccttcaaacaatcaagtatccaaaataagtgctgcctacaagaagatgtatctccagacacagggagaaacacagcagacagctcttttgctacatgcta

SEQ ID NO: 420561 - DNA, 137 bp, Homo Sapiens
tacttgtctagttaccaaacatgaaatgacttcatatattgttgtatatgtacaatacacacaactaccacatggaagagtcttatttcctactcatttcctaccatttttctcccaaagaatctaagaatgtatca

SEQ ID NO: 420562 - DNA, 203 bp, Homo Sapiens
cgcgctgattagacatctttatgctcagtctcactccccactttcaatcatttatgtttccaggttttctgttattttccactacagcataattttaaatagtgcaagatgagaaaattagtacaactatacttccttctactggctatccccctctcctcctctcagcttctattatctaaattttaataaaaactatagtt

SEQ ID NO: 420563 - DNA, 209 bp, Homo Sapiens
cgcgcgagtagagatcacgtatttcaggtatttattgatttctggagagacggaggtctcgcctgcgtgtctcccgaggctgagatccttcagtatacttctcggaagttaccttagttaataagcaacagagaacaatggcagttaaaccggatatcttcacatttaaaatacaaaagcaccctttcaatatccagacatagagctcc

SEQ ID NO: 420564 - DNA, 191 bp, Homo Sapiens
gggcagggtgtagtgagagtttaacaagataatgcctctaaagcctttatcatcaagcgaacacagtaacaccccatgctcaatgaattttagctcttattattttattaccattatggaacagtggtcctcaatagagagtgagggtaattttcccccttcagaggacattaggcaaggtctaataggga

SEQ ID NO: 420565 - DNA, 270 bp, Homo Sapiens
  misc_feature (112)..(142): n is a, c, g, or t
atcgacgtacacagttgagaaaaccaagaacacagttcaggcatggattctagtcacttttctgtcacggtctagctatgtaccctgagtaaatcgcgatgtttatgcatgnnnnnnnnnnnnnnnnnnnnnnnnnnnnnnntcctgctttacctgccctgcaaagtagtcatgaggaacacacaagatgcatagtctttgccttatctgcccatgcagaaaagaaattatgtttacatttgatccttcccaccaaaaccttagagaaat

SEQ ID NO: 420566 - DNA, 189 bp, Homo Sapiens
tgctccctatagaatccatctcacagggctggcgtgatgattaggataccacagctgtgagagtattctggaaaagagatacaacaccacattcatatacattagaaaaaggaagcttttcaagttttaagtttgggtacctatgaattgtttgttgctaatttatcatccccaaatattaggtaagag

SEQ ID NO: 420567 - DNA, 149 bp, Homo Sapiens
gtcaagatcagtgtctatgtggggctctcggtgcgtcccattggactattgggtcatcttctgccagtaccacactttttccccgccacacctcttatgagcactgttaccatacggttttaattactccagctttggtggtaagtctt

SEQ ID NO: 420568 - DNA, 139 bp, Homo Sapiens
  misc_feature (86)..(98): n is a, c, g, or t
tatgttggaattatagttatatattattcatctatcactatcatctctattatatcttacatataaagtattcttaaagaaaaacnnnnnnnnnnnnnagtccctttaataactcttttctgtgttttgggtaagagga

SEQ ID NO: 420569 - DNA, 177 bp, Homo Sapiens
gacaggcaggacctggaaaagagtggaagtgcacgtctctgggccttctcagtccttacttcctcctccctccttgtcccacattcccctctggatgggtctcactctccaagaaaatggccaggagcaaatccaggcagagagggaagttactgagacccagaagcacacgcgact

SEQ ID NO: 420570 - DNA, 320 bp, Homo Sapiens
caggtattcatagtaagcgagcatcttctatgtgtcagtcacgctctaagtgctagggatagaggagtaatccaaacaggccatatacctgactttatgaagattttagattatcatattttccatggcactcctatattcaggtattctttatgatctcagatcattgctcttgatatatggtataaaatgttatgtagcatgacagaataaagttgattatactgagattgaaggaacagaatgctttgagtcatcacagacttttgttacagtcctggatatactatagcctactagctatgtggtcttgggacagt

SEQ ID NO: 420571 - DNA, 145 bp, Homo Sapiens
cctgtggattgctctgacaggatttcacataatgtttaatgggacagatgggatttcatatcttaacaactgaaagatgttattctgtaaaaacagagtaatgttgaaatagcactttgtatccttgttgcccagatgcctcaca

SEQ ID NO: 420572 - DNA, 321 bp, Homo Sapiens
  misc_feature (121)..(242): n is a, c, g, or t
cttataggataaaactgacaaactgaaagtacagccagtggaaaatcacattgtgaaggagctagtgaatatgctcccattagttatctagctggtaatatgaatccactgataaaggtgnnnnnnnnnnnnnnnnnnnnnnnnnnnnnnnnnnnnnnnnnnnnnnnnnnnnnnnnnnnnnnnnnnnnnnnnnnnnnnnnnnnnnnnnnnnnnnnnnnnnnnnnnnnnnnnnnnnnnnnnnnacggacctcacttattactccatatactttttattcctgtttttgcttttttacacaataaatgtttgtaatttatatg

SEQ ID NO: 420573 - DNA, 403 bp, Homo Sapiens
gatatacgattcactgagaccatttattctagcatacatcacgagagattttgaaacattctgtatattcataacaatgggagggaatattttcaacagcaagtttggacttataaaggcacacaaattacatagagaataaaagaaaagcacaaaacacaataaacgaaaatactgctgcatgaaaaataaaaataagaatgtaataaaatggcaggtcttacagcataaattatggtttctcataaatcatgtattgtcattatgattaattatttcacataggctatatggtaaagtgtttcaagagatacagccaaaataatcaagttcatgattaaaacttattttgaaatcactatttatctttggtgcagacttttcccaaagaaagctaatgaga

SEQ ID NO: 420574 - DNA, 153 bp, Homo Sapiens
acctaggacttatgtaaaatcaacttttgttggtacctgtgtgcagtaacttcctgggtggtttttctttgtgcttttgcagctactcgttatcttagaaccttaaatgttggatgaacattagtaataaaattgcagacaaaatgaagacaa

SEQ ID NO: 420575 - DNA, 167 bp, Homo Sapiens
cctactagacatctcacctcttactccaggttgtccacactcagtctagcttccacaagaggtcgcactctcctcaggttctctccatttgggatgcctgccttgctctgccggctcttcaccctggatggacctgaaatgcctgctaaggccttgctccaccgagt

SEQ ID NO: 420576 - DNA, 489 bp, Homo Sapiens
tggccgatggagacatcatgagtcacgggtgataatagtacttagacaaaaatcatcgtcagaagtacataagacggactgaggctctggaagtaatctacatcattttatgtagaaacggcagaagtcatgtatatcaagtgcctacaattttccagattctgtgctagacacttgacataattacctacatattccaccctgtgtagttaagtcagcatagtatggttattttaaatatggaaaatggagatttggaataatttgagcaagtggcaaagcaaataaggttggcagttgtgacttgtgtctaggccttttagaccatgagttttcattgtcaaaaatggaaaaacctttaaatcacttttctgtggtccacagatgtcaatttatatagtagaacttttaatgtcaatactaacagttgctttaaacaagaagtagacattgaacctcaaagaataggtcatcagaatcacaaatatg

SEQ ID NO: 420577 - DNA, 111 bp, Homo Sapiens
cgggtaatgagccccgttagctatatgcatatcttagttaattatggctcaggataaattcctacatgtagaattccggatcacatgggatgaacatattttaaggctttt

SEQ ID NO: 420578 - DNA, 273 bp, Homo Sapiens
catctcagtcactgtgacccacatcataatactacagaggtatacatatggatttattatttatatctgaatatctatttcaagtataatttagtatcaatttatccgacgtaaagatcttcagttgatctttatcaactgaaaataatttaatatcttcaattattaaaactatcagttgaataaaaaatgtttattatttatacataatgtttatgatagctcttaattttatgcaacttaattttaaaaaatattattaggaaatagatt

SEQ ID NO: 420579 - DNA, 139 bp, Homo Sapiens
tacctccatattagaatcatgttgaggcatctgcatttcctatcacactgtactaaatcagttagaaaatatcttaattaccctatcctcacatgagtcttacttgggtcctgacaacctcctggcctctcaccctggt

SEQ ID NO: 420580 - DNA, 241 bp, Homo Sapiens
taccaatatgaactcccatttaaggtagacgtgggaaaagtatcagtcaaggagatcttaattactacatgcttcaggcaaacatacaatttcggtaataagaaacactacttcaacagatctgcccttcacaacatagagtacatgcaaaagatatgactgaactcaaattcagatgtttggcagttgagctatttggtgaaatgtcttgagggaaagatcttagggttcttttatactt

SEQ ID NO: 420581 - DNA, 103 bp, Homo Sapiens
gaggatcccattcgatgattttttatgagcatctaccatgtacatgcatggtctgggcattggaatacatcaagtgaattaaacaaacaaatgccattgaact

SEQ ID NO: 420582 - DNA, 163 bp, Homo Sapiens
cggtgcgtataagctagttgcgtgcacagcagcatgcattccttctttctcctcccgctttccctcttagccttatttatcttagattaactttattcaggacacttgattgatctttcttaggcctcctcccttatcttgctctctcgctgtctaataggga

SEQ ID NO: 420583 - DNA, 592 bp, Homo Sapiens
  misc_feature (102)..(136): n is a, c, g, or t
  misc_feature (250)..(521): n is a, c, g, or t
gtccatatagaatctgggctgagtctttaaaggaaaagaaagagaggagtctgaaaaacaaggttaggcaagagggaaaggtacatatcccatatttcaggnnnnnnnnnnnnnnnnnnnnnnnnnnnnnnnnnnngcagtgtgtggaatggtacagagctagaatatttttagggaatcttgggacataggaaggggataagaggaagtcatgctggggaaggtaaagctggaaagatggataggaacnnnnnnnnnnnnnnnnnnnnnnnnnnnnnnnnnnnnnnnnnnnnnnnnnnnnnnnnnnnnnnnnnnnnnnnnnnnnnnnnnnnnnnnnnnnnnnnnnnnnnnnnnnnnnnnnnnnnnnnnnnnnnnnnnnnnnnnnnnnnnnnnnnnnnnnnnnnnnnnnnnnnnnnnnnnnnnnnnnnnnnnnnnnnnnnnnnnnnnnnnnnnnnnnnnnnnnnnnnnnnnnnnnnnnnnnnnnnnnnnnnnnnnnnnnnnnnnnnnnnnnnnnnnnnnnntaaggaataagattaagaagaagagcgttttggtgaaactatggaattaattcaagctttttatgccttac

SEQ ID NO: 420584 - DNA, 115 bp, Homo Sapiens
cggtggtgtatttcctagaaaagtatcccatttcatctaaaagtacggagaaagtcgatggtttttaatgtttgaaatttcaacctgaatttatatactcatggttttttccttt

SEQ ID NO: 420585 - DNA, 229 bp, Homo Sapiens
agatcccccgagaaatcatttaatcacttctctcctttaaaaaccaccagacttgaagaaaactatgattttaagatggaagggctgagcaagtatcaagcgaactgaatgaataaaatacttgaatccaaatatattctcttgaagttttatccaacgaagataaagaagaaaacccttaagagattccaaggagggaaaaagatgttaccaacacaagaatgtgaat

SEQ ID NO: 420586 - DNA, 116 bp, Homo Sapiens
tacatcaagctcggtacctggcaatctgaaacaatcaatagcacacatgtctggcacatgtttgtgttctatatgtatgcagtgaattgacctgcatgaagatgtctaatagtgga

SEQ ID NO: 420587 - DNA, 389 bp, Homo Sapiens
  misc_feature (298)..(321): n is a, c, g, or t
ttcccatatagacattgcacatggagagctacaggatactccaattcaaaaggttgacagttacctatcccatctaacccacaaaccaggccatcctctgtctcaagccctggggattgatggtaacatcttgtcagttgccataaccagaaacttctgggatgtccttgacttttctttttttgcttagcctgcttaccccatcagttgcaagaaagtattgtttctatcttccaaacgtactcagcttagcaaataaagttaccattggcagggataaaacacacactcagttgannnnnnnnnnnnnnnnnnnnnnnncctgctgtttatacagcctaccccatctcaatagatagtaactctctcttagttttcaatccaaaaat

SEQ ID NO: 420588 - DNA, 138 bp, Homo Sapiens
gggaggatcaataaaaatactatttctaataacataagcattgtacagttcataaactgactactcatactatgtgcccagaaagtaattaggttcaagaatgattttaaatcaatttgtttaatccttttaactatc

SEQ ID NO: 420589 - DNA, 164 bp, Homo Sapiens
catgagaagatcttagggttacctagagaagacaatccagaggagagacaaaggaaaggaaatttgggggagtgatatgcttttgcctgagcacttgtgattcttcttcctcaggcacatagcagaagcctatgcaagctccacaggtgcagcacacgcgacag

SEQ ID NO: 420590 - DNA, 181 bp, Homo Sapiens
atctagatgtccctccctattaacatcaaatgtattcagttttaggggagtcaaacattcaagtcacatttgtaaactgttgagagccactaaacatattaatcgataataatcaacacttaatagtaatttctaccagtgcaaaaggatatatttttgattggggtggatgtctaatagg

SEQ ID NO: 420591 - DNA, 490 bp, Homo Sapiens
tgaggatccctccctatgagacataatataagtggacgatgtgatcggagcacaaagaccagcaataccctattctcgaaatgctttccctttctcctgctcacagtcatgagtccctcactttttcctctgcttaattgagaaattccttgaaagaaaaatctccctccactgcctcacccatcagtcattccacaactccttgcgatctggcttcagttttcagagctccacgactactctctagttaagaaaaatgaacaacggctacttcttttaaatgctggatttagtgggtgtctcaatcctggtcttttgatttggcagcacttggtacttgactgggtctctctccattgccaggtccagttgaatctatccactgtgtgctttcctttgtcttctacttgacacaacctgtccccctccttaataagaaaatcaatctctctgtgcctctccttgccacctctccatagatgtctaatag

SEQ ID NO: 420592 - DNA, 212 bp, Homo Sapiens
ggctactctgaggttttcttgaggatacttccgattcttgctgttttagaaaaatgagattcgattatgatactgatttatggataggttatttggcaatgattattagtgtgtgatgcaaataatttcaaagatttgttcttaataacagctatgctcactgtagatgacgcaataaaaaccgtgattggtagatctggttgctgatactc

SEQ ID NO: 420593 - DNA, 271 bp, Homo Sapiens
aagaaagagagatagctagttccagaagatgacgcgcgatacggagaagcatgtaaaattagtgtgctgttggcctctacactgagaagagcactggttctaagatgttattctctatttactttcagaatttcggttacggagtatcatcctctttatttagggctggaagagatgtttattgaatttttcatactacttaaatctgaactagctcgcaaacggtgttgatacaatcaaacatgctattagccttgaggtctaataggga

SEQ ID NO: 420594 - DNA, 234 bp, Homo Sapiens
acgtcgtatagagccgtgtgtgtttctaagtaaacaatacagaatgatatgttagaaaatacttgaaagctacagataggatgggtgggaccaagatggacaactagtaacagcagcaatcagaggctcacatcaaaaagaatgataattagtgtgtgactccttcactggcaaccaaggtatccagattctctcatcagaactgactaggtggctgacataataacggtcagg

SEQ ID NO: 420595 - DNA, 245 bp, Homo Sapiens
tgcggcattcagtatgatatggggggtggtataattgtaaatagatgtctattgtccttagctaaactttagcacatgtgtactaagcgtgctgttaaccaagagtatggattctgaggacaggcttgggcagaaatttcatgacaaaattagaaattgtataaaagcctccataggacctgatacaaaagggactatactgtgaagaaatgtttatgtttactgagcaatattctgtctcatta

SEQ ID NO: 420596 - DNA, 551 bp, Homo Sapiens
tattagacatcaaagagcttatatcaagccaaacagcgtgtgtattggagaagttgcctttctctcaaaaaggatggataggaagcagtttttaaaaaaaatctgcctgctttctgaagatgaacacaaatctggttacatccaacagaagatagaatgattatacaacatgaggcttaagtgtttgtcttttaaaatgttcttaggttatgcagcaagagtttacagtagccaacctgtatttccaaggagatttaatcagaggaagtatcaaagaattgaagattagtatgattttgaaggttttcctaattatttttctgatgatctcttctcaactaacagagctgttaagtagagttgattaagcaatgtcaattttttgaaaagcccttaatgacatatttacacagtagttatgaagagccccccaaagcccatcatggattataggagcaagttatagccattaaaaccatctgtgattatttttttgtagtagagagtgatgtcaagccatcagcttctgttcaacatatttcttagaaaag

SEQ ID NO: 420597 - DNA, 418 bp, Homo Sapiens
tcagaggatcccttagacatcacatgacatgacataattagaaagctgtgtgtggcagctgcaggaaaaagatgtaacacagaaaggctgaacaagaccaagcagccagccgctcagggacacccaccctggtgtgctctataacaaaggccaagggaatgatcagtcagggctgtgggctcactaggcacaggctgactcaggacagaatgggtggcagatactctttttaactctagaaaagtcacccaaaatccctgcagatcctgaaatgcttcctccaggccaatgtcattatcccactggtaataaaacacctcccttctgttgactgctttacagttataaagggcttttatctacgtaatctcatttgaagagtcattccgtaacaaaaatttttggatgtctaataggg

SEQ ID NO: 420598 - DNA, 448 bp, Homo Sapiens
ttcacagggtggggcaagatactcctcatcacctgctagggtctcctgctgctgcttctggccataggattttcactcaggaatgggaggggtttaggctatcactggtggttctccaagctccctcatcagcactgttttccgccgacatgctttcagatttgtactcaatttctcccagtgtggtccctgcctcatctgaatttaaaattctagctctctgcatgtggtctcctcgtgttcttctttccagacttggcatctcagcagagccatttctgtttttgggtactcctccttttgaggatgaacccaccatggtggacatttctccttactgccttcgcaggactgactgttctttccccagcagctgatattgagtagatttccaatacaagttgaaatgttcttaaggtttaagaagtaataagatggtgcagagtca

SEQ ID NO: 420599 - DNA, 413 bp, Homo Sapiens
gtcgtccatatagacatacttaaaaacccattctctgggctcagcaggcagaaccccctgatatatggcagggggtaagaagccaggaccaatgttcaggcaaaccattaaggtatggaaagaacagaggagttcgtgttgatttcactgtccttacctacatagcccaggaatgaatatatagatttataatacataaagaaaacatgcagtgaatgtggccaaatcccaagcttgaccttctgggccccatatgatatgcacggtgagcaggcaaagttccaatgagctcttgccacctgccaagcccatctgctacaaacacactggcagccaggaagtcacacattataaccctataggattcctaaaaagtgccaacagtcttcttgaggagtaagagggtacaggga

SEQ ID NO: 420600 - DNA, 258 bp, Homo Sapiens
tcatgccagtaacctttcttttctctttactcacaaatcgctctagggaccagagtgatgctgtatactttatcttagtaaaatagatgaaatctgaaatgtagcctaaccctgacacagaaaaaccacatataaaattcgaatgttcttagacatactatacagtgagccgtgctgaaaataatagcctttctgtgtaatttatcctgtatttctcctcccttatatggtacctcagcttctcattcctcctaatct

SEQ ID NO: 420601 - DNA, 197 bp, Homo Sapiens
ggagtcttaggaagataatccagcagtggtgtgtcagctgaataaggaggagaaaagaagccatttaggagtactttaatgtttagatgtgagaggctgaatgtttgggttaagatgttagttgtcagaatcatgagaaaaggttttaagcaagtggcatttctaattctaaaaataacaactactgttatttattg

SEQ ID NO: 420602 - DNA, 511 bp, Homo Sapiens
gatgagacatcactgcctatatgaagctacaaggtataaggttggtcctaggctaagttagaacaaccattcactttcttttataatccccttccttaaaattagacgttaaggaaatccttaatttttttgcctgaataaccctgctaccactgaaaactcatagggaaatagagtttcaaatgataaaataattcaagtcaaagcttgcgtttcttgaagataactagctggtcatttctgagtaataattggtatttgcacctcaacaatttgtagtgccttaggcaataccaattcaagaaaaataagaacaatggacaaatgagaaattaccctgcgcaatgaataatcacacaaaatttagataaattaacccggaataaagcaattttctacagagaaatatgtttttcctgctttcatctataaagataaggtccaagatacacatatataaccacataaaattcaccactaaatgctaagaaaatgggctcccagtttttct

SEQ ID NO: 420603 - DNA, 344 bp, Homo Sapiens
acctcgagtctctcttttaattctttaagtttataaaattttgcctcttcccacttctctacctttttctagatttacttagatttcttcttccttagccttttactttttgtgacaacaaagtcagattttctttcttagagagaaatttaggtcatcctttataattcatcttcttcccgtgttattagaaaatccagaactccatttaaatttgcagagagagaacctcactaaaaacgattgtggaaattacctcatgagcttaggtctcttcttttggcaataggtacattcaaaatataagaagagaaaatgaactaacatataaaaactcctctggg

SEQ ID NO: 420604 - DNA, 156 bp, Homo Sapiens
tcagagtagctattagtagtagcctactgttagtagaagttaagtagcattatgaagtgagagggaacaaagattttacaaggaaaatgaaaacaggaatacctcttaaaaacgatcaaaatccctacaaacatttaaaacaactttaccttacag

SEQ ID NO: 420605 - DNA, 331 bp, Homo Sapiens
ttccattctgacgtcttagtcatcacatcaggttatgatcacaaccttcagtactctccgtgccctccatggttcaaaatccttagcaggcaagagccaggcctctcccatgtgattccagaccagctgttcggtcctgtagccaagcccggccatcaccccgccattcagaccagcttacctgggcttgcttcctcctttgctgtgcttaatctgggtgttttccttaaaatgtagcctctggtctctgactcatagaaatggaactcattctataagcaccttactaaagacttagttattcactaagctataaacattttcctgaaaa

SEQ ID NO: 420606 - DNA, 394 bp, Homo Sapiens
tacttatctgaataggaagattaatttttaacatgatcatttttgcaatgtattaaataatgaagttacattaatttaattaattactcaatctcttattttcactggtgaaatatctgatacaatgctacagtggcagtataactactgagtcttttcctgatcatcattattgtgtcattattgataattacaaggttttgggttttggtatttagtatttagtctttattcactctgttcatttagtttcttattctacctttgccaaccattgcaaatcatcagctataacgtgatggcactgacagggaaccttgacttgttcccaagaaacatctttgaaaatattaagtataaaaattctcttagaatataatattttacccatatg

SEQ ID NO: 420607 - DNA, 172 bp, Homo Sapiens
tacttacaaatgataacaaacattcctttatatctttattatatcattatactatatttacttactccccctttaagagtaaacatgtcactgcttggagcaatgaaatacaagcaaaagtggtatgtgatacttctagtcaaaagtttcacgtgccatttatcatgtcctg

SEQ ID NO: 420608 - DNA, 321 bp, Homo Sapiens
tctccctatgggacatcaaataccaattattatgtcacttcataagtgaagactcaagtcacatcagttacctcttccattatctgtatttttacgagcacttggctcacacttccatgacagcaagaatcctatgacattataaataattttatatatttcttatttagatttaactttctggaatctattttggtatcccagggatttgacacacagtgttcattaaaagcttgcgctcaatgtatatgagtgactaatctttgatttactaaatatggtcagctagaacagaattttcctttggggatgtctaatagg

SEQ ID NO: 420609 - DNA, 527 bp, Homo Sapiens
  misc_feature (293)..(301): n is a, c, g, or t
  misc_feature (338)..(447): n is a, c, g, or t
agcattcaggaatgtacagataaaacctatctttcaaagaatatcaaatctctttaccagcaacaagaaataatataatggtaacattcttaaaaggaccttaaaaggagatatttaatttctcaacatatattttggaaaaccataacttggctagcatatatacgagttagatctaaccggcaaggttaatttctcatttcaaacacttaacatcgtcatggcaagatgatcaaacctcacccaagcacacaccatcctccaacagctgaaattcattcctaacaagacannnnnnnnnaatggtagtagtttttcaagtaaaattttagagttcnnnnnnnnnnnnnnnnnnnnnnnnnnnnnnnnnnnnnnnnnnnnnnnnnnnnnnnnnnnnnnnnnnnnnnnnnnnnnnnnnnnnnnnnnnnnnnnnnnnnnnnnnnnnnntttttttaaatcctaatatgtgtaaatatccttatgatttttaaataaatcctctcaatgggaaaaaaataacattttaa

SEQ ID NO: 420610 - DNA, 160 bp, Homo Sapiens
  misc_feature (90)..(115): n is a, c, g, or t
gtctagaggatctcagggagtcaggtgagaattaccgaataaaatatacaaaagggttatgtcaggccagtggcaatcaataaatgctannnnnnnnnnnnnnnnnnnnnnnnnnagattaaaatttaattggttttagcttaaattcagggtgaaaatg

SEQ ID NO: 420611 - DNA, 194 bp, Homo Sapiens
agacatctctaccagatctgtctgcgttctctcaacttcaggaacactgagcatccttacaacaccaaaaatttccaggaaagagacagaactgcccttctctgtacacagggaggaatagccagtacagaatcaagctcagggtagaacagaaccaggctcaacattaggtaaaagtgtaccctcgctgactc

SEQ ID NO: 420612 - DNA, 280 bp, Homo Sapiens
atcgtgttacctggtgtacatgctcctggtctatgagatactagctggtccataaagtcagtggtgtaaagtggactctgaaaaattctggcagtcggagctgtgagtcgacttaagggaaaatattaccgaaatagtggaacagtggcatgtgctccggtaagcaccatgctcactagaatggctaatgttcgggaagcagtgctgggcaggatagggttctgcaggaggcagtgagaaagcctggggctttttcctcttctccaatgtctaataagga

SEQ ID NO: 420613 - DNA, 502 bp, Homo Sapiens
gatctctctcagcagtgttgtcaggccgggtgtagggtgtgtcagtctttaattcagatgctttttgaacagtatacaggagtttcagtcattagtatgtaaatagagattaaaggcacatgaaagaatgagatttcttaggggagacacttagggaaaggaagagagctgagaattatgccccagggctctgcaacttctcatgtctgaagaagaggatccagaaaaggagacaaaggaggagtgcccagtgacgtaggaaggaagccagggcactagtgtacaagagctttggttaaaacactgacagggaaggatgataaatgggataaggcatgaagatggaaaagtgaatattaagtatggcaaagagaaagttattgccaacttggctaaaagtggtttgggtggaaaaatagtaaagagagctttattaaatgaggtgaggtgagaaaatgcagacagagagtaaaggcggctttttcatgaggtcttgtagtaa

SEQ ID NO: 420614 - DNA, 135 bp, Homo Sapiens
gaggctgatctagaggatccctcccgtatagacatccattctagcagcagaatctttaattgaaaaagtggttgaatcgtaatggacccagttctaacctaagtttcaggtcagtgactttgtataattcatcgg

SEQ ID NO: 420615 - DNA, 360 bp, Homo Sapiens
  misc_feature (106)..(241): n is a, c, g, or t
attatggagaaaatggacaaaatgggagtacagaagtggaaaatcacatggtgaaggagctagtgaattttctcccttagttatttagctggaaatatgaatccannnnnnnnnnnnnnnnnnnnnnnnnnnnnnnnnnnnnnnnnnnnnnnnnnnnnnnnnnnnnnnnnnnnnnnnnnnnnnnnnnnnnnnnnnnnnnnnnnnnnnnnnnnnnnnnnnnnnnnnnnnnnnnnnnnnnnnnggacctcactttttactccatatacttttttttcctgttgtggcttttttaaacaatagatgttggtaatttatatgacaataaagagtctcattaaaaagtatttcaaaaattttgtg

SEQ ID NO: 420616 - DNA, 378 bp, Homo Sapiens
cgggatcaatatactggagagttctccggaaactacgatgtgatggcaagccagggtgggacaggcttaccaaggaaaagagtcttgggagaaaatagcaatgatcccaggtgtgagccgtgggacatttctccatttagaggctggagagaaaaacaggaaacccagagagtgtagtaacctggaagccagtgaagagtgtctcaaggaagacagtgagcagattaggattgagatttggccattgggttcagcaatatagaaataattgttggattgagcagatattctccccaagaatgtaaaatttataatttcaaggaattatgtgccatatcttagactatagtgctcaacattttaatagatgttagaaaa

SEQ ID NO: 420617 - DNA, 156 bp, Homo Sapiens
ttagaatcacatagtgcatcattacatgaaaaggcgcgtatactagtattatagttgtcttgctacgaagataactttttccagcactcttctaacttatggcaacatgttaatcaaatcagagcgagatagtgagaataagtgaaaagagttctt

SEQ ID NO: 420618 - DNA, 483 bp, Homo Sapiens
cgatagacatcacccaattagggagtagcagcagccccgctttagttcccttccaaatagctggtacatgtatttctctccaaaatcttatgggtgacctcttagcaagtttctctatgtgcctaaattaactctgacttcctataaatattttattcaattagcgagtgaacaaatgaggcgtacatgggaggctcatttatttttcaggccaaaacatgaatctataatatggtgatcccactcattgaggaaatccatctattccttctccatactcacagctagtgcttatctttttaaaaacaccataatcttcagcatgaaaataatctcctaattaacccccagcttccagacttcctctactccagttcattcttctcacagtagccagagtaatttttctacattgaatttttttataaagaaacttccatagtttttactctgttatatttaataactaaaatatatgagtgg

SEQ ID NO: 420619 - DNA, 165 bp, Homo Sapiens
tgatggtgttctagaggatccctgcagtgcgcgtgtgctgatagcctggtcctaaccacccaggggtggtagtgactgtgggtgggatgagttgtgggggaagtctgtgatccttggcagatactctctgacttcagtccaaggtctttagaatactattgtgag

SEQ ID NO: 420620 - DNA, 122 bp, Homo Sapiens
ggagggtaaaagaagggcaggggaaccggaaacaagggcaaaagcggtacccggaggaaaacggacggcaaggaaacacggaaaacggggaaaaacggaaacagggaggaaaaggaaggaca

SEQ ID NO: 420621 - DNA, 142 bp, Homo Sapiens
aaggtaagcgaacctgctagaactgcagctctttgatatatgtgtgtatgcacatgagtgcacatatatgtattttgctgggcgacagggtcttggactttcaacaagggatctcaaaggatcagttccatgaccaaaaagg

SEQ ID NO: 420622 - DNA, 540 bp, Homo Sapiens
gctgcgtcagaggatccctcctatagacatccagtggagatgacaagtaagtattccagtatgtggattggattttaagggagtgtctgtgctgggttcataagccatcagcatgtagacagtatttagagccataggaataatgaggtcaccaagggagtgagtgtagatagaacacacagtccaattcctaaaccacagggtactccaatctatagatgtgagggagagaataagaaaacagcaaaagaaatagaacaagtggctggagacaaggaggaaaaatcaagaggatataatttcttgggcaccaatttttctagaaagtgttttaaggaagagtagagtgacctactatagctatgctgagaagctaagggctgagaatggatcatggcctttaacaacgctgaattcatggctgaccttggtaagtgcacattctgtgaaaccttgggagcaaaaatccttatggggtgtgtaccaacctgagatgaggagagtgattcgaggtgctaagacagttaatctgggaaggag

SEQ ID NO: 420623 - DNA, 171 bp, Homo Sapiens
agaagaatgttttctatgacacaggagaaacatgttgaaaaagcaatacagaggattagaagaaggggttgactgaaaataattcacaatgagcagatccttgcaaacatgcccctaaaggtcgaggatgctgagaggctgaataaagggactgacaaacccagtttctca

SEQ ID NO: 420624 - DNA, 108 bp, Homo Sapiens
actgagcacccatttactaaaagggaggctgagccttggcagaggaaaggggtgtgttcagggccacacacctgagacctggtgatcctgtgctctagaggggtaccg

SEQ ID NO: 420625 - DNA, 273 bp, Homo Sapiens
acgttatgcaaagatacatattctgaaaataaaagaacaagacataattaagccaagtttattgttatctgaatgtcaaattaaaagaaaaccaataaactggtcatttgaattacatgtaaatcgtttgtaagcccacatttgaaatttctatttcgtcattcacatgagtgggtagttcctccctgactcttaaacctacccttattctccattctctgatagagaagaagaagttagtgaggaagaactggatcacgtggcatccatcag

SEQ ID NO: 420626 - DNA, 394 bp, Homo Sapiens
atgaacgtagtccgaggatatacaatctggagttatgcaagagagatcagggctgcagatataaatctggagagatacaacacgcatgtaggtagtatataacgtcacaagacagaatgatatcacagagggagtgattatgaatagaagtgagaagctgtctaggactctgacattaagaagttggaaatatgacgaacccgcacaaggaacactggagccagctagggaaataggaaaaacgaaaaacagggatactgtcctggaagacaaaggaaggatctgctataggaccactactgctaaaaggtcagtgagagctgacaattgaccttggcatatagctcataggacggtcactggatgtctaacgggagaatctacatagggaggg

SEQ ID NO: 420627 - DNA, 278 bp, Homo Sapiens
aaaaagaatgtgaggttagaggtccctttgaaacaacacaataaagcagtaagatgtctgagatatgatgctccagatgagggacctgtatgaaaatagagaacgagcaatcattagaatatctgtgtcaagtatgccatcggagtggtgcggtcactcgatcactagacatttccgccttgcactcacattaggttttgtttatcatcaagtaagagagctagaaagtgcaggctcaaagtatcctgtgggtgcttccctccccggctgccattggg

SEQ ID NO: 420628 - DNA, 225 bp, Homo Sapiens
atgacaatacaaatgatacaccacagtacttcctgtactagcttagtacgcgtgcttctttctagaaacaactgtgattctctacctgggagcttcctctggccacaggagcctgctcacctgattgggacaccctagcagtactggtgagttatagcttccaggagcagctctcttccagcaaaggaaagggttgggctgaacagtacttcggctgccattggg

SEQ ID NO: 420629 - DNA, 151 bp, Homo Sapiens
agagaatatataacaaacagtagagaaagaatcagagtaatagtagcactgtaaagtactcttacttaggctcactgtttttactgtgtcttgtaggacataggcacagttcataagaactagaaaggtggaacctactagactcttacca

SEQ ID NO: 420630 - DNA, 106 bp, Homo Sapiens
acgccctcaccgctaggatctgagatcgacagctgattctgcacatgcaaagccctgctgccatttgtcatttcaggaactgctttatttttgtcaaaatggaagg

SEQ ID NO: 420631 - DNA, 359 bp, Homo Sapiens
ggatccccacgccctcccgctaaaatcttccaggaaccctttctctcactaatccccttcaggcgcaaatactccagcaaaacttaatcactggtttttcacacttgacatgaactttttccattttctgacttttctcaaagtttaccttgtgtagaataatattttatctaactgacacatctaaatataactattcttcaatgccagctaaaagcttatctcttccagaatgccttctttctgattacactaatctctgatcacacctacatttacttgacttatattactcagcatgtttttactataaagtaaatcttgtgtcatcttcctcatttacactgcacattcatcaa

SEQ ID NO: 420632 - DNA, 362 bp, Homo Sapiens
acgcctcaccgctagtgttgctccgtggtgctctgttgtatgtgtattcgaactaatgcccaatttcccccgcctcccttgaatatttggctgctttaagggaagttttttgcggagaacgctgggtggttggtctgggccaggctgctccgaggtgagctaggggacctgctgtgcccgctttgagccgcagtagactggagtgcaagactccagggatggggtgtggtggagaaaacgagtaccacaccctcttcttttcctcttcacctgctggtgaagtctccccattcagcattttgctgatttccttttccgagggattggctcagagaactgaggaaagctgctgaaatacttgg

SEQ ID NO: 420633 - DNA, 259 bp, Homo Sapiens
ttccagccaatagcggtgagggcgtacgccctcaccgctagtttctgggaagttctttatatcccttcgattgtatttttttctgtctaaacttgcacaaatgggtacttttgtttccaactaagaatcatggcttgcaaagattaggagatttgttaagtagagtgaccaaaagaacatgtatatcctcagaatagtgttaagcaagaaaagtgaatttacttagtgagctccttctaggggaaagcaggaattaagt

SEQ ID NO: 420634 - DNA, 246 bp, Homo Sapiens
cgccctccgctagggaattttggaatactcttaatagatctgttcttgaaataagtcagctaaactgagtgaggtgctttgccaacacattaactgaaagtcctgaccaaccctgatcccagaccttcatggacaattctcttgttttatttccatttccagtagttgtatgtaattcttctaagagacttgttccaagccaaccttcctagtggtcttgttgaaatgagatagcggtgagggcgt

SEQ ID NO: 420635 - DNA, 202 bp, Homo Sapiens
acgaccctaattaaaagattacgattttccataacagccagttgtgggccccctcctacgtgactttgctcaagcccatattgaactcttggtcacagggaccagggttcctgaatccctggcccaagtgacaactacccatagtggcagacaagcagcagccacccaaacattagcggtgagggcgtagcggtgagggcgt

SEQ ID NO: 420636 - DNA, 207 bp, Homo Sapiens
cgttcctcacgctacgccctcaccgctacgccctcaccgctacgccctcaccgctacgccctcaccggtacgccctcaccggtacgccctcaacggtaggacctcagaggtagtacctcagcggtagtacctctcaggtagtacctctccggtagtaacattatggtgataactaagaggcctcagctctcaggtatggtaacggga

SEQ ID NO: 420637 - DNA, 391 bp, Homo Sapiens
agaggatcccgccgccctcacgctacttaccagttcccacccccacttacgcactcacattacttaccagttcccacctccactttccaaatgaccttatttcatgattttatttaaggatgcctatataaaaagtcccatttattccatacaaaaactgaaaaacagatttgttcaggcaatattaaatggatgagaggtttaaaatctggtgctcaaaccaacctagtcgcctctcctgattctatctaagagcatcttgtattgatttattgttactgattccaatgtgggaggtaacagtacattctatatgcaccagtctcatgggaacttctatcctgttttttacactgagccttgctctgactagttactaataattagagga

SEQ ID NO: 420638 - DNA, 361 bp, Homo Sapiens
acgccccacagttcctactctataactcaggaaaataggaattctatcattagtcaaaggtattatattgattagaattatagtagctgctattaaaattgaaatccaaatatcattaccttaacacaatataagtttatttctcactcatataataatccattgctggtgttccttgatgactggggagctttcctccaaatagtgatttagggacacagagttctatctttcagctttgccattccatatgattaagattctacttccgtctggacagaacatccttttcttaaaaaccaagccctgagtgccatattgcttctattcacaccacagtgaagaaaattcatctgataga

SEQ ID NO: 420639 - DNA, 356 bp, Homo Sapiens
cccttcatagaaggcagagttggaattcaaatcatagttcaaaatctgttcttttagttactatataatcccagcttctctctcatccccagcctctcaaattctagtttaaaattttggacaaaggaaaggtttcaactataaagccactaatctcctggcacattcactcccatcaactaactccaaaccctccaccacacacatgcaaaagtatcttttataaattattataaagtctaatcctactttctttaaaaggtaggcttcaaacaaattaatcagtaacttaatgttatttttaaaagtgataatcatgggtaacttgaaaacagtggaattattaatgttttaaa

SEQ ID NO: 420640 - DNA, 351 bp, Homo Sapiens
acgaaaaatatgggaaagggatagaaaggagcaatttgacaactaaaaatagttgggaaaagataagaagaaacaagtgagtcttagagcaaaggagtgaatggagccaacagatctctgttgctctttgctcagatggggtaggccttggctctgccaatgagtggtgtaaagtccaaatactgtaagggaagaggacgtgcgagcagccatgaaatattcctttctgagaaactaggaaactggacaagacccctccggatggtgcccaggatagaatgtgacttgaaaatgacaaagagcccaaagtgcagtacttctttaacctagcggtgagggcgttctaatcat

SEQ ID NO: 420641 - DNA, 127 bp, Homo Sapiens
cgctagggaggaggttatttcaaatatggggacaaatgggaagaagtaccaggataaggaggtcaaatggtggtaaaaaaatacctggtatagaaaatgaagaagatcacgcaaacgaaaaggagat

SEQ ID NO: 420642 - DNA, 371 bp, Homo Sapiens
agtccccacgccaattgcatatgcatcggcgttactatgacgtatggtgtacaagaacatgctggagttgaggtcaagtatcttgaagctagactcttctgtgtttatcaatacagatattgaagttgttcacaataatgacaggagaaggtgtgaatgggaagactttgatcaggatgacctgaaactcaaaaaaagaaggggttttttgcacaagagtgaaaaacagtggtttggaaaaggcaaagaatatcgataaaaatgcagacattgcctcggaaccacaatgtagaaaaatgtgcaacttctacttgaaaaggtaacagagaggtggtgtcttcctgcaagatggattttaattaaggcaagaa

SEQ ID NO: 420643 - DNA, 334 bp, Homo Sapiens
agactgaggagggactgcgaagacagctctgcatcaaaacagtacgtgagaaaaaagcataggacgctctcgcagccgtagttgttggtgacaagaaactgtgcttctaatctaagcaaaaaatatctccacatgccaactatacttttccaagatgtaccatggactactcaaactaacacagccttatttatgtatttaggttggaagtgggcaaaagtgtatcttgtctatgtttctatgtttctacgttgggatgacaccatcatccacccagccagacagttatcaaccttcccactttcttaacctcttacatccgattagaccctat

SEQ ID NO: 420644 - DNA, 339 bp, Homo Sapiens
  misc_feature (329)..(329): n is a, c, g, or t
tctctaactgaggagagggagttccctgtgtgcttcctaacgccagtattttcatcaaatgagtttgacctgagagtgatgttgaaagggcagacatgagcatggggtcagcgtgggggattgggagccagtgtgaaggggcggtacttccgtggtgggttgttcggggccattgagtgtatgtgcctattaggtttaggggggcacctgccccctccttcctggctggtgtaactgtgtttgccacagtgagagttgggcttgtgggtgcagcagggctgggatgtcagggactggttccaaagatggtttttgctatgtggccaggnaaaaaactag

SEQ ID NO: 420645 - DNA, 347 bp, Homo Sapiens
gaggatcccctctctagagagacggagtggagtagaagtatctatctcctgagcttgtctttcaaggacttaactatgaaagcaactcctccttcaaagcccttatcattttccgactcctcttgcagctgctccacaacctctgtgtgcagccactactttcggggtggcatttgttgatttctacctctgaattggctgaggtggcacctgacgtttagtctttgggtaattagagatgacatatttgcggcatgtttactccttcccccagctcacttggagtcatgctgattttgtttagtcaatgctctgacagatcgcctttggtattttttcaattgtac

SEQ ID NO: 420646 - DNA, 321 bp, Homo Sapiens
  misc_feature (131)..(147): n is a, c, g, or t
gtcctcaccaagggacagatgtgaaagtctggaaattttgaagctaaaggaagtataggcagtatatggaaaaatggaagtataggcagtatatggaaaaatggaagcaatgtaatttttaagcatcttannnnnnnnnnnnnnnnnaaacttaaaataggaaacatctcccagctctaaatgctcttaaaacaattacatttgttatattttgagatgagaagtcttcctgaaaacaacagaagaatttgtcggcaaaacccactgtttttaaatattggcatcctcatttgtagtgctaatgagcatttctgtttcttc

SEQ ID NO: 420647 - DNA, 111 bp, Homo Sapiens
aatgataaaacagcccagaattttattttccgtaaggtgcttaggagagcgtgggcatagccatgagacctccgtgttgggttgtgtttaaagatgtgtattcatttctca

SEQ ID NO: 420648 - DNA, 243 bp, Homo Sapiens
ataaatatacattgaaggtagatttaagggaaaaaatagaaggagataagctcaggaacataatatatacatcttgtatgttttgatgacatagaaataaattactaatttaattaaaattgaaggagaatagagagaaagggtaaaaatagaaaaaagttcattgattggtatataagcaataggtgagagtcaaagaaaccattaaaaaatggcaaaccagctgcgccaaaggaaaagttt

SEQ ID NO: 420649 - DNA, 389 bp, Homo Sapiens
acataatctgtgagtatttccgtagcaagggacacaatgttaccccaatgcttcacatgcttccctacattttctaaatgctcttgattgtcctagacaatgagctaagaacaaaaatgacttggcacttcttgtccaaagtatctaggactaagctgagttcatacgcttgtctcccatgccacggccacctagaagccatgctagtgacgtagatgaaagtggtctggatccttgagtcacctcctgaaagggtagtctagggagcccaccaaacccagaggacttcgagaacctcagatttcagaggtttgttgtgcctccaacatccctaacctatcctggcttatccattttctcaggaaaagtaatggctcacaccaataaag

SEQ ID NO: 420650 - DNA, 347 bp, Homo Sapiens
gttggatgtggatgtgtagccatggactcagagttagacactgtggaattggagccctgactggtagtgtgttttcatttctctagggctcaattttttatttaataaaaagaatacttctgtattttaatgaataggatcaagtgagaaactgctttgtaaaatatgaactatgttcaggtcagcaattatgctaattctttctatgatctcatctagtctaagatgccgtaagtgggggggtttttcatgaggatgaaatctgtccgttgccagatggttcaaagggcaagccctaagtcagaggttttacctcaactgctttcaaatcacagataaccttgggc

SEQ ID NO: 420651 - DNA, 353 bp, Homo Sapiens
tctctagatgaggaaggtattacagtatttcaggcaagaagtaatgacggtctttgggctagggtggtgaaagagggaagtagaccaaccggtttgggagttttttaggggtagaattgaatggagttggtgatagattaaatattgactaagggagcagaaagcaccaaagatgaacctaggcctctgcctaaatatcaggatggtgatattttcttagatagtgaagacatatttgggagagagaaagaccatgagggtggttgctgacaactagaaagccatttatctttatgcaagctatcaatgataactctcaggcatcttgtagataatgtgaaaaaccattggta

SEQ ID NO: 420652 - DNA, 285 bp, Homo Sapiens
actgggagcaactgctttaatgaacttatttttcctttcagtaagaaagtctgcatagttctgaatagctcattcttttggcttaacatatatcttaaagtagactttcaaaaatgttggtgacttacaatatgaattctccgtatttatataacaacattctcatactggcgaatttccaaaagtatcattgcttggctaatcagttttatatgtgtcttaaattttcattgtcagatatataatttgcccgtaatttgacagttaattgtggctaatttctta

SEQ ID NO: 420653 - DNA, 360 bp, Homo Sapiens
ctctctgactgaggatctatcatgaaacaattatcccgtttatggaggagcaaacaaaggcttagagaagattagtaatctttctgaagtcacatgacttatgaacaaagttgggatttgaacccagaactgtctgaactccagaacccacagccttagcatccatgctctgctgctttatggccccaaggccaaccttctgaatccagcttaaggttttaaattctgaagttctatttctgggtcaacccactcacccttcttgtacctccttctcctgggagagaatacagaagagtgggtttaggtcaccgcgccttaaacatgccccatgccctttgctagctagtctttgtaggc

SEQ ID NO: 420654 - DNA, 224 bp, Homo Sapiens
ccaacaattacctacgtgctccgtagttaacaggagccctcgacaatactagagacggcctgccattgatcttgcttcagtcgcaggtctgcataagccctctggaagccctggccatgtttgcttcacataaaacctggacactgcgctatatgggagacacagtcatgctcctccaggtgacatctgaccccagtgtggagtccttaaaacagttgggcaaa

SEQ ID NO: 420655 - DNA, 285 bp, Homo Sapiens
ctagacgaggagcgagagtagaagggggaacactccttgacaaaacaaaactgtgaggaaaacttcaaggccaggcaaagccaaagcctgcccgtcacctcccagtgactacatctggagctaaagacacaagacccagcagtgatttcaggttcactctggacaactaaaaccaccaaatgagaggaaaccaccactaagcacttagatgtgagcatggctgactgtatggacttcaacgcaccatttcctggctctgcacctgcttccccagatgggtcccag

SEQ ID NO: 420656 - DNA, 157 bp, Homo Sapiens
gatacaaagtgttcccaaactgtgattactaaaggagacattcgctcactgaaaattagctggggcacaggtgatgactggagtgagctgagtcatacatctcttcaagtagcatgcaaaaagggagacgattcagtgaggtcacaaacaagcaaac

SEQ ID NO: 420657 - DNA, 220 bp, Homo Sapiens
tgaggagacagataactgttggaaataacttcgcatccctaaaaagcaggctcttgcgaaattcctgtagagagaggtgagactattgggcctgttgcggttatgctgagtcagtcatacttctttctactgtcgctgtccagaggtcactgatggagatttgtttctctatataaagcttactgatttacagaaaaactattttagtcattgtttaaat

SEQ ID NO: 420658 - DNA, 139 bp, Homo Sapiens
gtatatcattcgttaaatcggccaccccctactttgaaatgggaaattggaattttggggaattatttaccagtttacttaataaatgtaagataatattaatacaaaataaatatgcaaggctgtctgtacatggata

SEQ ID NO: 420659 - DNA, 211 bp, Homo Sapiens
  misc_feature (90)..(114): n is a, c, g, or t
ttgtaactaggagttaatagtctaggttcaatcttaaaaaaatgtcgttaatggtaattggtaaagcctcaaacagtcttcatcctaaannnnnnnnnnnnnnnnnnnnnnnnntaacataaatcaattttgtgacttcctggcaaataaaactgagtttctattttttatccattaaattgatgaaacagccaggcatggaaatgtacat

SEQ ID NO: 420660 - DNA, 288 bp, Homo Sapiens
tctctagacgaggatcagtagtttctttggatgatgattttcacttcattctgtggcttaggttaattgccagagttctaaaatggttgatttgagttggtttgaccatcttttcattgttttagagggaaagtgagttcatcaaagtcctcgctctgccattccatctatctactattactcctgtctttgaaaaaaactttaaatcctcttcatctcacatgcctttgcagttatgacttcatttctcaattcccctaacagcaaaactcttcaaagagttttcct

SEQ ID NO: 420661 - DNA, 388 bp, Homo Sapiens
tctctagacgaggagtcttctggaggagtccttagggttttctaggtatccaatcattggcaaacagagatcaccggacttcctcttttccaatttggatgccctttgtctctttcttttgcctgattcctctggttaggacttctagtactataatatgttgaatagaagcagtgaaagcgggcatgcttcccttgttccagtccttagggggaatactttcagcttctccttgttcagcatgatgctggctgttgagtgtgtcacatatggctttattttgaggtatgttccttctatgcctagttcgttgagggtttttatcataaagggatgctgaattttatcaaatgctttttctgcatttattgagatgatcatgtggttt

SEQ ID NO: 420662 - DNA, 143 bp, Homo Sapiens
attacaaaatctattaggagagaagaatgtagccaggacagccagaggtaacactctctcttcacactaactacccacctaggcaccaaagttagccctacatgaaaagtaaacagtttagctattgattagtgtaattcaag

SEQ ID NO: 420663 - DNA, 278 bp, Homo Sapiens
aggtgaagagagatgggctcagagagacggctgggatgttgactcgtacttctgtcagtaaccagcagggtggctgcttaaagatgaccgtgtggaagcaggtaggtgtaaaccgtcacagcactgtactgcaagcaacacacacagaaactcagggttcaaggccaggccatacccttggacgtacatttcacttaaccttcctgagttctgatctgtgcagtgggtctggtgcctggctcgtcagggctgctgggttctcctgtgacgcccttggc

SEQ ID NO: 420664 - DNA, 129 bp, Homo Sapiens
ctcgctccggttgggcatccctttctcccgaaagcacaatgcatgctatccccagaagctacatgtctttagaaagaggaaagaataacactccttcaataacagcaaccctcaggtgggtggtgaagg

SEQ ID NO: 420665 - DNA, 381 bp, Homo Sapiens
agaaaatggcagccagtgggcaggcagccaccggcctcttcttgctaatatatgcagcggatgtggcatttctgacaatattgcttctgcctcacttgccatttaatgttaagaggcttctagaatctcctgcatttaaagagtaatgactgttttcagggtaaatgctctgttaaataaccctggattattgtgtcgtgttattacatttataaaatggcatttcaaaaaataataattgtttcagagttaattgatgtttttaaccatcactgtgtggagaatttttattcagaagacagggagtgagcaagggagaaagagatttccatcgagagagtcggtactgaaaatagaaacctttcctgcatgtgaaatcct

SEQ ID NO: 420666 - DNA, 334 bp, Homo Sapiens
ccgtttggagagcgaaagatctgggatgctatgataagtcactaggaagttttgggggattgctggaagtgttatcagcatgtaggaaggcatttactcccttggagcaacattgtgaaaggaatacaatattaggaaaagagcttaggaagctgaaagagcgcagaccaaaccagcagaggatggggggagctataagtgtagagagagatactaggaatggacacctgtgagttgagtatggatccaaggtctgaactaaatagtatcccgagcagtttacacacagagtgacaagttagcaaacagggattgaggccgcaaacagggggat

SEQ ID NO: 420667 - DNA, 142 bp, Homo Sapiens
gtggagtctctggagtgacaatcttccaatagcatcaggacaggatattaagtttaataattagctggagagaaaagtttagaattgctgttttggaaaattggacaagtggctgtataagagttcataaaagttaagacca

SEQ ID NO: 420668 - DNA, 333 bp, Homo Sapiens
  misc_feature (242)..(266): n is a, c, g, or t
acatcccccgttacgtgagtctctactcacatttttgggagaagagaacaattttgttattgtagactacaacccagtaactagtgcagtatctatagagctgctgtgtttttccatagtttatcttatctacatctaggagctctagtaagagaagtaatacaagaaaattaaattaataactctttgtcatttaggcttctggtgactgcaacatgtaagcagcgtctaccgattggtcnnnnnnnnnnnnnnnnnnnnnnnnnattaggaaccgttctggactctgttcaccccacggaagtgtgatgttctcggcaagtgggtgttgca

SEQ ID NO: 420669 - DNA, 394 bp, Homo Sapiens
cggtaggactcacacaattttgcaagataagtaaccaaagcaaaagtcatcttaggctcaccaaaagggctacatagattagttacagaaaacaaggcaaggctaagcacactacctaacaatattactttttacttttcattaagcagtggaaagtcttttataaatgaaattttacttgagaaaggcaatagataatacataagagcagaactgctttgtctgaaacagggttgcgggtgtgaggtggtacgcagcgttctgctgattttacttccgtcttattttcctgcttccatacctacccggggggattctctggagtcctgaggattatctataatcttttccatatgataaaaaggcacttgggggatagggccatgtcttctgt

SEQ ID NO: 420670 - DNA, 373 bp, Homo Sapiens
  misc_feature (54)..(138): n is a, c, g, or t
acgtggtgtctcgtctttcccatgagaattaactatacaggagcaaagacacannnnnnnnnnnnnnnnnnnnnnnnnnnnnnnnnnnnnnnnnnnnnnnnnnnnnnnnnnnnnnnnnnnnnnnnnnnnnnnnnnnnnttacattaaaaatgtcagtctgaatttacccagatcctctttcagttccaaaatataagccatggcagccatcacaagaatgtacctcatatacctgtaagacataactgttcttcttaatgcaggccagaaatgaagccagaatccaaagctaaaccaataagaatgagagcaaatactgctatcacccagaggggtgttgaatctggatacagctgcttaggggtttagggct

SEQ ID NO: 420671 - DNA, 386 bp, Homo Sapiens
cttacgtggagtcttgagagaggttttcttcaactctattccaaaattatttttgctttgtgctaataagctgtcgttgtccagcaatactaatcttttggatcgtttggagtaattcccttcgcccagagttcttaaccggggtggatggaggccttcgggagagtcacaccaatgtggaaattgtatgtaaaaccttaacagcctgtcttaacagcattttcttaggaaagagattcatacattcattagaccctcgaatggatccaggacctcccaaggggttaagagcaactcctttagcttacttttcctttcaaaataacggtatttaatttcagatagtaatagttaaagctgaaaatatttacaggctaggcacagtg

SEQ ID NO: 420672 - DNA, 223 bp, Homo Sapiens
  misc_feature (13)..(13): n is a, c, g, or t
acacagaggtaanaggatcatttcctaccattgaatatataggttttatgcaaatgtaacacctcaggacaaggaaaattctatcgtcctgcctcctgactcctctacccacctctgctcttacaatggatttactaaaaggcaattttgatcagacctctcctcaaaggtagccctcaatttattaatctgccaactaaaagggtgcgtacaatgcctccaa

SEQ ID NO: 420673 - DNA, 213 bp, Homo Sapiens
tatcagcactaataagcatacttctcaccttctacatgtgtatcttacatgatactcagataactctaggagctcactgttatcctttttttcataatgcaagacacagtggggctgagagggattgagttatccacacaattttccttagctaataaggcggaatttaggcccaggtctacctgagcccgcattcctaatcactatgatgta

SEQ ID NO: 420674 - DNA, 236 bp, Homo Sapiens
tagcacaacatatcaataggtctattcacctgttgtctagagactgtgacactggtgtcctgactggccccttgcacctgtctcatcccagaccaactcattcttcacactattgccaacattaaattaaaaatactttcggctccgccctgtctcttgattgtggaatcagagggatctcacaatccagttctcagtgacattgactgtgtttctttacctgttcctgtatgtga

SEQ ID NO: 420675 - DNA, 398 bp, Homo Sapiens
tctgcaccagaacatgggacggactgagataacgtatacagaaaataaggggaaatatcaagtgaacagaggctgaagaagacagtagaggtgagactagtcagattatatttaaaatgtttgttcttattctaaaagccttaggaaactacagaagaaatattttaaagcagatttattggcgtagaactgacataaaataaactggaaatatttacatttaaatctggtaattttcaacatacgtatacatctgtgaaactgttaacataatcaagataataaactcagggaaagatacaaccttcctaacttaaatcagaaaaaagagaaagcctgaacagaccaatagcaagcagcaagattgaaatggtaagttaaaaattaccaacaacatg

SEQ ID NO: 420676 - DNA, 208 bp, Homo Sapiens
tctgggggagaggatatagaggaggagaccccagggttttagggtccaggagttgcgtggtcagttgggcattcaccctggggcccttttttggcccaacacatcctgagatgagggtctttgtggtcagaaagagacgtccagcccaatgctggtccactcttagcaccagactgctttgccagggtgcaggtgagcatgcctgagc

SEQ ID NO: 420677 - DNA, 104 bp, Homo Sapiens
cgatggttttaaactgcaccctaaggaatagatggaaaaaggatggaaggcatttcaggaaaaggtacatgagggtgtgagaccaaccataataatgttctggg

SEQ ID NO: 420678 - DNA, 175 bp, Homo Sapiens
atccacaagggtctctggttgtctcctggacaccctcaagggaatcacattgagcataccctagctgaagtttatcgtgatcgtttctaaataagaaattgtactgaaagttttaacttactgtttggaaagcaagtgccttgtctttgactgatttgtgtgtgtgctttttttg

SEQ ID NO: 420679 - DNA, 412 bp, Homo Sapiens
gagtaggtagcatcaatgagaaggcagtagcttaccaatgtataatatgcatgtttacgtatccttcctctatgaaatcaaagtcaaggcagaattaggatcaacactttcaaaggcaaactagtatatatgaagtctaaagacaagtagtttctctagtgaaaattttagttataagtattaacaacaaaaatgcaatactgacactagacaattcaaaatatcacttattatacttggggtctaagttttggtttcacaacataaaagacctggaaacttcggtagccgctaacaatgaatactcaatatttcacacaacagaagtcaatttactctaggttcgcctaatatttacaaatcatttaagtcaatttatatgtgggacagacatctcgctcctataggtaaa

SEQ ID NO: 420680 - DNA, 128 bp, Homo Sapiens
ttagtacacatatactatgtataaatattgcagatttcagtgacctctaataataaatatactaaatccattactcattatacaaaacctaattattacatctactgtattatatgttgctacccaca

SEQ ID NO: 420681 - DNA, 435 bp, Homo Sapiens
agacctgccatgtcctacacgtgcagcagacgtgagcctgtgcaattctgagacctgatctgccccattttcaggtgaagaaaccgagactcagtgtggttttgtgacttgtccacagaaacactgcagtaaatggtgggccaggacctggggccaaatatgctgtcctgcggagctcttcttcctggggtccacctgagatgggggtccctgggatagaaagacataacttggggcctgagtcccaggaagcaaacaagccttagtgccctcagctggagagggggaccctgtggtgttcccaggctcactccagagcagcaggctccgaaaccaatgccttctttccaaggagagaccatactaagtactaggcactgggtggggctctactgactggatctggttgaatcctcaccactgcccagaggagtg

SEQ ID NO: 420682 - DNA, 148 bp, Homo Sapiens
tgtgggtagcaactagatgataagaccccactgccactagccaaatgttctgtctcttctaaattatctgtacctcttttccacctgcattccagttattagtgttcatattttatctctagaattagagatcatggactcttctcat

SEQ ID NO: 420683 - DNA, 127 bp, Homo Sapiens
  misc_feature (45)..(53): n is a, c, g, or t
atccctgtggtagcaacatggattctacataatgggggtatgagnnnnnnnnngttagggttaacgagggtggtaaggatggggggaattagggaagtcaggattagggagttgaggtctagcggct

SEQ ID NO: 420684 - DNA, 314 bp, Homo Sapiens
tacaggaataagccatacatggccactttatttggatttgcaagttgtggactgcacaactccagaaggatagccatctaaatgttctgaaaatggaagcatcgggactgtagggcattttgctgtttttaatgcaaggtgctacatcacagtggtatgggtgccaaacagtaagtctgctaagtcccagctattctgacactgccaatgaataacaccctggcttcagacaggcatttgctgtctgcatttatcaaataaaatcaaagaattaataatctgtaagatctaacttatttgctagttttttgttg

SEQ ID NO: 420685 - DNA, 182 bp, Homo Sapiens
tgtaggtagcatcaatccaagcgttcatgcgacgttcgctttttgattcttcgttatcgcgctctttctttcattgtgaagcagaattcaccaagctgttggcattgttcactcactactagggaacgtcagctgttttagaccgtcttgatacaggttacttttaccctactgatgatgtg

SEQ ID NO: 420686 - DNA, 286 bp, Homo Sapiens
tgtggtagcaacaatggagttgaaaaaagatttagaaattatctcatgtaacgattcctgatctaggttcttcaggcactcaaaaataaatggataagcaagtactagtggttcatgaactattttcaatacttataaaattatcatagaaactgtaactaaagagaatgcacaggttaactgaattgtcaattttagcagcatttgattggaattatatcacctctgtggcaaagcttggcatttcttcttattggccaattaactttctatgtaataagatttg

SEQ ID NO: 420687 - DNA, 359 bp, Homo Sapiens
tttgggtagcaacaagagccacaaagtactgggttgatgaattgtcttactctgtttctttaagtctgatatgactctcattggcaataacatagagaccaaatgcatttaagttttatactctatctccaatttatttttcaagacttgattccctgctctgtatcttatcttttctacatttgtgtgtagtgaaattctacacttttgctatgctggagtagttttttttcccagaacattttatgttttctcacaccctcatgttaccttttcctgaaatgccctccatcctttttccatcttattccttagggtgcagtttaaataccatctctgttgacatctgccatagtata

SEQ ID NO: 420688 - DNA, 304 bp, Homo Sapiens
attgggtgtgttgtgtgaaaaaaagtgatgttgcaaggtctctgtcagcagcattaagagtcactggcacaattaccccacaaacggagggctgggagtgctgcacagttccctaggcagctgtgattttcaacccagtctgacatattattatagaccacacattgtttttttgacattaattcatttgtgatctttactgccacgctgagtatcttatctcgaggtggtccttaatggtgcatggtatattttattgatgtttcttttattctggtgtttttcttcctcatgattatgtctg

SEQ ID NO: 420689 - DNA, 353 bp, Homo Sapiens
gttgacctactatgtagatgaggacctagtatacacatctgtacacaacaatgtggaagaatacaagtcgtgactgagtacacgagatcttcatgagataaatagtaccatcaaatgtattccctctaatacttaatttcaaaagctactagtctcaaattcactaacctgagtttcataacttttaatgaaacatcaagttaaattgcagggtatgatccactaggggctcataaaattaacttacagggtcctgaccagtagtagattgtaagtagtaagcataagcagtttactaaaagttttgtttcatttgatagatatatgtatgtgtgtactaggtttgtaatgaa

SEQ ID NO: 420690 - DNA, 282 bp, Homo Sapiens
gagtcctgcgatcatagtctatctcacctgatgatgaaaataataatccctttcctgccttcttcaccaggaaaccatgaggacggggtgtaaagggactgtgtaaaatgtgaaatgtagtgaacactaaaaggtgtgtttggactaaggagcacccccgacctagggctcagacctgtacagccacctctatacagaggtgagggctccctctcctctctcacctggggctaggttcgggaggtggacaacactgagtggcattgagagcaccaacccaca

SEQ ID NO: 420691 - DNA, 323 bp, Homo Sapiens
ctgtgacccacttcttcctcccagcatgtgagaaattatataacacagactgcaagcacagaaagagatcaaaattcaaaatttggagtacagtttctaccgaatgagtattgctttcacaccattgtaaagtcaaaatatcataagttgaacccttgtaagttaggggtcatttttatgctattttaattatgattgcaatgaccaatcaggatctgtggaactgttttttcccaccacaaaatggcttaagagtgctgtattttgctatcttttcttattgatattagaataactttttgactgttgacacttaaatttaa

SEQ ID NO: 420692 - DNA, 224 bp, Homo Sapiens
ccatcactgtttcagcgcacctaaagagactgccagctgagaatttttggtagtttctcatatgttttgtgtgataactagatcatttggggaattttttatcctcaaactattcaaaatctggaaattgtcttaagtcaccctgagtgaaagtttgcaacattcttgacaaaataaagaatttagaaaggacagtcctttctattctgttcaggatgtgtgcg

SEQ ID NO: 420693 - DNA, 254 bp, Homo Sapiens
acctctggttctactgcattcaaagtgttttataagggtccaactggtgctgggaagcaggccacgcactgaagcagggcagagagaaggaggatgcagccagtcaggcctggggaccgacagccctgtcacgctgacttatgatggatgagggaaaagtctatttctcatccgcagtgggggaggtgaagtgtaaagaaagatgctcccagagtctctgggcgattcatcttgcagcagataaactctagaag

SEQ ID NO: 420694 - DNA, 212 bp, Homo Sapiens
ggtcggccctctgcaacatcctggactcccacctgcagggtatgagtgcctgtttactcacagcctcgcctaactgagtatgtcatccagctttggagttttgttattatattctgaaaggcgagaaatgttcatcagggatattgacctgaagttcccttttttcagtgtgtctttgccagattttggtatcaggaagatgctggatttgt

SEQ ID NO: 420695 - DNA, 268 bp, Homo Sapiens
aatacatccttcgcgccacatcctcatcctatcatcccacatcacccatcttggatggaagctacgcagaatggtaaatcaatgagtccttatggcagagtgcactccgagacaaccgtcagtgaaatatctaagtcgaaggaactgcattttacaaacacaacaaggatcctgacacttggaaagaatcttacagtgttcaggtgcttttccagccattagctcatttggttgtcagagcaaaactgtcaagtaggcaggatgtgtg

SEQ ID NO: 420696 - DNA, 173 bp, Homo Sapiens
ccacatccttcacatattgtgtggaaggatgagtgaattcagtgtaagatttatggagtgttcctgtaagagataagcctggctcttgttttcctttcgatctcgtatatttcatcgggttcgtttgattgatgtgttttgttttgggaaagcggctgaggagaggatgtgtg

SEQ ID NO: 420697 - DNA, 126 bp, Homo Sapiens
tcttccattatagctgtatacaaccactgaacactggacctcacaaataatgagtgctcaatgcaggtagaatcctacacaggatacagccacagatatccacaaactatccccagaggaacaccc

SEQ ID NO: 420698 - DNA, 478 bp, Homo Sapiens
  misc_feature (430)..(430): n is a, c, g, or t
tgggcacacatcctagataaaccaaatctcaagcatagaggcttttcttctggatgaccaagacattcaaatccttcatttctagaaatgtactctgtagtgtaattagcattgtctgaactacatcttttcaaggatgatatgaagttttcaggaaatgaaaacaccatgtgggacttccagaacttggagtaacttggagttgattcccattttcctttggaggtgactggcaaatgcaatctttaggaagctcctctgacccaagagacatgcacacatatttgagtgggattccagggcccgtgagccagcagttttcccaaggcttatctcctgtcctgcaccatcccagatctccctgatagacttctcggaagttgctgctcagaaaactagtgataacaaaacaagtttcttacgttgattntactaaaactgtaaggataagctcacaacttgtttgacttctgctttt

SEQ ID NO: 420699 - DNA, 251 bp, Homo Sapiens
tcgcgcacacatcttgaggggggcagagggttacgcagctgcaggcgtgggccagatgggaaatccagatgctggcctagggagcaaggtcccttctgctgctcatgcaggctgtcaaagcagcagcctcctataggaccctcactgcaagctttaaaatgttactccttagggagaatttcagatgggagggaaggcttaatcaatacatgcaacgtttaactggcattagaatgatgttttgttttgtt

SEQ ID NO: 420700 - DNA, 343 bp, Homo Sapiens
gtgaggtcatacccagccatttgaagctggaattttaaccaaagcaatgactttgtaccagaacccatgtccttaccttaggaaatggtggccttacagtgacaaagagaaggatatagaaactttaaagccgagaaggccaaaccaagaatggggacactgtgcagagaatattatgagagaccaatactagaggtcagggaagaggagagcaataagagaggaattcagaaagggatatttaacatccatggagaacaactcactctagtttgcagctgtatttaacatcctcaatgtcacaagttttcacacaagggcatttgaaaggttaaaagttact

SEQ ID NO: 420701 - DNA, 113 bp, Homo Sapiens
gaagcaggagcttggtgatacctctgtcccttaccctgaagttgtcaccctatcctataccctacctcccgctgctgtacatactagtacccctctttctagaaatagccttt

SEQ ID NO: 420702 - DNA, 210 bp, Homo Sapiens
cccctacactaaggctctaaataagaggggaagataaaatcttaagcttcttttttcacctggatctgctgctcctatctaatcctagttttcttctagaccaagagtagaataggttttctataaaaatccaggtagtagatactttaggctttatgggccacagtgtattctatactcaatatatctcagctactaatacactagtag

SEQ ID NO: 420703 - DNA, 432 bp, Homo Sapiens
atgcgacccacatgaggctccatatctgggccaacatgtgacatcattgagctaattttttccaatttggtgatcattaattattatctcattatggctataatgggcattttactcattaatggagttgctaatattttcttaagcttattaatcctttctgtttattcttatgtgaaatgtctgtgcatatgttttgctcaactctgctgagtttttatttttaacaattctttacataatcaggaatctgtcctttgttagttatatgtattgaaaatagcttctctcccagttaatggctcatctttttagacttgttaaattctttgcctaaatcaccctgctatacctctaattatattgagaatgaccccacttctccaaacccaatctcttgtcttggaaccaagtttgtacacctcaactccc

SEQ ID NO: 420704 - DNA, 311 bp, Homo Sapiens
tatacacacctcaatcctgctcagtccctgtagaaacccaaaatgcaacgcagtccagtgtgtctcagacagggcctgggaggtggcattggtgagggctgcagtgagggcgcctgccccggcactggcatcttcctgagtctgccggaccctcagagagcagtgggttcgggcctcagcactgtccagcatgggtaacttttgtccaagttgcctcaccagccctaggactccctctgtgtctgggctccctgtggcagcttcctctccctgtcctgctgtagcggagcctcagtgtaggagcctcatgt

SEQ ID NO: 420705 - DNA, 388 bp, Homo Sapiens
tacacatgaggctccacatgaggctccgtctatccaaggttattgtcagctatccagcctctgactgtggaaagccaaggtagcgagttaatagggagatattggtggaacaaaaggagtgctgtgcttggagctggaagacaacagtccagactctgcccctgatttgctgtgcgatcttgaggctctcctccacgggcctgtgtttcctctgctataaaatggggggaacccccttcccctctcagggaccaacaatgcagtgaaaggcataaaagttccttgtgaactgcaaggtgcttggcaatgcaacggccgagtgttttcttgaaaagaaaagagatgaaacaaaaaagcagtgaaacattcaccctcactcattccattc

SEQ ID NO: 420706 - DNA, 119 bp, Homo Sapiens
ataggatataattaagtaattaatatccacatgtatatcacaatctcatactgaatcataatggaatcccctaaaatcctgggggctgttatggtagggtaggagcattttgttcctat

SEQ ID NO: 420707 - DNA, 386 bp, Homo Sapiens
tatgtcccacatgaggctccctgcctttgacggcaaagtgggcttgggtgtgtccctgaaccaaaaggctcaatgcctgaccaggtgtctcctcacacagccctctctgttcatatcctcctaacttaactcttccattgttctctaaagcctaggggcttcagaagcagcgctgaagcaccccagggttctgtaatatcctttgttgttgtactataccctgcctaatatacaaatgggagagtgctacctgcttcctatcgagtctgaaatggaagtttttgagaacaaagtgatcacttctagctgttaggaaccaatttgttatctttgattatgtagtatataatggttagaatagaaaactgaaagttttttctatactc

SEQ ID NO: 420708 - DNA, 313 bp, Homo Sapiens
tatgctccagctgcttgagatggtgggtttcataagaaaaatctgactgcaaaaaaacgatccatgctacccaaagcctgtcattttataggtccatgccggtgcctgaggacttactattaagtccaatgagatcaccacgtttcccttgttttaggagctgtttgtttatcaaattaacagaaatttataagtctctacctactctgatagctggctgactccaaatccaggctgtatcagcagaaaaagatgtcagtgaaccctgtgcctgacttgaggaaactctggacaagttaccagaaaaggtgat

SEQ ID NO: 420709 - DNA, 294 bp, Homo Sapiens
gtcctatagtggcctccgtacagaggcatctttagtctacatgctttgtcaacctctatgcgctatagctacggtggcctcacatccacattcaaggttatcgatccactcttaatagctgagtctcatctattgttgcccatcaaatgagtttacagtcaatgatcacattatcttcattctttctcaaaacgcttctaattcatgctctcatgacattcttttcattaccctcactcacttgcaacatactttcacagtctatcttggatagctccctaattcctagagcct

SEQ ID NO: 420710 - DNA, 321 bp, Homo Sapiens
tacacatgacgctcctacacatgaggctcccattagaatgccgggaatcactcatgtgtgtttatcattagactacttggtgtcggctgggagtctttcccattggaatgccttgggtcgtccaggtgaatttattattagactgtctggtgtctgcgggagtctcttccattacaatgctttgagttgcactggtgtatcaatcgttagactgttgggttctgccaggagtgtctcccattacaatgccttgcgtcaccctgctgtttttataattagatttcctgttgacatctacgactctttcctattagaatgcct

SEQ ID NO: 420711 - DNA, 345 bp, Homo Sapiens
ttttggtccaggaattcctttaatcacgctgggaacacttatagtaaggcacatgtttactcagctgtctgttcccccttccagaatgagaggagcttcctgaggcagtgactgtgcctcatccaccttcgaataccagggctcagcaccaggtaggtgctcaatcccatgatgttgacaacttccaggttcccaatgcttacagaccatagcaagtcaagatgccagtaatgcttcaggtcagcaggacaggcagtgaagtgggctgtttttattgccagaaagtttaggggattcaggcaaggagacattctgggcaagaatgttgtgaccagggagctggag

SEQ ID NO: 420712 - DNA, 383 bp, Homo Sapiens
gccacccccatctcaagtcttatagatgagccatttcctgacagctaaggagcaatcaactccactgtcctcctacataataatgaataatcttttcttgcagtcaataaaacaggctcccacgatcatatccttttatgacttggggatgctggtgaaaaatcttgaccagatattatttgatttgggagaatagagcaatgtaaatatggcattcaatatgctttaaaataattatccggaaggtgtaactttcatgctaaacatgatttacactacaaagaaagtagtctaggagaaataaaccacggaacttgtgggcattttgtaattgtctaatctagctcctttattttatagttgtggatgctggagcctcatgt

SEQ ID NO: 420713 - DNA, 291 bp, Homo Sapiens
cccgcgagcaggtcgcacgtcctcacagaggctctgggagcttagaaagcccacgtcaccctagaaaagaggctattaaggtgtggcgcgatttgcactttcaggcagaagctttttaagctgctgcagagcccaatcacagggagatgaagacctcagtttctcaagatatgcaactcttctgctgatgagggagaatgttcccgggtgcaggtggagtgagaacgggttcctggcacacattcagcaacctggtgaggagagctcggaccatgtcgccgtcacctcttg

SEQ ID NO: 420714 - DNA, 365 bp, Homo Sapiens
aatcttctttatgtacacttaagaagcatcaatgaggttatatggcctgctcttgtggagcactgcttgtctgttatcttattatagtgtgggtggcagagggtaaagagtggtcaagcactaagcagcaggcgcttcccgaccttggtactctgtcgagtacatcatattcccagatacaaaaatgggagatagtgacttccatgcttctgttttggagcctgcagctcaaatctcccctatgtttatattcactattcattcaatctaatacatgaacttgctttgttctttaaatggccctttatgccctctactcaattttttatgtgactcagtttcaacatgctgacatatttgacaca

SEQ ID NO: 420715 - DNA, 413 bp, Homo Sapiens
tatcagcaaatagcatcacttagtctagagcagtggttctgggctaagtctaggtactgcttgtacatcacaattacctgtggagtttttccaaaaacttgcttagcattctaaggttgcagcttcgtacctaccccagggcttctggtttaggactggatgggatctgtatgtgtgtgatacagacatctgtgtgcaaaatgcacaggagatactacctggcccatgatcccctatccccaaagaatagacgggaaggaaagggccatttgctcgtatgttcctttttgcaagaaaatgttcacctctaacagctcgactcttgtttagtgacattccctgacccttcccactttcttttctgcacactgctgttaccactgttatctctaggcagaggtgtgccaaaccac

SEQ ID NO: 420716 - DNA, 389 bp, Homo Sapiens
ggataccattactacctttatagtattttgtattaaattagcatatgatatttatgttttctctatatacatgtgtatgtgcacgcatcatccactactatcatgttgtcctctaactccgaaagctcatatttcagatgcctggcgttataaatgtcaactctaaatctatgataaggtcagtaaaggggtaaaattaaaattgtgaaaacggtgttgcccaaacaatgaaaaaggggagctctaacctgccctttactctcttccttcagggtaatttctgtttcaatttcaattcaagaatattacatgtagtaatgaatgtattccatggtaacaaagtttaccttttcttctccttcatctttcagctagactttggtcaagat

SEQ ID NO: 420717 - DNA, 224 bp, Homo Sapiens
ggctgctctgatctttctaccctctgtgtcgcgcaataggacccgggctataaaaccatactcagcctggcacgtccaaagttgtcagacctggttgacacactcaaatcagagccgcctaaccctccaggctgaccggggacacctcgggccaagccggcttggcgcctcccatgtgtgtttaaacccacgaggccaattggcaactcgcgaggctatagttg

SEQ ID NO: 420718 - DNA, 250 bp, Homo Sapiens
ttgggcaacgaattcactgaccaagacacatgaaaagttctaaatggtggagaagatgaccagtgttgctggccccgctgaagattcagcctaaagcaatactacattgcatgttatcaggagggacaaaggagcactaaaagcacctacaaagaaactgaccaccttgactccctaaggcgattcagagaggatgtcacctctcaggaattccccatgttgtatgctatatttggtctgggactattaa

SEQ ID NO: 420719 - DNA, 233 bp, Homo Sapiens
tcctttaatgttttaagagcagtgccatgtgagggtgcgggattaacacaatagcctgggaaaactgtaaaaaatgtgaaacgatataatagtttaactggctctcaaaagatgctaaagatctttgacaggcgtagcccgaggtacgatacgaggctattgattgctctcgttcgcccgagtcgtctgtgtggtttactgtgtctactgtagttctcgatgctataattgtt

SEQ ID NO: 420720 - DNA, 140 bp, Homo Sapiens
cggttgcacccacctcacaaacaataacagcagccacaaatgttgatgtcattcctactacaggccgttcaatgtgctgtgattatcccctcctatctattttgtgcttggagcaggtgacttgagatttacaggggtta

SEQ ID NO: 420721 - DNA, 145 bp, Homo Sapiens
tacattaagtatcataattgcagctcaactctttcgatttacactctgattatatgcaggtgggcccaatatagagacttggagtcaacatgggttagaaatagactccatcatagaacttgtctattttcccacaattctgata

SEQ ID NO: 420722 - DNA, 234 bp, Homo Sapiens
agaatgaagggggatgcgagcatttatcataaattaaagcagctgcatttcattcggtttgagactgaaaaaattacagcattctccagcacttgaaggaaacatcaccctgacatttttgagggggtttcttttcaatctatacctgacatgtaaatggggaggcccataacacataatataagtgcgcaccacgagacttttacccccacatgtgcgacttagaaaaaaata

SEQ ID NO: 420723 - DNA, 202 bp, Homo Sapiens
gagggggagggggagataaggaggcaactgtttcaatggacagtgtctctactttgtttccaaactacaaactgtaatccgtatgcaggctgtgaaagggagggatggatcagcaaacatgtatcagatggtaaagtgcaaaatacaagcaaacataatatagaagtgactaagtaacactagtccccacgaggctatagtt

SEQ ID NO: 420724 - DNA, 130 bp, Homo Sapiens
ctgtaccgaaagctgcagcgtgctacacacacttcacaaagcagatggttaaatatggtggaagagtggggaagagatcttaatcatcactagaattattaccgctacataagatcaacgactggatcca

SEQ ID NO: 420725 - DNA, 127 bp, Homo Sapiens
cgactctgaggatccccgcctaaagtggaactgctccgtagaaagaagactttaggtatcattgatgtctgggagattagatacaccaaagccctgaaacaagagaatgatgattgacaaaaggccc

SEQ ID NO: 420726 - DNA, 356 bp, Homo Sapiens
ggtacaatatatttagaagttcttgaaatactcctttccctgtgtctgccctccatagattctccttctgcatagaatatttcctttccctatccactttctacctatttattctacctcctattcatccttcaaagctcagctcagatttcacttcctctaggaaaccttcaatggcattatcttagtctttttgggctgctattacaaaacaccataaactgggtggcttataaacaacggaaatgtatttctcacagttttggaggctgggaagtcctagatcaaatcactgacaggttcaatgtctggtgaaggttcacactctggctcataacggagcagttccacttagg

SEQ ID NO: 420727 - DNA, 553 bp, Homo Sapiens
ctctttatagcgattgtgtccggctacacatactagactgttcttccctggcacgtcttcacctagtgttgcacaggtctggtcaatgagctatagacagaagtccctgagaggggtgccccttcccagatatagcagtgaagctgtactgggtaaaagctctttgagactcattcatcctttcttctctttcttggaatgcaaacctgaggcctagagacgtagcagccactttcctaccatgagatgataaacctaaggccaaaggcctccattctacgcatggcagagtagaaagaagtagtctggggttcccaatggtacacgggagctatggccaggtttctgaaggtcacgtgtatggggaagggaagactaagactgacagcagagtaaccttgtgcagacgaccgagcttagttcttacttgcaataaaacgagttctgccaaggtttcaggccagggaacagttttgcctcagggccaagcgaagaccatgtccataacgaagtgagggatgatttgcctttaggtcctgtcaatgagaatcca

SEQ ID NO: 420728 - DNA, 190 bp, Homo Sapiens
gttgcccataacagaccatacgcataggacttcctcggtatgtaggacaggcgtacgagccaaagggcagttgctatattcacccacacagaccataaggaatccatgcttcctggaaactgcccattgatgtcaccctgtgcagctgtaacctgtgtgagtgttctgactcagtcataacaatgacatt

SEQ ID NO: 420729 - DNA, 483 bp, Homo Sapiens
atatagaactaaacctgtcacataacaacaaatgactttgtttttcctgtcatggtgacccatcttctatttgtgtcacttgatgtgggcaggccaaggaaattgaagcctcccctgatgaccataatcacaattgtaaatttataagtctgcataaatgaaattgttggaactgtttaaacataatcccatcatctagagacccgccatttaaactaggactgaggaagaaaatcaccgacatcacaagctgtgcatccccttgcaggagcagctcagatcactcccaggaaaattttaaaactccccgaagaaccacacatgtgctagcttaatccaagctcaatcaacaaatagtattgaggatgatgacttaaaacagcagtttggaactgatgttttagtttatgcttgaatctcatctatgtattaggattggaaataaaagacacaaacccttgaagggcagggacccactcgggt

SEQ ID NO: 420730 - DNA, 309 bp, Homo Sapiens
  misc_feature (44)..(187): n is a, c, g, or t
accacggagtacaaacgcatctttgactccctcctctactgttnnnnnnnnnnnnnnnnnnnnnnnnnnnnnnnnnnnnnnnnnnnnnnnnnnnnnnnnnnnnnnnnnnnnnnnnnnnnnnnnnnnnnnnnnnnnnnnnnnnnnnnnnnnnnnnnnnnnnnnnnnnnnnnnnnnnnnnnnnnnnnnnctcccgtttttttctttccatttttccctactgtctgctctttcctctttgaatacggaagttctcaaaccctctttggaaatcgtgcaggccgcaggtcctactgtgcagggacccactcg

SEQ ID NO: 420731 - DNA, 136 bp, Homo Sapiens
tgaaatgttggatcacctgtgggtgtccatcacctcagcttcatctctctttattaactaagctccacttatttctgaggatgacgcatcaccgagaaaactctaaattagatgagaacttgggaggatacagatc

SEQ ID NO: 420732 - DNA, 483 bp, Homo Sapiens
  misc_feature (197)..(245): n is a, c, g, or t
  misc_feature (312)..(371): n is a, c, g, or t
aagacgtctctgcgaagctgtaatatcctatcttgccgccatcagtgtctattgtcatcagtcacccagagtcaagaagatctgaagaggatcaaccagtccccacatcctgcaacctagtcttcaaagtcttacctacacaaccattagatccttcttccctatcacttatatatcaattagcacttaattccttnnnnnnnnnnnnnnnnnnnnnnnnnnnnnnnnnnnnnnnnnnnnnnnnngccagccatctttgtattccagtgtatacacaggttagctggcaaagtatatgttgtactgagttannnnnnnnnnnnnnnnnnnnnnnnnnnnnnnnnnnnnnnnnnnnnnnnnnnnnnnnnnnnagacaacttgtaaaaaaatgggagtaaaatttaagccctttttttcccctagtaaattgaccagaattttcatcataacttaaatataaatgaagattcccataaggcattt

SEQ ID NO: 420733 - DNA, 257 bp, Homo Sapiens
ctagagtatccgcctatgtggaactgcacgtgcattgcaggatgtagagcaacagccctaccctgcactcactggctgcaagtagcaactcccacaagcagtgtcaagcagaaatgtccccagatactaccaatgtcctattcgtcgggggaggatatgcaagtgtgggcaaaactgtctccgcttgagaactactcacctagaataagagtcctaaattaaactaaaacaacatagtgttgtgggtagcaactatc

SEQ ID NO: 420734 - DNA, 290 bp, Homo Sapiens
gtatctagaggatcccgcctaactggaactgtcgatcttagtggggacagtagacttggagtggggtttgggctggagggcctgtgaatgtgacgtaagccaccataggggttccattcccagatgggctgagcagggcatggacggggacaaatggaggcccccttcatggaggaatttggccattctgggtggttgcagaggctggatttggggaaatagtgctgcagaaacatggggcgccggcagcgcccgggccagtggccgggtgtggggtgagcccatcaggc

SEQ ID NO: 420735 - DNA, 110 bp, Homo Sapiens
gaggatgtggctcccggtagagggggcgtggcgccctcaccctccccgggccaatgggcaggaggtgagaagtggagaggaaggcgaattatcccatcccaaggtggctc

SEQ ID NO: 420736 - DNA, 179 bp, Homo Sapiens
tggtttggaggggctgtttccgggatctgtgtgtcttggcagcgcgggttccttctcatctatcttttctgtagaagaaacagtcccttcagcttttcctgataggcctcattttccagccactgaagttgctaccagagctctacattggacccaggctggctaagtctatatgattc

SEQ ID NO: 420737 - DNA, 324 bp, Homo Sapiens
taacatccattaaccaagcacctccatgaatattactaagagtctgcccctcgcctcttcatcctcagaaaagtactttagtttctgcagctccccttccacactattttgtagtggcatagattactatgatagctgcttgatttgtccaactactttaagttttgcttgcttccaagctgtcctccactctgctgccaaacattttaaaaccacaaacgtgatcatctcacttctgtttaaaatcttagtatctgcataatatacatgtataatgtctatataaggttttcgtacaaagtgtttgtatattagttgatggta

SEQ ID NO: 420738 - DNA, 369 bp, Homo Sapiens
gtttctggctactgctgtaacgccaactagagctcaaaccagtgccaccttcttgcttaaactatcaaaagccaattttatctgtgcactgggaagcaaggtgctagaagtgctagatatttcaggagagaggagactgtatgagtagtcatctagaggtatgggagagtaaatggaccggctcatgtggaaaactactgtacgaggacccctatcctaaatacgacaaaaattaccaacagtctttattgtccaactctcatgtacttcccatacgtgtataaattagtaacttccgaggggcaatttagaaattttaacacatttttacaaatgtaacaaaattttcaattagtgtatcctttgagg

SEQ ID NO: 420739 - DNA, 139 bp, Homo Sapiens
tggcattagtcagactaattaaggacacagaagatgacgggtaaaatagagtcaggagaagggaggaaacactagtagtaggagagttgaataggtgatcacatacgaagatgttagagattttcatagactttagcga

SEQ ID NO: 420740 - DNA, 164 bp, Homo Sapiens
ctatgtggaacggctccggtaagtgtactgattcgcctgatagcttgatttactattcagatgataattgccctcctttaggcactttgttactctcgtacatcatcccatccaggatcaggtatgtcatttagccctcatgtgtcttcagtcacactttaatc

SEQ ID NO: 420741 - DNA, 581 bp, Homo Sapiens
gagactgccgttgaactcagctaagtcgggctccgggtcgacccgagctgcaaagtagcatctgagcctccgccagtgtggctgaggtcaccagccaagcactgggtcttgagtgcgaggaggcctgacgcttgttgtctgtcccagtcaattgccactatgtgagacctactgcatcttaaataaacgtctggagaaacccttttcctcgctgaacatgctcgtggattagcagcagcctacatctgcggcgtgtgctggtggccaggttccccgggtggtggggccttgccccaggaacttccaggagcgtgtggctaatagcaggaacccaagaacttccaggagtgcgtggctaatgcaggacccggagaataacaggagagcgtggatacatagcaggaccccgagaacttccaggagagcgtggctaatgcaggagcctgagaacttccaggagagcgtggctaatagcaggaccccgagaactaccaggagagcgtggctaatgcaggagcccgagaacttccaggagagcgtggctaatgaatgacccactcggggtaccgagctcgcatccg

SEQ ID NO: 420742 - DNA, 178 bp, Homo Sapiens
cctacgtggaacgatccgcctccacagagagctccagaggctggccaggcccttgcgggagtcttgtggatagccctgaataaggacctgggcgcagatcaggtgacgtagtgcagtcgcggcacatgccgagagagactcacgactttaacatgggctctgcctgccccccagttgt

SEQ ID NO: 420743 - DNA, 250 bp, Homo Sapiens
gtgcctctcatctagttacataaggttataaaaatttcctgtttcctctctattgagatttccttgtgttctattcatttttcttacgagacgacacgtaaacctaaggggtaagtgggggataatgggctatcaacataacggtagcttactatgcttaaggactgtatagtagttatatatggctgctaactaagaggaatgctttatgtccatttgcagcctgaccacggtgcatgatgcacttagg

SEQ ID NO: 420744 - DNA, 293 bp, Homo Sapiens
tgaataaagtctgctttacatctttttgaaaacaacatttgaacatatgttgaattagagatactcaatggttttctcttttaacgtgttaatgtcaaggatttctaacgttgagcctttttcggggctcctaggatataaactccaacttggcaagggaggtgtgtctgcgtgtctcacacgtggctggatttcaatgttgaatgtttgattaggggtattcagatttgcctcctgagaacgggttctactttccctctcttgtacgccccacttaatttttggcatcgagg

SEQ ID NO: 420745 - DNA, 101 bp, Homo Sapiens
cctaagtggtatgctccgtgctcctgaccctcaagcgggcatgccggaattaattgagcctagcagaggctggataactatctcaatggtgtccatgtcta

SEQ ID NO: 420746 - DNA, 158 bp, Homo Sapiens
agcccaccatgacatcctgcgctttgctgactaacagggtcagagcgcaaagcagacaccgcacggcaccgtggatgttaactacacactttactaacagatggacaccagctttgaaggttgctattgcctcaatttatcccaagctgctagactaa

SEQ ID NO: 420747 - DNA, 205 bp, Homo Sapiens
gccgagctccgcctgctgcaacaaagtttaaggggagtgttgtgtaggtggaatgaggaggtcagctatacacagaagaggaggcagtgcaagaagcggtagagtttgatcttcagaatcatttcactttccaaacaatcaggaggatgttgtgaggggttgggtaaaacttcctctaggcacagagctattaaatcacagcttc

SEQ ID NO: 420748 - DNA, 283 bp, Homo Sapiens
cctacagtggtactgctccgcaagaatgaaccccttggttatcccctaaaagagccaccagaggggaaaagatggctcccctacaaagcatcagaaatgagtttgacaggtaacttttcaccaacaactgtggaatccagaagccagtggaatggacctttaatgtgctccaaagatagctgacaatcaaaaattttacctcatagattcctgtagaaagtataaagtgccagctcctctagagagagcagtttgggcagtatctcttcaaaagtgacccgga

SEQ ID NO: 420749 - DNA, 129 bp, Homo Sapiens
gcgaaaactcgatctagggggagaatcttccaacctaccaagaagaggaaagaactcagaggtttaccagagggcaagggatcaaaatcaaaactcaaaagctcccaccagccaaaaatgggccaacct

SEQ ID NO: 420750 - DNA, 325 bp, Homo Sapiens
aaaggacgctatcagtcgaaccggtatcgaatcggtactagaactcatggcgggtgtgaacgtgagagattggataccgttccagccattgtttatgtgacgcgcttcacccttgagccggcgtttgatcgtggctggagtacaggccgcggtacccgaggacaatgcattgtaccgaccatgttctttttgcgagccctgtgatcgctgtgtagcgtgacgagggttcacggcccctgtttaaaataggtgcattaatggcaccaacgagaaatttaatgaccgatgttgtgagttatccaaaaggcgacacgcgggttaactt

SEQ ID NO: 420751 - DNA, 404 bp, Homo Sapiens
tgcgggtgatctagaggatcctgaagtcacccgcgtacgctgagtcgataatggcgagcaccgcggtgcgctcggtcatcaggcggccgctggtgatttgcaggctgcccaggtcgccggagtcgatagccacggccaccagcgagaagggaataccgttcaggcctggcaaatattgcacgtcgctcaacatgagtttgtgatccttgggcagcggctggatcgacggcaactcaatattccccgggtttaccagcagcagtggctgtttgtcgggggcggcaatgctcagcacggattcgcggttgcccaacatgttctggaacagctctggcttggtcttgatcaggtccagggtattgctgtcgttgagcaggttgcgtaactggtccacccgggatatc

SEQ ID NO: 420752 - DNA, 151 bp, Homo Sapiens
tgagtgtctagaggatcactgaagtcaccgcgtggcttggccaagtgcatacgcacaacctatggtgaacaataacgagctggtactacgcattgcttcggacagcagatacttgaacttcgccaggtttgcagctacatctgctgatcaa

SEQ ID NO: 420753 - DNA, 180 bp, Homo Sapiens
tagaggatcccgaagtcacccgcgttcgacagcaagtgatcaccgcgcaagttgaatgcgcgttcgcagatcgacgggccgatcgagaagccggtgaccgtgcgttgggcgatcgccagggaatcgccatggctgacatgactccgcaggacatggccagcaaattgctcgccgcgggtg

SEQ ID NO: 420754 - DNA, 123 bp, Homo Sapiens
caaagttccccgcgtgctgcaacagaaggcgggctcaagccgctgaccaccaacgcctggggcatggcctatggggcggcgatgctggcgacctattgcgcactacgtgttattcccttcgag

SEQ ID NO: 420755 - DNA, 225 bp, Homo Sapiens
agtcacccgcgtacatcgcgatagcgtaaccggttccgaacggtagctgttgcggttgttgctcagcatgttgccgatcagcaagccggtcagcaggctgctggtggagaagcctgagccgccgccgctggcctgagcgttggccgcttgcgcattggcagcgtcgacctgggattgggtcacctggccttcggcggtcagttcgaaaccgcccaagcgcgggtg

SEQ ID NO: 420756 - DNA, 690 bp, Homo Sapiens
agaggacccgaagtcaccgcgtatcaactccgtaagtgaggatttagcatcagacactacgcctcttttctagggcttatcaattcagaagctacacaaagtgtgcgctgtcatcattaatccactccattcatcactccgatacaggatcgccacggctctcgaagcgacggaatgaccgtttttggccgactctgtcgttcgtgaaggacagcaatcggccaacccgatacccagagctaaacccccggtatccggtacacaacagaatcatatttctccgccatccgcctctcgattaccactccccccaaagcttcggcaatacctcgactcgcaccattctgcgtcgcaacaggatagataaagtgcttcgccaccacccactggctagcccactgaacaaccgcccgcaccgcttcaccaccaaaccccagcccgtgtttatcttcacgaacccagatccccaactccggtgtttcactgccggtatggtgcagcccgaccaagccggtaaaacgagcacctacccgctccctgaccgtgaacacgatgtcgctgccatccgctatcgcaggcagtcactgcccccagacttgcgcgtactcttgcagcgaggcaggcggttcccaggacatgtagcgagtcagtgccggagtgatacaagcgaaagactcaacagggtcctgc

SEQ ID NO: 420757 - DNA, 218 bp, Homo Sapiens
gggtgatacacccagtgatcgatctccgcagcggacaaatccgagaggtgttcgaagacgacgataaggtcaggattgccttacggcgtggtcggatcgtaatcacagcgcttcagatacaaaccaagatccgtgagcggctcaagcgaatcaaggacaagctcgatcgtggcgagaaactgccggtggcaagtctcttccatggcgggacgcgggtg

SEQ ID NO: 420758 - DNA, 197 bp, Homo Sapiens
cgtggcaagcacgctggtggagcaaagggttgtcctgacacgaactgagcgacagcgaagccacgccctgtgatggggttccgcccttcccttccctgactcgctgaccgatcattgaccggtgtgtgcgacgagcaaagtgctgcttgcgttctggtcaccagcgttctggggctgacacaagcggcggtgcacgg

SEQ ID NO: 420759 - DNA, 318 bp, Homo Sapiens
gcgtctctctcccagacagcctgttcagttctgtgtgagacatgcgggctttgtatcgattgccgtgccgactctttggtgacgctcgtatgcagcccctcagtgcaaggcgccttttttaaacaccccggagggatgcatgactgcactccattggcacgtagaacgctgaagaggtcgagaccgaaagcactcgcaagcatcaaatatttgaggggatgatgcgttcccctcggcttgcgtaggatcttggttacccagcacgctggaagactatccaacgcatctctcaatataaggaactctccactcgcgggt

SEQ ID NO: 420760 - DNA, 318 bp, Homo Sapiens
gcgttacctgatcctgctgccggtcgcgatttcctacgtgggcatcagcaagcgcgccatcgccaaaagcaagaaagacgcgaaccgcgaacatagcttctggcgcctgctgtccaaatttgccagcccgaaagtcgcgccggtttcggtgttcctggcgttgatcgcctttggtggcggcctctggtacagccagaacctgaagattggcgacctggaccaaggcgcaccggaactgcgcccggattcgcgctacaacaaggacaacaacttcatcatcagcaattactccaccagctccgacgtgttggtggtacg

SEQ ID NO: 420761 - DNA, 141 bp, Homo Sapiens
ggtcgtgcttgctgctggtgcctccacgtgcgcgcctgcctgctgtcctgtgcatcgcagcgtgttccctggccagcaaagttgcctgacgtcctgcctgcctggctgcccatgtgccgttctcgctgctctgcatccagt

SEQ ID NO: 420762 - DNA, 616 bp, Homo Sapiens
ggttggctgggctaatcaagatgtggaggtaacaaaaaacattgtctacgaagtcacctgccaatacacaatatttcccttggtttcagagcagatagggcaactgaaaacatctcctatcttgtgctgccacataggaaatccacacttgggcaaactgatgtacaggggcattttacagcacccattgtgcaatgcagagtctctgggtaaaggacagtggttccttctggaagacacatcatatttttgcgtcagagtgaacattcaatttactgcagatggatcatagtggtgttctgatgccatgcctaagctgggcatactgccataccacaagttcattccagcaatgtactgagataactgctcttcttagtctcaagtctccttggagacagtccaggtaggttttccctactttctaacagctcttggctatctccttctggactctgcagttcatttccagattccccactctcctgacaatgctcctctttgattcaccctgaaccctgtggaaaagaacaaggaatccaggcccttcttcaagcctagtgtctgatgtacagacggtgggcatccaacagcacccacacttgacttaattttt

SEQ ID NO: 420763 - DNA, 214 bp, Homo Sapiens
gtcttgagcagcggcatgacttcctggcaaatcgcgaggaagtgcgacgggtcgcgaaacatctcgctcaccggaatggtcaagaactgcagcaactgcatgaacgcggccgggtcgtgcaacacgcgctcttgcagtgcggaaatggtcgcgcagtcgaactgacgcaaggcatgggccacacggcgtttgaccgacgcgcccgagtagtcgc

SEQ ID NO: 420764 - DNA, 122 bp, Homo Sapiens
ctcggtggatgtgtgtcttgccttcccaggccaggtcgtcggcggcagttcatccaggaaccggctgggggcacaatcgatgacttcaccgtattgcttgcgcttggcggcaaaggtgaagg

SEQ ID NO: 420765 - DNA, 204 bp, Homo Sapiens
cacccgctgtctgtctgggttacccacgaattcaagcctgcgttcggccagcgtggtgtaacggggcgcctgagatcaagatcacaagcagatcaagagcaagatcaagagcggctcgcttcgcatcgtggtgaccgttgatcgcaaactacccctgctgctcctcctccaacgcctctgccaactcaacggcctacgcgggtg

SEQ ID NO: 420766 - DNA, 144 bp, Homo Sapiens
cgtgatccagctccatcacgatacacaagatcgatggggcgaccgcagttcaagtcaatgacacgaaggtaggaacagagcgccgacaacacctctgttgcttttaatgcctgccaagagttaataagcaacaatctgagcacc

SEQ ID NO: 420767 - DNA, 694 bp, Homo Sapiens
cacccgcgttgtggtacgtgggctgtgggcaaggacagcgcggtcagcgcagggtacaaggtaccgatagctacaatgcggtggggcttgccctggacagcagcttttcccagcgcttttccctgggggtgcgtaacaacttgtcccgggatcattcaacaaacgtacaaggcgcgcgcaacagtgtgtctgtgagcgtcggcctgcctgcgaatgtacagatgtccttgagtgccactgcgcagacaccgggctatcgtgacgtcatcgatacagtgacgcctcatgtaaacgatgtggatggttcgcgattcaagaaccagtacaccgtaggattcagttgggcggaccctcagttgggtggcttctcaatcggttataaccggggggccgatttcaagagccggattacccagaatatctacggcacgtggaacaagagcttcagatatgccagcgtcggtgtgaccgtggactctcagattggccagtccaacagtgccgatgaccggaacgatgacggactgggtattcgactgcaggtcagtgttcccctgggccgtgatcggagcctcagcgcattcgctcgacgtcaggaagagcgctccagtatcggcactgcctatgatgagcgtgtcgacgagacgctgaactaccagatacgcagcgacagagacttcggagggcatcgtga

SEQ ID NO: 420768 - DNA, 245 bp, Homo Sapiens
cccgcgtgtgtctccatctgtatgcatcgacgcactcagggtgcgggcctggcgggttggatgcctacgcaactggtaaacctggcgttgagcgaacaaggcttggcgtggctggtgccgtcggtgatgacgctggtcgtggccgtggtgattgaccgtatgctgggcaagcgcagcgaagcgatcgcttaaaacctctgacttatacgctgcaattaaaaagccccggatcaaatgatccgggg

SEQ ID NO: 420769 - DNA, 258 bp, Homo Sapiens
cgaagtcacccgcgatacggtcacagactgggtgtgtatacgtaggaagcagtatatcaaaataagcaaagggtgagtcctcctttgtttttttattagaaacgctgtgacttataccaatataatgagaacactggagtgactttacacttgtcaaaaaaggaggcttgtcatgaatcaacaagcgatttcgcggcggaagttgctaggcattgccgggcttggctggatgtttgatgcgatggacgcgggtgaact

SEQ ID NO: 420770 - DNA, 519 bp, Homo Sapiens
tctagagtgatcacgaagtccccgcgtacctgccgcctgaacgaagaccctcaacaaatttcggcgcttcaccggccgggctgaaggcatgtcgatcagtttcgaagcgcatctgctgggcgacaagattgagttcgacgaagccggcggcacgctgataatgcgcaatttgccaacccagctcgcagatcaactaaaacgtgcagttgcctgattagagttgtccgcgccacgaaatcgtgattaacgaaaacgtggcgcggctttttaagcaggattcgggaaattgcgcgagattcaggtgatgaagttatccgatccaccctgcttagatattagaacctaatgcatgatcgattctatccttcgccacttctctacccctatcaacagcggcctcataggaactgtattgcgctttctccacgatcgctaggcctttgtaattcgcatgatctatatggatggcgactccaaccggaatggtattcacgctatcccacgcggggggtaccgagc

SEQ ID NO: 420771 - DNA, 185 bp, Homo Sapiens
agactgtggtgctgttcgtgggcctgttgttcgccagccgctggttgctgccgcgcctgttccgtgaagtcgccgcgtctcattcggcggaactgtttgtgctgctggcgctggtgattgtcttgctcaccgcctggctcacccacctgctgggcctgtcccctgccctcggtgcattcctgacg

SEQ ID NO: 420772 - DNA, 277 bp, Homo Sapiens
caggacccttaagtcacccgcgttactggctttcccgagttggttcctgacaaagatatcctagagtaatcattctaaaacaaaaatgtgatcacttcactcaccaacttaaaaaagccttacaatagctatgtttctcagcttaaaaatccttcaatgttcctcacttgagaaagctgaagacacagaatgctagaatactcttggtgatctggtggcacttatctacttctccagcctcatctctctcttgcctaacccctaccctaaatctctt

SEQ ID NO: 420773 - DNA, 416 bp, Homo Sapiens
cacatttagcgtcacggccagcagtgctcgggccaaagaaaatgtctggctgctgcacgacacaacgaaagcggtgcatggccatcgttgtgtagataagcttcccaaggatgccgtctctcaccttactcgctcagcacgcaccaggtctgcccacagcgcagtacggccgcaggcgatgcagtcgatcagttcaagattcatggttggattgcctcccctgtaccggtggagaataagcgcccagaggtcaggcggctatgatggctcggttgattgctgccagggagcaaccgggctaagttgccaagtaatggaataccaatcccggaaaccatctttgcctctgtgacattcaggtaggcgctaacactgcgcgtcaaatacagcgagcaggcaacccctatcatcaagaa

SEQ ID NO: 420774 - DNA, 384 bp, Homo Sapiens
atgcgggcactctcttctattcacagaagaagctatatcggccccagactgcccatcctgctaaaactggcaaaggctttcccagcctgagcagtagtgattcagccaactgcagaagtggtatttggagctcacccttaaaacataaagcaagttatgttcagactatatacaggcaatgagaaaatatgatgaactatgactgcgtatgattcgccccagacttctagggcctttgagtgtgtctgtcttgggcaacatcttctccttttagatttcaggctcagtttactgtcaggaaaattaagttgctgagagcgtctcagaattttggcttaaaagagaatatacacctcgaacaaagacttgaggggtgctcatatt

SEQ ID NO: 420775 - DNA, 114 bp, Homo Sapiens
gtattttcggcgcgcagtatcgcctgcgttcggtgctgatgcggctgctggacagtcatgcacaccgtgcccagcgttcgtgtatctgatcccggtgctgattgctgttcggcc

SEQ ID NO: 420776 - DNA, 100 bp, Homo Sapiens
cagaagaactgtatgtttgtagcatcaatattcgtattcaaatgaaataacccccttctatcgcgggcgctgcttgacaacctaagttgtttaataaccg

SEQ ID NO: 420777 - DNA, 273 bp, Homo Sapiens
aggatccctttgttcaccgcgtacgacgctcgtctttggtcgcacagcaggtcttgcctgtattttttcaccggccttcgacatgaatcacgacggcaaatgccagcctgccagaaccgattcctgcgcgttgcgtcactcgcgcgaatcgggtcatgacgctggtcgagttgctggtagcgctgttgattttggcgatcggcctgattggcgctgcggtgctgcaactcagcgcgctcaagtacaccaacacgcgatatacgttcgggtacc

SEQ ID NO: 420778 - DNA, 360 bp, Homo Sapiens
gcgtgagtgagtgtacgcaccgctggccttgcctgcataggggcgcgtggtacgtcttcctgggctttcatgccgccaatgggattgccagtttgtaagggcgcgcccattcagtggtcagccggtaccttgcaaataatgcaggtgatcgatatcgctgcggtgttgatcatcggcccgaacgtgtagcgcaccttctgcctgcacttggtcagctccaacatgcattactacggcgatgtgcaactgggcaatgtgatgcagcagaccccagtgctgaacccttggtggctgtggccgttgcaggcgtactgcttcaacttcggcagcacccacggcatacatcactttgtggtgaaa

SEQ ID NO: 420779 - DNA, 113 bp, Homo Sapiens
atcttagttaccgcgtagggtgtactcaaggctttagctacatcaacggtccgattcgtgacctgttgctgggcaaggaccgctggaccagaaaaccccttggcacacaatga

SEQ ID NO: 420780 - DNA, 239 bp, Homo Sapiens
gattctagcaggatccttaagtcacccgcgtagtgctcccaggatttgtcacagccgcttttgaaggctgtaatcaacgcacactcttcctgactccttgtaggaagacacaacaacaataaccgtccttctgtagcccctgggcgcggaaatggagtgcgcgatgaagttcacagtaaaaaccctgcttgcctgttcttgcatgactgcatgccttaccctaagcgccgtcagccttg

SEQ ID NO: 420781 - DNA, 213 bp, Homo Sapiens
ttactagtcatcccagccatctcagcctggttcagcaccctatgcttggagaggtgctatcatcatattgaaagaaagaagcgcactctggttatctttgagtagtcacggtacttgcactattttctttctatatttttatgaggcttatcttacttcgtgtctttgagagttgctgacctattgagatgggttgaattttatttagaacag

SEQ ID NO: 420782 - DNA, 183 bp, Homo Sapiens
catttctatcacatacccgaatttttaaagaacgatctaatcaaagactagaaatcaacattcaccatcatcaggatggaatgctcatttctatagctctaacaacagaaacagcagatagtggtggagccaaactgggatcgagacctgttgacctccttgcgtacgcgagataaaacttct

SEQ ID NO: 420783 - DNA, 400 bp, Homo Sapiens
gtaacagatggacgaggataccttagccgatcatccgacaagtcgataagcccaccgagaggccagaaaaccatcgcctcgacaacatgatgcccgcctgcgccccgtgtaactcaagtacagggcggcaggagcttgaaggctggcgcacttggcttgcagggcacgtgaatcgcctcaatgagtatcacggcatacatcgaatggcaaaagcatattgggtcggtcgtggagacggcgggatccggtcgtactttcactttgagaaatgccaggccgggcgagaatcacagcccttactattcggcagccctttgggttcggctcattgtgcacgctggaaagcccgtcgaaaaccgcagttggaggtctcactaccgcgagccacgcgagttacctt

SEQ ID NO: 420784 - DNA, 180 bp, Homo Sapiens
tcaccagcgtacacaggtccaggtcaaattcatgtaaagctgtagtaaaggttcacgggttctttccgtctagccgcgaatacacagcatcttcactgcgaatttcactttcactgagtctctgctgaagacagcgccgccatcattatgccattcgtgcaacgcgggataaccttcggg

SEQ ID NO: 420785 - DNA, 223 bp, Homo Sapiens
tcttctcaagctacgaaggatatccaatagagcggagccagctccatcacgatacatcaaaatcgatggggcaaccgcacgtcaagtcaataacacgaaggttggaacagagcgccgagaacacctcttggctatttaatgcctgccagagtttatttgcggcaatctgagcaccgaatcatgcgggtacgcgaggagtacccgagcctctaattctgtgatc

SEQ ID NO: 420786 - DNA, 423 bp, Homo Sapiens
gcggcattcttgcgggatatcttctgtaacgacatcccgctgatcttccgccgcgagctgtatgccagcgtgtcgttcctggctgcctggttctacttgctgtgccttgtacctgaagctgcccagcgagcaagcaattctgctgacgctgttcagtggttatccatgttacgcctgctggcaatccggtttcactgggaaatgcccaagttcgtctacaacgacgatgtgcactagcgcgcagtgtgttgctccagagcccattccacgtgttcgcgtaccaactccgacgggtagtcccgccgcgccttcaatgacttccagcactggaatgctggagggagcattacccaggcccaccgaaaagttgcgtaacccgcgctcgtaaccggcgcgacgaaatggaacgcgattaaacttcgg

SEQ ID NO: 420787 - DNA, 281 bp, Homo Sapiens
gccaaagggggtgggggaagaagcaccaccttacaatttacatcctgctaattacctataatgcctagatgcagtgatgactattgtggaaagggcagatctgttatctgttctcccaaagggaaatgatgtatagatagaaacagagagattcttataaaatagaattctccttggtgagttgctgactaaaattaaattgacataagtaaataaatcttgaatagttcagggattgttcgtccctgctgacagtaacaagaaacttgggcgtacgggga

SEQ ID NO: 420788 - DNA, 257 bp, Homo Sapiens
tccgtacgccaactcagcacttcagacgtatcaagtctgccaatgcaacaggtggcatcccctaaaccagtgctctctctcatgcaggccctgctgactgctactccaatcagctccacttcccttttagcatagaacagatgaaaagccctttttagatcaaaaatgcatttcggttaaggcttcatgaggagaaatgtgatttacattattctactacattaaagagaaatcttaattttttgggcgtacgggga

SEQ ID NO: 420789 - DNA, 193 bp, Homo Sapiens
tgtcgttgtatgtttaagcattgtaagactgtcagaagctgaactttgtgggaggggagtcaagtgaggagagaatgcaagtaagaaaggaaaaagagtgaaatcacaagttggtgtttcccgtcctggcttttcggttcatgggaagtggcagaatctggatttaatgcctccataattgggcgtacgggga

SEQ ID NO: 420790 - DNA, 345 bp, Homo Sapiens
ggagctttacccgtacgccaaaaaagaaatacagagtaatctgacttattatacatctgtggcttgatttttgcatgtacttagtggttgctttaagcctatagtataaaatgcagatttctaaaaatcatcaattcacttatataagaaagatttactgcagatgcatggtatgccagacatttttctggttgtaggaaatacgagtcagttaagtccctcgaggagaaaaacaataagcaagaatgtaagaaaaatgagtgagatattttcagataattacaagctaaaggaaattacacaaggtcatatgagagagggtgatggttgttgggcgtacgggga

SEQ ID NO: 420791 - DNA, 132 bp, Homo Sapiens
atgaatacgggggtatattcatcactttgtcgctgacacgcccgttgtactgacagaatcctggcttgaatggcgcttgctcagctgtgctttaaacaaacccttctgggtgacctggtttaaacctggctt

SEQ ID NO: 420792 - DNA, 266 bp, Homo Sapiens
caaacccggagtcctactcaagtaaaccttcttatgcgagttggaagctcaggtttgtcagctgcaaaaagtacttactgctctgagcaaactgcatatcatttcctactgggcaactgttcttcaccgagtctaacagaaggcaatatattgatatagcattaagataaccttccctacatttccctaccatatacttcatttctaggagctaaatttcaaatttctattggattttatagacttttcatttgggcgtacgggga

SEQ ID NO: 420793 - DNA, 242 bp, Homo Sapiens
aaatggggccatgtcgtatgaatagtaaataaagaggttaagttcacctctatagattcacttaagaattctgaagcagaaacgttaaagggaaaatattcaattgtactctgtccatctaatagcctacaaagtagaacgggaatctcatagatttataattataatggtgattgaaaaataacagcatgcatttttattgtgtgtgtctctgagtatccagacgattgggcgtacgggga

SEQ ID NO: 420794 - DNA, 553 bp, Homo Sapiens
gcgggtatttgttactgttgagactgctgtacttaacagtcagaggaaggcagctggtcaccacgacccactcggccattcccatgctgaagactcgctctcacttcacacttgtttggactccactatgacttgctggtggcccatctcctggatccttctgttggagctgttctagaagatgcttgtggcaggctccagtttcagtccttggctgaaataagtgcagtgtggctcttcggttttctaatctcttccacctaaaaaggttaaggtgacaaacaggtggtgggtacagtagagttgtttttggtccttggtaatattaaaaacttggaatgcattccttatattactacagaattaggagaaacggttgaaagaggagaggtttttttcttggagtatccaaggggattggattcgactacactgacttggtgtgtaatggttgagtaggacggaagatgaacatacaactgctattcattatgctcttagatgtgaggcaacattgaggatgtattgcatgtaacccttgactgcagaatca

SEQ ID NO: 420795 - DNA, 108 bp, Homo Sapiens
caggtgaggtccatttcccatcaatggcaggtcaggcagcagtcccagtgcctgatgtacattgtttgggggatgctcatggtttgtggacttgggcgtacggggtca

SEQ ID NO: 420796 - DNA, 312 bp, Homo Sapiens
agtggtatgtagctatataacatataattgtcattatattaggtgcaattaaattttactctttatattctaactaatgccccaacgggataacttgttccatatttaacattatctctttaggccatttttccagaagtgtaatcataggattagggaaatggaaatatcttgcacagcactttacctgtatatccaacttacttttcaaaagggtcatagcaatgtatataactactagcaatgcatataaatactagtatctctacattcacaccaaccttgggcgtacggggagggtacgcgctcgaa

SEQ ID NO: 420797 - DNA, 248 bp, Homo Sapiens
  misc_feature (181)..(181): n is a, c, g, or t
  misc_feature (222)..(222): n is a, c, g, or t
gtgggtgagtgcgtcactgtgatgacgtggaagggctcggggcatgtcacagccaagatcactctcttttcaccaggctgtcacccaggcttcagcggagactcccagcagattggttcagggatgctcttggctcgtttcctagagccctgtgcaggcaggtggaagtggaataactttnctcagagggttctagaacctgaagagcaaggtgactaaaanccaggcacctcttgggcgtacgggga

SEQ ID NO: 420798 - DNA, 158 bp, Homo Sapiens
tcgccaaaaaactgcgaagtattgaactttgccattaatgtgcacatccagtgagggacaattcatcttcttagaaaaactgacacacattgcttcatcctcatttcttagaggctccatagacaactagaaatgtgcaaaagttgggcgtacgggga

SEQ ID NO: 420799 - DNA, 239 bp, Homo Sapiens
cgtagtacgagcctaactcaaagcatcatgctaagtccagcactagaagacggaagctgcacagagctattgaagcagagggtggagaagtgcggggtctgagccagtggtaacaactgcttccaagctgcaatgtggtaagagctcttgagaccagaaaccctgggctgctgttttcagcagtcgggtgtttaaacagaatgagccccttaagaccactctccttgggcgtacgggga

SEQ ID NO: 420800 - DNA, 266 bp, Homo Sapiens
catcacccaggtgcagggaagagaagccaaacttagtaagttctggaactattacaaaattatccaatgcttccaattctaccagtagcttcttgtcctcccgtcccgtacgaactaagctgataacttttatttctcatactcacagggtttgttttctagccatttccgtatgatgtacaaaattttaagatttcctgcttcctggactagcatactctcacgaatttctatgcataccggtcttcaccttgggcgtacgggga

SEQ ID NO: 420801 - DNA, 134 bp, Homo Sapiens
  misc_feature (32)..(32): n is a, c, g, or t
cgctaccgtagccaaaagaagccgagtcgtangtaggccagtataacgaatctgacaatacagcctccaacctgcagataactagagccactccaacgtaaggtcgaggaggccaaggcttgggcgtacgggga

SEQ ID NO: 420802 - DNA, 286 bp, Homo Sapiens
agttcaccgcgtaccatgcactgagcaggagaggaggctgtgggcatcctcatggatggccctggcaggcaggtaccagtggagccgtgtgtcagaccacacgaccagtgagggtcagcgccggaattcagaatgctgtgaatggcggttggttgtcatttcctgagtgctcaccgtgcaccatacattgagctgggtgccctgcataccttttctcatttaatcttggtgagtctttcaggtggtctggtatgatggtcaagagcataggccccagaagcaaacc

SEQ ID NO: 420803 - DNA, 195 bp, Homo Sapiens
gactaccatctgtttactagaggtctctctgcatatccatctatgtgggggtttgcatagagaacatcaatgctcaaacaaaagaagagctgctcccgctgaagtaaacctaaggttctgtggaactgttagatacagctaggttcctcttcaaacagcttgtccagttcccctcttcttttgggcgtacgggga

SEQ ID NO: 420804 - DNA, 386 bp, Homo Sapiens
  misc_feature (184)..(254): n is a, c, g, or t
gctgctctgttgcacgtcaattctatgtccagagtagctaattaataccatgtagccctatttcagctccactgacgacaatccgaaaattcaattaacttatttattgtccttttctctcataagaaagtacattcccctagaataacattgtagcttagagccaaagatcccagaagctccnnnnnnnnnnnnnnnnnnnnnnnnnnnnnnnnnnnnnnnnnnnnnnnnnnnnnnnnnnnnnnnnnnnnnnnagagcccccatatgttgatctattgaagagaaaaaacagcagcacccaccacaaagggctgttataagaaattaaatgcgataactgtcaagtgcttcaagtgacagagtaatcaatatttgggcgtacggg

SEQ ID NO: 420805 - DNA, 171 bp, Homo Sapiens
agccaaaacatgaacacaagatgttaatttccagctattcttgagaaattagagatctggccatgctgagcccttgtccctgcatagtaacgatttgctggagctgcatgatgaccaccccctttactgtccagtttatccaagatcctgcttcttgtcttattttgggcg

SEQ ID NO: 420806 - DNA, 184 bp, Homo Sapiens
tacacatcttattagacgtattttatacatatcagtagataccatcatttttgtagtctcgtatggtatttccttacctttacaaaaacattccaggacttcaaaaacagtggggtgtcccaggccccgatggacttgagagtgacaccttcaagtttaattttgaagcttgggcgtacgggga

SEQ ID NO: 420807 - DNA, 278 bp, Homo Sapiens
aaaatactgtgggttgctaatcagaagctatagtcaatgcctatcttaaagcaaaaccaaatcaaaaacctccctaactaatgtaaaatcaagaaaatctcacctactttgtaggagaaatagtaggtatacatggttgtagctgtttttgtcacgaaagtaaatcataaattatcataattatataacctatgccataaatagtgtgaggctgtctaattctccaaaatgtatctctgtctgcaattatatggtccacacgactgcctaataaatgt

SEQ ID NO: 420808 - DNA, 111 bp, Homo Sapiens
ggttgtggtttcgctgagatcgatcggtcgagcccgggagacctctcgttcctcccttcctgcgcgtcactaccttacgactgaccgacggactttggctacccttaccga

SEQ ID NO: 420809 - DNA, 255 bp, Homo Sapiens
agaagtatacacatagtaggtgctaatatttggttgaatggaagatattgataatgacaagaggcagataaatgcctaggtacataggggcgaatccctgatgaaatgccaccttcaagccaaaaacagcctgaaggctgaaagaccacactgctggttctggatgaaagccgtgattcagagtgagaacctctgttcatgtttgcccaccctttccccattgattctttctgaataatgctttttttgggcgta

SEQ ID NO: 420810 - DNA, 262 bp, Homo Sapiens
cgaggggcagctgacatcctgcagatacagaagatggggctcgaaggactcgttatgttaatcacaggatccacaggcgtgctggctggtaacaacaactctaccagttcactctagtgcaggatcactgcctgaatgaagggtccttatagaattcctccagttgagtgctttcataatatgtttgaagattatttcattataaaattttcatctatacatgagagacagaaggaactacagtctacagattttcaagtca

SEQ ID NO: 420811 - DNA, 308 bp, Homo Sapiens
acagccaagcattcaacactgccatgagatccatgtatatgtctaacgctcaggctccttctctttccacatacagtggatggctaggtgcatgatgcacaacctatgcccactagaagtcctccccactccgctgtctttcaaggatgcccctgtgtggggttgcagtgcagacaacggtctttttttgtcttgcccaacccactgagctgacctatcttacggcataaggccatggattcttttctcttctatcagctggatattctacagcagctccccaggccagcaaaggtgtgcaacatgcg

SEQ ID NO: 420812 - DNA, 253 bp, Homo Sapiens
catgttgtttaacttctagaattttaacagaactgttgaaaaacccaaggcttaagtcagttagggagagaattatatctcacagccaagagtgttaaatactgagccctaaactggggtattaatgtaaccttagttcctgatagatgtaattaatataatcccaattccaggatgaaatcctttatattctagaatatagttgttcaggtgtgaaattgatgaatgtttttgctgagagttgggcgtacgg

SEQ ID NO: 420813 - DNA, 381 bp, Homo Sapiens
acacccctggccagactttccacatttctggtgtgaactattgcaggaacccctatgtggttttcttgagtctagtgtcttgaactgctaatccacagcagagatattcccaaagagaaagatctgatcatgtcactgcccaaatgaaacaccttcattattttcccttaaatgacaatacaggacaaagtgtaatcatctcaacctgacattcacagtctaacttcccaatttttctcctgttactttaagttctagtcacatcaaacttcctactggtctgtggagattctacgtcacacttctatgctttttcacatactgcctaaaacgttgtttacctttttccacctggatctcctgcttgttgggcgtacgggg

SEQ ID NO: 420814 - DNA, 271 bp, Homo Sapiens
gtccccgtacgccaaaaaagaaacaataaataattttaagagagaactagttgggtttcaggggagctaccactgaagccttaaaggtctgaaggtggtgtttgtaggtggagaaagagggcattccatgcggaacaggaagaggcagagtctcagaacagaaatatggattgttcagggaatggtaagtaattgtagctttgtataaaatgtatgtgtgaaggccagctttaaatgataatggtatgtaaatgtggttgggcgtacgggg

SEQ ID NO: 420815 - DNA, 239 bp, Homo Sapiens
gtgatttgacttgccagtattactcattagtaggtgttacacccaggactcaaagccagattttgtgtggttatcactgatactacttcagggtactcagaaacagaactggacacacagaggtgagcctttcactctgccctgatccttgggctctggatccctataccccaaaccccagccctctggtctgtggtgttactgtgatgtgaaagaggattgccttgcgcgtacgggga

SEQ ID NO: 420816 - DNA, 314 bp, Homo Sapiens
ccgtacggccaatgtgcacactcgtggttacctccattggaaggttatgatgttatattcttctcttgaccctggggtacctagcaccctgtttactctctagagagggatctgggggttgtggaagcaggacacctgcagagtaaagactagggaagggtgacatcttgcggccctgtgtagggcaactgtgcagagcccttctgcttcccaggcctcctccccgctcaaccaggtgctcatggctcttctggataatttgagacaaggctagtttggccacatctgcttttcccccggtttgggcgtacggg

SEQ ID NO: 420817 - DNA, 246 bp, Homo Sapiens
cagttatgatgctaagatttacatttattaacatggaaagatgccaaaaatatgctgcttaggaaaaaattaaaagcatggttccatgtgcataatataaaactgcatatagcatggcattggcggaaaataaatacccatgacatgtaacactctgggtatacacagcactggatggcctacttatagataaacgaatgctccaggcttatgttccacccctactctcatttgggcgttcgggga

SEQ ID NO: 420818 - DNA, 387 bp, Homo Sapiens
gccgtatccgtacgccaaaagtagtgtgatgagctttgttagcatttgaacctgtcttcacattttcttctgatttgtggacatttacgaccttgctatcctgtgttctcaagtttgggtatattctgacctcaggctcgttttcacctgtgtatagagcatctagtagttctcaagggattgtattgcccctctcctgcccttggggaagttggggtgtggggtcttttattgacaagcaagggcatacctgacatttagtgggtatggctggggttaccaaagtcctgtgaaagacagggcagcctttcttaccacgttgttaaccttacccctgatatcaaggaaccctgatagagcaagtctgatttgtggggcgtacgggga

SEQ ID NO: 420819 - DNA, 159 bp, Homo Sapiens
ccgtacgccaatcaatgctactctatccacaaatttgctttctttggataacagctcaccaaatcactatccaattcctccctctataagccactctgctatcccacacctatggatcacgtactatataatgtctaatgagaatataaagctacaatt

SEQ ID NO: 420820 - DNA, 267 bp, Homo Sapiens
atgtatagcgatgttacctgttagggtcctccagtagttgtttcttccccctacttcttgagctttgacttctgagattatctgtgtgaaagcccttagcagtccattgaaatcttctaaagtaaggcagttaaaaaatatctttcctgcttagcagaagggactttgttctttggcaccaccttactctttgcaatatgttgctagtagccctaaatcagaatgtgcattaattttatcttttgaattgtttggtctcctcaggag

SEQ ID NO: 420821 - DNA, 422 bp, Homo Sapiens
ttagaggacccttccccgtacgccaatcccaaaacactgtaattatgtattcttttaatcccataatcacttctgtagtacaaatggccagggtcaaaatttaaattttgctaacactccttcaaggaccagttaactctttcatttggcttgaatgactacttgcctactctggaacatactagccctttaaaaaaatgtgaaaagaacatcttgattcaggttaacatccagtagctctaggtcttccaataatctgagagaagcaaaatatttccaactttgctttcactgaaaaaactagcttagtctcttaactttcctttaacttatatattagagatatttttactttcttgtatattttcaagaaaataataactggcaggttaagtgactacttgtttttgggcgtacgggga

SEQ ID NO: 420822 - DNA, 290 bp, Homo Sapiens
gcgtatagtgacagcaccccaggaccaattttttatcccaagttcctagcagtccctgctgtcaccctggtctttctatttggatttctcatgagcaatttaaacacaacatgtctaagactaagtccaccattttccaaaaacaacctactcctctaccacccctgcccaccagcctaacaaggataacaaccttccataacaaggatatgacaatcggctactcgtgtgcccagccctggggttttttccttaggtgcacacaactgcccccacgattgggcgtacgg

SEQ ID NO: 420823 - DNA, 294 bp, Homo Sapiens
  misc_feature (130)..(130): n is a, c, g, or t
  misc_feature (250)..(250): n is a, c, g, or t
gccaaccaaaccccgtcttctctagggatgctgccgggctaccatgggctgcttccagacatgatttaggaaggatgtgggatccacagtgtgtagctttaaggctctgtcacttacctgtcgtgtatancaactatggattcagtttcttaacagtggaaatgggtgtgtgttaacatttccaaagcaattgactgtgcttcttcgtcaggtgagcacatgcagcccgtgagacccaggatgccatttntagcttgggtttgcatgaagaatgcacacgtggaaatattaggg

SEQ ID NO: 420824 - DNA, 362 bp, Homo Sapiens
  misc_feature (68)..(117): n is a, c, g, or t
ctgctgacttagaggacctatcccgtacgccaagtcacaagagctttccttattctctacttacactnnnnnnnnnnnnnnnnnnnnnnnnnnnnnnnnnnnnnnnnnnnnnnnnnntacacaccattcagtaacaagaaatattgtaataatttagtgtgtctgaacacatgacctcgctgatggtaggtgatggtttgatgtctggtgactatacagatctcagccaaattgactgctaatgaaatacctctgacagcctgtgtcctggttcagcaactccatcatattagaaattttgatatatggccacataattagaactgaccatatttcctaacatgtgcttttgggcgtacggg

SEQ ID NO: 420825 - DNA, 283 bp, Homo Sapiens
tctagaggatccctccccgtacgccaaatgatcctgatgagctacgcaaaccattatttttatgtctttatgaatgccaccagaaagtttcatttgttctttctgaaaacaaccatgattataagatgtcttctgaaacacggaagtgagagaacatgttgtacagagaagcatgcatccctctgccctgccaccactgcacctatgctaagcatattatagacagaaggatgtccatctgcctatgtaagctcttgcccgtttattcttgggcgtacgggga

SEQ ID NO: 420826 - DNA, 235 bp, Homo Sapiens
  misc_feature (52)..(88): n is a, c, g, or t
gcagatgtatggtgtatttttcttccactctctttgccaagattaggatccnnnnnnnnnnnnnnnnnnnnnnnnnnnnnnnnnnnnncagctctctgtgtaaaactgtattaactatatggcattttataaccccactaatattttaacaaaagaatttactaacgtagttacatgaagtcgtcacatattttagtgactacatagccattcacattttgggggcgtacggtga

SEQ ID NO: 420827 - DNA, 406 bp, Homo Sapiens
  misc_feature (81)..(145): n is a, c, g, or t
cctttagagtttaagaacatggattttaaatgtgagacataccccgaattcaaattgccaaattcactgtagaatatcacnnnnnnnnnnnnnnnnnnnnnnnnnnnnnnnnnnnnnnnnnnnnnnnnnnnnnnnnnnnnnnnnnatacttaccataccattacattggattactagtacacatatgattataacgttaccttgtataagacgcttaacaacatggttatacttgctcttattattaaacatatatcaactatttctgaaatggtctgtatcttatacgtgttacgtagttgggttatttattccttttagtgacacatagacataacggtgcatttaaaattcgatggagtacgattcactgatatagtgatactatgttaaaagtgcatggtca

SEQ ID NO: 420828 - DNA, 250 bp, Homo Sapiens
tgtgtaagcattttaagtgaataattgagcatttgatttattatcctggcttttctatctgggtctttgaaagggacaaaaggagcacatatacaccagtggacgtagcctggccagattgaaaactgaaaattgatggatttggagtatgcaggcagatagttgaatgctgggacagggatcctctttgctgactgcctcatggttaagcttttaaaaattggttggttacgcttttaaaaaaatctta

SEQ ID NO: 420829 - DNA, 338 bp, Homo Sapiens
tgaagtacatttcagactgctttcttcttcatttcacactttccatgagacttgacaagtaggcaggattctacagacaatggcaacattgctacagttggtagaacttctcacctaagaggttcacaggtgtggtgatggttcaaaacagaagtctttcgaggtaggatgtgtgctgacttagggaaagaatgctgtacctgcattattacagacctcttttggatctttaatgttgctaaaattatctgggtggcaaacataaaaatagtgaaattatgtaatttggctaatactctctatctgcttgtgtggcctcttcacattgggcgtacggg

SEQ ID NO: 420830 - DNA, 128 bp, Homo Sapiens
tacttaaattcagtatattcagcagtgctggatacatacacgttgctatgcagcccatctccggcaactcctattgtgtctttcacagtaaaactctgtatatgttacacaaagagtacccatttagg

SEQ ID NO: 420831 - DNA, 159 bp, Homo Sapiens
ctagaaagatattttagagaacttaaattggcattttacgaaaaatttgcatctcctaccagtctgtaagatgtacacaccagttttgtctgccgttgttactccaaatacaagtatgaccaacctgtctgaatatttatagctaattatttctagagc

SEQ ID NO: 420832 - DNA, 117 bp, Homo Sapiens
cctgatcggaacaaaaatgggagaaatgaagttagcagtaacaaacacttactgtatcgacttaccagtgtgccaatgcactgttttaatgcacttgacgacatgttagctacactt

SEQ ID NO: 420833 - DNA, 207 bp, Homo Sapiens
  misc_feature (84)..(84): n is a, c, g, or t
gcctagaggatccctaacgatcatcgagagaataaactgctagaggaccagataaaatctaagaacaagaatacttaaggaganaagacacataaagacttctatggataaaaacaaagattctcaaacaattgactacatgaattgaagaggagtatatgtattttatttgagacctggaggttagcctggaaatggtatcgttaa

SEQ ID NO: 420834 - DNA, 107 bp, Homo Sapiens
catgaagtgcacaagatgaaaaagaataatagcccatattatgaggctgtagaggaaaggactctccatttttaggagtaataaaaggtttgggggacaagctcctt

SEQ ID NO: 420835 - DNA, 198 bp, Homo Sapiens
ccacaggcggtatataccggagtattaaagggcgaagataagtccgagagattttggagatgtccgaacacgggggtggatagtccaaataatccgagtggattaaatctcctgaagataatgtatgggtgggcaccggaatatccacatactgataaaaccctggagaatggcattctttaaagaaagatggtagag

SEQ ID NO: 420836 - DNA, 205 bp, Homo Sapiens
actctagagacctacgatacattcgcagatgcagtcataaatatattggtctatacctatacgaaacctgtatgtgtcatagacattggtcttgaaacaactatttcctcttctagaggtaggcagacatactagagagtgttaatgcttgggcacagctcaggaggaagaaagtgtattaccccacatacgataattttctatt

SEQ ID NO: 420837 - DNA, 168 bp, Homo Sapiens
gttgggatgttcgatacagcggataaggttctaggttgacaaccataacatgtattgcactgaaatcaaagcacataatatcaaggcagagttactactgacggagaaagcaggaacacagaactacattacatctttgcctatcaaaagacgagggtaccgagctcg

SEQ ID NO: 420838 - DNA, 364 bp, Homo Sapiens
  misc_feature (243)..(259): n is a, c, g, or t
cgcttttgataggagagttgaggttgtcacccaggttagggcatagggtggcttgagaacttggcctgtgtttactccacgtggggctcgtggctgtggcccatgaatccatgttgaggaatgggacccagggagttgccctgggacatacagagggcagtgaatcgaagggattccctggatgtctgtcacttggagggagaactgctttgggcacctagaaaagctggatgtcagcatgannnnnnnnnnnnnnnnnacacaaagggggaataagaaatggtttaagggaactcttgtgggacgtgtattttggtctcgtggaggcgagaccttattcaaagagacgaccctattcaaaaga

SEQ ID NO: 420839 - DNA, 193 bp, Homo Sapiens
  misc_feature (115)..(115): n is a, c, g, or t
  misc_feature (131)..(131): n is a, c, g, or t
  misc_feature (140)..(140): n is a, c, g, or t
tcttttgataggaatgcaattcagttttggaaaaggctatatgaaaaatgaaacctttcctgtattctttgttttatatttcatgctatctcacatgtatacaattctcacttcnagtatactactttagngcataatanaagatttacagaaagatttattaaagttaggtctcctgaagttgtttaaagtc

SEQ ID NO: 420840 - DNA, 242 bp, Homo Sapiens
ctctctttgataggcagatgcatttatagaataatagtgatacccgttacaagtttaaatctccataataacttgataataatcttgtgatagataggtatagaaaaggctgtacttacaaagtatactgctaattgttgataatcatccctactcattcctcctccactcccaacatggcacaaaaactaagagacacaattgtgtcattcatacaccactcagccaaataggtctttatt

SEQ ID NO: 420841 - DNA, 202 bp, Homo Sapiens
gcaccttaactgtttttaagtgtgcggttcagtggtgttaagtatatttacattgttgtacacccaatctgtagaactttttcatcttcccaaactgaaattctctatacgtgaaataataactcctcatttaccctttcccttagcccctggcaaactccatgctactttgagtccctatcaaaagacgagggtaccgagt

SEQ ID NO: 420842 - DNA, 370 bp, Homo Sapiens
  misc_feature (46)..(111): n is a, c, g, or t
aattttgggaaagaagggctttctatgttgccaagctgggtggggnnnnnnnnnnnnnnnnnnnnnnnnnnnnnnnnnnnnnnnnnnnnnnnnnnnnnnnnnnnnnnnnnnactgcgcctggcctacattttctaacttaatttctattcttatgggggaaaaatttaactttacctcttcatcagattcttcagattaaaaaattggggtaagaaacaatcagatgatctctgtttcagcttacatacataattcttcattacatccatctcatctgaccctattaccctctttcatgtctttttatcatgggaagaagagcctatgacatcttatacttttccttcttagaatttagcacaaataaaa

SEQ ID NO: 420843 - DNA, 201 bp, Homo Sapiens
tgatggtgtcatggcctagccagcccattctgtgagtcatctactgtcaacattgtctgttgttgtgctgtgttactgagtgtccattcaatgccagcgtgcggctgggtcctaaaggatatagtggggagcaacatggtgaacctcttcccagggagcttcacgttagcatgtcttcagaaaaaataatccaaagaaccc

SEQ ID NO: 420844 - DNA, 648 bp, Homo Sapiens
tcgtctttgataggaaatgggaggcaagaaacaaaagccaatttattaagatgacgttaattttaaaaatgtgcgaatcactgagctttactttctgaactttgcgctcttcaattatagctgggtattcttattactctacaatcttttaaaatgtaggccttttactctgtctcatttgccctcaaaccactgcagcctctcccactgacccctggaaaggaaagaaccccagtgactgggagcgaccaagaggcaccctgaaggaggaaaagccattgaggcatgtaaccacctccaccacaggaacgagtagaagaaactcgccacagcatctgtatttttgcaaggtgcaggcttcaaagccaggagttcttgcgtcagaccccggactcatctcgaggcccaacctttattccagcatcaacagaaaaggtctctgggttccaccctccctaccagcaggtgccactatcaccgtggatcacgtctgcaggaatctgcatgcccctgggtgttactagttctcttctacgtgcaccactgggagggcttagaatttcaaggcatatactgccatgataagcaaatattcttctgaatttcctaaaagtgaaattatagaacttagggatggaaagaaagggg

SEQ ID NO: 420845 - DNA, 453 bp, Homo Sapiens
ctagaggatcccctcgtcttttgataggaagatggagcaagtaaacatatgccaggtgatgctgttggagtaagagaggagaggcatgaattgcagcagattggccaagaagcctaaacattaggggccaagaatgtgctagaagggagctgtctggtggaagcaaaaatgaatgtggtccccaacaggattaccctataactgtttaaactggaacacattagagagtaaaaggaggcactgttaataattacactgggatgacaggcataaacagggctgtactgagaaaactggaaagtttgttcccctggttaccaaggaaagcacctgcctagacagactcagaaaatgcttaagtagggctagagatgagattttagaatccctatagattatattctgcggatcaacaagatcattcaagtgagaaagttcagagtgacgagccta

SEQ ID NO: 420846 - DNA, 228 bp, Homo Sapiens
gtggttctcagggcactgagaacttgtgctcttccccttgactctgccaggtgcaccctctcccagataggcaccctgggtagctgtgagacttcaggggattctgtatctgggttagagaaccaggaataggaaaactgttctcccactgggtggggaaggaagttagcaaaagtttgcctgatgggattggcctggatagtaatgctacaccctatcaaaagacga

SEQ ID NO: 420847 - DNA, 294 bp, Homo Sapiens
ggacccctcgcttttgataggtcggaacacttctttggagtttaatggtcagttaaaccaaaatattatacagagaggagatataggctatattcctcaatttatctgaaactattatatagcaagtggtttaaaattgacatgatcatatattaacatcatattctatcaatatcactgaggtaaataaaggatttttttcacaaattttccaggattgaaaagcaactccaaactactgagctcagaatttcctttttattatggagagagtagatgcctatcaaaagacga

SEQ ID NO: 420848 - DNA, 262 bp, Homo Sapiens
aagacagcaataaatatccctgtgcctctaagggaagtacttacccccaaagtcttaatacaagtcaactctcagaagtctttatgttttcttcagttttgaaacattctaagtaaagggatctggattcattgctcacttatctaccccgaggccacttctgtaaatgcagtagtgcttcgtaataccccttcaacactggaaaggggccattgacttgatttgtataaataattattatgtagtgcctatcaaaagacga

SEQ ID NO: 420849 - DNA, 226 bp, Homo Sapiens
agcatccctcgcttttgatagggactaaatctggaatgcttaataatggttgcaagggcagatcatttcagagtgagagatatttaaaaacaaagcgcctcagggaaacctcaattgaaactagagcaatacaaaataaaatctcctactgaaccctaaaagactcctactgactgacccctcaaaagcaccccatatgtctttctcttctcctatcaaaagacga

SEQ ID NO: 420850 - DNA, 185 bp, Homo Sapiens
  misc_feature (91)..(91): n is a, c, g, or t
tattatctctcacaccggagagtagatatatatcatactacgcaggtaaggaagggtaggctacgatgttgagtaacttgtcctaattggncagcagcagacctgaaatttggagtctgggagctaggggtggacttgatgttctctctgactccgaaaaccctccgagtcctatccaaagacga

SEQ ID NO: 420851 - DNA, 266 bp, Homo Sapiens
ccttcgtcttttgatagggaggcatgtagaaaaattcagagtcaggctgctacgttccaatcctggttcttgtcccatctcactgtgtaaccacgggcgggggacccgcacccccaggcagcttctgtttccacatgtgttaaaggggggctcatagtcatgcttatcgcagaggattgttgaggagattaaagcagattatgctcagtaaattccaactaccacgtctactactaccggacctggtgttggctatcaaaagacga

SEQ ID NO: 420852 - DNA, 248 bp, Homo Sapiens
tgaaatgatggcttttggcctaatggaagcaaaaaatcaaaggcaacggaagcttgcagcataaacaggcaagggtatcaaggaggatgaatccagaaactgaaggatgctatgccttgaaaaggcatttagagggaaattcattttgtagcacattgctaccagacttcaatattctcaagctcaatgaaagcttatagacacctgtgtaaatagagcactctctcatccaccctatcaaaagacga

SEQ ID NO: 420853 - DNA, 323 bp, Homo Sapiens
  misc_feature (49)..(49): n is a, c, g, or t
gtggataggcagctcagtatgagtgcaccctttttttatacctattatngtggctaaaactgaacaaaaactgtgtccttttatgaatgagaaaatataggagagaatttttaaaaacctttggtcttctatgactaaagagacttgctttttttactagcccctgttttgagagccggtcagatgtagttttagtcatattggggaggacagtgtttaagcagataccagagctccccattatgaaattctttcctgacaccagccccaactaggtcccagtaagaaatagatgcagaggacaacaccctatcaaaagacga

SEQ ID NO: 420854 - DNA, 216 bp, Homo Sapiens
gtgggctacacatggatgtttttcttgagaggtatacttttgatttgactcaatagccttcatgctatgactcttgtgtagctcgcatcttaatgaggtaagtttaaccctcttacatgtcccactttacataggagtaactggtctgtctcagatgacacagccagtggcatagctgggatggcagtactaagtttgttgactgccctatcaaaa

SEQ ID NO: 420855 - DNA, 384 bp, Homo Sapiens
atagacagttcagctcatcattatcctgatgaaagctgagtctacctgagattcagattcctttaaaatccagcccaataaaaacaggaggttggcatagatgtttttttatttgcccctaaagagccagtgtccacttttctctgccatgttatttcagaaggtcgacctctatgaacaccctagctgtcttctctaacttcgatcttttcattgaatgtggtcagggagaggcctgacaataggtatggagttttcctttctgtgatcccttctgtagaagtcactggtcttatccaagtagccacttcataatttccctcttctgagttttagccggttctctctcctcttatccctatcaaaagacgagggtaccgagct

SEQ ID NO: 420856 - DNA, 249 bp, Homo Sapiens
atctaggaggttacgtaacgccttccccaacagatgatatagtctgccttactcagcacttacattctgagtcagcaattgacagaatcaaatccccagtcatggtgaactgatagaaacgaaccttcttcacagacacattgatggcactctatcctaataccctttatctgtcccggcatccttatattgtctccatacaaatgatgagacagccacaagggacgggatagcagtggactgtcaaga

SEQ ID NO: 420857 - DNA, 373 bp, Homo Sapiens
acccacgtacgcttcctgctagctccattttctcgatgaaatataaggtaaagatagctgagagacttgtacagagaggggaatttaagggtcaattaagggtatggaatagtcatcttggagataaggaaatagactgaagttcttgcctggtagcctccattttctcgatgaaatataaggtaaagatagctgagaggcttgtacagagaggggaatttaagggtcagttaaaggtatggaatagtcatcttggagataaggaaaatgtcattacaaagccttgacaatgagtccagttatatgaagtttgtaagaaattagctactaattaagtgttctttgaatgaaggcgtgacggggtaccgagctc

SEQ ID NO: 420858 - DNA, 312 bp, Homo Sapiens
cttactcaggctaaaggttgtcaattttatcattacaaaaaaaccaactttttgtgttgttgatcttttgtattgttttcttaatttcaatttatttctgctccgatctttattagtttcttttcttctcctaatcttgggtttggttagctcttgcctttctagttctttaagatgcatcattaggtagtttatgcgaagtttttcttcttttttgatgtaggcacttatagctacaaacttccctcttaatactgttttcactatattccataggtttaggtatgctctgttttcattattgtttgtttc

SEQ ID NO: 420859 - DNA, 119 bp, Homo Sapiens
acacgtaacgcttcacaccctcataattacagcctgccactccctccttaatcatggcatcagcctgctcccgctttcccactgctcacctgggcactttctctagctttgttccagtg

SEQ ID NO: 420860 - DNA, 454 bp, Homo Sapiens
aggattccatacgatactgccttttcaaagttcgtgtagtcactgcctgaatttttcccttttctattccacaagtgaagtcacactcagctctgctttgtttattctcataaaatatgggatgtcgaggagagggggctggaatgatgaacttctaagcaagctggagggagtatggcaagatgagaacaggctttggaagggtgtgtctgtagtctttgccctgccatgaaattggaagagtatagggttggaatacagagcaggggtttggagttgtccatacttgggttaaaatctgagtcctgtcgtgaacctggtgaaatgcttgtgtgggtttcccctgcctactggaatctgtttcttttggtaaatggaaatagtatttgcttcctagggttcttgtgagcctggaatgaaatagtctatgtgaggcacataggaaggcgttacg

SEQ ID NO: 420861 - DNA, 481 bp, Homo Sapiens
atgtaatacagatctacagtacatgtagaagtgctatcataaggtatgtataaagtacaatgcatcccagttaatacagcattaatcctggcggaatgagagaggtgctgaggacagaggcagaaagctagagaggaactaagaaatagcactaaagctctcaaggaaaagtagatgctgtccagatggacaagagaggatggtattcaggcagaggaagcagtattcacaaatgacacagagatacgaaagttgcatgtgtattgaaggactagaaaatggtcttatgtgacttgatcctagatttcatgcagaagtagctgggtatataacccagaaagggcagctggagccacaaggtaaaagcttcttcatgacctgctaaattcagacttgtagctgtaggcagtgggaaattatcagagattcggggtttaatctgttaacatcttaactaaagtgtacgcctatcaaaagacga

SEQ ID NO: 420862 - DNA, 113 bp, Homo Sapiens
acagaagttaattgattggtataagcacttaaacattgttctgattcttactgagaattcagtatattattattttggaaacacgtttcggaagttatcctatcaaaagacga

SEQ ID NO: 420863 - DNA, 117 bp, Homo Sapiens
  misc_feature (62)..(62): n is a, c, g, or t
attttaatagtcacaaaaactgagtctgtagctagtggatgtgagaatttagacatcagcancatagatataacattaatttgtatggcattagaaccggctttagaatttttagtg

SEQ ID NO: 420864 - DNA, 349 bp, Homo Sapiens
  misc_feature (135)..(135): n is a, c, g, or t
  misc_feature (185)..(185): n is a, c, g, or t
tgacctagaggactacacgtaacgctcttcttaggagctactatcacagaggaagatcagtaggatagttatgatacatttcatgctagactcgagatagacctgtgtatgctttcttattttaccataatcggnggtaggcattatttcactattctgcagatgagaactgaggatacagtgangttaggaaaatatgccagcctcacacagctgagcagctgagatgtaaatgtaagtctgtgtctacttcgaaagctcttggaaggaaaggaaggcatgtgggagagcatgaaggttgaggaggtaggaagactgggaattgcatttgcattgtgattttacataa

SEQ ID NO: 420865 - DNA, 115 bp, Homo Sapiens
tctaacaacttggctcaccccacaggcttagctcaaggtccttgtcttgaagttgaatagggaaaacatatacaaagccagagtagcacagaaggtaccagtgccactctgggaa

SEQ ID NO: 420866 - DNA, 336 bp, Homo Sapiens
ctgatcaaaactaaaatctgaaacatcatttatgttttagggtgaatgtaaatcagtgtgtaacccctcctaaggcatttgcatttagcccatgtatgaaaagggaggtgttcattttagacaagttgtaggggggtatcaaagaattatttctctctcttatttaacttccatttttctatgagatgggtctttttcggtgcatcgctgcagagactgataagtaacccctcactctgtgatatacatataagaagcacataatgcattggcagagatagcactcaagaaagaaggaattaaatcagccttgtgcactccacattgcaccttata

SEQ ID NO: 420867 - DNA, 140 bp, Homo Sapiens
atccgaggattacacacgtaatgcttcttgactctctgtaacagtctattcactttccttacggtacttgttgactatcggctcgttcggtattaggcttaatggagttaccacccgctttggtgtgcattcccaagcaa

SEQ ID NO: 420868 - DNA, 160 bp, Homo Sapiens
gttattagtgttaatgggaaaatggaattagcctcattttattagattttgattccctaaactacaattctatctgtatcatgtcaataaaaatgaactccttgagcacatgaactatatgctagtctacctttgtatactccaggaaggcgttacgtgt

SEQ ID NO: 420869 - DNA, 137 bp, Homo Sapiens
atgcttaccctggggaagaaacatcctgagtgagacaggattgctgacctgtatcttaaaagagtatcctctaaaagtagtagaacaagctattctgcatttttcttaacagttacaaccagtgggaaggcgttacg

SEQ ID NO: 420870 - DNA, 253 bp, Homo Sapiens
gctttgttcttgataaggtttgtctgtctctagaaaatgacaataaaatttcccttcatttaccagaggttagaatggggttatactctcacctcagcaaaggggcatgggattgcaataacttgtttaggttggttatgagtcatccctttgagactggagaaagggcctgccttttctaagacaaaaggattcctgccttttatacttctaagtaggagcagtgattgcttttgaagccgtacgcgtgggt

SEQ ID NO: 420871 - DNA, 106 bp, Homo Sapiens
cagaagcagggattaatgaagttttggttaatcttagactgtctgactccaaagcatgggcttagctttgaggggaggatgattggccaggggaaggcgttagtgt

SEQ ID NO: 420872 - DNA, 195 bp, Homo Sapiens
tcggtcttgaggtcccacacgtacgcttcggcaacattaaaatgagttgttacagaacatttgtgtagatccaatcttcagtgtcaagagagcattattctgctgtaatagtatcttttcatgaaagcacttcaagggagtcataaataagagccagtgaaaggaatgacaacgtcaaaatggaaactgagtcag

SEQ ID NO: 420873 - DNA, 200 bp, Homo Sapiens
tggaaggaaatgtaacagactaaaatcagagtaacgcttaaaaccatgaagattccagcccacagattctatctgccacatgcagacacgatttatacccctagacgggaaactgaagacaacaaggtgggtggtcataccaataactagactcaaaacccaaccacactgtttgacagtgaatagctggctccatgatg

SEQ ID NO: 420874 - DNA, 246 bp, Homo Sapiens
gtcgtcttttttgataggacatgtatctaattgtgaataaattcagcccttttgaaaaggaaagtggactgcactctgatatatggtaaaatttccaacactaaaggtgtttgcccattggcattatgattatagggctctaggcacgtattttagactgggcaatgtcttctttctcacaagactgttttgctttaactccctccttcggccttctttctagaaagttttgagggataaagccct

SEQ ID NO: 420875 - DNA, 261 bp, Homo Sapiens
acacagtaagacttcttcacaaaaaggtacaaaatactctcttccttaaaatgttcataaggtttttaagagtgtgaaaattatatgcaagaagcctgaatgactactttagaaatgagtctgtggctcttctcaattatacccattactggaaaaaactaagaacatggacccacaaaaaacagtatctatgtaaaacatgatttccaattttgcttatctcggaccccttctagttaaaatttgtatctgtccatcctg

SEQ ID NO: 420876 - DNA, 219 bp, Homo Sapiens
acgtaacgccttcgtggtacaaggctggctgcaggaacttcacttcgccccggacaccttgctttcaatcaacccgtctacaggtaccttgtccgccaaggtcgagggcaaaactaaaaccttccatctctcggattcatcaggctggggacaaatttcaggaccattgctggacgccgcgaaagttatcgcccctggaaataacggtgatttacgtgt

SEQ ID NO: 420877 - DNA, 162 bp, Homo Sapiens
acgtaacgccttctagataggaatgtatttaattctggtgtagaagattgaggataaagtgttggtattcgcatttgtatgggaatcctaaagtcattgacagtggaggctagctgctgcagaactggcagtcaagtcaatgaagtggagggtgaccaggga

SEQ ID NO: 420878 - DNA, 173 bp, Homo Sapiens
cacgtaacgccttccatgtaaaatataaaccaagcttaagtctaatgtttgtggtagcagagaagagtgacaagatgacagccatgttttaggaaaccaacaggcaaccagaatgtcagagcgtggcatgagggagagataaaagaatgagcaggaatcaatggtgggatgat

SEQ ID NO: 420879 - DNA, 512 bp, Homo Sapiens
cacgtaacgccttcagattctctaactgctcagacatccttctgaacacgagcccctaagatgtcaaacacacagagcccagtccaccgccttccccacagcctgctgcatctggcgtcggtggatggccctgccaggtgcctgctgcccccataggagcaccaggagtgcctctccaggtttctcccttcctcagccctcacccagcccctcctgtttctcctcatttaccatttcaaatcctgtacagatatcccagttttagtcatttgattatttcctttagataaattccaaaaagtgggattgcaagtgaaagagtgtgcttttattttctagcactttagtacatattactaactcagcttccagacaaagttgagcagattagactctccaggcctcccgtgagcagacaggtttctctacaccctcggcaacactgagcatcgctgtgctctctcatccttaatgaaaaacttcagaagcgaaaaaatatctcatctcaatgg

SEQ ID NO: 420880 - DNA, 359 bp, Homo Sapiens
aggatcccctcgtcttttgataggcctgtggtatacaccttttccaaaataacatatctttgttcctggttgtaggagtaatgaggttcagtgttaagagcaatcagtgcttagtggtaatagaaaatcaggtaatacagaaaggtataaagaagagagcagtgaaaatgactagtagttctaccacccagaggttaacattttgatgtatagtttcgctgactttttggtgtatagacacatacacatgtttttaaaatacaaatagatttataataggcatgttgtctttaattctaatttcatttattatattttggccattattctatgtcattatacatttatatctccatctc

SEQ ID NO: 420881 - DNA, 219 bp, Homo Sapiens
  misc_feature (35)..(35): n is a, c, g, or t
aatacgaggaggagatctggctgcttattctaggngcataacaatcacgttcactttagaagactgagactcttcagatcgatgcacttggtcttttcttctgggaaccttttggagcatttatcttgtaggtctcatgacgtttctggcaagctgtagcctcagagagaagaaatatggagctgacaaaaagaatgcagatgtgcagagagtatcagt

SEQ ID NO: 420882 - DNA, 159 bp, Homo Sapiens
caatggatcctcgttttttatttattgtggactcattccaattacaggggctcgtgagagttctgtattgttaccccttcgtcactaccttcccgggtcggtagtgggtaatttgcgcgccggctaccacattcaaggaaggcagaagacgttacgtgt

SEQ ID NO: 420883 - DNA, 240 bp, Homo Sapiens
tcgataggttatctgtttactctattgatattttcttttgctgtcagaagctctttagtttaattgagtcccacttgtcaatttttgtttttgctacaattgcttttgagaacttagtcgtaaattctttcccaagattgatatccagaatgctatttcctaagttttcttataagatttttacagtttgaggtcctaaatttaagtctttaattcatcttgggtcctatcaaaagacga

SEQ ID NO: 420884 - DNA, 185 bp, Homo Sapiens
taagtgtggggacatctgggttgacccactcaaaaatattgaatccccaggatcccctaagcactctaggcctccagaagaatctcatccttacttgttaaaaacctgtgctcatttcttctttgaagataatgcagaggctatgatattgcaagacaacaaaccctctgagaaggcgttacgtg

SEQ ID NO: 420885 - DNA, 377 bp, Homo Sapiens
  misc_feature (186)..(186): n is a, c, g, or t
ggaatgggtactgctgattggttggggatggaatcacaggcatatagaaaaacagtcctggtccttgcgtgctgagtctgcttctgggttggggccacagaggagtggctggtctgagaggggccattgggtagtcagaagtgcaaaagcctgaaaagacatctcaaaaggccagtcctgtgtacntacaatagtgatgttatttacaggagtaattgaggatgttgcaaatttttgtgccctctgggaataataacgtgctaagtcgatttaacgtgacctgcgatctatagcgagaattcgtggtccttcgcattcctccgtgaacctggtgtccctttcatatagttttacaagaggcaggtttacgtttatgg

SEQ ID NO: 420886 - DNA, 182 bp, Homo Sapiens
actctaaggatcctcgcagaggcgtttagcaacacaaacccagagtcgaggccgcgttcttggtttgtccagatcgtcctgtgcatgttttgtctgatactggttttattagttacagcgacggggacacatggcatcttccacaggaaaggctctcgaatgcccatggcattgggcccggc

SEQ ID NO: 420887 - DNA, 126 bp, Homo Sapiens
tgcagaaggcgtttagagagaaggaagcagtgagtaccacggctggaggtttgggtgggttacactgaaaggaggtaggaactaagcctaggaagcgtggatacgattcaggcgtgtggcatttga

SEQ ID NO: 420888 - DNA, 270 bp, Homo Sapiens
tgcagagcgcgtttagttatcagtggagattgtactgcatatgctatcttcagatttgaaggtcatcccagtacaagaactgaagatgttcaactaatttagctgaagtgataacagctctgaagccaagaagagtataagtctagcgttactgggatccaagggatagggttattagggctctccagaggggaccagaaaccaacagaaatatttgtatatataaacaggggctttattaggcgagaattggctccacgattaccaagg

SEQ ID NO: 420889 - DNA, 390 bp, Homo Sapiens
  misc_feature (129)..(191): n is a, c, g, or t
ggacccttcagaggcgttagtactactgagaagatattaaactctaataagcctactaaggctggatctagaaactcaaaggtaccaggaggattttgagggggaaggcatagaaatttgagaattagnnnnnnnnnnnnnnnnnnnnnnnnnnnnnnnnnnnnnnnnnnnnnnnnnnnnnnnnnnnnnnngtacaaaaagtgaaagccaaacagatctttttttctcccccagctctgggtataatgtgtcaggggatatagtgctttagtgtcaggataagctttactgtagatctgggaaaggaaactagtatttaccacactgtgctgtgtattttcacatacgttatcccaagtgatcatctcactaaacgcctctgaaggggta

SEQ ID NO: 420890 - DNA, 120 bp, Homo Sapiens
gatctagaggatcctccatcttatttcattatttttaaacacagcacagggagaatccaaaatgagttcccaagatgaatgacaaatgacagcccatatcataaccaggtattttctgat

SEQ ID NO: 420891 - DNA, 340 bp, Homo Sapiens
gtatagttcactctagttacttatttctattttcttaaaacagaatggagagctctggagtggcctctgtttaatggtgccatgggggtcttgacaagaacctaaacaacaggctggtggaaagttcagggtgggtgctggatgtaggtggctgaggtcacagcccagggaccatgacccagagggccctgataaaggagtatctccactcttggcactaaccataccttagtcttcaaaggtgaactctgggaggagtccatgaggatctacaagcaaatgggtgggcgaagtatacctcccccactccccaactgttctttgcctaaacgcctctgga

SEQ ID NO: 420892 - DNA, 158 bp, Homo Sapiens
agcaggatccttgcagaggcgttagaagattagaccaagatcatgacattagaagtggtttcataaatggatttataaggtgacttagcataaccaggtgacggtcttttgggtgaggtctttcccattggaacataacatgggaattcctattttca

SEQ ID NO: 420893 - DNA, 185 bp, Homo Sapiens
accgagggtatagcatacagcaattaagatggaagtctattgaccagacctacacacaggtttccaaatagtattaactatataatgaaagcatgaatcagcttcacacgtccttgtctctctactcccagttgtaagatggcttaactagctcctccggagggacgaaggctgtatctccagtc

SEQ ID NO: 420894 - DNA, 488 bp, Homo Sapiens
ttgactctaccgatccttacgaggcgtttaggcgtgtcttgatgctaacacttccacacccagaactctggtgccccattactaactggtatatctctgcacactgccctcccaggaacataattaaagttgtaggcctgtgtgaggccagctgctgctggaccatcagcatctctcttccaggaaccctaggtctctccaaatggcacagagttccctggggcagaaagacgggctaatcccattgttgggaagtcaggtgcggagtgtctgtgttgaatgattacaagcatgaagatgattttggaatctcacagagggatgctctgcatatttcctctctgctttcagccatttcctaggttatacacaggtgggctctgctccaaaaagagaaaacataagtaataggacagtaggcctgtctacaattggtaatgcatatttaactgccacccgtcacaattagatttcactaaacgcctctg

SEQ ID NO: 420895 - DNA, 432 bp, Homo Sapiens
aaggagtcaagggtactcattcatcataaagtgatcaacagcctggctgtatggtatacatatggacacatggtcaacttagcacacaactccctttcatagatcaggggtaaaaggaaggaaagcagctacagtacatggcatgaattccaacccccgtcctccagaatgactgtgctcaaagattagagaacaaaaaagcatgactggctgacgattgcaaacttccttcacttgtttgtgctggtgctcttctctctcctggaacatgcttttcccattctgctactgacaaggtcttattctctaaggcttaatccagtcattatttcttctagcaagccttacaaactctatgttgggctacattcccccgccacttcacttccatagcttgaaatgtcctcctcatatctgtccagagatgaaatt

SEQ ID NO: 420896 - DNA, 232 bp, Homo Sapiens
tagtatgtagaggacagtggagaatctcgatacatccattgcatgcgcgtcactaattacatcacgaggcttaaggctactttgtgagagtcatagattactcccgccggtctcccgcgcttcattgattatttttcacttagacattcagagcacggcggcataatatcacatcgcttctacatccgggcgcgggccttcgcgatgcttcgtgttaattaaacacgtcgcg

SEQ ID NO: 420897 - DNA, 133 bp, Homo Sapiens
atcttcatggcagggtctttgcacgcctataaaaagtgggcccagctccagggcacgcactggttaactgccgatgtcccagacagctcctcctcgctgtgcttttggtgggtagcaagtggatttgggccta

SEQ ID NO: 420898 - DNA, 353 bp, Homo Sapiens
gatcgagctcggtcccggtctttgtactgtaccacaagtcaggttctgtagaaaccatggtaggcatgcgtacagacccctgttggggaaatagaattgaaaacaaaatctcttgccaacccagaaaagctctttgcaaaagtagaagagaaaaacagcttttaaaagattgaatgtgcatgaaaccagaatgtggtgcgcaccatggacaatcccccgagcaactgcaaagacgggagctctgagcctgcaataccccaagcgactgcaaagacgggagctctgagcctgcaataccccgagtgactgcaaagacgggagctctgagcctgcaatccctgagtaactgcaaa

SEQ ID NO: 420899 - DNA, 338 bp, Homo Sapiens
tagagatgaaggatatcatatgtacactactaaaggtgaccagtgtcatctacagtatcactgtactggttactaacctagaagcttacatgtaaagtaacaggaaatgcacatatttacaagaaagcaacgcctgatcccatgtctccatcctgcttcctcctcagtgggtatctatctggatctcacagtgggctcaagagacagcagcaggctcaggggaagttagaccgagggtgaggtggacaggctgggagcaaagctgtggagtgatctgctggatgtccagttaccttagaagctggctcccacctagatcagacaccagttgccatgac

SEQ ID NO: 420900 - DNA, 144 bp, Homo Sapiens
ttacaactgtaaagaccctcttctgctctggtctattcttcccaattcaagatgggcttaaaaacccgatacccatgttaataggtctagaattacattaaaggtaaattctcagagccagtgctgacacactagtgaggacct

SEQ ID NO: 420901 - DNA, 373 bp, Homo Sapiens
ccctacctgaaggtacgcttaatactccaggaagaaaacttatataaatacatgtcatgagtgctcatcccccgagttgcagcttatctgcagagatgcttcactccgggagagagggttggagttgccattgtgaaggcctgtgtgtgtagaggtaccatgctgccaccaggccatccctcttacagctgtgtggcatcctggaggcctgggtaggagacggagggtgccgcaagttctcttccagtgatggggagccacaggtggtttcgtagggttcctgggtcttaggtggttatcaaaagcatttcacagacatatgtcagataaagaccctgtcctcaagcagctaaatgaatgaactagaacagtg

SEQ ID NO: 420902 - DNA, 170 bp, Homo Sapiens
gctttacactctagatgagcatccattgattattcttacccacaccaatggtacagttatgatagttggaaaatgctgcttttttccaactccactactccctccatttcatggtattctaatgaatgatcattgtcacaaaattcaacacctaatagtatctgttatga

SEQ ID NO: 420903 - DNA, 278 bp, Homo Sapiens
acccgtatacagaggctacaaacatactctgttgaggtgctttgggggtctcctgagcatttacttttgtgaatttttgggcagcctagtatagaggtgatccagcagtaagctgagagagaggccctagtttgactcttaactcaggcatggtctccttgggtgagtcatttcttcatcaggcagtcctcagtcttttggttgcagtgtagttgttaaaaatgtgggtacttggaggctgaattcttgggtcaaatcttatctccatctccctgtcc

SEQ ID NO: 420904 - DNA, 116 bp, Homo Sapiens
cgaggctatctcaacttacgaaacagtaaagtatcgttaataaaagcaaagtaaagaaagttataaaaggtattctggcaagaaaagttagaaggaagataattgtatatgaagaa

SEQ ID NO: 420905 - DNA, 130 bp, Homo Sapiens
tcgagctcgctacccgtatacagaggctactgaacaaaggatcagatcacatattagcacatccatgggtggaagcaaaatactagcggcatttcagtaatgcatcagagcagaaaggaagccacgtacg

SEQ ID NO: 420906 - DNA, 367 bp, Homo Sapiens
agccgccaccgttatacagaggctataaactggcacgcgtagaaaaaaatattttaagagacagattgggtgactatcactgccaagggtcaagaccaattaaaatggaaacaagtctcacagcctccctaatttttatcgactattagctggcttcgcacaccagaaagcattccaaggaaggtgtaagtacttccttccccactcttctccctaggaaacttgtccagcatgtcagtcaccaggtcttgctctacaaggtgacaaccatcactgcccaggccaatgttagtaattctccatatttgcaatatcctcagagcccgattcttttcttctttcaagaataactactgtcagaattgcc

SEQ ID NO: 420907 - DNA, 296 bp, Homo Sapiens
cagaggctactaaaataactcccggtatattagcagatgcggggtgttctgcgatgcttcattagtgagtggtgctggtctaggagactgccagcttgcttactgcactcaaaaagcagggttgtagctgccattgtttggatttgcatatgttcttcccattttcacttaccgcccctttgcccaagaaatcacctctccaaatcgacaatgactttccaaatctatatgtctttgcttttccagttactgccttctcttcatttacccagtcacatcgggttatggaaacacaa

SEQ ID NO: 420908 - DNA, 586 bp, Homo Sapiens
ctccgatatagagaggagagcaagaacaacttttcacatgctgttctaccttccagattctccttctaaatgtttattctaagactgattttcaaacagctgtcactagaggcagaaatgtatgatggaatctcatataggtgtggactgaatctcacctatgcaacctacttacagtacattcctaggaaaatcatttaacaaatttggatttatgttcccttacatgtaaaataaaagtagtgacatttacttcataagcttggaaaaggaaaaatgcagagttatttgacaattaaatatgtgaattgaatttacttatataaagggttcacccatcttgttctactttcttactctagatcaggggaaaaatgtaatagaatgtagaattataagtaatttattattgagaagatggtttggacaccaaactgctggccatgcacatgcctgtgaggggaagtaggtgcaggaactatattgaagtcaggctatagtaaagtaggacatgtttcgaaggagttagcaaacaagaggattaattggagtttagagggcaaggtctgaaaaagccaggttaagg

SEQ ID NO: 420909 - DNA, 153 bp, Homo Sapiens
cccgattggaagttcccaaagagtcaggtctggattgcacttttctgtaccccaaagaaagctctgatgaaatgcatggatctcagaaaggccaaaactcaaaggtcaagacctattggcctttattattcagtctgaaatgactccaggtag

SEQ ID NO: 420910 - DNA, 112 bp, Homo Sapiens
catcgagctcgctaccgttaactaaccaattattcttgcctgattcactttgttcctatgaagcctccccacaatgtatgatggggatgttaatagtcttctccctccaggt

SEQ ID NO: 420911 - DNA, 173 bp, Homo Sapiens
aaaagaaaataaaaccgtacctgtgaggcatgaccagacctgtaccaactcactactacagcatcatcaccagctgtctgtgttttactcatcctgcctccaagtgtgacggtccactctctgtgtactccatcatcctgccacaccggcctgaccacgagaacagcagaaat

SEQ ID NO: 420912 - DNA, 165 bp, Homo Sapiens
acacaacagctgcaggtcaggttattgtgtctcgtactaaccgatcttacgtataccatctggctgccctgtaacttgacccgccatatctaaagagcttagaaggactgtaccacttacctggcatgtgggcatctcttcgtggaatagaacggctattaatgg

SEQ ID NO: 420913 - DNA, 230 bp, Homo Sapiens
ccgatgtaagaggctactattaatccaccttactgagatccctctttcctggccttctgtgatacttgactcaccgtggtttttcttctttctacaaattcttacagctgtcttttgtcagattttgtagactttaagatgattacacatgccttcagcgttatgtttttaggttgtcttctcaatatgtatgttctgtttcactgttcacatctaccccgacaggaacc

SEQ ID NO: 420914 - DNA, 409 bp, Homo Sapiens
cgttatacagaggctagagggcacttccagagttcatctgccaattaaagaactgaattccatctatataataaaagccaagcggtcttccagcttttgctggaacatctgcagggctgaggaacccacccattccattttcagaacgttctgaaattttattcttatattttacaaaaatctgcctccctaagacttctatccattggtcctaacccaatatcttgagttcccacataataagctagacaccctttacacatgacaattattcaaagagctgaagacagctatcatgtcccctgagtctttcatgtaccagaaatggtgaataataaacacactgcttttgacttaaagaaactgtagcacattctcagcaactgttagttaataaggagagtaaaaa

SEQ ID NO: 420915 - DNA, 353 bp, Homo Sapiens
tacagaggctaaatgaagaccaacgcgtgatgaccatctaggagaacacacttcagtcagatagttttctgagttacatttatcccgtgcacttgacaaaattgataaaacttgcttcagataaagaagcactgaaaaataaaaatacaataacttgatttttgcccccagtgctatccctcttctgtgagatgttcttgagctagtattcactttaaccttgcatgaagtttagtaaagagtctttctttgatcttttgaagacactggatactttggtttccttactgtttcataagcatggatctaatttcattttcccaattaaacctgagcaattatatatttaggca

SEQ ID NO: 420916 - DNA, 294 bp, Homo Sapiens
  misc_feature (244)..(253): n is a, c, g, or t
cgattatcagaggctaatatacttggcctgaaattgaaaatgttgagattcattcctaagtattgttttatgccagagacctcctgctaaaattgatatagctgtttgctgatttgatttctccaggtctcattcagtttggttacaagaggagtcccgttcaaatcaatcctgtcttgtgtattaacagtacttcccctgtctgccatcatgagactttttcccctttaaacattcacccacnnnnnnnnnngagtacctatggctttaacatatgctcacaagtccagtaag

SEQ ID NO: 420917 - DNA, 356 bp, Homo Sapiens
cccgtgatacagaggctacggttatattctgaacagcagtgactaccccacagacatactgcagcctgggcatgtttacaagcccaccaaaaggggtgtgggaatgattggaaggatgtccttcccactgacaaagtattcagcacatctttgagttggcttggcaattaggttagaggattcaacatgctcaataaagatactgaagaattaactaagggcccagaagaaacattgccccaggacaaattacaggttgtagccataaaaccttatgtatgtggcgagtgacttaagggatagccaggtttaaatcttgactgtgcctaacttctatcaggagctaacttgtcaat

SEQ ID NO: 420918 - DNA, 326 bp, Homo Sapiens
  misc_feature (136)..(165): n is a, c, g, or t
ctaacgaagatgattaccctgaagtgtgttttgaagggatgttagctggattgcaaagaacagttagaaggctaacaaagtgattttatatgaggaatgctggttccactggttaatattgtgcatggggccaatnnnnnnnnnnnnnnnnnnnnnnnnnnnnnnaaagcagtggaagacagaaggcaagaggagactgacatgagagattaaggagttagaaccgcagaactcagtggtatctcattatagaagcatggctcaaaattgggtaattgtggctaagaaatgagtatctgaatgaaggaagtgaatgtggactgtcc

SEQ ID NO: 420919 - DNA, 597 bp, Homo Sapiens
gccccccttcggggagggggcctatgtcacagctgtgcgtcgaccacggtttgcgagtaggttctgccattaccgccaccgtacagatactccagttcgtccgtccagaatcgctgggcggaaaacatgacactgtacagatcggcttgccaaacatcagccactgtcgtagaggttcgagtgccggtacgcatcggaaccgatgtggtcggatcgatgggtttctcgatgacggtagagcgaccgatcagcttgccattgcgatgggcaaacatctcatggcccgatcgttgacccgacaagatcgtgaactgaccattgttgattggatcgcctgcatcggtcagaacgctgaacggagtggagtccaccgtcacaccgtaacggagcttgctcgcatcggtattgtcagcgtaaagctgccaacccaactgagaggttgctcgtccgatgatgcccgcgcctgcccgcacgttcgtactacggtaacccaccgagacgaacatgtcgttgcggaagttctgctgaccttccaggaactggccgttgagcttgatgtgatcgccaccagataccgcattaccggcacgcaccgtg

SEQ ID NO: 420920 - DNA, 268 bp, Homo Sapiens
ctaacgaagatgattaccctgttacaaaatacactgaactcagacctcaatgcagcctatagtgacgccatcagtcccatggcactggctacctgcaatcttccctggctagcctttggacacgggactcatggtgcctaactgttagagggagtttctggaaagaaaacactggttttcctcccagctaggaagatcagacttcaactaagcaatgtgactactgtagatggtatccaagacttatttgattcctgagttctcttgt

SEQ ID NO: 420921 - DNA, 392 bp, Homo Sapiens
tgatgtcatctgttttgcagaaatctgacaagctcaccctgaaattcactgtgaaatgaaaggacctagaacagccaataacaatcctgggaaagaacagagttggaaaacgtcttcccaattgtaaactcagcccttatagaggatggacacatagacggacagaacagacgtgcagacggacagaatggagctgagtcgagaggtcaaccctctcacctacatgcaacaagagtccagaggtcaacgctcaaacttgggcgcaacaggccaccgacagggcgccaagacggcccaaggcgcaggaatggccctctcaacaacagtgctgcgacaaccagaaccaaccaacagaatgaagtggggccccaccaaacaccacacaccaagtg

SEQ ID NO: 420922 - DNA, 472 bp, Homo Sapiens
  misc_feature (229)..(229): n is a, c, g, or t
actgtcatcaggccaccttcaggaagctttgtgctagatattgcaggaaacaatggcccatgagatccccacttgatgggcctctcagcatgtctaagcttcccctcttgtgtaaacaaggagatctctctgcgcttttattttactgagaatttttcattttaataatcatcgcagcaatggttattttttagaaatgttaggaagtggagggaagaaagcacagatnatttcagtcctgtcacatatctccgtggtgcacgtcattccataatttcctcgaatgttctcgttcgtgtgtttgtgtaatacttgcttactcgggcgctctgaggagtctgagtcatggctggtggctgttcaaaaaggtgatctttactcgcctctctctagccccattgctgtctttggccatgttttctggccatatctccttcactttccctcctaacactttccactggctggcaca

SEQ ID NO: 420923 - DNA, 324 bp, Homo Sapiens
cccggtgactgtcatcgtagccctaaaaagatgtcagcattattgagagggctgctgatgacaggtcaggtaagacgggcctctcctgagacatcagggatttggctgagagcgaagaaaatctctgatagcgaaggctgaggaacaatgatgaaaactttcctgagaaactaaaaaagcatattctaggctccaaagcccatctgcctacagatattcgaggagggggcttagacaaggagtctgctcagaagagactggccagctcgcgctcagcccggcaactctacatcgcgtgattttccatgtctaacatccttgcag

SEQ ID NO: 420924 - DNA, 392 bp, Homo Sapiens
ggtgactgtcatctgtgtgtgagaatcgcagcagccatcagaggagtgaggcgaatccacctaaagacaagccaagggtgtcagtaaggaaagacagacagagcccaagtccttggtaaggcccctgtagcctcagaattacccaatcccgggcacgcccctccttaggggcttctgatggcgagacatgcatgttcttactgtgttttcactcattttaattgtggtccctgttccctgtcaccagacacagtctatcagctgtgctctgtggtgcagcctttgaaaaggatgaacagcactccctgcagaaacacctgagtaatattttacacatttgccctgagtgtcctcacccagggaacaaacccagcttggttgatgacagtctc

SEQ ID NO: 420925 - DNA, 432 bp, Homo Sapiens
tcggtccggatactgtcatctgaagatagaagtggagaaaatatatcgagaggtgtgaaagtgaaggcaagctccacacagagttaagggatgttagggagtgtcctccgggccctctcccagaagatccattcatggccaagacaaatattcccacgtcaatatcactggagttctctttcaagtgcagacctcgtgtaccattcctttacttaaaaacttcaatgtctcctaaagcttatagggtcatgtcaaatgccacagtccaggcccttccaggttgatcccaacctagctttgttccctagctgctctctcctccctgccactctgctccctacactttaggatttagctattctggcctgctaaccactttctactgagtcaagccttccatctgtgataggcctttctccttgctgtgggatc

SEQ ID NO: 420926 - DNA, 468 bp, Homo Sapiens
ccggtgactgtatcgtaggacactgcatggatctgctttctcgggcctctgagcctccatgtctaccctgctgaaactttggtcccctgtctttggattgggcacctaggcctttggatgaggagaataggggggctccaggagtacacatgaacctctgaccatgctgccactgttgaggttgtacagaatgaaaagcagtagggcagcagcagcctcttagttttgcccagaccaaggtagcctttaatgcagaggtactgggttgatagctacatatgactgcctccgtggcgagagtcaggctccagaaatctgcaggctacagcctaacaggccacatttgaggcttcatcccagtttaaaaggcagatcttcccaagtgaaaggaagaaggaaggacactgcgaagtttctctcttttgatatctctgtatgaccaggtatctggcaggggaaagggtatag

SEQ ID NO: 420927 - DNA, 223 bp, Homo Sapiens
tcagctcggtacccggtgactgtcatcaggaccctttccccaccctgactcaccccccatgagggtgccctgtctggagcagccaggacttcttcgtcccatgggatgccagctggcccctcccactcggtatgacacctgtgtcattcgagtcgtctgcgtggttgtgtgtgtcctgtgtattgcattgtgatgacgtctgtgtcattcgagtcgtctccgg

SEQ ID NO: 420928 - DNA, 316 bp, Homo Sapiens
aactcttcaggtgacctctcttgaacaaacgtcatttagggaacccccagaaatgacccctttacattgtaggaccataagcaaaacactggttgtgtatagtcactgatccccaaggacttgcagttttttatttctgctggtgtgtcttgggatcagcttataactcctactcttacttagtcagtgaccagtccagtctggtctggaccaggcctgacaaacttctgctcacttgcatcattttcattctgagccagtaggactttgggtagactttaaagcccaagaattggtactcgctttggctagtgac

SEQ ID NO: 420929 - DNA, 422 bp, Homo Sapiens
ccggttatgtcatcccagatgacgctgctcacagctagagctaacagcccagaggctctggcgaccctagccactctgagggctgagggcagcagtttctcacagcacatggttaggaacctccttttagccaacccactgtcccaccatcatgcaaagaagcttgagacagcctccaggaggctggacagcctctcagggttcaatgagcagcagatgatgctggaaattaagagagaggactgagctgtttccatggcagattagggagaactcctacatctttttacccacacttgggacagacaccaagcaggaaatgatggagaaaatattaagaagctggctcctttaggccaccggagaagtgatgaatttcttattccatgtgtccactctgtattggcctagttccaggagtg

SEQ ID NO: 420930 - DNA, 454 bp, Homo Sapiens
ggctcggtaccccggatgactgtcatctgcagaaaacgagaaagggagagagaacgtccttttccacattaaacgaaataagccctgctaccccggtcccatgaagcctttctgggcagacactggcccaggcctgagctcttctgcacccatgtgcattctcccaagtcctctgccagcctacgagtcttcctctgtttcctttcattccatcacagaacaatctcgacaaactatcaccctacaatctatagcctggtggcatggcttgctcggtgggttgagcttaactcagcaacattctagcacagatgagggcctccccttgagccggcctgcagcactctaaccgggttcccaggacacctttcctagcaggctcaggaaagggcatctttactgggtcagtggctcctccaggaggcccttggaagacttcaggaggggcgtggtg

SEQ ID NO: 420931 - DNA, 435 bp, Homo Sapiens
cgatcgagccggtccgtacacctttcggccttagaaacagtatcatttaaaccctgttctgaaatcctcaggacgtttctgaagatcctgacaattttagtcccattctccccagttagctcataggctctattcagaatgaagctatctgggggcatgtaaaagccagtaaatttcctgatgcacaaaagaaaatggtgctttctgcccactgcctatttccactcgaaagtgaataatgccccagttaccaccaggcctgacttgatttatcttggttaataggattaacgtgtcagcccctctcaagaatttccaaatgcagatccggagtgtcactgactcgctggtgtcttttttcctctctgatgagcataatgacgcacctacaagcagagggcctttgtccggtgggagcagacagattatctgtct

SEQ ID NO: 420932 - DNA, 114 bp, Homo Sapiens
accgtgagtactgaggagctctgattccctgtcaccggttcccagagagtggcggaaaggaggcagccgagtaagggctgatggccggcgagctggtggtttctttttgcctcg

SEQ ID NO: 420933 - DNA, 107 bp, Homo Sapiens
gggtactattctcaccagactactaggagacccagacaactacaccccagcaaacccactaaacaccccaccccatattaaaccagaatgatatttcttattcgcct

SEQ ID NO: 420934 - DNA, 301 bp, Homo Sapiens
gcatcctcgtgcgctcgtacataatgcaggaactggagatgtctcgtgctgctgcctcttgacaggtattccttgtaaggaaccatcattcccttgtccctgtaactggagagaggcttgtggcaagagtgaggagacatcggctgataagtggcaaccagttaggggcccagctgcatgtctgcatgtcccgaagcgttcttgattcagggatgccattcacagcatgagaggtgcctcttatgtgaccatcctgcttagggtcagctgtatcattcaaagatggtaacaagtgttgagt

SEQ ID NO: 420935 - DNA, 341 bp, Homo Sapiens
ctatccagagacatctggtcgagagtcttcaagcgcgtcacgttcagcgtttcttcagcgacaagtgctccctagagatcgttccctatcccatcaggctcaccaccctgaggaagagctgcgctgtgagatggcccctaggcaggagaagccagcaggaaaggaaaggaaggaggcagtaggaaaaactcctttgtcatcagagttgtgctggaattattaaatgctcataggaggggccactatgaaagagtatgggaaaacaagtctggaagcctgggtgtgactttctcatctctacagcagacaaatccccattccccacagatgcaagtgaatgg

SEQ ID NO: 420936 - DNA, 245 bp, Homo Sapiens
tctgtggtccgtagagataaggctgtcctcccggaaaaccaaagggcaggaaagacgcaaagcaccatacatttgggttcacctggcatagtggtcaaatctttctttaaaccttacgcatgtttttaatcactgcattttccccatcacactcactctttgcttcttcagacagcacaactcttctcaaaaaatatccctgatgactcagacttatttgagacttgagagactcctggactcca

SEQ ID NO: 420937 - DNA, 209 bp, Homo Sapiens
aatggggtagtgtgatcctgagtgtgtcaccatatgaagtcagtctatctgatttgcgctaagtctatggtgcttcatgaaatccctctgctctcctcgggttagctaccttccaatccctgatggcagcacatccaaaatgagctctccctcaccctgtgcaggttgtgcagaaaatcttccctcatctttcacagagagagaaaaaa

SEQ ID NO: 420938 - DNA, 357 bp, Homo Sapiens
ctatagctacgatccggccactctctctcatctattctaagcttcaaccaaactgaactacttagagttgctgaacatgaatacatttcattttcggttgcttctaacttctggcaaagagagaatacttgtttggaataatattccctattccacactccctgacccctgcttgtttttcaggtatgagctagaatgtcacctctggtaaacctttcatgggatacgcagtattaggccagtaaaaccacgtttacttaccccatttgatcactttagtacacagtactgtgttattgtcactgtcaccaatgtcgagccaacgtttaattaatgagcagacatttaaatgttaag

SEQ ID NO: 420939 - DNA, 431 bp, Homo Sapiens
agcatacttaattagctaagacttcttattctaggcttgaccctatgttccacatcttgtgaatttgtagttgcataggctgctctctgacactggttagtgacctggaagctatagtaacgttaggggaggtgttgtatgagcatagaggtatccttgcaaggaaagacttgtcttatctcaatacgtctttgtttttgcacacaagaaagtcaatgtatgagtcttctaaaatcttcctatttccaagttgcagagtaccactgattcctaaacaaagatctaatttttgactcagagacgtagcaaggtctgaatcgcaattataatttaatgatcattaagataaattttctctctgatatttagattttgcccaattattaagatatttgggtgtctcgtaaagaatggaagactctagtctcttg

SEQ ID NO: 420940 - DNA, 442 bp, Homo Sapiens
gggggtgacataatatgaaaagtgctttgtgatttgtaaagtgttgagttatgttagaagttttaattcgtgaatggttccacctttctacaaaatgtattaggcagctattaagtgccacatgctctggtatcactgggaaaggagatgcttcaaatgagctgcctgcccttaaggggtccactgggtgaaacagaagaaaactgcagaagagtttggcaaaactttaatagtgatatgaacaatatgctgtaggagcacagctttaccccaaggggatgagagagttgtcactgacaggcatcatttgagatgagggatggctaatgataggacctgggtggactgggaagcaaggaatactcaacagcaataacaaaggcaaagagttgtgaaatatcatcatatgtgcagagattaatgaattctgtgtgattgtgac

SEQ ID NO: 420941 - DNA, 290 bp, Homo Sapiens
tagccatctggctgagtgtaaaactcatttctacgtggggagcagagaaaaggactttctgtacaagcatcctttccgcaatgtctaacatatttgaatatcaattcctttatagcttgctatcattcctatcttagaactgtcactttgcttacccccttccttttggtgcttagctataaaaatgtgcccttctcaggacaccaatgtcatacgtcttatgttgtaacactgcaagggatgtatactgagctatcctttgctctctcccctggacacacgatagaatt

SEQ ID NO: 420942 - DNA, 264 bp, Homo Sapiens
agctattaaagggactgagcaggatatgtagttttgtgcactcaacagcaggggcatcatcaggagccaaagtgccctgagtctagtgggcctgctatcacgtcacaggggctcttccaaccctgtacacgggaagcctgcaccctttcccagtgtgggaatcatttgtcaggggcggcagatccatgtatggtgggctttacctctgaatctgaagcacattgtgcagaccatccatgaaaaacacaaagggtagtcctgaag

SEQ ID NO: 420943 - DNA, 128 bp, Homo Sapiens
atgatcctttttcatgagtcactacatggcgtagagctgtatgccttgctatgagtgtcacataactatagtgttgactgagcccgtctaccttggtccgagggagtactcttgccccaagtcttctt

SEQ ID NO: 420944 - DNA, 414 bp, Homo Sapiens
cccaacccctggtatgggagagctggggagtcttggtccaaaactgttggaggcagttgttattagatggaggtggtgatgtggtagagtagagaaaggaaaacaagacaaaactattccatggaacaatttatgactgaaattgaagacatgtttcctttctttttgagttcccttgtatttttgcaagaaggaatccctgagatagttctcttagagtcaatagatggtaaatgctcttaacctttgtatatctaaaaatgtttcatttagcatttactcttgagtggtaagtttagctgatgataaaattttggctgacagttattttcactcagcactttacaagtagtattctgttgtcttctgtcatcttactgctgatgaaataaacatctgtcttcacttctttgc

SEQ ID NO: 420945 - DNA, 230 bp, Homo Sapiens
cggagctattcatgagttcacactaaaatggctagttctcactcttcagatattaagtttcttaacatgtaagaaaagatgaaagaatccaaggcaataatggaaaatattctttttattttttagcagaaatatgttagagtacaaactttgccaggcactggtagctactgtgttttcacagccctagtcacatctaaccattttcctttaaaatgacagacttaaat

SEQ ID NO: 420946 - DNA, 517 bp, Homo Sapiens
tgagtcaccactgctgtgcagtatgactacatccacgatattgtccattatgacttctggttcggtttcttccgagtgagatgcttgggaaacagtctacacctcaactatttagattgctgtgattttccccaccagtctttttcagttggtttggcacaccttattaaggagcaccgtttttagtagatcaactcacagtattcaacttctagttttcagacaaacaaaactctgtccacacatacttcaaaagtttgcaacataaattatgactatgatgaatttaactggcataagtgggtttgggaacaaatggggctgttttaaataatgccttttttttctagtagctcgtagtttaatcagcattctcaaatttgagacatgagggagtatgagaagagtggtgttttgttttttagaaatctgtatgctgaatacacaaatatttatgaatatccaagaaatacgtcagtaaaactttccgaatcaaccagtttgattcagaaaatca

SEQ ID NO: 420947 - DNA, 234 bp, Homo Sapiens
gtatttacaaaagtcacacaacatggtgaacgcaggaggaagctgcagagatggttctagacttacagagaggaggctatatgcaaacccctgtatgacttgcaatgtcccatgaactctgcctagaaaaaaccaggtgttatcttttcacttcttgcctatagttgaggaagctctatacaaatccgaccctttatctgagtttctccccctccctgttcaccccatatttag

SEQ ID NO: 420948 - DNA, 501 bp, Homo Sapiens
caaccctggagtaaaagtgcagaatggggaggagcataaattaccagcacacgattcatactccaaaactccactctgatgtctggctttcaagaccttccattttatggctcttcccaagctattctctaccaaccccgcagaagagggcagaatgcagaggagagtaaataaggggatgagaacgctgacgaatatagccattgtcccttcctcaagagcagtaataaagttaccttacaagctgtttaaccaagagcctggaggatgacaatacaaagagtagacacaagggggagccaatgggtccatcttaaaagtaactggagaccaggaaattgggcttttaagaactttaaattccacaaacaagccacaaaatgggaatgaatgaagtctaagagtaacaacagatgccatgaaggaaagcagcaaagagcaggagacactgagatttctgatttttaaattcagttctgaactgaattaaaaaaccaaaag

SEQ ID NO: 420949 - DNA, 108 bp, Homo Sapiens
ctacacatgctgaagtactaagccaaaagggaagatgcttcgctactcaccgatttcaaactgacctaacaacttttcagtatttccacatcccacaaaaatcaaact

SEQ ID NO: 420950 - DNA, 381 bp, Homo Sapiens
cacttctgttttggctccaatgtactcacttattctggggcacccttccaatatactgctaaacgcacctctaccactgtgcatagtgtcatgccaatcatcactaaagaaatcagcatgagaactgtgtgagtgcacctgaagagtaaggcgattctcacgctcacccaggataaacatccctacaacagtgctggtatgcagtgggtgcttgtcgaatgcctgcctgaatgactgaattgaatggccaacaaaccaatgaagacaagcgcccttaactgtcaatacctactgagaagccaccatcacacacctgtctgtgctctgatagggcatactgtgatcagtagatatgaccttgctgcctgtggggcaaggtct

SEQ ID NO: 420951 - DNA, 302 bp, Homo Sapiens
ctacattgaacatatgattcaacatttattaagataacttagcacatctttccccctgtgaattcctactctgcgtaatacctattgtaggctgggtatgtggcagaattagctggtacaaatgagcttacgacaatgggaaggtctcatggaagaagtgaagtcttacacattcccttcacttttttatgataaaggtgataagattcacttacagtaaaaagacattaatagctgctagattaacatctggcactctacccactcagaccaccacctgtgtattggaggtgaggggtgta

SEQ ID NO: 420952 - DNA, 121 bp, Homo Sapiens
gtgatcccaagactaaccccactcccagagttgcggcctacagccccttcctctgggcttgccttctcccaccgggacccttgtgtgactgccccctccatgctattatgccccatgacaa

SEQ ID NO: 420953 - DNA, 543 bp, Homo Sapiens
ctagaggatccccagactaacccactccaagaactcttcagcctttccattttcttttaatccctaacaacatgggactctgatgatcaggctccttgcttgaattcaacttgaaacccaaaggcaagggagctcttcgggtttgatggagatcaaagggactcacccctggggcacagaactgggtgcaaaagggtaatgagtgtgccgaaggggcacatgaaagatgtttagttcaggggttgatggtggagcccttagaggcagcattctcacttgtgattaggccaatggcaccagagagagaaagagaaccgaaagtggccccacagcaggcagggatacaaatgaactgccccaaatgatcacttagtattgtaatcacttgacagggagtgttgaaactggaatgttcttttcctttcaaggaagtgccatgagtgtgtacttttttacatgttaggctctccgtgtgatacctatattcccccacatcctattctcctagaactatgtttctgtacgttgtggggttaggtctgg

SEQ ID NO: 420954 - DNA, 162 bp, Homo Sapiens
agactaacccaccccggcagaggaaggaaacatggaagttggaagagaagtctagggagagaaacatgtcacgtccaggctaatggaagatgccacatgtcaaggcagaggaatttgcctctcaaagcaggagtgtggctgaatctcagagacacaacatca

SEQ ID NO: 420955 - DNA, 213 bp, Homo Sapiens
ccggatctcagacctaacccacaggtatttacaaatatgttaataaaataaaattaaacagcagaatgcttatcagaacactggaactgacacagatgcccaataatgatgtaaacctatatgacagtatattgagtaattaaaaataatgcaatcctatgtttgcaacatagaaggttgtacacgttcacagacgaagaggcacttgcaaaa

SEQ ID NO: 420956 - DNA, 340 bp, Homo Sapiens
cagctcgctcttgcataaagaattgaaataaatgctattcagttctccaggctcatctcaaatgttatctgcctcagttctgactccagttggtagcagtaagaatgctgctcagttgtgcattgccatgcaccctgggaaatgctgcaccccaactcagcagcttggctgctcccctcaggcaatgtgtgcctgacagtaagcctgatgaagcagctgtggactcagtgattggcagggggtctctggaaaaatagaaaccgatgtggcaacgcctcaggtcctagctgtaaactagtaccaaatgagctttcatgtagagaaaagaaccatggattaa

SEQ ID NO: 420957 - DNA, 226 bp, Homo Sapiens
aagtctggagtagggataaagtccactttctcccaagctcatgaagagcctgctatgaggcccagagctgggatgtctctaagaatcaaaccttcattgtgagtggctgcattgacccctggatacctctaggaagtcacatgtgagtagcatgagccagtcgtggaaagtccacttgcagaagagggtgtgtaatattgtcctgtgtgtctgtacttacctgtat

SEQ ID NO: 420958 - DNA, 297 bp, Homo Sapiens
  misc_feature (174)..(226): n is a, c, g, or t
actaacccaccacagttcgcaatctgctcagcagaactttaaactcaaaaaacacttttcccccgcttttttcttgattcccaagctgatacatttctgtatcacaatcatatctaacactctgagggagtatggaggactcatgggctttggatcctgatggagcaaaatcannnnnnnnnnnnnnnnnnnnnnnnnnnnnnnnnnnnnnnnnnnnnnnnnnnnngtcaccatttccttatatacagaacaggaatatccacctttttaggggcagggtggagataagagataatg

SEQ ID NO: 420959 - DNA, 459 bp, Homo Sapiens
  misc_feature (109)..(393): n is a, c, g, or t
gactctggtggcctgagactgaggtaggaagtcagctggaggctgattcctgacatatctccttccagaggaaccaaaacatatcccatgttaaaaagtggagggctgnnnnnnnnnnnnnnnnnnnnnnnnnnnnnnnnnnnnnnnnnnnnnnnnnnnnnnnnnnnnnnnnnnnnnnnnnnnnnnnnnnnnnnnnnnnnnnnnnnnnnnnnnnnnnnnnnnnnnnnnnnnnnnnnnnnnnnnnnnnnnnnnnnnnnnnnnnnnnnnnnnnnnnnnnnnnnnnnnnnnnnnnnnnnnnnnnnnnnnnnnnnnnnnnnnnnnnnnnnnnnnnnnnnnnnnnnnnnnnnnnnnnnnnnnnnnnnnnnnnnnnnnnnnnnnnnnnnnnnnnnnnnntacaagtgaggggctaggcttttgatcacaagtaatctgttagatgtggggtcaaggtctggggta

SEQ ID NO: 420960 - DNA, 156 bp, Homo Sapiens
taactaacttcaaagtattcagaatgagaagagatgctcttgactccatgtgacaagaataggcggctctagcaaaagagctatgccgcaaaatgacaactcttaatacttacacctacgtattagaaacataattcagtaagaagacaggaagac

SEQ ID NO: 420961 - DNA, 128 bp, Homo Sapiens
agaggatctcagactaaccacaattttggatactaacccctctcattcaccctcaggtctcagaaatgatgtcaacgtgtgcggatcatttctgagacctgagggtgaatgagatggggttaggtctg

SEQ ID NO: 420962 - DNA, 282 bp, Homo Sapiens
agtattgctctatcttgccactcaactccatcatttccaatccaactgcacatgttgagagacacgtcgccatgaatatatcacatacctgcactgtctgggtctctgagcaacgacatttatatcaattataagaatgtatctatacatgagcctttccatgagtagtaaacctgggagacagctccctccagagaggttctagggtggtaccgctacgtgacctcaccttcttttactcagaggtttacatacctaagatacggtctctccagacagaag

SEQ ID NO: 420963 - DNA, 495 bp, Homo Sapiens
  misc_feature (162)..(221): n is a, c, g, or t
ccacctcatcccctccctataaccacatcatccaagtagaactgaacattatttagctaaagcaggatttcaacctcggggagcctcagcccttagacaatggtggttaccagacagtgctaaacagttgggtccaaatgacacatttcactaggccttggnnnnnnnnnnnnnnnnnnnnnnnnnnnnnnnnnnnnnnnnnnnnnnnnnnnnnnnnnnnnaaatatcccagggggccagatctaagcaaggggcgtacaaaccccaataagagacggagagtagcaccgagaaatggggggtcgctcggggaggacaggcgaggatgtgtccatagagcggaagtggtaacagcactgaacacgaggtagtgatatctgaaactggcctatgtattctatatatatttatttcaaggtcttgatttaatgtgtccttcccaggggttcgaaactaaagacacatgcgcaacaaaacattgtggtttaagtcagc

SEQ ID NO: 420964 - DNA, 131 bp, Homo Sapiens
attatcttcccatatttcacaaatgtactgtgataactctaaccacccaattatctgatcagatgagaacactgttaacaccagctgtctttcctaaagcacctagtgtgtgtggtgtggggttaggtctg

SEQ ID NO: 420965 - DNA, 367 bp, Homo Sapiens
tgtaatgactcagtgagttaatgataatagctgataaaatgggtactgcgggcgggtaccgtgctgtgctctgtgcgcgtgctgtccacttcaccttcacaacttcatggtggctgcaccaggtcacaaagctggaaagtggcactgtgcatggctctcaatgcctgaagctgccagccaggtaattgaggaggtcagcaacagggacggtactatgtgatgttggagaaataaagaggcgaagctgtgtttaccgaatgcatttcagcagtgtgtaaaacacttggaaataagatggcataggaaataacacggcaggaagtttcttcatgatatatgtggggttagtgtctgggtgtacccgagc

SEQ ID NO: 420966 - DNA, 499 bp, Homo Sapiens
gtgtgaggtgatctagaggtccccagactaacccacttccccagccttatctgaccttcagcaagcagagagaattaaacacaaactcgctttgatggaccagaactccctgctcatagggtctgggtgcccggactctgggtgacctgagcaagtcacatgctaagattcaaagactcagtttccaaggaagaggcctagcctcacagccagaccagcccctgactttggatcactcctgccctccatgcatccctcagccacccgcagagaagctgggggcagagtaaagcaagcctggctcaacctccacccagaaacacacaagcacccgacaaatgccatatctgaaagctttctccatccttttcctttccttgactccctcagtagtctccatggacagtcatctccactcccagcctcctcgctggcctcccacggtctcaggctaagcccagagggtttaggggttggacagcaggcacgcagtgtgtgg

SEQ ID NO: 420967 - DNA, 347 bp, Homo Sapiens
ctgtacagactaaccccaccccagtagacaatgtggtctgattgactaaaaatatctctgagccagtagctacagtctcatccagcattatgggaagggagggggagataagtggagaattgaggaaagcataggatcctaggcacgcatctggaattcctgggatattggacactcagggatgtcagactctcaactctcatgtccttagcctccactccaaactgagagacacaaggttctatagatcaggaatcaaaatggtggaggagagggaagaaatataactagatggggaatcatgagatttaggaggtaacaagaacggtctctgtggggttaggtct

SEQ ID NO: 420968 - DNA, 357 bp, Homo Sapiens
attgaggtatgattctttctctctattacttcctactaagagaagttccttccttcctttgaagcaggctgactcaaaatttgtttcaggagtaacaagagaaaacctccctcataataaactgtggaaacctgattttaaaaatctacccaattcaacgtgcctcctccttcttcatcgatgctttatttaccattccttggtatatttaataacactttacaatccaatgtcctgagaggacaaaacgtttcttctcttggagaacatagctgagagagcggggaaaacaatccctggattgatgagtccaaacacaataagtcttcagcgtccacaggggtggggttaggtctg

SEQ ID NO: 420969 - DNA, 203 bp, Homo Sapiens
tctagcaggaccccggaacacaaaagcggggctatgtgtgacatgttactgttcaattcctatctgaggcaacagagcaggaatactgcttggcccaccatgcaacaaaaatgtatgaaatcgcattagcagaaaaacaagatttctgggtcttatcacagaaaggcttttttcctcttctagatgaatgccgcttttgtgtt

SEQ ID NO: 420970 - DNA, 224 bp, Homo Sapiens
  misc_feature (68)..(68): n is a, c, g, or t
tctctggtctcccagagacctgccaggggtagtgccccactcggagggaaggtggggaggtgacccanacctgtgtactatttacagaagcctttattggggagaggtcagagttcatggatcacagggaggtgcaaataaagagttctgaggatgctgctgcggcggggacttgtggaggaggctgcatccctgccaggttgtacggaagccgcttttgtgtt

SEQ ID NO: 420971 - DNA, 217 bp, Homo Sapiens
tagaggatccccccaacacaaaagcggggcaagagcttaagtataatagcatgggtggaaagtggagagagataaggacagagatgggatttcagggaaaaggggataaggaggaaaggaggtctccaaagttgggagaaaggaggaaaccctatgatgtgtgtcgcccctccaggaccagcctaaaccacataggcgtcaggagggttttggaaag

SEQ ID NO: 420972 - DNA, 149 bp, Homo Sapiens
tccagaaaatccacatcttccagacaatccagggttttccggacaaatccatgtcttccaggaagctccaagtcttccagaaaatccacgtcttgccctcaaatccatgtcttccagcaattactgttctttcaccagatccagacctt

SEQ ID NO: 420973 - DNA, 277 bp, Homo Sapiens
ttatattcattgacaggtagcaggagagtgtagatgcagagaacagtggagacaagcagcacgggaaagccactatcaagaagagaatgccttcagtgctaccacccatccacaccctgacccctgacaccacagtttaccccaggaggtgctgggaaatcccagcggaagccagggtgcctggaaggacaagcctacacacagagcaggtgggagggggcaaaaatgcagaaaaggcacagttggagtctaccacaacccacagacttggtaggtc

SEQ ID NO: 420974 - DNA, 438 bp, Homo Sapiens
  misc_feature (170)..(328): n is a, c, g, or t
cggaactccccacttcatcctgccttcatcctttaatgccatagaacgtgcttcagaatgactcactcctgaagaggaacagagccattttattctccaaagtgcacagtctttcatcaaatatgtttcagctgacacgacagctcccgcaacaatccagaccaggaacnnnnnnnnnnnnnnnnnnnnnnnnnnnnnnnnnnnnnnnnnnnnnnnnnnnnnnnnnnnnnnnnnnnnnnnnnnnnnnnnnnnnnnnnnnnnnnnnnnnnnnnnnnnnnnnnnnnnnnnnnnnnnnnnnnnnnnnnnnnnnnnnnnnnnnnnnnnnnnncaataaaggcaaaggttggcagccacctaggaagtaatgagctatgtagccatttagacataaaataggttaaacatcatatgcctttgaccaacattagccagcttgga

SEQ ID NO: 420975 - DNA, 212 bp, Homo Sapiens
attcgtgtgcggagaacatgccggggtctgctactctccgacgccctgggagggccttactactttaggtcctaactaactatatccaaacgaccaggtggtggtcccacagcacgggagctgtcagtcagggctgtgcctctgcacccgtatttaggatcgagctcctccaagagaagtaagtgtcctatacacgttcttggaaggttgat

SEQ ID NO: 420976 - DNA, 213 bp, Homo Sapiens
cctgggcccgtcatttatagtggtatctgcatgcaaagccgaacgatagagtgaggactgttctgaggcatatttctctgtccttaggcctgtctcattatatagactgattgggtaccatccaggcaaaggaaaagaacatgtgaaggttcttatcagcctgaagaatcactgtcaggtgaacagagttcacaaacatcttcacagcgggct

SEQ ID NO: 420977 - DNA, 328 bp, Homo Sapiens
ggctccgcctcagcccatactgggtccctggcagacttgccatgcatacatgctcaatccccctgtcttagacatagcaccctttactagcatgctccccctgtccccactgagtctcgggcaagcctctgaactcaccagctcccactttcctggggtgagtggcacaggcacaggagatattacaatgacacagccgtgagactgccattgatttccagctctcagtctctgctttaatccatatttttattaaacttatatgtgcaggaaggaatatatagggaaaaccatgaagggctgtcaggcgctgttattagtcttctca

SEQ ID NO: 420978 - DNA, 182 bp, Homo Sapiens
atctacaacattcataatacattctttctttgtctgtgacttgctaggaacctagaagacaagcctgtccctacttggtcccctcgtccataatacaggctgataagagaacctgtgccagctgcagtgttttctctcgaaagggcaacacatgaggcgacccacccagatcgtgctttcta

SEQ ID NO: 420979 - DNA, 182 bp, Homo Sapiens
tgaacctgttttatacttttacattgaatttgtctttttaaactgattgccatgaaccattttggaggtatctactataatatccaatggatttatttaacagagccaggtaaaatatgttgccagagtagtgtatctcattaggatacttaaggttggtgtgtctttttggttcccagaaa

SEQ ID NO: 420980 - DNA, 502 bp, Homo Sapiens
gtataagcaaaactggaaagaaaaatgcatttttcttgtccacatcgtcttcgtatcctctgctcctggcgtacggtttgtttgtctcttctcactactgataggcatttctgccagccgtgtgcataccgtatgtctgtggatcgaggtgtggacgcccgcgcaagcttcccgttcccgtttcaggggggaagctgcagagttctggagctgtgagtagcaccgctgtcaccgcaaaagcagaacccccagtgattagggacgctccacggacttcacggctgcgcgtcctgcatcacggggctgctgttgttccagggtgttgggacgtgcgaaatgcatttacgacctccgtgaaacattccctacaacctcattcaccctggcaagtcgcggccagggtgtgtacaggggacactcccctctcgggctggcttgtgcgggaaccacgtgcgatcagcagaccacggactcaacataaattcatccacatgcactcaca

SEQ ID NO: 420981 - DNA, 519 bp, Homo Sapiens
gtatctcggatttctgagtgtcttctgaccaccgttgtgtgtagtttccataaacgataatctgcccgtgggtgtgagtgctgtctgctgcgatgcgtgtctagtatacgtgtgctgcctgtatgagtgtgtctccatgtatgggtgtgcccacgggtgtgagtgtgaatatgtaagtcttgcgtgtgcatgagtgtgtacacatgagtgtgagggtctgtgcataagagcctattgtgagtgcatgtggatcgcatttatgtgagtccgtgtctgtgtgcacgcacgtgtccccgcacaaagccagcccgagagggagtgtcccctgaacacaccctggcagcacttgcagcgtgatgaggtagagggaatgtgtcgctgaggtcgtaaatgcctctcgcgtgtcccaacacgctggagcaacaggagcccgtgatgccggccgcgcagccttaaagccggtggagcgtcctaatcactggggtactgctttgcggagacagcggtgtacacagagct

SEQ ID NO: 420982 - DNA, 175 bp, Homo Sapiens
ggagggtgggtcgcgatccactatctggtttccaggagctgagttggacagccagtccagtctttcgatagagcccgtcgccgctggtagctgcagtgtggccttgaatttaccagttcctgtgtggtattgagatcacgccacagcttgtctgtgatctcgttctgcatccagt

SEQ ID NO: 420983 - DNA, 192 bp, Homo Sapiens
ctatggttacagacattaattttctaggcattagtctatacactacaaaggccagcctccagttcagctgcattaaataggtaatatattttgtttaaagtttcaattaaagcctgggccagaagatatatggtccctgtggggagtttgaacactttcatgccagttctagggttgcttaaggatcatgct

SEQ ID NO: 420984 - DNA, 198 bp, Homo Sapiens
ccgtgatctttgtttttcttactgtgcattttgtcactgattttatgcatgcactcatttacgttgcttagggggagaaaaagctgtacataaaaacagattatcttttagagcaccccagggttagtttcattttcccctcttctttttatgaagaaaatgataggaaacataaaccggcgccatctaatcggaaag

SEQ ID NO: 420985 - DNA, 582 bp, Homo Sapiens
atgcgcagtcctgctgttggagtagaggcagagtttctgacagtaactatagccacaggcaggcagttcttaggctgtgtgggaggagggatgctttaatccccagtggcagtggcagtggtatatcagctgtagtagcagcagggaaaactagttctcaggaaatgtgcaaatgcgtgatgggagccctgctgcttggtagatggagtcgtggccagctacatgtgttttggcttctggtggcagcaatagtggctgtggctggtgatgagagggtctgtcctcagagtgtgattgcagtagccctgctgctgggggcagggtcattatatgtggtagctgtcccaggtaggtggttctctggccatagagagtatgtgctttggctttctttgtcctgggagagcctccctagggtgctgcaccaccgtttacctggcatacagggcactgtgtgtgctggagtgctggggaccctgccattctgctgagtctgactggtgttattgctgctacgggtctctgggtggacacagaatggtgtcagtggggctccagggacgtgaaggtgcaggtgctctt

SEQ ID NO: 420986 - DNA, 202 bp, Homo Sapiens
cactctaccaagtccagacaatactttactaaatgaaatgacaattataaccaattaaaattcactttacatactacttcacctatttggtatgtattatgcatgaagacggagagcccattgcctcactgctcaggatttctgtgtgtcttggaaattgatggacagctccaagatcttccttttagtgcatttttccccc

SEQ ID NO: 420987 - DNA, 120 bp, Homo Sapiens
gaggatctctactgtggtgtacgtagaaatactatacacaaaaacccatccaaggtgaagaggcatacgtcagtacggttaaggaactagaaaaagggggaagtctaaggaaatagatga

SEQ ID NO: 420988 - DNA, 125 bp, Homo Sapiens
acccatcaaaggtgacgaggcatacgtcagacggttaggacactacgacaccagggggagtctaaggcaatagatgaaggacttgcaaacttagctaaagagcttagacttgaactttttagaca

SEQ ID NO: 420989 - DNA, 259 bp, Homo Sapiens
tgggagacttccacttccagcaaatctctggtttggaactgatagctgcaaggatgttggaagtgtgaccatgaagtctgtcagcaacaggtcagggacataagaaaccaggcatggaatttcatgcttagccaccctgcagtgctgtagcaaagcctcgggaagcagggcgactctttccaggaaggcagtacttacttctctgttctagaaaatgcccaggatacccctcgtgtatggacacacccacacttgcacc

SEQ ID NO: 420990 - DNA, 280 bp, Homo Sapiens
  misc_feature (39)..(39): n is a, c, g, or t
  misc_feature (41)..(41): n is a, c, g, or t
  misc_feature (170)..(170): n is a, c, g, or t
cgctcggttcatctgtcatagcgtgatattcatatcgantncagctgatgtgtagtaggctatacaaattattgggcagaactggaactagagttcagattcaggccacctcagccagtaaatcgaactccgagagtgggttccgaatctgtactaaatcccagggcaanccaggggggctggagaccagtggtttgggagctgctgttgtcgggtagacggagggtgagtaaggccagccttcgctatctaagagctgctttctgaagggtactaaatt

SEQ ID NO: 420991 - DNA, 130 bp, Homo Sapiens
  misc_feature (44)..(44): n is a, c, g, or t
cccctgaacccgttatgtggtgtaccgcattatacactgagtanacaagtatagagctgcgttagaccagcctacaggatactaatgaaggctggaatctggaagctatgacagaacaattctgagcaca

SEQ ID NO: 420992 - DNA, 218 bp, Homo Sapiens
tacctgtggtgtcttactctttctctgtattgaatgtgcaggcattttacagctcagaaagaaatactgttaggcaagatccggacaatgctctagaaaccagttttccccattgctctgcagtgaagttacttgctaccaggtctctggcaagcacatagtatttctaagctaacaccggcacctagtggaaataggaatactctacatgagacaca

SEQ ID NO: 420993 - DNA, 138 bp, Homo Sapiens
  misc_feature (33)..(33): n is a, c, g, or t
ccttgtgtatacctgtttagtctaatgtatgtntttagttagtgtgtggacttaaaaatggtagaagccctccaggattttggcaacagagaaaaacatgggctctggtatttgatcaacggctcccacttaaggctc

SEQ ID NO: 420994 - DNA, 116 bp, Homo Sapiens
ggtatgggtgcagagagggcacgtggggcagggcaaggcaggccaggcgggaggtcagcgccatctgctcactgcagctgaacctgtgctgacagctggctctgatggtgagaggg

SEQ ID NO: 420995 - DNA, 178 bp, Homo Sapiens
ggtttaattgacagctctgccacatcctcctcatttttcacaggggagtagcgcaccaggaagttggtcagttcaatggatggaggtggagcccagtgtgacacgtatcgtatcaggaccaacattggtaaatcgcaggtcagtgggaggagggacagctggtttcaaacaagaagga

SEQ ID NO: 420996 - DNA, 113 bp, Homo Sapiens
gcgcagtggttaatgaatccaactaggagccatgaggttgcgggttcaatccctggccttgctccagtgggttgaggatccggcgttgcggtgagacggtaacaccacagtac

SEQ ID NO: 420997 - DNA, 207 bp, Homo Sapiens
gatccttactgtgtgtacgtgtcggactgttgtatgcgtagttgagacctggggatccttatcaattaatcgccaaagcgagtgtggaggacttcagcaagctgggggtggcgttcctggaagacagactgcagatggctaatgggctgatagcccaaaagatcgtttgtaagtaactttagaacatgtgtcatacgtgtgggtgtc

SEQ ID NO: 420998 - DNA, 236 bp, Homo Sapiens
  misc_feature (69)..(130): n is a, c, g, or t
tgtgacttcaagactttgaaatttggggtgcaatgatcccaaaaaataagttaagcagttactatggannnnnnnnnnnnnnnnnnnnnnnnnnnnnnnnnnnnnnnnnnnnnnnnnnnnnnnnnnnnnnacatgtgcacaaaacagagagtgtattctacataaaatctctctctggcgccagagcgcacatgaggagtaactcagacatacaggagacatacatcgtcgtctcg

SEQ ID NO: 420999 - DNA, 191 bp, Homo Sapiens
aaattcactgggaagaaaccggtaaaatgaagcactgaggaaatgacaagtggttccgtgggggtacccaacacccagcccatcataggagtatgcagagaaccacacctgattgaacttgccacagttaacaattctgcaagaagagaaattaggcgctgtttatttctctaaaggtgtctggatgaaac

SEQ ID NO: 421000 - DNA, 143 bp, Homo Sapiens
tggctaccatgttttacatttgagaggcgaacagaaaggatgtgctggataaaagcttgacaagttatgtactcagatgatgacttagaatctagttcagctccccaagagtttgaatacggtaactagttatttttctcatc

SEQ ID NO: 421001 - DNA, 150 bp, Homo Sapiens
atcttataggactggagagtcaagtacttaatgaggaatgataggtactaggcaaagagatagggaacatccatggaagtgactctggctgaaactacctgagggaaatattgtgcagaggaggctaattaaccataacactctggaatc

SEQ ID NO: 421002 - DNA, 101 bp, Homo Sapiens
cgtacgtggtgtaccgccatggcttggaacactgagacatcttatgaaatggggtgaaacagccaaatctcaaatatttagttcttgtccaaacatttacc

SEQ ID NO: 421003 - DNA, 129 bp, Homo Sapiens
gatcagaggaccccgtactgtggtgtacgtaaaatctaatctagtgtgttcatgcaccaggcaatgagcatgaacatagaatttagtctctgtggtgtgtactggggttagaattaggatcagacttgc

SEQ ID NO: 421004 - DNA, 175 bp, Homo Sapiens
tgtcccattgtggtcagtggttacgaatcgactagcaacatgagttgcgggttcaatccctggcttgctcagtgggttcaggatctgacgttgccatgagctgcggtgtaggttgcagactcggctcagatcccgcgttgctgtggctttggcgtaggctgtcagctacagttcc

SEQ ID NO: 421005 - DNA, 240 bp, Homo Sapiens
ctctagaggatctccgtactgtggtgtaccgtagcaaataaataagtaataggtggaaacgatgagtgcgttttaaatcggggtagattttaaataggatggggagggagatacttaatgagacgatagccttgagtcagtccccaaaaaccactggtgccaggacctcagggcctggaatgagggtaaagtgagttaggcactctcctgggaggcagacacatgtacagggaatagaat

SEQ ID NO: 421006 - DNA, 181 bp, Homo Sapiens
  misc_feature (37)..(37): n is a, c, g, or t
ctagaggatccccgtaacgtggtgtaccgtccatcancatctttggccttcattataatcatagtttccttcctggtcttccactgtataatctaatcagaagaatagcctgtcagtctgttatatgcacctccagttacatcatcctccgcttcaaacttttccattcttacttagcctc

SEQ ID NO: 421007 - DNA, 209 bp, Homo Sapiens
tactgtggtgtaccgtccattgccgtctgggcagtgctgatataggtctgggctgaactcagatatgacatggaagcattatgaatgcaatagcaattcagtcatagcaccgaggctgtggaaattttgccacgagttgttcaggattcattattgggcagagtcgtatgttgaatatatcagtgaatttttgtgtaatttgaaatacc

SEQ ID NO: 421008 - DNA, 137 bp, Homo Sapiens
agatctgagatcccgtactgtggtgtaccgtgacttgtgacctctggggcaggagctatttggatggagctgaaggatcaatgtctagttttcccctcagatcccacggtcaaactgcctccccttctgttttttgg

SEQ ID NO: 421009 - DNA, 148 bp, Homo Sapiens
tgctgatctagaggatcccgtactgtggtgtacgtcatatacatttttttctatctcacatcatgttctagcccaagagattgaacatagttccctgtgctgtacagtaggacctcattgcttatccagtctaaatgtaatagtttgt

SEQ ID NO: 421010 - DNA, 121 bp, Homo Sapiens
tttcatttcattgtggagcagcaactctttacagtgactactcttggataccagtgccatggaaggactgggaggaacttactaataactcgcttcacgaactgaaataacggcgtgacag

SEQ ID NO: 421011 - DNA, 216 bp, Homo Sapiens
aagaggtgatgattacggagttatatgtggtgttaccgtccctagatggttaatgagcgagtctcacagtgagacactacctcccaactcccatcccactgcatcccagtcttgccaccagatgagcctttctaaaacactgctgttttctcagagctcttcatttcaaaaccctcagctgattccctaaagcaaagaccccaaatacatcacagt

SEQ ID NO: 421012 - DNA, 148 bp, Homo Sapiens
aagcttatactgtactatatgccaagtcataaatacagccaacattatttcatgaaaagagcactgtcaggagatagatgattttggtttaattgcctattttactgtccctaacattcacgttcttgaacgaacggtcattttagcc

SEQ ID NO: 421013 - DNA, 231 bp, Homo Sapiens
tgtatagtaccgcttactacttcctacagctaagttctatctattcctgctgtaattgtaatgtgtttgaaatttaaatcatgtaggtatttattttaccttgagattagatgacatcatagtaggctgagtataggttgactctgtacaattcaaaagagtgaacgcatggttaatatccttttctcacactaatggtgggacttggcgttggtcccgggtaacaccaca

SEQ ID NO: 421014 - DNA, 209 bp, Homo Sapiens
ataagagtgaattcctttgcctgatggtcttgagtggagtcatcagtttttccctgcctttgcattcataatgaaacactaactcttcctgggtgcctaggctgcagggcactggagtggaaccacactgttgtctgtactgggtgctagtttgctgactgcagacatgtgaacttaccagctctgtaccactgtgtgaagccagctcc

SEQ ID NO: 421015 - DNA, 241 bp, Homo Sapiens
cgatttgtaccggtagtatacacttagctttccttctggcttgttctttctctgcatctagtctaggcaaaatgctgtaacatggcactattttaggtcacctagggtatatcctggtgtgggaatctacacgtctatctagaataacgtgttctttggtcgtatacttgacatgtttgtttatgcttctccagtggcagcagtagtggtaactccttgtgcaccacactatattatcggg

SEQ ID NO: 421016 - DNA, 218 bp, Homo Sapiens
  misc_feature (153)..(153): n is a, c, g, or t
actgtggtgtaccgtcccactgagtatccaggatgaaccgcaactcatggttggttcctagtcagattcgttaacactgagccaggaagggaactcccaggaccttgtacctttgagggttattattcaaagtactacataccctctccaggnatgacaagggaacctttttggtttcagttttgttttcttgaacaaagggagcaaaatagtgcctt

SEQ ID NO: 421017 - DNA, 256 bp, Homo Sapiens
tgctatgtaagctaaagacaaggcaccctgagcacaactgcctgtgggtgaaagatgattagcacatgatggtttgcagggacgttcctagttggttctcatctctgatccacatgccctttcgcaagtactgttactccaggcaataacccagaagtccaccgtcatgatcatgctgagctctcctgactcaccccaaaaacaatcacccgtaaggctaaagacaaggcaccacgtttttaccacagtacggggt

SEQ ID NO: 421018 - DNA, 189 bp, Homo Sapiens
atacacgaattcacaaacagcaaaagtcccacacacatcctctgcatccatctcaatcagctgcagcaaaacgcatttgacacaagtcaacatccattcatgatcaagaccctcgccaaagtgggtatagagggcacactcctgaacctgatcatagtaacttaggacaacaccacatcaaagatactc

SEQ ID NO: 421019 - DNA, 222 bp, Homo Sapiens
tgcagtttattgatgcagtggatctatgcaggtggtgcagtgtaatccattgaatgaagctgattacatgcagcttggtagaattgatacggattgaatgcagtggattcatgcacgtgtgattgaatgcactgcattccatgcagcattgtgtaatgcactcagagtgaatgaagtggattgactgcagcttgggccaatggatcctgattgaatgcagag

SEQ ID NO: 421020 - DNA, 221 bp, Homo Sapiens
  misc_feature (53)..(157): n is a, c, g, or t
tgtgtaccgtcatacgcaaattaagcagtgtcatacacgacattcacaaaagnnnnnnnnnnnnnnnnnnnnnnnnnnnnnnnnnnnnnnnnnnnnnnnnnnnnnnnnnnnnnnnnnnnnnnnnnnnnnnnnnnnnnnnnnnnnnnnnnnnnnnnnnggaacactccctgaacattgatcactagtaacttagtgacaaaccccagcatcaaacgataact

SEQ ID NO: 421021 - DNA, 128 bp, Homo Sapiens
acacacagcgccattcaagaacgttgttcaatgcctcttcctaggaacattgctcctacagctaaacaacggctgcagatttggaaaccttggctacagcattgccaaacggtcagctccagtgcctc

SEQ ID NO: 421022 - DNA, 149 bp, Homo Sapiens
ccttacgtcctggactccaccagaaaccttctccctcctccacgcaactcccaaaggtcgcatagatttctcacttcacataattcaagtcgctactccgatgtactcttcagagaagctttctcccaccaccctaagatcacatcctt

SEQ ID NO: 421023 - DNA, 146 bp, Homo Sapiens
gcccttttagctgtctctgaaacacttactgaccaagcgctgacttgtgcaggctatgtgcccctggaacccaagaaggaaaacagaatcttccctaccttctaggagcacacattcagtgaaagtgatggataaaacctaatcac

SEQ ID NO: 421024 - DNA, 182 bp, Homo Sapiens
cttctgtctcgtatcatgtaacaaccggagtgaccacatccaagtaggagtcagatcacgcctctcctctaccctgaaggccagtagcttctccagcacactccagagcacaatccaaactcctcggcagggcttgagagggccatctcgtaccctctctgacctccctccactgcacaatc

SEQ ID NO: 421025 - DNA, 190 bp, Homo Sapiens
gtggtgttaagtgtgttacgtgttgatcctgtccctcaggtttggaggtagtctacttcatttacaggtgaacactcccgggagaggtaaactaagttatccaaggttgcacagttgataaacaacagaacagagattcaatgttggtgaatttgatgacaaagcccaagctctttatcttgctcattgg

SEQ ID NO: 421026 - DNA, 302 bp, Homo Sapiens
tcgtacgtccacagcgtgaaattttgaaactgtggtatctctcctgcattcatgactccgctctgggacttctgatagccaatctcacctccatcagcttctttatcctccttccatctgattttgggttcatggaagccatcagcgatctcctccaaatccaaggcaatggaacctctgggtccccatccttagcatagctccctagtgtctaacgtcctctcctggctgcattccttccttaattctctttcttgccatgccttaagagaggacgtcgtcacggtaacaccttttttttg

SEQ ID NO: 421027 - DNA, 172 bp, Homo Sapiens
ggttccgtgtacactagtcagaggccaaaagcagcactgtctaaataaatactaacaaaacttggtttttcgatactgtcttaaatgtaaatttcatatccttaaatgaattctagtcatatgctactttacagtatttatgacgggtaacaccaacagtacggggtaaccg

SEQ ID NO: 421028 - DNA, 214 bp, Homo Sapiens
tctagaggatgccgttgtggtttattgaacactcacatggcagtgttaaaagtaatagaatatatgtttattgtgttggtgtgtatgtatatccacccacctcacaccactaaacatacccaggagaaaaggaatctcttctatttcatttattccaaagataatttagttcctaagatgcaatgatgagcaaaatgagtgtccttgttttgtt

SEQ ID NO: 421029 - DNA, 366 bp, Homo Sapiens
cttccaagacactcaaataaaagacacaagctacacaggtccatcggaaacctggggccaggtacgcttcctactctagaaccttacatgtcagagaagagtatgcacacaccagggtttcgggacagtgcctggaacatgccacggagaccttctgcagacttaagagtcttcagagcaagtgagattcatacagacccagagtagccccacggcagttcccgttaggttttgccaccacatatccacgccccaaatttaggggagaaaatgaagaattcaaaacgttctgaatttggtacttagaaggaagcgattataaacgtgttcagaggagttcccgtcatggctcaatggaaacaaatc

SEQ ID NO: 421030 - DNA, 154 bp, Homo Sapiens
ttatctaggggcttccagaatcacctcattgaaagggccttatatgaatcaccaaaaaacagtcatttcatctttaaggctggagctatttcaaaagctgggaacaggagtcccccttgttacgggttcccaccataacgaacctgactagtat

SEQ ID NO: 421031 - DNA, 197 bp, Homo Sapiens
cctaggaccagtaacgcatgggttatatggcagggatatggaaatttctagactttttgacagctactggacacagaatctgagttaacattgatacctagagatccaccccaacatcacaccaccttgttattaccttcggtggggccacatagcaaatcaagtccccgctatcatccaggtcacagtgggcccac

SEQ ID NO: 421032 - DNA, 269 bp, Homo Sapiens
attgccctacatctgtaaccaggcacactactgctcaggttgaacccaggtcattccagctgctcgtacccgttctccgtgaggctgggacattcctgtgccacaggaattaccttggcagtgcctctctttaggaggcagcacttgaattccccatgtgccttttcatggataatcgccttaattcccaccatagcccagtgaagtaggtcacatgtccccatttggtagatgagaacacatgctcagagaggtaaggcaacccacca

SEQ ID NO: 421033 - DNA, 242 bp, Homo Sapiens
gacgatgcttatactgtggtgtaccgtactccaatagcataagccaagtgaataatggaactttggcgtttaaccagaacctgcggggttgtgttcttttgtcttctatcaccaaccactcgtttctgctaccaaacgttctgctactgagcatggctcagtgttccaaaggagtgctgagttcaagatgtgccatgccagtataatgctacaacaccttagtaacctacaagaaggaacac

SEQ ID NO: 421034 - DNA, 169 bp, Homo Sapiens
gcagggatcaagaccgtatcccacggagctaagtcgggtcttagctgttgagccacaatgagaactctgtcatggtttatttttgatgcactctatttattaaagaaaggtgcacaaggagtgcccgtcatggttgacgcggttgacaaaccgtgactggcatgcacca

SEQ ID NO: 421035 - DNA, 184 bp, Homo Sapiens
tagcttatgtccactcagtttttccattctttttttctctttctgagttcaagaccaagaaacagaaacacaaataagttataagaacagttagtgcctaaactagaaatgctgggtgtctttcagccccaaatgaagggaggacaggcctggctgtgtctgtggcactgagacatgacgctgg

SEQ ID NO: 421036 - DNA, 205 bp, Homo Sapiens
attgagtacttaaataatcatctcttccataagcattatcgggtctcagtctgcaccagacacagtggaggcgcaggtggaggaaccacgaaggctctacaggttagaagatgcagttcctgcctcaggaagccaaatcgctcgtgcttcagccgcagatgtctgtcagcccctactgtgtgacggtaacaccacagctacggga

SEQ ID NO: 421037 - DNA, 230 bp, Homo Sapiens
aagtaaggtactcagtcaacaaacgtcactctatgcactgaagaatctcagctcaccaagttcaaactctcttcttgacgtccaggaactggtattccatcactgcggcaagcgcagagctgaagttccataagtccacaagaaagtctgacaatgggtgtgtctgaccgacctgagaggcctgaacctgggtttcaactggaaaatgcctggcattattctggctcacg

SEQ ID NO: 421038 - DNA, 157 bp, Homo Sapiens
cttagtattccaacatgtgaggttacagttatgtacacagtaaactatgattatctcaataatacttagaggtaggcatattatatcattgtctacaagacatttgagacttagggactaagtgaattgtccggcgttacacagcttgcaggtgatg

SEQ ID NO: 421039 - DNA, 166 bp, Homo Sapiens
gtttctgtggtgttaccgtcaaatacaacacaatgtatactggcattaaaaaacatacccatgataaaagaaatgaatggagagccccaaataaacccacccatctaggatgaagtgatcttaaacagtagtcaacaatactactctgggaggaaatggagaggtg

SEQ ID NO: 421040 - DNA, 123 bp, Homo Sapiens
cctgtttagatcagaaataggttgagcctgtgtcaagggtcctcattacggtatcacaaggtagcagctccatacttaccaagtatatcttctgtttacggggactgctacacaggttcaagt

SEQ ID NO: 421041 - DNA, 173 bp, Homo Sapiens
gggtgtaccgtaaagcagtagtttcaacatttgagagtatcgattcctaatgaaaacactgcatatagaattgtagcattactcaccgcactatgatgatatgtgttttcttgtggaacgacacaagcaatacttaacaatcaaactcgttgtactacgtctcctgtggactc

SEQ ID NO: 421042 - DNA, 165 bp, Homo Sapiens
  misc_feature (93)..(93): n is a, c, g, or t
  misc_feature (131)..(131): n is a, c, g, or t
gaggtatacgaccaagaggagaggagcggagtcatgctgcagaggggaatagtgggctaaagaagctgtcctcactccgggcagaagacaggngctggattggagtgactccaaccctgagggcttgtgcnctgaagccaggatgcagctacggtaacaccacag

SEQ ID NO: 421043 - DNA, 129 bp, Homo Sapiens
taagcacagttgtggtcaaaagaaaagaaatgtaattacaagagctgaagtacctgctgtggtgcagtgggttaatagatccggcttgtctagtgggggcgccagtttagatccctggccctgatgcag

SEQ ID NO: 421044 - DNA, 136 bp, Homo Sapiens
ttaaagtcatatgtctgatatgagtatgcaactcctgcttactgtctggtccatggcatgaagcattattcccatcccctcactttcaatctataagtgtcctttgccctaaggtgagtctcttgtaagcagcagg

SEQ ID NO: 421045 - DNA, 197 bp, Homo Sapiens
agcgacacggtatgtggatgtggcttatcaaatgagagcatcactgccggcaaaatccaggcttgctgggggaggaagctgacagggcaaaccaccgcggaaggacacggttttcttggcggggggcagacagagttgacatggggcagttctggcttataacatgttcagtgctgacgtgtaacaccaccagtacg

SEQ ID NO: 421046 - DNA, 243 bp, Homo Sapiens
acaagaatatatttagaggttttcaacattctcgcaatataaaagacatttaaaggatacataactctgttctctgaaaactggagcagctaattcagtcccgcaaggtactgaacggggactcaagaagcctgttgtacttctatttatgcaaacatagaagagcaagccgagaattgtagccctggtgtaatcacgaggagtggacactggttaaccctccagatgtacagtggaccgtgg

SEQ ID NO: 421047 - DNA, 207 bp, Homo Sapiens
tggtaacaatgattccaaatctcccacttttcccaaatcagaaatttaaattaataatttaagatacaacttgatgtagtgtcacagatgtggcttcagatctggcattgctgtgactgtggtgtagaccacgcagttgcagctaccgattttgacccctcagcctgatcggtaacatccacagggcgtaccggcagctcgacattc

SEQ ID NO: 421048 - DNA, 156 bp, Homo Sapiens
ttaagttgggtgagctgggttctaggatcattggatatgtggaagtcatttcctatgtggtttgctggcgataggtccatgtgtcctacgtgtgtatactcgtttgtgtgtctatcaccaggtgcatgaatgaccaggttgtgttcctatggtatg

SEQ ID NO: 421049 - DNA, 229 bp, Homo Sapiens
ccgttgtctatggctgtgtatacagactctctttgtcctgtttttcctgttacggttcatcacaggatagtgaatgtagctgcgctgtgctgtgccggtaggatcttcctgtacatccattctccctgtaacagcttgatctgctcaccccaaactccaaatccatccgtacccctccccccgataaccgcaagtctgttattgtgtagttctaaatgttggtctgatt

SEQ ID NO: 421050 - DNA, 248 bp, Homo Sapiens
ggtgtaccgtgactgcgagctaaagtcactcaggaaacacaaactcagcatgtttctcagtctccccttagacactcttctcctccttcacatgaggtcctgtcaccatagcctgcagagaactttctggccaggctgtgctccaggagcccagccccacagctccctcctatggccacctggacctctgtccctgagtcaggcttgaagcagcaaagtcatgatgtggaaattgacaatatctgggg

SEQ ID NO: 421051 - DNA, 183 bp, Homo Sapiens
cctgcctctaggacgctaacgctaaaaagggactcaccagttaagagctgattattttctctgtttctttactaacacaaataacagaaacgacgacagataaaacatggacagaacccaaaacaccatctagcatttgcaatacctattattccctccattttagttagaatttttaagtgt

SEQ ID NO: 421052 - DNA, 119 bp, Homo Sapiens
agatacagaaaatgtgcgtcatcacagaaagctctttgtatggtgttatgaaagagctgtagcatttggtactcaggtttaaggtgtcaggaaacaaatatagctgaatgtatccatgg

SEQ ID NO: 421053 - DNA, 203 bp, Homo Sapiens
ttaacgcttagtccgcgccttctaccgcatgcgcacagcaggccatcagcactgagccatcaaccaacgctgcacggtttgccagacgggcttgcggatgaaaaaccctgcgatcgagcccgccatgagggcaatcaacgcgttgacgctcacactgatcatgatctgcgtaaagccgagcaccaaggactgcgacagcccac

SEQ ID NO: 421054 - DNA, 206 bp, Homo Sapiens
gtctgtggttctgtaaatggcatgcctatttgcagcaatcctgagtgctagatttgcatcttggttctctttgctaatgcatattctgctaacgaccactcataaaccacttggccatgaggttcctctttctcttattctttagaggacatatcatgtttgtgcaaatggtgtgccaatctgcacaggtcacggtaacaccacag

SEQ ID NO: 421055 - DNA, 230 bp, Homo Sapiens
cagtactggtacttgtgtggatcctgccacagacaggaagtctgaggtgctcttggtcaggttacatgtctgtaggcctggatcgcttatggggggttcagaacctatagcgggagttgaatatacttcttctgattacatgacatcttgcgtggctgtaattcctttacttacttgaaggccattgttactccgtccagagatgtctctgtcatgaacaccgatttttt

SEQ ID NO: 421056 - DNA, 164 bp, Homo Sapiens
tgtcccgtggtttcctaatacagttatgttgcagagaaaagtagaggcctgcagaaaagactgaaggacgaggacttagtggagtcctaaatcatgagaggtggtgcgttgtactttctgggaaggaaactgtatcacagaagagacggtaacaccacagtagg

SEQ ID NO: 421057 - DNA, 222 bp, Homo Sapiens
  misc_feature (117)..(117): n is a, c, g, or t
  misc_feature (153)..(153): n is a, c, g, or t
cgttatgctcctcactacactttggtgggtctgcttgaccccacactgtattatctaaaaagatgaaaattgcggtcatttacttcaatggataagtagctttggaactcttgaatngtgggtcaactttgcatcacgttggccccataatgnataatttagtaagttactcattgctgtaggtgtttgagaaaaatgatgaccagcaatttgaggaacact

SEQ ID NO: 421058 - DNA, 135 bp, Homo Sapiens
  misc_feature (74)..(82): n is a, c, g, or t
acacatgagtcacagagatatgagcttagtgagtccagacatcaggctagtgattctaattaaagaaacaaaannnnnnnnnagttcccgtacctggttcagtggttaacgaatacccactatgaaccatgaggt

SEQ ID NO: 421059 - DNA, 209 bp, Homo Sapiens
atcttgtactgtggtgtacccgtgatgttgaaatgaatcaaaccaaggtgtttggtttggggagagggagtcggttctattgagtcatcacaactagccaagcagtagaggtctaccctacctcaaactgaatcagagctagaactggaatatgtgcatacatacatttatgcatgtaaaacctaatagtttcagaaagccaaaagagg

SEQ ID NO: 421060 - DNA, 328 bp, Homo Sapiens
tatgcccttgtaagtattcaggagggacatgttaggcttatatatttggggacgttgggaaatgtgcgtctgctggagagatgaggttctgtgtttctacaggggcgtgggcgacgtgcatatctatggtgtgagaaatatgtgctgtggttatgtgttacgagtattgtgatggatgagctgggttctaggatcataggatatgtggaagtcctttcctctgtggtttgctggcgctagagtccacgtgtcctacctgtgtatacctcgtccgtgtgtctatacaccaggtggcctgaatgaccaggtagtgttcctaatggtatgc

SEQ ID NO: 421061 - DNA, 204 bp, Homo Sapiens
gtcatgctccagctgccatgatacaactatcttgtacacaagtgacatcacagtaactctttccccagagaggaaacaaagtcctggggtgatgttcacccttcttgagcacctgtgcctgccttcatgccatgtgaaactacaagaagtctgcaactcccaagaaggtctttgccagaagctaaccttgctggaaccctgatc

SEQ ID NO: 421062 - DNA, 208 bp, Homo Sapiens
gtatcaagtctgatcatcagctttggggaggttggagtggctgtgggtcctagggagcactttgcacatggagagcaagcaatatagatgtttatgcacctccaaacattcccgacctttgatggttccactctcacttgcataagcctaatgtaggtcatctggcatttaacattcacctaccattctatccacggtaacaccacag

SEQ ID NO: 421063 - DNA, 260 bp, Homo Sapiens
gagacgaaaagtacatgggagcaagaaaagaagttatcactgttcgcaaatatctaaaccgactttcacgatttcactaaaaactgaacacgtatgctgaacgagtttacgtgcctaaggaagtatttaacagagatcattttcaagtaccactgaaggctctgaaggagccgtgcaaagactaaggatgaaatgcatgttggcgatagaagaagctataaccaactgctggctctgagtatcacatgggcgatggggtg

SEQ ID NO: 421064 - DNA, 266 bp, Homo Sapiens
ttattgaaggggcatttaattcatctggtttgttactttcactactacagtctaaatatagaattattctggagttcctgtggtggctcgttggttaatgaatctgactaagaaccatgaggttgtaggtttgatccctggcctcgctcttgtgggttaaagaatccatcattgccgtgagctgtgatgtaggttgcagatgcagctcgaatcccacgttgctgtggttctggcataggcttggcagctacaactccgatgagacc

SEQ ID NO: 421065 - DNA, 197 bp, Homo Sapiens
  misc_feature (86)..(120): n is a, c, g, or t
tccgtcacctgcgcagtagtatagctgtggtcagattcagtcccttgtccaggaacttccatgagccgtggtgctgcattaaaaannnnnnnnnnnnnnnnnnnnnnnnnnnnnnnnnnntatcctgactctctgtgtggcaggggagtggtggaggggaacaagagcaataggatgattcgtcctatgtgtacagt

SEQ ID NO: 421066 - DNA, 223 bp, Homo Sapiens
  misc_feature (82)..(82): n is a, c, g, or t
tgtggtgtaccgtagcacatacgttttatgttggggagtgggcagcagcagccgaggggtatgtagagatgaaaaagacagnccccgcctccgtaatagaaaggaaatgaggacaggctacgttttgaatgtggaggggtctgaaaggaaaagcttcagatcgtgactcaaccgaatcacacaacatgccggagcaatgccgtgctcttggaaggtggaattc

SEQ ID NO: 421067 - DNA, 199 bp, Homo Sapiens
gtatgtactgtcctcaagcacagctgcttttattaaataatagcaggtagtgaaaattatccattatcagatacagttttatgtgctttataatttttgttgcaatcctcactaactccacaatgaagatattcatcctttcagatgaagtcaagacacagacaagttaaaaaatggtccaggtttgcagctgatgaag

SEQ ID NO: 421068 - DNA, 195 bp, Homo Sapiens
agtgttgggccaggtgttaacccatgtccagtgctctcaagacgtgacttatcccattggtcacagtgggcactctactccactttatgtttttaaacgataataataccacatcactctgtggcagtacaccttcagcaatttcaaacaggacgtgataacaccacatgtacggggtaccgacgctcgagattc

SEQ ID NO: 421069 - DNA, 192 bp, Homo Sapiens
ccattttaaaactttaatgattatcttctctcaaaagagaagtggcactcagaggaagtggcaccctgtctgctggcacaaccccctgcaatccgcacaccccccggacaggctggcaccactgctgaccacagcgcttgttccaggcatggttcacatatgccaatccttggatctgacccaggcagccac

SEQ ID NO: 421070 - DNA, 141 bp, Homo Sapiens
ataggagggagcagtgtaggtagagatcaaaagtgtaaatacttagggctgtgatactggacagcagcgtaggaaggtggtgaacaagactgaagtagtggggcgattacacagagagctgagttgttgggacttaatgtg

SEQ ID NO: 421071 - DNA, 209 bp, Homo Sapiens
cctgtgtggttgttcctctggagaacctgactcctaaacatcccagaagagcatttcctgccacttttttgtgctcaaactgccctagcataattcccactgttcccagcagaacccacaaagcagatggggcttgactgggataaacagcacaaatactatcatttccatgtcattgctgataaggaatcgggtttgtgaagtttgaa

SEQ ID NO: 421072 - DNA, 183 bp, Homo Sapiens
atcggattctgttaacactgcgcacgacgggactcctgtcacattttatcataataacttaaaattttacttttggagttcccactgtggcacaacaggatcatgcagcatagctgcaatgccaggttctatcctccacccagcaatagtgcgtaaaacggtaacacccacagggggtacccg

SEQ ID NO: 421073 - DNA, 267 bp, Homo Sapiens
atgttctaggtgcagcagcagggcagtggtgtcatctgtaagcagtggcaggtagagagaaataaagatgcaaaggatatttagaacaaaggattgactagatttactaactgtttggacactgggggctaaaatggaagagggtgaggtagaggaaggatcggggatatctctcaggtcttcggcttgaccagttaggtgactcatggagccacgtcctcagtgggaggagagttctgggagggcaagtaaagagttcagtttggg

SEQ ID NO: 421074 - DNA, 146 bp, Homo Sapiens
tgtggtgttacgtccggtggtagcatggctgcatatccccttctcttagggcctgtgcctatttcaaactctcttctcaacagaacaaagggtgggggaaaacaatgtaacttcgtaactgtatacatagtaaggataacctgacc

SEQ ID NO: 421075 - DNA, 219 bp, Homo Sapiens
cgtctatgaattttatttttcatcaaaaaacaaggaattaagcttgaatagtgactatatggatgacaacagtctatgtgaataacttcgaatatatgcctatccctacaggtgtgtgcttgtgggagacagactttaaacagcctccatacaatgcgtgtgtatagcaaactatcatgatgtataaagagctcacaattctattgtgaaaaataaaac

SEQ ID NO: 421076 - DNA, 290 bp, Homo Sapiens
attatataagatgttagctttgaggcacaggagataggtaatagcttacagctctaatctatgtcgtgatatgagaaagagcgtctagaatagcctggtgtatctactagttgacctaccatgattttgccttgcaagcatttcattccttctgtattacacagtagtagcttcgactggactggctagtcaatataggcatgttcactcaatgtcaaactaacttagcagcactttcacggctaacaccaccagctacggcgctaccagagcctcgacatccgctacct

SEQ ID NO: 421077 - DNA, 185 bp, Homo Sapiens
  misc_feature (110)..(110): n is a, c, g, or t
gtttctgtgtggacactgaagaactgaactcagtgagtcagacaccagtactgttattccaggcaataacccagaaaacaccaccagcatcatgctgagatctcctgatngccagcttggatggactacacattcccccaaagaacagaagaaagcatgtctgccccaatcctgattcttactct

SEQ ID NO: 421078 - DNA, 241 bp, Homo Sapiens
gtgaatggttgcttacagaatctgaactgaaattaacacctagacatctgaagtatcccaggcttctcccccagtagagtagggatgtgtggaagccatgtaagaaatagattcctggccacatttggcattcagtcaaactgggtctactggacccacttcatgtcatttctccagcctcaaaataaataattgagatcaatatatttggcagttgacatcttattctgtgtgctgggag

SEQ ID NO: 421079 - DNA, 211 bp, Homo Sapiens
tgacctacggagttatatgtggcgttacgtagtcggattcgtataccactgcgccacgacgggcactcctagtcacataatatcataactaacttaaaatttttactattcggagttcccactagtggcacaacaggatcagcagcatagctgcaactgccaaggttctatcctccacccagcatagtgcgctaaacggtaacatcacagg

SEQ ID NO: 421080 - DNA, 226 bp, Homo Sapiens
  misc_feature (142)..(142): n is a, c, g, or t
tgatctaccggatcttatgttacggtacggcacgcagatgtgtatctcagtcttcgactacaccacagatcatggcaacactaggtccttaaccactgagcgaggcagggatcaaacctgcaacctcctggttcccagtcgnattcacttccgctgcgcaatgtcaggaactcctaaaaaaatggttgtggtatctctcttcttttcccttggtccataacatatt

SEQ ID NO: 421081 - DNA, 193 bp, Homo Sapiens
aggcgaggtcggattcaaacccttgccttgcggatgatgcctgggtggcagagtcctcgttcatggagcgcaagtatgatgtctagtccctcttctggcaacccaaggtaggcgaaggcgagccaaacaggatggatagacatgggcgatgggatccctgtgttgggaaagtgcaatgcatccacttcgagca

SEQ ID NO: 421082 - DNA, 176 bp, Homo Sapiens
agcaaggcagagatcgaacccacatcctcatgaatactagtcaggtcaattctgataagccaaataggaactcccagaactatgtctcttgatgtaggttctccatcctcatggcttctagcatacctccagtcgccagcatccctatagctacccagctagaaggtagcctctcc

SEQ ID NO: 421083 - DNA, 243 bp, Homo Sapiens
ctgtggtgtacgtagcctactgtacatctcgtctcttgtcagcgcttcctcttccatcagctcctaagtgctgggcttcttacagctcttttctcatcctgtggccagaagcaatcactaggtccagcccaggctcagtgggtggggtcacacacagggcatgaatggcagagatgggccactcgttgaaggccatcttagaaagccctccctgtgtctttgctctctccatcccacggtaac

SEQ ID NO: 421084 - DNA, 126 bp, Homo Sapiens
gcatgtatgggaatggtgatagaactatatcccagactgatggaaggatgaaatgacatcagctttggcctggagtcagtagcccggtaaagattcagagggagtgctgcacattcccaaagggtg

SEQ ID NO: 421085 - DNA, 190 bp, Homo Sapiens
  misc_feature (118)..(118): n is a, c, g, or t
tcgtactgtggtgtaccgtgtcttttttccataacgatctctgcacaatcactgggtcctgtaacttgacccccacactttccctaaactgtggaaccttcctttcatagtccttgcnacaggttcccaccatagaccctcaccacagagtcccaccatgaccctacgtaagactcacttttcctggcag

SEQ ID NO: 421086 - DNA, 126 bp, Homo Sapiens
  misc_feature (74)..(74): n is a, c, g, or t
  misc_feature (90)..(90): n is a, c, g, or t
agctgtcatatatcttagacggtgcacgcacactgttctgacacgtatgctttgcattcacaggtgaactaagncagacacctgttcctnaaagtaacacgaatctctttaacttcaccaccgcaa

SEQ ID NO: 421087 - DNA, 151 bp, Homo Sapiens
tattgtggtgttaccgtatagtagaatatacggctgtgattagtactgatcagacaaacaggggtgtttggtattgagacattgcgggaggttttatgttaataattgtggtaatgaaattaatagcccctaggattgatgatacacctgc

SEQ ID NO: 421088 - DNA, 137 bp, Homo Sapiens
tactcctccagcatctgctcttcttccttcctcttatcttttaatgataactattataatagatgtaaggccatagctcactttagtttttgacttgcttttcccctaattactaactgttgagcacactttttata

SEQ ID NO: 421089 - DNA, 153 bp, Homo Sapiens
attctctatcagatccttcctctcagcgtgcatgcactacgatactcacctcataaagtaccatttccaatcagtgttgccagtgtgtgcttcaggatgtacttaggaattacttagccatagtatttgcaacatatgcacatgcatagctga

SEQ ID NO: 421090 - DNA, 288 bp, Homo Sapiens
tctctgcatggatattgtggccaagcagctacagcaatagctccttactttcttttcccaacttcagctccgtcacacaacatgaaggcctccatagagatgtgtgcggccatgatgccagtcatcatatgaaagctccatcaagacccttccatctaaacaggggctcccaacacctctcaggtctagagacgcacgcactggaaaccccattcttcttcaggaagatgccaacacattctctagaagcagattcaaggctctgaggatacggtctttccagaagtc

SEQ ID NO: 421091 - DNA, 170 bp, Homo Sapiens
gagttggtacagccaggttgtctgtatccctggtgtcagattacagctctgctcctagactgaagggagtactcgctggctgctccctgaccttgtgtacctggatgatgtcactgccaccgccagcagtgtttatggagtgttcattctcttgttgggaatgcgcattg

SEQ ID NO: 421092 - DNA, 261 bp, Homo Sapiens
tgcagccaatatgccccactagaaaagaaggatcagctgttttacttatgcgactcatccatccctgatgcctgtgatcctgtgatatgattccagtttgccttcatggagggctgtctgctgagctaattgtatgcacccctttgtgctctcctcttatgtttatttcattacaatatttacaaaaggacttgagaaataagtcactatgcaaatggaagtatgaatacacgattcggaggaatattaaaattcattaac

SEQ ID NO: 421093 - DNA, 219 bp, Homo Sapiens
tggtatatttccatgtttccaatttgcgctggataaagcaggatggccaaattatgacagagttttctcttccaaatcaatcaacttttaatacaaagatttcctcaagagtcaaagactctaaaagagaaaggtttaaattttggatgttgcaagctcaaatcaccaagtgaaatttgatccttgaacatctaaatcaatgattaaaatgtttcatag

SEQ ID NO: 421094 - DNA, 112 bp, Homo Sapiens
tgtaggaaccaggaacagtgtctgtccttgtcattaacacttgtagcaaaagaggggtagctcttctcttggagttgcatcacttctttagcttaagcttccatttgatctt

SEQ ID NO: 421095 - DNA, 215 bp, Homo Sapiens
  misc_feature (181)..(181): n is a, c, g, or t
ttctctatgctctttacgtctctactttagttatgtattctcactaagtacaatgcttaactttcctttctcctcatttaactttttgcagcgtttagtataagtaacgcctgggtcctgtttgagacagagagaggcaattcttccagtcaaagtaggccatttacagaaatcaaatcgngggaatctgagacatttgggttagaggaagagaa

SEQ ID NO: 421096 - DNA, 156 bp, Homo Sapiens
tttatgaatgagtattccttaaggcttctgcacaaacccatctatagtttacctgtagatgtgtatgccatctctgcagacaaatactctttcatgtgtctttacaagaagcaactgtgacacacagtggttgattgggtgaagcagatgtgtact

SEQ ID NO: 421097 - DNA, 254 bp, Homo Sapiens
tacttggttgaagtagatcctctccactcctttgtatcacttatttgtacttaaacactctatcccctgcatctgaaatgctataatcctaagcacagtgttgacactgaatgtactgcatgaaatgacacaccatgatactgcagatggactttccgctctgcagtgccagcttgtagatatcattctgtccatgaaagtgggccaagctaccaggaagaagtcctgcatggagtctcgtgaggactccaaga

SEQ ID NO: 421098 - DNA, 123 bp, Homo Sapiens
gtagcttgaggatcccgtgttgaaggggtctgttgggtcatggggaggaacaagtatagaaaaaaaggaagtgaacagcaggagagagatatatcaagctgaggaagaagattggagtatagt

SEQ ID NO: 421099 - DNA, 248 bp, Homo Sapiens
  misc_feature (86)..(94): n is a, c, g, or t
actgagaaagggcaggatagaacccgcaacctcatggtcctagtcggatacattaactactgcgccatgacgggaactcctagacnnnnnnnnnaaatttaacctgcctatatacagttgtttagtgatttccagtggtgtgttgagcacggaatgttgatattcaacacaggatcatgtccaggaccctggtaatagacagcatattcctttcagacagggatttacaatttggtcaccaacttcaa

SEQ ID NO: 421100 - DNA, 195 bp, Homo Sapiens
caggatctcgaacattcaagggacagtaatgaccttgggtgggatgttgtgggctgtcttctggactaaatatgtgcagcataaaccaaagtgttatgcctccagatgcccacattcatggctttcttcttagaagatgacagtcaagtttcttttactccctaagaccatcaaagtggaaacactaacttcaac

SEQ ID NO: 421101 - DNA, 236 bp, Homo Sapiens
aaatagggacgattctgttactttaaaaagcactaatcaaacaccagaattgagtccaaatactttaccgggacacccacgggaaaaatgcccaaccatttttccatcatggcacacatggacggtgataacactgtatttgtaggcacgctgaagataaaagagaagaatggctgctgcttgaggccacctggccaggactgctggcaaccccaggccacacttgatgtccaaga

SEQ ID NO: 421102 - DNA, 238 bp, Homo Sapiens
aaaatagcgacgcaactgcgtcgaagtataatttctcccgtgggctgggctataactctacgaggtaaaacagtcaccccgagccatgcgtcaggaactcaatagtaacgtgattaagttcctagtcaacaagactacactcgactgtatgttaacaaacctaattatagccccgcggtgataaattgggccagggcccttgctgcacaatctctgaggtcatgtctccaagagcagc

SEQ ID NO: 421103 - DNA, 190 bp, Homo Sapiens
gtcccggagctataaattagcgacgacaactgcgagttatgtcatataaccacatagttagtgtaggaagaaaacactattaattagagattagcatttgtccaagaacttgctgtaatcagatcttgtggggatatagttcagtactttgccaattagaaacaaacactagatacagttgtgaaatgga

SEQ ID NO: 421104 - DNA, 187 bp, Homo Sapiens
aattagccgacgcattctactgcagaatgtgttatattgtggatactggaagatgtacagctttttgatttgaacaacgaagtgcataaattagaaacttccaagtgcactggttttggaagagatatatatatataaaatacatttattctgtcaggctaaaaataaagtatgatctttatgattc

SEQ ID NO: 421105 - DNA, 117 bp, Homo Sapiens
tgactatacacggctcatggcaacgcggatcgttacctactgagcaagggcaggatcaaacccgcaactcatggttcctagtcagattcgtcaaccactgcaccacgacgggaactc

SEQ ID NO: 421106 - DNA, 163 bp, Homo Sapiens
cgtgaaatagccgaggggacaagtaatctggtggtactctccaggacccacaaatgataataggctaatttcccgcttagtcaaaacctctacgcatattttagcaaactcattcatagcagttaaataactttcagtatatacgagcttgtattacaaatta

SEQ ID NO: 421107 - DNA, 108 bp, Homo Sapiens
gccatagataatttggaaagtggaaagccattccaatctcgttgggtaaacaattaactaagacttacatttataacaaaggctccagaactggccaatccaatgggg

SEQ ID NO: 421108 - DNA, 177 bp, Homo Sapiens
taaatagcgacgcccatgaaaaggcacatggggtggagctggggtcgtcagcactggtcctgacggagacatagtggcgccaacgtaagagcttgacttctctgcaggttcacagaccgtgaggctcatgatacttagaaactcaggcggtggaacaggaacggtttaagaggcatc

SEQ ID NO: 421109 - DNA, 113 bp, Homo Sapiens
tcgtgaaaatagcgacgcatgcacattttccttttttatccgaatggaattgtgtatagaatgtgattctttcttaattcagatttatagtatatgacacatatggatgacct

SEQ ID NO: 421110 - DNA, 202 bp, Homo Sapiens
ttagtgggattacgggctcttttatctgtgaattacagtacttactatatctaattttcaccacttgtagagctacccagacttcagaatgttggggtagaaatcatctaaccatgttcatataactatagcacctttaggtggtgggtataggaaataataggttagtagtttaaaaatggggataagctttctttgcata

SEQ ID NO: 421111 - DNA, 177 bp, Homo Sapiens
tacttagtgacatacatgttatcccttgaaagcatttctgaccttgaccttctgttcatccctttaaatatctgtagccactgggaattctttggacatcagtgattgctctcagtcgcacttgttggctaacttagtctctacatccttggccctcacaatcatgggacactgcgt

SEQ ID NO: 421112 - DNA, 200 bp, Homo Sapiens
gacaagttagttaaacttttctcatctctatttgctcatctaaaagaatgaaagggtgggatcggttaatctcaatgatcgcttatagctgtgtaattcattctacaattctactacgtagattatacacacaaggagaaatcaataattcttttctgttgagctcagtgaagttaaaagaaacctactaatatttagtt

SEQ ID NO: 421113 - DNA, 137 bp, Homo Sapiens
aatagcgacggagttgagaggaattagtgaattaatgcacctaagaaatttagaaccggatgtggcacaaactgccacgtgttagcgcagttattatcatagacgccctccgtgtgtgagggcatgtcccatgctct

SEQ ID NO: 421114 - DNA, 176 bp, Homo Sapiens
tctagcggatgcttataaatagccgacggggcgtgcagaggagttgtctttaggttctccgagcggaaaactcggctccgctcatcttgccttgaaagccagcggggggaaatgcgtgtcctcagttagcattagtccgcgtgtttcttgccgatggagcgcgctggggattattt

SEQ ID NO: 421115 - DNA, 209 bp, Homo Sapiens
  misc_feature (65)..(153): n is a, c, g, or t
tgttaaattagcgacgcttgtggttcagaaatcatgctagcaacctgcttgatggtgatgatatnnnnnnnnnnnnnnnnnnnnnnnnnnnnnnnnnnnnnnnnnnnnnnnnnnnnnnnnnnnnnnnnnnnnnnnnnnnnnnnnnnnnnnnnntgtgatgtcagtgatggtggcgatattggtgagaagggtgatggtggtgcgtcggc

SEQ ID NO: 421116 - DNA, 222 bp, Homo Sapiens
tccggaaatagcgacgcagctatcctcaggagctagacagataaccaatccctcttccatatgactaattttaaaaggagaaccatcaggtaatccttcatcttcttttctctggggttaatattactagtcccttcaatcattcctctttagtaagtatataattccggtatctggttttcacatttggatggttctccttctggagattatcccaatggc

SEQ ID NO: 421117 - DNA, 130 bp, Homo Sapiens
agaatctattttcacatctaaaagaacagatagagcccgacaggtgatgcaccgtcgagtaaaaataataagaaaaatacatacagttgggaagggcatttggtgcactggtgagcacagtattttagaa

SEQ ID NO: 421118 - DNA, 201 bp, Homo Sapiens
ctgaaaatacgcgagggctcgggtcgatgatcggcatgtacaccaactctcccgggcgactcgcgctctggtcaagggccgcagtgtcgaccagcaatccttggcgactcgtgctcgcttgagagtcccgcgggttcgaccagctgtcccagtcttctcgggcccttgtccggagggtccgcgaggtcgaccagttctccg

SEQ ID NO: 421119 - DNA, 124 bp, Homo Sapiens
ccatatcagccttagaaaaacgtagggtacggtacagctctggtcacgtgttgttgatacatgaatctgtacgtctggctccctgagcgttctggcattcgcagacaacctatcggcagtgtgg

SEQ ID NO: 421120 - DNA, 310 bp, Homo Sapiens
atccttgaaaatagcgacgggtagtatagttacaaagatgcaaatatatagccaaaagaatatccaggatatcctggctcttctcagttgtaagatcccttgcctgaatgatagtcctggtgttttctttcattttattcataaacctagcatgtaatatgaaccaaaccacttttcacctacttttatttaagcaacttagaagagagcatttatttactttgagaaagaaatataggttcctctcagagaaatccaaatttcattatctaatagaggcgtcggctacattttccggcgtaccgagcct

SEQ ID NO: 421121 - DNA, 161 bp, Homo Sapiens
atagcgagatggacgagggatcctcatgcttggttcagctccattagacctcactcaagcaggactaggtctcactctgggctgtcactggcctcagagtgatctcaggaagtgcttcctctccctgcagccaatgtccttgtttgcgaaggaggcagcag

SEQ ID NO: 421122 - DNA, 174 bp, Homo Sapiens
tctagaggatcctgtgaaaatagccgagggggcggctgaagctgagttcaacccactggtgggtcgagcttgattcatggctatggctgaggtgtccaaggtattctggaggtggtgtggcctgctggtggatagggctggggcccagtggtttcccagtggctgcatactggc

SEQ ID NO: 421123 - DNA, 196 bp, Homo Sapiens
tggacacgcgcaaacagggtcaggcatgtttctggtggtgtttgctcagtatggaagcaaatcagctacaacttcctgttcttctatgccggctgcaatccattccccgttcgttgatcgaagccgcagccatcgacggtgcatggccgaattcgtcgccttctttaagatctgcgctgccgccttaatcgccccc

SEQ ID NO: 421124 - DNA, 154 bp, Homo Sapiens
atagcgacgccagaagagccggttgtaggcattcaagcctccaggtatcacattactctgggcacctctcacagcaaccagtcatcactctgcaagtacactcaccaccgagacacgtttccagaagggggaaggtcgaccttctttccatgaa

SEQ ID NO: 421125 - DNA, 210 bp, Homo Sapiens
aggacctgggaaattagcgacgatacaagttttctacatctgttatcttccttggcacgaatttccctgaagagaaacggtcatgttgatgaagaccgtggaattataagcttgggttagtgaggatagtaaactgcgtgggtttaggtgtttctatgatccattcatttctttttttacatagaaccagacatgtttcacatccacagc

SEQ ID NO: 421126 - DNA, 136 bp, Homo Sapiens
tttaggatgccttcgagtcggcgaagtcagaaagagcatgaaacaaaaacccaagaaagcatctcagactgcaccgaggaaggcgtccgggtcgagacgtgtgccctcgctctggcaaaagagacagacctgaagg

SEQ ID NO: 421127 - DNA, 381 bp, Homo Sapiens
  misc_feature (182)..(251): n is a, c, g, or t
aattagccgacgcttggtcatggtgtatacagatgctatgaacattggggagcatgtatcttttccaattatggatttctctggatatatgactaggagtgggattgctagatcctatgatagttctgttcttacttttttgaggaccctccaatacatgttttccataagtggttataccnnnnnnnnnnnnnnnnnnnnnnnnnnnnnnnnnnnnnnnnnnnnnnnnnnnnnnnnnnnnnnnnnnnnnncagagggtcccgagataagaaggggcttccacggaaaacgagggcgttgtggctttggtgccagggaccacctgtttcctggggtggacctctcactgcacagatcacgatctggccgtcgggtaatttt

SEQ ID NO: 421128 - DNA, 149 bp, Homo Sapiens
tgctggcatttaggcttctggggaacaaggtgatgtttgcaggtctcgccttagacagggggagttggtgcctggttcctcctagaccctggccattagattccagatcagctgatttcatttgggatccttaactgtaaggaagtgta

SEQ ID NO: 421129 - DNA, 201 bp, Homo Sapiens
gtatggtgacagatggtagctggactggtcgtggtgatccttttgtcgtgtatgggaatatgaaatcactatgttgtgtatctgaaattaatatcatattaaaagtcaattatatttcaaaaaagggattgctgtgggtcagtggcgtcggctcaattttcccgggataccgaagctacgaacatctcgtaagtcaatggt

SEQ ID NO: 421130 - DNA, 170 bp, Homo Sapiens
gtatataaggtctcctggcagcagagattaatttggaaatgggcatgttaaccaatcggggccaatgagatggagggagaaacaaaaaaagacagttgttcttttatttcactgcagaaagaagaagcgatcaagagtctttcttatctcccaccaccatgtatagccat

SEQ ID NO: 421131 - DNA, 152 bp, Homo Sapiens
tgaaagacaggattacaagtggagaagatggctcattctccatctgcctgccaatctaggaggttaacctatatgttttcttccctatctctactttttctcattcccccccacatatccctgtacatccttcttctcatcttttctacttt

SEQ ID NO: 421132 - DNA, 157 bp, Homo Sapiens
atgttatgagagctactcagacttgccgggactcaactgggagccttagaaggtgtaaatactgtcttacaggaaaatcattttaaatttttgagccttttactaaaaaactcaatttcagaatgcagtccatgtgtttgatttcttgggctgccta

SEQ ID NO: 421133 - DNA, 116 bp, Homo Sapiens
tggcgtaggataccggtggtttttaccgtacgttatcgggtacacggttacgtattatgtacgactgttttgacgtttggactacttactacattacgcgactggttacgacacta

SEQ ID NO: 421134 - DNA, 181 bp, Homo Sapiens
caaacaaggctaagtcacgaacgcacacaaaattcgacaaatctgcgttcacttgacttagcagagcacccgagatgtggccacaggctaaaaagtgcttaagcaaagctgacgataggctggcaacttcagtaccgccaacccgcttcccaaagggcccggtcggctaacttttccgggg

SEQ ID NO: 421135 - DNA, 159 bp, Homo Sapiens
  misc_feature (100)..(100): n is a, c, g, or t
  misc_feature (116)..(116): n is a, c, g, or t
  misc_feature (130)..(130): n is a, c, g, or t
aaatagcgacgcacgtgcatggagttacaagttaaacaaataaattgaacataacaatcccattaccaatttaatttgtgagctaaaggcagtagctgtngtcactgtgctttagnagacccagcaactngaaacagactaattttcgggtggtttgcc

SEQ ID NO: 421136 - DNA, 179 bp, Homo Sapiens
gggctgataaatagccgacgcacacacacagacgtatatcatccaacaaataaagcctaaatataaatgtactatcttacgtttatttctttctgcatcaacgtgaacatggcttttggcttaattccatcagttagaatggtaaataagagcaagtcattttcccacagtggagttga

SEQ ID NO: 421137 - DNA, 189 bp, Homo Sapiens
tggcaaattagcgacggacgggctgaagattttcttactattccctaagcaaaagtgtgccttacgttaggaatgtttatttatttgcgtatgcctttctatccactgtaagccctatgcatcttgcatctacggtggtcttatttaaatttaaagctgatgattgtgttgcttctatataatatagcg

SEQ ID NO: 421138 - DNA, 141 bp, Homo Sapiens
acctcagtttctcattcaggaggcaaagtgtatattagcagaagttgtttcctgaccctcctaaggaaggtaagggtatgagttaaaaccaattaaaaccaggtaatagtctcaggatagagctcgtcggctaatttttcc

SEQ ID NO: 421139 - DNA, 199 bp, Homo Sapiens
gtttggttcttacgctaggaggcagtgtcctgaagcttggaaactaggcatatggtaacaaagctgtagctggtggatcctgacccttccttccagcacacccaaagaatggtgtctggtctccaagctagactaggtggtcttcgcttcgatgctctccatttgggttgccatgtactctagccgtcggctaaatttt

SEQ ID NO: 421140 - DNA, 162 bp, Homo Sapiens
ccagttgtatgcacatagatactctcaattacttatagaccataactctgctttatatttctaagccctccattctaggggtgtagctgcagggcatttttctctattaccatctcacttcacacttttatctcctctctagcagggtatattttgtattct

SEQ ID NO: 421141 - DNA, 318 bp, Homo Sapiens
ggaaaattagcgacggattgggcaatgggtaaagaatttgactgaattagtgctaagtatataggaaacgcgacaaagaaaaaatcaagacaagtattcactaaagaggaaaggaaacttgtgcagaaaagaagaaattatgatttagtacatgattcaggatttacctagtcataatacaggaaacgctaaatagtcatataaccaaaattatgagaactaaattggaagagtgggagaaacaggaaatgtgtgtacgtgttagtgtgaggcgtcgggtaattttccggggtacgagctcgaaattcggaatccatg

SEQ ID NO: 421142 - DNA, 138 bp, Homo Sapiens
gtatccactcagccacctgtgtctttgataggggcatacagtccatcgacatttaaggtgataattgatagataattattaattggccattcgaacctcgtgttccacttgattctatggttctcttttcttccattc

SEQ ID NO: 421143 - DNA, 357 bp, Homo Sapiens
ccacgaagtactggaatcactgcattcaatcgggatgcatttaccacgctgcatatattacactgcattgaatggcaatgcatagaattcactgcattcaatcgggaagcatttacatcactgcatggaatccactgcatttaatcacgctacatgtaatccatggaatttaatcgggattcattttactaagctgtatgtcattgactgcatttaatcacactgcatggaatcctttgcattcaattgggattcattttacaaggctgcatggagttgactgcattcaatcacaatacatggaatccactgcattcaatcgggatgctttgggccatgctgcataaaatccactgc

SEQ ID NO: 421144 - DNA, 239 bp, Homo Sapiens
tataccagatggcgagcacatgcccagtgactgcgggaaagtttggtctgaccgcgcagaatgagtgacgatgggtggcgcgttcgtgcagttccatcagcgtcagcacaatcacccacaccgacatcagcatccccaccacggtcataccgacgattttatcctgcaacaaccacggcagaagaatcgacaagaccagcgtgacgaccagcgccacgcccagattatgccacagtttg

SEQ ID NO: 421145 - DNA, 150 bp, Homo Sapiens
ctgaaccgccacctcatggttcctagtcggattcgttaaccacggagccatgacgggaactgcctaagctcttcctttcttatacacagcaagacgctcagatttcagcaatgaagataaacgcttttaacagtaattggatataagtac

SEQ ID NO: 421146 - DNA, 228 bp, Homo Sapiens
tctagaccatgcttataaattagcgacggcacagccacggaagtatcagatcaagccatgtctgtgatctacaccacagctcacggaacgtcggatcttaacccactgaccaggccagggatcgaatctgcatcctcctggataccggttgggtttgttacactgagccactaagaaaactctccagaactttttaattattgaaaattgcgtcggctacattttccg

SEQ ID NO: 421147 - DNA, 204 bp, Homo Sapiens
tagccgacgacactttacctcttttctttgttagtcctgaaaaacaaaaacaagggcatgcccctttggttttaattccctcacccatacaattgcgcaggtttatgacgatttgggttagttttcttcattggcttcagggcactattcacctttaaagatataacttcttagagtccccgtcgtgcctccgtgggttatttt

SEQ ID NO: 421148 - DNA, 490 bp, Homo Sapiens
actctagaggatcttgaaatagcgacgtgcagtcacgaagtaagtctatgattccatttgtagttagttctgacacaggaagaccaggtgcctctatttgttgccctctagtggcaatctagggagtgggtgggccgccaagaaaagcagctgttttaagcttttgagccacatgaggcatggctcatgaggcatgatggctaggtgaggtttggccatttctggatttggaggccacttggcagagtcaaggacattgagcacttaactgacttaacagtttatctccttcttctctaccttgtctgttcccatcgctgtccttccaggaatgaaaggggtttgtataattccaagctccatctatagacttcagcacattaaatcttatctcttcattctcagccaagccctacaccataccctgaacatcactaaaacataggagagaccaagagagaattcaaacacagtccacctcctctcgtcg

SEQ ID NO: 421149 - DNA, 116 bp, Homo Sapiens
ggagttcctgttctggctcagcagaaacgaatctgactggcatccatgaggacgcaggttcaatcccaagcattgattagtgggttaaggatccggcattgccgtcgcataatttt

SEQ ID NO: 421150 - DNA, 249 bp, Homo Sapiens
gctgaaaaattagccgacggccatcttcagatttacaataagtgatacatatgtttatctttcactgtctgactaacttcacttagtatgataatctctaggtccatccatgtggctacaaatggcattatttccattcttgatatggctgagtaatattccattgtatatatgtaccacatcttctctatccactcctctgacaatggacatttaggttgcttccatgacttggttatagtgctgcaa

SEQ ID NO: 421151 - DNA, 262 bp, Homo Sapiens
cagagtagcttgaaatttgggatagaatttttttcccccccatcatcttctctttccaacagtgcaagcctgggcagatggtctctggtggatggcagaagttcaataaccacaaccttatccaactactaatgtgtacagaagagcaggtcattaagagggtaggctactaaagtaacccctttcttccaatagcccacattactgtaatgattccttaatagcaaaccatttattaagaagtgacacaaagactacattc

SEQ ID NO: 421152 - DNA, 317 bp, Homo Sapiens
atatagccgacgatggaggactcagcagttagatgcagaaaagagtcaattcagtgaatgtttaaaagagactatttagttagacctgtaggatgtcattagtgacttggccaggaattttcatttcagtagggactacaaaaatcagctacagtgatttaagagcaaatgagaaacaaggcaaagtatttactatggaaaaggaagagacgtgtatatcatgaagttgggggtgtctctgaagagaaaagtaatgtttttgtaatcacccctcaggaaagtcactgactcagtacatgtcaaagaaatgcttaggg

SEQ ID NO: 421153 - DNA, 133 bp, Homo Sapiens
tagccgagtatgtgttcttctttccagctgatgtggcgcgggctggctctcggttacaaagcaggagactaacacgcgtcagagcgcgaagcgtattccagccctggatgagggtctttcttcaccgttacaa

SEQ ID NO: 421154 - DNA, 208 bp, Homo Sapiens
  misc_feature (179)..(179): n is a, c, g, or t
  misc_feature (197)..(197): n is a, c, g, or t
ggttatatagccgacgccaagaagacgcacggccgtgaagcattcaagcctccagggatcacatcaactctgggcacctctcacagcaaaccagtcatcactctgcaaggtaacctcaccaccgagacacgtcttcaagaacgggggaaggcccgaccttctttccatgacagagaacnatgcctcttgcggtccanaacctccccac

SEQ ID NO: 421155 - DNA, 262 bp, Homo Sapiens
cagtatatgtttaaaatgttactacaccttccatgtaactcagcactgaccactagacattatgattaaaaatcgaattcatattaaagtttaaacaatgaggtataaatttggtgtattttcatgttactagtcccttttgtataatttggcttaaagtgtatcatggatttttaacttcaaactcccccccacactcactaattgaggctaatcaaaaagcactttcgttgaaaagttgcaccaaagaaaggagaatttt

SEQ ID NO: 421156 - DNA, 132 bp, Homo Sapiens
atgagcatcatcaggcaaggcagcatctggaacacagggccatttcatttcattctcccacatggccacattccactggcaggcattttcacatcatggggcacatcaaggcacatttagctttgcagcatt

SEQ ID NO: 421157 - DNA, 122 bp, Homo Sapiens
  misc_feature (112)..(112): n is a, c, g, or t
tgatctagaggatccttaaaaatagcgagggttcgggtcgatgacggatgttacaccaactctcccgggcgactcgtgctctggtccacagggcccgcagttgtcgaccagncaatccttgg

SEQ ID NO: 421158 - DNA, 131 bp, Homo Sapiens
ttagccgacggagtcacagtagcttgtatggtagatactttcttaaacccagatcttatgagctaaatctacagggccatctgaccggcttccttattgggacataagccttataggggagcccactatgg

SEQ ID NO: 421159 - DNA, 240 bp, Homo Sapiens
gagggtcagtgtctgagcgaggtctttctaggtcaccactctgtgacgagagggtataacgaggtttggtaacgcctggacttattcttcaaagagccgaagaaaacgggctgagtgtggaaacaaacagggtagcccgctaagaactgcaatgtgtcattattgttcattagtttgtatctgagccattttcagtgtgccgctggcaaaatctcttggaccaaggagggtcgacacatg

SEQ ID NO: 421160 - DNA, 128 bp, Homo Sapiens
aatagcgacgcaggatcaccacagtacacggctacaccatatctttaacccactgagtgaggcaaggatcaaacccacaacctcatggttcctagttggattcacttctgctacgccacgacaggaac

SEQ ID NO: 421161 - DNA, 250 bp, Homo Sapiens
tagtttttagattcttcatataagtgatatcatacagtatttgtctttttctgactatttcactaagcattacattctcaaggtctatccacgttgctgcaaatggcagaatttcattctttttatggctgaataatattccattctatatatatacaccattatctttatccattcatctgttgatgaatatttgtgttgcttccatgtcttggctactgtcaatagtgatgctatgaatactgaggtg

SEQ ID NO: 421162 - DNA, 154 bp, Homo Sapiens
cgttatccatgtcgcagcaaatggcaaaacttcattcttttttatggctgagtagtattcccatgtgtatatgtacacatcttctttatccattcatctgtcgacggacactcagggtgctttactatcttagcgattataaataatgctgcca

SEQ ID NO: 421163 - DNA, 217 bp, Homo Sapiens
  misc_feature (16)..(16): n is a, c, g, or t
  misc_feature (160)..(160): n is a, c, g, or t
cgccttcacattcatntctaatagagagttcactcttggtccagttaagccagacactcagttggattaggactgggataagacattctgtctggctatctttgagcaaaacataaactcagaagctgctgcacttccccctttccatcatgtggactgngtaacagaagaagtccatctgtcggtccagagagaagcagaaatgagatgttggacg

SEQ ID NO: 421164 - DNA, 232 bp, Homo Sapiens
tcccttcaacatctcatttctgaaatacggtcagaaatgctatacagtgactttgcagattacaaagcgaccattatatgcaaaatacttaaatttctttcagcttaccaatggcaggagtgagaaaaggcatacactaaaacaccttatttcggtggtgtgtgtggtcgtatgtgtgtgtgatggccaattgtgataaggactaggatggttaggaacaaggtgctataaa

SEQ ID NO: 421165 - DNA, 128 bp, Homo Sapiens
agacatgagatgtgggaaggagaaatgcgatgttggaaggagaaatgagatgtgggaaggagacatgagatgtagcaaggagcaatgagatgtcgcaaggcggtaccgaactcgactacgccctcatg

SEQ ID NO: 421166 - DNA, 188 bp, Homo Sapiens
ctaacagtatgtacctaaggagatgggggaaatccattcagataattaaattctctttcaactcaaaaaggtcacagggataaatacatgaacagaatagctgcaaagataaatgtggagaaagtgctaagcattagttaacacttctcagttttttatttcttctcctcagttgcacatgcggattc

SEQ ID NO: 421167 - DNA, 118 bp, Homo Sapiens
actgctatgagggagtatagggctcgagaagcttgcttacaatgctgtatgccgagggctacacaaagcaggtttgatcgtatattcaacctgcagaacaggacttcaactcaggaaa

SEQ ID NO: 421168 - DNA, 410 bp, Homo Sapiens
  misc_feature (208)..(208): n is a, c, g, or t
actctgtcatttctcacacattatatttctgcttgatttagttgcgtcggtctgtttcctgactctactagaagctgtgtgtctttgcaggataggggttcttcatctctgtgtcctgactggtgtccacagtgctttgcaaatagcataagcaggtctttatcaagagtgtgaagaagacactgtatgtgctcctctaaaaagtctncaagatagatatttttatggcccctaaattgagtattttccatgctaaatatgtgtgctgttggcttatattcatgccttcataatctccaagatttttctgtactaaccagaatctgactttggggttagaattattagtagttcctagtgtattgtctttatctcccaagcattctcaaggcatacctattaattgctag

SEQ ID NO: 421169 - DNA, 172 bp, Homo Sapiens
acttacatgttgagtgggtagacagaaagcagcatatggtaagaggggggacagggagaatggtagagatcagtagagaggggaatggctagatcatggagcaaccggggcaagatgtcagcccttggaaggttttgagccagagagtgttatgtactgacttacgtcttga

SEQ ID NO: 421170 - DNA, 116 bp, Homo Sapiens
aatacaggtctgaagaggtattcagcattaggtgtcatcatttggcaggccaggcagcataacatttgaggtgaatggaataaaaattaattaattctataagcatttcattaaca

SEQ ID NO: 421171 - DNA, 154 bp, Homo Sapiens
  misc_feature (124)..(124): n is a, c, g, or t
ctgatgtcgtgtcaccatactgctgttaatatttgtatcatctatgctgtgattgagtctggtttctttagccttgtgtattatgtgtaagtggttatgggaaaaggggcgaagaatctctcgntgtgtcattcacgctcaagtaatggcaggg

SEQ ID NO: 421172 - DNA, 142 bp, Homo Sapiens
cgcatttcgtatgatgtataattattcttatactgagcatgactgatggaagatatctcatggggggagagtcctcatacagagtatggaggaacttcacttcagggtcagatcagcttcttttgagaggagatccacccct

SEQ ID NO: 421173 - DNA, 217 bp, Homo Sapiens
  misc_feature (78)..(78): n is a, c, g, or t
ttcgtatgtgtatagaataactctgatagggatactgattacctcaaatattgaactagtgatgactatgacgtatantaaatctgtaatgtcagtctataagtctgctgagatgacgagatgagatccacattcggagactggacatccaaaactgggggagatatcagttggagtagagccagtagaacactctagaaatctgcattggagtctc

SEQ ID NO: 421174 - DNA, 416 bp, Homo Sapiens
cattcgtaatgatgtatttaacagttaagtatccctaagtgtatttaattgtaattaggcggtaacccttcattaaaactgattaggatggtatgctactgcctctaacgaaatgctcaaagtgagcttatatgcacgttctggatcaagaattattgggagagaagatgaaattcttctttcctgctaccttcaaccatacaggctgaaagaggacccccaagtggtaacactggctgtggtcccaaatgtgctccatggctaccacttacccgggaagactgtcaccaccagccacttagggcgggcctggcaccattaaactatggtgctgaaaaccgcacagatggaatcaagatcaagtggtgcttatacggtcaatgtaggaaaacatggaaggtcattgaagattagtt

SEQ ID NO: 421175 - DNA, 197 bp, Homo Sapiens
caaatatctatcattatattaatcaatctaaatttttgttacatttcagagtaagtgcagacatacccagatccttaagcattcatatcattagctaagctttaatattttgtttgcagtttttttctctttcgaggtaaaatttatatacagtgtaatgcacaaatcttagatgtgctgtttatgtgttccagcaa

SEQ ID NO: 421176 - DNA, 246 bp, Homo Sapiens
tgattttattggtttttactcagaagcactcgagattagtgtttcttgaactgcaatttgaagccttctttgggaatgttagattgaggagtatttctcttaaatacaaatgccttttcatctagcaaaccaaaaattatatcttaatattgaatgccatcactcggggtcgaggtgggagtaaattctgagataactccagagttttcaaggcatacaaggtatgtggaatagcacagattcaga

SEQ ID NO: 421177 - DNA, 310 bp, Homo Sapiens
gtgattagaggatctcatcccagaataaccttctgtgtcagttctgcttttattagttacctcccaatctgatagctgctcattcagtgtacacttaactcaagtggggtcagaattacccccagatttagaagggccagaaaaatgctctcccatcctggagcatagtgctccaatcacacagttcctctaaatatagttgacggcctttgagatgcaaaatgcctcactttaatgtagtagaggtccctttcactgcatagccaaatctatatagcagaatcttctaggaataatctgtccctagacc

SEQ ID NO: 421178 - DNA, 353 bp, Homo Sapiens
cggagtaaaggagctatgcaaaaggttgcctgccaaccagatttgaattctagcttgccacacactcgcagtgaggggataactctaggcgagtgtccagttgtagataaagcccttactgaggtgtacaaggtgtacggcacatagtgaatgctcaagagacactaactcattactgcagaggcaatatgatggtaatttggtaaattcaaaatttctagtcaagacggaggggagagaagccttctcaaaattctccagtgcttctcaattttctcagaataggtcccaaattcatccatggaactacaaagccctgtcctggttcctcccgcctactcggaatgggtgca

SEQ ID NO: 421179 - DNA, 400 bp, Homo Sapiens
  misc_feature (46)..(204): n is a, c, g, or t
caggacttatgcaccattccgattccctatttcagttccagtcacnnnnnnnnnnnnnnnnnnnnnnnnnnnnnnnnnnnnnnnnnnnnnnnnnnnnnnnnnnnnnnnnnnnnnnnnnnnnnnnnnnnnnnnnnnnnnnnnnnnnnnnnnnnnnnnnnnnnnnnnnnnnnnnnnnnnnnnnnnnnnnnnnnnnnnnnnnnnnnntaaaggcaacactgttagaggaatttaggaaaggaaagataatttttacttggggtgatcaggacaacttcatggcagagttgccatttaagttgggctttgccacctaggtgtggaccggaaatgaccgaggttgacggagggaaggtcattctatatgaagactcagatccaacgacaggttcgcaatggctgc

SEQ ID NO: 421180 - DNA, 515 bp, Homo Sapiens
  misc_feature (44)..(97): n is a, c, g, or t
caccatccgaatccacaaaatatgagtataagatggtggcagannnnnnnnnnnnnnnnnnnnnnnnnnnnnnnnnnnnnnnnnnnnnnnnnnnnnngcaaacactgctggactcttgtgactcaggctcagaggcggaaccaaccactaatgaaggcttttggcaagggctcattcactggattttggaagacaacaacacctgagtggcacagatgagacaaaggggaatgtgtttctgtaggccatctgtcctagatgctgctttcaaatgaatttgaatagttcccttttgaacatacaccaaatgccagtagtgccaatgcactacccagccaggtgaacaccagtgacatgaacgaactgttctttagtgctacaaggaagctactgactgcagcgttcatgccatcaacttggtgatgtaactagcatgctctttgttgttagaaggtgacagtttggcacaaggacatgtgaattcaagtgattagatgcaaactaagagagatgac

SEQ ID NO: 421181 - DNA, 310 bp, Homo Sapiens
cggggtagaaatacgttatgcgtgtgtactcacatttcttttgttctagtagcctctgtaaatcatttctttgagctgatgtactcaacagtggcaaggctgggtctccataatgcaatgtgaagcccatgcctctgttctctgggtaatagtactactcaggatgtctgctcgacactgcagatggggctctgggaagctgggatctgatctgaggactgatgggagtggaagaaatactcctgttatctcacttattttaaatgaaatgacttgccagtttggttcaggaactgaccaaattagacag

SEQ ID NO: 421182 - DNA, 309 bp, Homo Sapiens
atgcaggtcgacctagtaggaccccccgaggtagaatatcgcttatctacgttacaactgtgggcattctgtctgccaaaagtgtgatgttacaaagaatccttgctgtaacacatgctgaacatgcctttccattaatgaagtttagataatttgtccccataaggaagctgactatagagcccagccaattatagtgtttttagttttgtggatttttttcttaatctatgaaccggaatttaaataaaaatttcaaatgactttatatccagacttactgtgaagaactaccctttgctgtgcaca

SEQ ID NO: 421183 - DNA, 326 bp, Homo Sapiens
cgggaagagatatcgttatcctataccttggctctggtcacaacattgtcccaatactgaactactgtggagcagcatgagataccatctatgtcaccaccctctggtgccaccaccatgtggttcaaaggctttcaatatcctctcccggctctgttcctgcttcggcatcatcccctataccttggctctggtcacaacattgtcccaatactgaactactgtggagcagcatgagataccatctatgtcaccaccctctggtgccaccaccatgtggttcaaaggctttcaatatcctctcccggctctgttcctgcttcggc

SEQ ID NO: 421184 - DNA, 345 bp, Homo Sapiens
acatctagacgctatctccatgtgtagctctcgggaagagggctgcctgaaaggagtggggcgtttttcgctgcgaagagaccctttgtctggttctatgtccttgatgggaaaagccgtgtctgacggtggttccaggattcttttggggaggccctggatcctgtggtccatcgcggttgaaccaacggacgtccacgcccagccggtgggagggccccttcttttgcacagcctgcccagaggttgtcatggaaaggcgtcctcaggatggccatggggacagggctgaggaggactgtcgagctggttggggtttggacttctctaggcatgcgtgatgga

SEQ ID NO: 421185 - DNA, 469 bp, Homo Sapiens
gaaataggcagataaaagtaggatattctcatatagcaaacgactatataagaagtccctaacctttatctaggttgactggttagtcattaatcacaagctatctattaaattcctactctattctagaaactatactggcatgaactgcatctgtttctgaagtccaaataaatattaacatttatacagtttaaagtctgtgaataacctgctactatttccaaatgaacatgatgaacagaccatttctccagagtcctaatttgtgtcaatatcaacactatactctgaggcatacaacttcaatttatgaaagtatcttagaaaactgcattagcccccacacatccacataagttgacaatgtcttgtcggttttacttccatagcatctctcacatcatccccccatgcttaaaaaattctttctaccacattctattttcctctaggttagatagttcaa

SEQ ID NO: 421186 - DNA, 225 bp, Homo Sapiens
acaccaaagtaacgtgtcgggaaccaccacgctcacggactgcctgcctatgattcaccagaccagagcactatggcagcagcgccaagatccagtgctgcagcttgccatacgcatatccagagagtccacaacagcagctcactctaaatgaaactgcccctcgtagcctgtgttcatctcatacgattggtaacactcagccaagctgccggccggaggatc

SEQ ID NO: 421187 - DNA, 217 bp, Homo Sapiens
cccgatgtattcacgtggtccgggtcatccacctccccgtcctcgttctggaactccgacatgctgtggacacacactgccacgatggaggccagcaccacgctcagggaggagactcgcaatgagcttggccgacaggctataggctgtgtttgccatccgaatccagatcttcttgcggagtttcccgaatcgcagcaccacgttgaagtccatg

SEQ ID NO: 421188 - DNA, 271 bp, Homo Sapiens
agtatttcctattccaaaagagttgttttcagtgacacatcttacagctgatttccttaaaatcaaaggaatacagcgaatcagatcctggtaattatagaaagtgttgttctgaacatgacctgcccctttctggctggtaaatcagtgaagcttaggggatgtctatctctacaaggatgagcagaggagccagaaatgctacccaggcccctgagagcctgttcactatcgcaacaaggactggtgaccaggtgtcactcttctccac

SEQ ID NO: 421189 - DNA, 137 bp, Homo Sapiens
caaggtcagacactagagcctcccctgtataatctacataactagcaaccctagtagttatgtgcccctgtggtaccccactagaaaggggaggaattgaggagcctgaagggtcacgtcatatatgtctagaggtc

SEQ ID NO: 421190 - DNA, 331 bp, Homo Sapiens
  misc_feature (138)..(162): n is a, c, g, or t
taatctcattactagcaaagagggtccttgagacttcactggagtgccatagagattctatggtacaaaaaggagttagagacctttcatacgtcgatgactgccaaaaacccatgatagctattcctcctctttggnnnnnnnnnnnnnnnnnnnnnnnnngtccacacactggtctaatttcctaaatcgtacgatagaactctgtgtgccaggtgacaagagtagagtcacctacagcctcgggaggaggagctgtgaaggaagtttgctcagagaaggtaccatctgtgccctaatgacaccttctagtgtctgcaacatttatctc

SEQ ID NO: 421191 - DNA, 310 bp, Homo Sapiens
tgtatatctcattctgcaagtttgtttaatgtgaaagagaaacaagcatcattttgactaagccattgttctttgcagtctctgtagctggcaactaattttaactaatccacaactcatccaaagtgatggcacagcgttcagaatcaggcctgtcagtctatgaagtttgttctcttaggtaaaaccttgaagaactcttgcttgtaatttgcaagagattttgaaaagagaaaagtttcaaaatgctgaaaaggaatttgacagaagaaaataaggaaagtttgaatatgctcttaaatctgctacc

SEQ ID NO: 421192 - DNA, 293 bp, Homo Sapiens
tggaatggagctctttgttaccttccagatcgacaagacagactgtttggttcatgtctgtgaacgagcaaagaagtgcgggggcctgggagacagatgtggccttaattgcatggaaatgttagaagatcgttaagccattttgacaggattttcctcctgctgcaggagcaaagggccaagtctgagctgcatcaggtctggccagaccctctggctgtgcctcttgtccccacgtatgagggacacatgggtctcgattcactggccctggtgctagagggaaatggagg

SEQ ID NO: 421193 - DNA, 278 bp, Homo Sapiens
aatcttatgggaaaaataaaaagtagccaggcaaaaatagggagtagaatctaggcaagagaaacagcatgtcaaagcgtacaagtgctagaagatggccaatttaggaaagagaaagtagttcggaaccgctggaggccacccgctgtggggtcagtttctgtgtctacaaagttaaggttacgagctgcagcctcactcagtccttttggatctggcactcacgttgatgctcgtgcaaggctctgctgttgcggagtggatagtgcactgtaatg

SEQ ID NO: 421194 - DNA, 220 bp, Homo Sapiens
gatcttatggaggttgcctgagcggctttgtccctggacaagttcttgaacgccatgtcagtgtattccttaagcccagaaaaataccacacactctgctctgaagcacaggtgacggggcttggaagtggagagtaatttgtacaagcaggatgtgttgatttttttaaataaaatgccttttacacaatgcctccggctgttgtgtctggaggaggca

SEQ ID NO: 421195 - DNA, 253 bp, Homo Sapiens
ggcagtcatcttagtgcagatcatggtgctttattaacaaattcatgtattcctttcccattcctttaatacaaaaaaattttattcaatcatcagttactttcatctgacatttcactaaggtatagttttcataatgtcaagcgttattctatcagtcattcaatgtgggtcacgtaagtttatcctccttgtgccaaacacccacttgaaggatatgaataaaagatgtctccaggtgaatacaacaacc

SEQ ID NO: 421196 - DNA, 233 bp, Homo Sapiens
cgatcttatggggatgcttgctcccccgctcgatgtaaaaagcttgagcagaagagctctttgcagtcacccgcccctcaaggaacagaaaaggaaaatatgcagcctcagtgggtgaagtcagcagatcagtggcaggcttagaggggaatgaggcggagggaagttgctttgtgattgagaagataatttctctgaattagggatagccttcaggaggtgtggaatacgtg

SEQ ID NO: 421197 - DNA, 127 bp, Homo Sapiens
catcagctcgtacattccagtctgaaatagatcactccgtgttgacttttcatagttcttttgtcatttgtaataagatattcctttgcttactaatgtctgtcttgatcactgaatggtaaattcc

SEQ ID NO: 421198 - DNA, 137 bp, Homo Sapiens
actcgagccggtaccgggtgtcatgaaacaaatcttcagtttaaaaatatgttcgatattgtgaagggtatcataagagaatctattactctttctttgggtcaataaaagggaaagatctaatctagcctttctca

SEQ ID NO: 421199 - DNA, 158 bp, Homo Sapiens
ttattaccttcactgtggattaagttagaaatgtctgcctcagctgtttcaaaaagtaatcttgaatcactttaggtgttcaggtttgggtgacagcaggtttcaatagaatccatgtatacttttttaaaacacttcatctattgcatgttactttg

SEQ ID NO: 421200 - DNA, 302 bp, Homo Sapiens
atactcaaatagcaacattcccaaaatatgatctgtgggccactggggccactaggtgattctcaaacaaggcttctgtggtccagtgacctggaaaacactgcattccatatttccacttagagattcacaatgcacatcgccttatgaaggcagctgagaatgcctgtagcaagggaacctgtggagctctgtttgatcctgagtttccaaaacctcctgggtcacagaacccctttgatgtagacagcgttttactgagagtgtgggaaatgctgctctgtgatgatacagtgactttg

SEQ ID NO: 421201 - DNA, 283 bp, Homo Sapiens
agcggccgtgtgtgtgagacagatatcacaagagcgtaagagaataagtaatccaaaatagtgtaaaaaattcagggtaaaatagtcaacctgttgggctttctgtactcctgttcccattcattctaacaaatttttaactatttagccaaatgtgttcatttttgtttgataacaagttatttctctctgttatggctacttgcagttgtcttgtttcttcatcataagggcatttaatagttttctgcaaatgtgctcatctaagaacatgatgccaacc

SEQ ID NO: 421202 - DNA, 286 bp, Homo Sapiens
catgcatttgaaaatacaatcacgtcatatttctgctatgatggcgtgttagaaccatgcttttattgtcggaagttcacagagctggatgggtctagaaagatgccctctttcatgcctcccatcttagctgcatgaagttagtgtcttaacgtggattccctgggtctgcatgaattctggcaacagtttctgatggatcattatttttatgtgacttatgtaggacctgaagtgggaaagaagtgggtgagactagttcaccatccctcaaatctgactagtt

SEQ ID NO: 421203 - DNA, 171 bp, Homo Sapiens
caaatagacatgagctggggattcccaggttctgagaaaagacaggaatataaatacattggacttgttgcacatgattatttggaaactatttgtatttacataagcaaaatattccatacttttacgagaagaatacttacttcatttttatatcacgtttttgcatac

SEQ ID NO: 421204 - DNA, 313 bp, Homo Sapiens
agagaatccagcaggatgatgggcggtgagcgctcagttataaaacctgtaaagagcaatgcgaaccatggaggggtttgcccatgtgtgggaaggcctgtatttcttttatggaatattcatcatctttttgcccaaagtctccaaacaattagactttccttgactatcaagataaacagatattcctatgtgtagatcactgtaaacactttaagtgctaggaattcatactaggcctcgtaaactctaaattttagaattagaagtgatccctgaagatcatttattttgatattgttctgcattctct

SEQ ID NO: 421205 - DNA, 288 bp, Homo Sapiens
cgctcttgaggatacacttcaggcgatggatgctgaggagtaatccctacaaattttgatgaccatagatcacagaagcactcggtgttgtgagagtataggaggagaaactgattttgtgttttcctatatccttatgcacacagatatgcaagcactggtatttttctaacatactagttttcataagaaatggaatcaggaatcaatgaattagataacattcacattggctggccattattggttaaaatttgatcgatgcccctgtcctccaacagaagcagc

SEQ ID NO: 421206 - DNA, 285 bp, Homo Sapiens
acacaggcccaggacgcacagatcactcccgtccggccgggagctgacacgggcccaggacgcacagatcactccggtccggccgggagctgacacgggcccaggacgcacagatcactcccgtccggccgggagctgacacggtcccaggacggacagatcactctggtccagcccaaacccagtggcatggacgggacttgctcagaacctgttagtggctcagacaggacgtaaagtgagggttccccagtgctccccaccgcacagaggctggcccctcct

SEQ ID NO: 421207 - DNA, 283 bp, Homo Sapiens
ttcaggtgatgggtggtggcagagaagcccgttaggaggctggtgctgcaactggagtgagaggtggtgtgaaatggaccaggaggagctggggaggactggtgctctagtgagggtcctgcttgccttggtggggcgtggccagcttgatgcttggcgctgtcctaggtactgaccgtcaacctctagtcctccgtgctgatggtgaagcagagagagttgccccttctggaaagaggccagggctaccccgaggagctcacttgaggtggggagccttcct

SEQ ID NO: 421208 - DNA, 288 bp, Homo Sapiens
cttaggggcaaaatagctacctcagacggtccaggcttccctggaagtggaccacctcttgcctatactgtgccaggcagtttatatacaataccttcagtcattcattctaactaactgagcttgcattatgtgccagacaccggctagatcatggcttttcattgaggaatataatagacatgaaccctatcctaagaaagttgccctgggagcagtaagcatttagagaaacaaatacataaggacaaatcgtggtatgtgccgtgaaggaaacagagccaggga

SEQ ID NO: 421209 - DNA, 314 bp, Homo Sapiens
aatcagatttaggagaagggcggggtggactttatcaataatatatcatgtgattttatttctgtgttttgacttacagtttctactgcctgaatccaattaaacttcagcaaaaacattcaagccaagtgccatgagccagtaaatccaacactctaacacagttaatgaaaattagaattgcatgaaagaggtttctgccagacatttagaaatcatgattcctcagtcattgaatatacagtatctctgtcagccttttactataagacagataaaataacaaaatgttgtttataaataatatgtaccct

SEQ ID NO: 421210 - DNA, 266 bp, Homo Sapiens
caggcgtggaaagtagtcttgctctgacgcctcctgtgctggaggtgccgtttctgtctcaaaacctaaggagtttgtactgttgttaagggataagatagaacgagtgagaaaaccagcaagtcagagggtcgcaggaccgtggaccgtccactggggacagcttagtgcctcctggtttaacttcagctgctctgcgggcccttatgaccggcatggctggctttgtctggggctgtgagcttctgactctcctcagtagagtg

SEQ ID NO: 421211 - DNA, 303 bp, Homo Sapiens
ttagagatggctggtgggggcagggtgccgtcagcttggctgggtagacagagagttttttgtggtgagggaatacagctgctctaggcctttggggtaacactgcccagtcatcagcccaaagagattcaaagagcaccaccagcagctatttttataaatcaatcctgaatccaagctgagcacatggatttagagtgaacagttgtcatgctctattacaagctgggtgtttggtagacaacattaaagttgctaagcaggagactcccatctgtactgtgcagtgtgtactttacttgc

SEQ ID NO: 421212 - DNA, 246 bp, Homo Sapiens
aggctcggtccgcctgtgtctcgttgagcggaggtggggccagtgtctgtatgagcagaggcggagttagtgtctgtcaatgagcagaggcggggttagtgtctgtcaacgagcagaggcagggacagtgtcaatgaacagaggcggggccagtgtctgtcaatgagcggaggtgggaccagtgtctgtcaatgagcagaggcggggccagtgtctgccaatgagcagaggcggggttagtgtctg

SEQ ID NO: 421213 - DNA, 286 bp, Homo Sapiens
taggaggaactgcttggctctgagttgggagacagcagagctaggattgcagctgatctgggtccccactccacagtctttggattatgccctgtgccctttgtaagaagagccaataagaagggctataggaaccatgtcataagagtaaccttcaaaggaataggaaggtttctcctggcgcagggaagtgttttaagaggtgagcatgagacttgacccagagtcttttaagtcccttacagtagacagtggtgggcctgtctggagctcattgctgtggatt

SEQ ID NO: 421214 - DNA, 165 bp, Homo Sapiens
gtgaataaacgggatggtcaatggaagaatgaaggttaagtgcaacttcctgacctaggagacaacgttagctctccatgttatctgttcccacagaccagtggcacatcttgcccataaagagtatgctcggatgctggttttgaaccccaacatattagtttg

SEQ ID NO: 421215 - DNA, 554 bp, Homo Sapiens
agaagaaaatgtcatcatagccaactaaacaaacaagtatcagaaatacaaatatcatacacagcaccaaaccaaataacacaagtatcatataaagatggctatatggtagattataatgcatctgtgcacttgcttaactagctatctttctctcgataggatatttctttcatatcgtaatatgagaggagctgccagactttccattacagtaacaagttcaacatgtcaacatagaaacaatcactgataaagacgctatgtcggagggatgattcctattagagtagtacatgacttagattttcatacaagtgtcaactctatcacccactaaggaaggattctattatcaatgtgttctcattgcagatttataagtgactaactaaaacgacaagaagttgagtttgtgccatccccagactggccaaagtcacaactgtggagctgtgaatttgttatttacctctgacaccaccttctttcacttggacatatgcccctgctttccattagcctaggactcttcgtagctctatatctcagga

SEQ ID NO: 421216 - DNA, 505 bp, Homo Sapiens
atttgaagggaactgtgccatcgtccttcactctagagcgagaagagggagaagcctcttctatccatactgattctgtctcctgcactttgtcctgtgagtggagtcaagttaaaggagcttcttacagtataccccagagactccaacaggacctcacattcccaagggcattgtagctgccattccatctgttctagggagaacattcatgaaccctgaaaggctgtcctcttctccagctgagcataggtttcgctcgggcgtacaggccgcagacctggttttccaggacacgtgccattcaaggccattgggatgggctgaaaggttgatagcaaaggtcttgatctatcttttgcaggaaccttggtgcttccatcttccacttgccagtcgggtgaccacagaaaagagattctggagagtagaaacttcggtcaagttgcccccagtcagggatgagccttctttccatggagccttccacagggcaagccgtctg

SEQ ID NO: 421217 - DNA, 128 bp, Homo Sapiens
tgagggtatatagaaactttatgatgacttccaccgtgcttcgcgtgagagagctccggctgcgccgccgccatcgcccccgcccggggcgtcgcttccggcggttctcgagtccagaattgccccga

SEQ ID NO: 421218 - DNA, 217 bp, Homo Sapiens
ggcatggaactgaacacattcaagtgcaggtggtgccggatatgcggtcactcagttcagacgcaaaatatctcgtgaactatgtgccacccgtgccacaaacattcaaaatgaccgttcaatgaactggatatgtgtctttcgaatgcgatgggtaccaaagattcgaccgccctttgaggtggcctttttgacgacaggaaaatcaatgacgcgg

SEQ ID NO: 421219 - DNA, 215 bp, Homo Sapiens
gagctccagtcaatgagaactgaggccccgatggaagggagatgcgcagtgcactgcagctggcgcggtggaggagctggcattgacctgcagcagactggcctctccgtgcctgcgcacccggtgtcagcacgctgcagggaattaaacccatatgcttcctactgtgcagtcaagtggtgacagcggtcctcatgagatgtgaagcccagggt

SEQ ID NO: 421220 - DNA, 432 bp, Homo Sapiens
gggtgggtagcacagtccagtgcttcggagatacaacgagaaggatcctcagtcgtgatgccaagatggtaaaggctgccgaggagtgcaagcccacgcccgaagatcagaaggccttcgaggactataagtgtgcgaagtcggttgattcgccaggtgataagccactcgtgacctgtgatcgtgaacgcaccatgaaatatttgtagtccccggtcgccattaccggcacccaggtcgtcagtgctgattcaggcatcccgcaggggcagttgtcctacgtggttaacttgaaattcaattccattggcaccacctcgttcagtgacgctacgacatacctgtgttctaagattgagcccacagaatcagtttgcggtcgtcctcgattggtcagttatctcttccccgcagctcaacgggcaggggatc

SEQ ID NO: 421221 - DNA, 207 bp, Homo Sapiens
tggggaggacatcgccagcacattcaacttaccccactgtcaacttaaatgcaattaactgcagggtaacataatgtggaagtgacaggtcctacagtccgccaggtatgaaggacaaagggcctagcactcgtcagactcgcgtctatgcagagggctgctctgaccatcccttctagcaattgtctagtagcttcttacttgatt

SEQ ID NO: 421222 - DNA, 180 bp, Homo Sapiens
ccttggtgtatcctttgcatggttgcggctgagggattcggtgtcgaaatggctttcaccgaaggcgttgctgatcggctttgtcgcagtcatggctggttgtggcattgttgatcacccgtccaccgttcagtgcagaactccaagcggtgttgcgcccggtttcgactgggctaaaaa

SEQ ID NO: 421223 - DNA, 173 bp, Homo Sapiens
gtgtgccatttctggaggtgccccccgaagaggtggttagagtggggacccaaggggaggcgtgaacgccacgtcctccggtatcgtccccttcccctctactttctatttgcccatcttcctaattagagggaacaaatctacactcacttcctctattcaacctttcactt

SEQ ID NO: 421224 - DNA, 178 bp, Homo Sapiens
agcaaggccgtcatggggtctgacagagtattacgggtatcagcacgtggaattctgaacctatcttgaagcaaatataattaacccatattacaccatcacaacactgcaacgttccatggcttctgatccctccctgagccactgactatgcaggcaccgacactgtagggaacgt

SEQ ID NO: 421225 - DNA, 254 bp, Homo Sapiens
atggttggagcaacacgatcgtacgcgtatcgagttgctatccatacggtgaatcccttctgtatttctgtgtggacgattgtgacgctcggggcacaccgggactgtcaccggcgccctgccgcaaaccgttagatgccatagtccttccgaccgtcccacagctgccaactggccacaagcaccgtcgatctcagagcctcgggtatcgcgcactgtcaccgggatcttccatgcgctcaagttgtctcgaa

SEQ ID NO: 421226 - DNA, 136 bp, Homo Sapiens
acactggcctgtctattcaggtgggcactctagacctacactggcctgcagcgcactacaccccttacagttcttgggttggaaaatgaccacttcatgtattcagtgttgtacccaactaagacacatccacatg

SEQ ID NO: 421227 - DNA, 121 bp, Homo Sapiens
tggctctgttctacgggagtctgggcttctacacggtggcacttagaatctgcaaaaggatgaaaggggagattccgttcatttctcttttatgttgcacattgcatgccttgatgtggtg

SEQ ID NO: 421228 - DNA, 387 bp, Homo Sapiens
aacagtcacaggtacgacaccagcccaggtgtgctctgctgcctacatgcagggtgagtgcaagtggagaggtgtggttcactgtggggtatggaggaaggagcgcaggaggtatgagtgtagacaagcagggatttgagagggagcctgatgtcccagaaggtaagaagtggggaagcaccgtatgctcagtaggctcagcagatggggcggccagtgaggtcaaccagtcaggaaaccagagggtgggcggcagaaactgggttgtataacagagaccggtggggtccaggggacaggtggcgctgaggccccggagggctgcatcggtgggcaatgtgaggtccatggctaggattgagagccgggaggctctgtctgcctgcg

SEQ ID NO: 421229 - DNA, 382 bp, Homo Sapiens
ggtaggtgggggtagatctggatgtgatgtgttagtctgaggtgtctcaggtagtccctgggtggtgtgtgcagtgagatggtgtgttatgaagtgacttggatgttgtagggcatgtctgtgcatcgtggggttttacgcatgtttgctcagcacttctgcgtgctctcagctaagcgttggtgttatgaaataaaaaacctatttttcaggaccagtctttgttgtctggaaattatatgtatgatgggacacgtccatgtattttggggaaggcctgggtgtcatgggataagttcagttgtccccaaaatatacggacatgtccgataacacatacaatgttgtgattctgtgtggcttgcctaagttcagagccagg

SEQ ID NO: 421230 - DNA, 174 bp, Homo Sapiens
gactgaggatagtgggtgctgaaatttgcgatgagcctgtgggtcttgatccccatcattctgaacctaaacacatatcgtgaacggtgtgaagtgtgctgatagtgtctgtcaccatctcaaataaacagggacttgctcctcattagtggttatgcctgcaaagctttgaaa

SEQ ID NO: 421231 - DNA, 109 bp, Homo Sapiens
  misc_feature (37)..(37): n is a, c, g, or t
ctggtctgaacttaggtcacaggttctttattgaccnattttcattcacttggctgatgcctagtgttacttaatgcttagtaagaaatctttaggccagggcggtagc

SEQ ID NO: 421232 - DNA, 136 bp, Homo Sapiens
tggctctgatcttaggcctgactgcatgtgaaaaagtgcctgggtgttttgttctctctgagtgtctgggcagctcttcatgggcactggctgctgattaacactcatggttgcgttacctaagttcagagccagg

SEQ ID NO: 421233 - DNA, 407 bp, Homo Sapiens
  misc_feature (334)..(334): n is a, c, g, or t
ggacccggcctcgattataggaggatggagctagcaacggcatgagtgaagtgagcgaccgggaggtgtctgtgcaggaaagagatgatggcatcttggtccaaggttatcttatgcagatgttcagtagtgatgggttcaaggtatatttggggactctaggcaaaaggccttcttaatggattacatcggaggcaagaaggagggagagaattaggactgttaatgtagagtcatattctgagatacagaagactttgggagtgggggtgcggacacattggaagttgggagcaatagttttgagtaaggtaaatttgatttcagatgtgtngggtacacaaaggggccaggctggagattacagactttagagttgtctgccttcacctaagttcagagccagg

SEQ ID NO: 421234 - DNA, 532 bp, Homo Sapiens
cctgggcagcgctgctgcagcgcacggcctcggccctgtgccacattctccacggtgattggtctgtgctctcagatctgcctacacttgtcataggattctggccactggccggccctttatgcccatcccatttagcctctctcacctctcagcatactgaccaaacccattacttctaacattttccaacaaagcttcctggacagcaaaaccttatgccctggctcttactttgccaccttcttaccttactctctcctggttaatacacaactctgacaaatccccaactctcatttcctaatattcccatttagccctctttaatgcccttccatatctgttgtttttctgcactgcatgttctggcccctacctcattcacacgttctctttccctatttagcatccaacctccatctttggttctctccttctttgcgatattgcatataagtctcctcagttgcttctctcacttttgggaagtcctaatatgcctcagttcagagcccggggggatcctcta

SEQ ID NO: 421235 - DNA, 425 bp, Homo Sapiens
gaggtgacatcacaaggctttattgttctcaacttcacatcctcccttaatctgtccatacccatggtgtcaatactacatttatgctgactgctcctaatttcatctccatcccatatatctggagtttagatagagcagccagtattacgtggccatgtctgccccaggcatggaacttaccatatccatctcaaacttaaccatatcaataattgaacttattttcttctctcagacttttctgtgagttgtacactaatcacccttaatttagacactcatatgtcatcccagaccctcctgcctcagtccctacattcaatctatcacgaaatcctatctcttatacctcctgattctctctttgataatattctcatggttttctgagcccactgctaatccctaagttcagagccagg

SEQ ID NO: 421236 - DNA, 129 bp, Homo Sapiens
ccggcgttctgagatcccactgcgcggactcggtgaaaagccttgcggagcttgaagaaacaacttcccaggcccattcagtaatcccaggatatcgtggaagctccccaaataattttgaaactcatc

SEQ ID NO: 421237 - DNA, 529 bp, Homo Sapiens
gtactcaggctgattctagaggatcccaatgcagcggaatcggagatgcaagccagacagtgggcccgtaaccctttgtggaaccccactgtcatggcagacagcagtgtgaacacaaatattgcattcatgactccccttaaccacacaggtgcatgcacacacaatcgcattgtgtgagtgtgcagtgtatacatgctccataagtgtatgctgtacacttcaagcatgcaggtatcatggtggttccacacagcagaaatgcacgcagaagcatgtaaggcgtacacacagatggagttaccagcagagtaatgcacatggggcatatctgcacatccttcataggtacatgacctgaacataggaccccttctgtctacgagaaaagtttatctcttccttagccttgttgctacctaagcaggaacctcccactctccccctgaggtctaagtgtctgctttctgggtgggatggggcatagctattagacagctgtcactttcattcttgcgagtccgctgca

SEQ ID NO: 421238 - DNA, 434 bp, Homo Sapiens
aatgcagcggactcggcaggaaggcacaaagtacttaaaaagccgtcaactggaatgggggtagtgttctttccaggcccgctttttccaaagttaaaagcctctttatatgaaaaccatgtaaactctcagcggccccctttgcttcactgccttttctagggagtgcattagagtcatttttacgtctgtagtgctaaagggtcacctagttaggagctttaacatcggattcgctgagagggtcatcggtttttgattcttctagagtaggcctccaccaagaagggaatacgtctaatacttgggatctgtggttggcaacacaagtggtatccctcagactcctgaaaagggactatgccgtggcttccttccggctgcagtgagatccgaggtgtttacaccaccctagttgccgagtccgctgcatt

SEQ ID NO: 421239 - DNA, 418 bp, Homo Sapiens
tctgtcttgtcattttgtgtgattctgctgcatactgaggtcttctgatggacggactggatgggccctcagtgctgcactcccatctcaggccctgccctaacacattatacccagctctaattttgaagggtggcaacattcatcccaagttgcctcagtttacttcagttacgtggtggcctgtcagtggggtttccaatggttcctccgtcgccgtgtgtatcacaatagccagcagaggctgctcagctcatctgtgcccaccccctgactgccaggacagcctcctgccaccttgtcactttactcagtctgctgcagttggcgttggcagggtcaacaccccagactcgaatcccagcatccatgggctcccctggtcttggccttgctctggccgatgtccgggtgcatt

SEQ ID NO: 421240 - DNA, 132 bp, Homo Sapiens
  misc_feature (43)..(43): n is a, c, g, or t
actgtctgattctagaggatcccaatgcagcggaatcgtgaanctggagttgcttacctgcccacaggtctgaccacagtgaaggggacggctgggcagagcactgaaggatggggagcaggcaggggcacc

SEQ ID NO: 421241 - DNA, 173 bp, Homo Sapiens
tggaaatgggagactgtactgtgttgtgtactgggcttcttccagttcctttgatggagaaacatgtctgtcctgtaatgccacctcagttggggtctttctgtgcagcccagtgcaggtgcccctattaaactgagaatatggctcttaagaaggcgccccacatggccacg

SEQ ID NO: 421242 - DNA, 506 bp, Homo Sapiens
aatgcagcggactcggcaatgtccgtgcggggatgggagaggagagtggaagaggagtggggataaggtcacctgagagcacgtcatttggcacctgagccctgcgggtgcccctgcctatctccctgtcttggaggtctggtatgttccttctctgtgccccacaccagtggctgggccaggctactgtcagcactcgcaccatctcacttcaccacttctgagcctggcagatgacactccttggtcagagtggcctgcctggcctgaagccccatagggggtggctcaccagtgggagccagtcacaacacctttccggaaagtcacacacctttccagaaatgcacgacaggaattcctggctcatttccggatgggtaacacaggcttggagagggcacgtgaggccccaggtcttcttggttgagtgccagccctgggattagcatccagaactgtcagactactatgccgagtccgctgcattgggtacggagctcgaa

SEQ ID NO: 421243 - DNA, 235 bp, Homo Sapiens
tgcggcgatctagaggatcccaatgcagcggactcggcatttaatattctgaagcatatacttatactcacttatccatttttaagttgacatctagtttgataagttgcataaggacataatttccaacttgttataaatatccagatttataaataaaactgttaatcattcccttacattgataaaaatctctctaggtatcacagagatttgaaaaacattactttttttt

SEQ ID NO: 421244 - DNA, 429 bp, Homo Sapiens
  misc_feature (110)..(120): n is a, c, g, or t
cagtccttcacgtatcgcagtgagagaaaactgatcagcatcttccggagacacctgatacccatcctctttaaggaatacctaggataggataaagtaatccttctcannnnnnnnnnnttaaaagatatagatgcactattgtaaagtggctgtaccactggatgtcataaggtgaatgtaccaatttgtaagtcgctctggataagagcgtctgctaaatgacttaaatgtaatgtaatgtaatgtaatgtgtcctggagggcaggtagtttgcccccggtgatgcgttgtgcagacctcactaccctctggagagccttacggttgagtgcggagcagttgtcgtaccaggcggtgatacagcccgccaggatgctctcgattgtgcatctgtagaagtttgtgagtgcctttggtgacatgccg

SEQ ID NO: 421245 - DNA, 288 bp, Homo Sapiens
ggaacatgtagcccgtccctatcagtcaacatgttgcccgtcggcgtaacagtcaagatgttgccctcccgtccagatcaacatgtagccctcccgtcagacaaacatgtagccctcccttcagtcaacatgtagccctccctccagtcaacatgaagccctcccgccagtccacatgtagccctcccgtcagtcaccatgtagacctacccttcaggcaacatgtagcccacaactaccagtcaacatgtagccctagcctatcagtcaacatgtagccacctctat

SEQ ID NO: 421246 - DNA, 126 bp, Homo Sapiens
tgcctgggcctctatcgccccaaactctgttgactgaagagagggctacatgttgactgaagggagggctacatgttgactgaagagagggctacatgttgactgaaggagtttggggcgttaaga

SEQ ID NO: 421247 - DNA, 436 bp, Homo Sapiens
tacaatgcgcttcctcaaattctgaagcctctcccatctgtcttcttccttccagctttcagagcttcttttattgtatatctgactgaataatttttagattacctagttgttttataggagatgaacagggaaaagtgagcctacacaatcctgttctagaactggaggtattcaacctcttttatcctgcaggtggaacacatgtattacgtaatgctcacacatgatatatagcaccatcgtggaagttcaacaatagtttttacataaatggagatgagtttaggattaagctaaacttagctgtgaactaattgtaactctaccccctcccactaatccataacctactgagaatggcgctaaacttaattgatgttacagtgaaatgtatgcgggacaagcttttgcctcaagaattattaaatcatgt

SEQ ID NO: 421248 - DNA, 425 bp, Homo Sapiens
tcgtacagcttgcgaaacagtcagcaccctgcctggcacagagtgcaggagctcagagcacagcagcgtgaggatcgctgctctcaaggaggcctcaggaagatgaggctgagcaacagcctgatgcaccacctgctctacctgctcaaattgggtcaggcgagcggtgtacccagctgttgccaaggcacccagcacacagggaaatactccagccaggacggcaggtgctgtaggggtggggccttgggcctgcttcactgacaccacccatgctgccaccaccaggtctctgggccatctcgggggttcctgggggtgggggaaatatgctattgatctgggtccaggatctaaccaggtccagttccccagaccctactccaacctggaaacaatggggcctttgctgtctagaggggcag

SEQ ID NO: 421249 - DNA, 414 bp, Homo Sapiens
ttgcgcctcctaatacctctcccctcagcacactggcctcctggccactctgccaataggactggctcctggtcacctcagaggcacagcgccagcacccctgcccatagacctcacctccctcatagctgcaaggtgggaccctcgggtgcctggaaggctcagataccaccttctagagacctgcctaccaccttcacggtgctgcctgaccctgcagcctcagcctcccctgctcctgctctagctccagctttcctttgctcccaaggctcttagctcctcacagttgtgtaatttacatgttcgctgggggctgattattcattgcctgtccccactgcgcaacggagctccatgaggtggggacatggctgcttaattcacgataacgcccgcaactggtacggcggg

SEQ ID NO: 421250 - DNA, 274 bp, Homo Sapiens
agtcacctcggccccccgtctgtacagttgcggggacttatactggggacgtaagcgatttccgggtgtagtactgttactcttatttcagcgcttatactcagtgaatcttgtctgaagctatcgagggcagactgccaagtcctggagaaatagtatatagcaagtaagtgggtaatgtttctcattgtacacaattttgagaaatgccacataattttccttagccaaatggaaacgcttgtcacccgaattctgtggccatttgtggttc

SEQ ID NO: 421251 - DNA, 448 bp, Homo Sapiens
  misc_feature (161)..(217): n is a, c, g, or t
agtgcggtaacaggtgctgtgtgggtcatccctaggctcatctctaacagcatttgcgctttggccactaaagcacaaaatgcaaaccactagcctctcagcgcgggaaatggagcaagggcttaaaaatccggagatctcagatcaagttgaggcatccnnnnnnnnnnnnnnnnnnnnnnnnnnnnnnnnnnnnnnnnnnnnnnnnnnnnnnnnngtgcacgtggagtgtgatgagtcgtggagtgtggtgagtcagggtttctctaaactctctgcctctgacatccagggctcctgtgcccacatactggaggagatacacatcatgaattggtttgagcttccctctgcacattgaatttcaggcctacatgactggaacccaaatgaggagggaatcttcagaaaccaagaacagtgctttacaggagaatctacaaaagtc

SEQ ID NO: 421252 - DNA, 423 bp, Homo Sapiens
tacctggggcccttcgttgagacaacagcggttagtgcgtaagtgagggtaaaccagagggtgcagagatcacagagctgagaaaggaagctacaagagcagaaacaaggacgccagactccttttaacaacccattctcactttcaagggaactaacccattcccctgagagctagaactcactcaccctagcaggaaggcattaatctattcatgagggatatacctctatgaccccgacacctctcactaggccctatctccccacactgccacactgaggattgaatttcaccatgggctttggtgggaaaaaaacacatccaaaccacagcacctcccctccccagactccaaagaacagaaccctcaggaaattgactgtgatgcatggtaagaactgccatgtttttctatgaatt

SEQ ID NO: 421253 - DNA, 407 bp, Homo Sapiens
gaggactcctgctatcatcggcacctcgctatcatcggcactcgctattcatcggcacctcgctattcatccgcacctcgctattcatcggcaccagccatgatactaaactgcctccggttttttagatgaggagactaatgaccaaataaatgaaatgatttcttcagagccatatattttatatttctaagcagcaaggtctgggtacaaattttctccactgcctctgggttcttctaggccccttgggaggcagctgctgcctactgtctcttctgggctcttgttcctggctgagccatgggccggacagtcctagacaggatgtctgcaggggaagggcggtccctggggctccaagacagggagtgggtatgaggcagggttagggtgccgatgaatag

SEQ ID NO: 421254 - DNA, 540 bp, Homo Sapiens
gtgatggtgtctagaggatccctgctattcatcggcacaggctcagtttcatggaagacaatttttccacccgggaagggggatggttggggatgaaacgttccacctcagatcatcaggcattagttagattctcataaggacggctcgacctagatcgccggcatgcacagttcacaatagggcttgtgctccagtgagaatctaatgccaccgctgatctaacaggaggtggagctcaggcagtaatgcttgctggcccgccactcacgttctgctgtgtgtccaggtttcttaacagggcggggactggtacaagtccgcagcctgggagttgtggacccctgataaatagttatcctcatttcatgtatgggaaaacaaaggtggagagaactggcttcccttctcaaaggtcaaaaacccgataagctaagcagtagagattcaaatccacaaaacctggcaccagagccaggacaatttttagtatattatttggtatctgcaagagcaagaaacacagatgttttacacaga

SEQ ID NO: 421255 - DNA, 545 bp, Homo Sapiens
  misc_feature (354)..(410): n is a, c, g, or t
tgtctagaggatccctcgctattcatcggcaccatctcagattcctgaggcagcatgatcttttctccactccttgggatgcctgacaattggtaaatccacgaggaagtgttggtgcaagggccttccttaacaatctcatgcaaacagcatgaagtgatcaaaagaaataagtctggtgttagatttgccttgtccagttctgtggggtggcagaaccagtacctcaaacaccttggagaaatggtgttcagggctggaaatggggcgaggtgagagaagctttggccctaggcaccaaatttaagaggagacccaaaacctcaggaatcaagataaatgatagtttcatgnnnnnnnnnnnnnnnnnnnnnnnnnnnnnnnnnnnnnnnnnnnnnnnnnnnnnnnnnccaggatgaacagaatgtcataattttaagtgaagacagtataaatattgatttcaaagctgacatttaagtactgaattcactaggggtggaaacaatgaggacactaggaaactagcagctgtagccatgggg

SEQ ID NO: 421256 - DNA, 524 bp, Homo Sapiens
tgggtggctgttctagaggatccctcgctatcatcggcacatcaggctggaaccccagtgctgattcctgtccccgatgcctcactcaagcacacgtggggctccttggttgctctgccgctcactcagagctttgaaacatcagagggagcatcttcccttccctgtttcacctttgtggttcctgggtctgtggctgtgacctcccttgcctgggtggagccttggagtttaattcccttacccatgagggagttggggccataagcagagccatgccatgttccactcagcccctctcacaggtccaccctgttccctgctcagaaccagctattttcatcacagagtaaccagtctaagggacaggcctagatagaggattggctgtgtagaattagtcccagagacacttttttggctaaccaaatcaaaatatcaccacgacttgccctatacaagcaattctttcttgtaatgagatttgatcaatgacattggcctgtgtaatactgttaggtaat

SEQ ID NO: 421257 - DNA, 168 bp, Homo Sapiens
gctgccaaggtagaataccagactgatctattagcctgttgcattttcactgctaagcatttgagacgtgtacagagcttcaggatatctattaatggaagggaacttatggctcactggtgggattcagagacgtgctttggagtcagttagaactaaaaagatagt

SEQ ID NO: 421258 - DNA, 421 bp, Homo Sapiens
gctatcatcggcaccggggggtgagctaaagagcaggtgagtccgggattttcgagacatcatggctgtgaaagtgcttggttttccctaccgtggaggatctcaagccgggcgtccttcagggtcaccctagggggcaaacggcacatgcaggtgcctgagctccatttcagacccaccgtgggggatctcagaggatgcgcccaggaatatgccccttttccccagtagctttaggggtacatgtggtttggtttccgtgggcaaatcataaagtctgagattctagtgctccggtcagccaagtagtgcacgctgcacccagtatgtagctttttattccttagccaccttctaaaataagactggggtaactggaggcctggcccagtgacaacactcgggcaaagtcgtgcacggg

SEQ ID NO: 421259 - DNA, 469 bp, Homo Sapiens
atcacagtggagtaacttagccaattctaacttcttggccaccaggagcaatctcatctaagagtcttacggatacacataagccagaatggttctcagcatttaccctaaggaaaggtgcaaacacccatggataaatgccacacaaaatgatcttatcaaatacagagatggcctgtccttgggttaggtgggatgtaggtggaagtgggtcactatgccatcatagcggccgtatttataaagatcaattgacaccaggaccgggtgattgggttctgagaaagggagcctggaggaatcgtggggagagattttcagggagagccagagaaatcttcctcaaatgacagggtccattataggcctaaggaaaactcaactggccatattttgttaactctagcaaagcttatgataggtttcaataaattagcacctgaatgaagacttctgtctccatgaaggc

SEQ ID NO: 421260 - DNA, 549 bp, Homo Sapiens
cttccgagggtcccggggatgatcggcacgtataaagacaagatagcttagtgggaggtgaagaatgtcccaggttccttaattttatatggaagagcattagccaacagagttcttttctgtagatatgtatcttcagtgggaggaaaacccaaggccctgtgtagcttctgatgaaatataggggaaaaaatctagaaaactataactggaagaagttatgtttatgctacttctatattcctgaataaatggacagcaaggcatcttcaccactcagtgaggcccccatcataagattggagaactggttgggcctcacttctaaccttattttagaatggcactgagaacctgggacaagggttattctacaaccaacgtctccttccttctactttccattctgttatgtctgagtctttttggtgggtaattatggattagaatagtgatcaataatctctttagttctgggcgttactagtgattataaattcttgctggtaacatgggcataaagaagaatgtggaaaagacaatgagtac

SEQ ID NO: 421261 - DNA, 500 bp, Homo Sapiens
gctgtacagctaccagctatgcttccacaagtaagcagcctgctctccagctcacaggttctttaggggtaggtaccatgttatgtataccttacaacccatcatatttatatgaccattagaatgtctgattaatatccctatgaaggcagatatcacgtctgtatatcactcgattatgtataacttatttttgagtgcctgagcactcagaatttatgctatgcccctagcttaaccagggttttcatcattgatgatcatccgatttcactttctcaacttcgaacttctgggtgcagaaaaactggtacgatagggagtttctcactctggctcctttgctcctcctcagaatcacagggcacacctgggtaccaggacgtttcccatctccccatagccagtcaggtaagggtagagcatgagttctgtctattctttactcgagtgttacttacctacattctacatttaacgaggctgtactgacaaaaaag

SEQ ID NO: 421262 - DNA, 516 bp, Homo Sapiens
tgacgcatgaagtgcttgggggagaggagagaggcctcgtacttcaatatgttccccgcggacagaaactgggagtggagaagggaggagtagtctctgtcatttgatggttttgagcttcctagttatttaagaagttgcttcttctaccttataagcttcaaacctaagaacaaaaaagcaatttttccacaatattattcatggctatttccaaacaaaaaatatattattaaagcaactcaggatggaaagacatctccagaaatggtgcctgattcaatggagtatttagctgaaagctagtaggtttgacagttagtaggggaagctataagggagagaaacagacaaataaaattctctctatatatgcctcgtctgtatcacggagattccctacacactaatgttacatgattggtatatgcctatacaatgttgtccaggttgagtcaaaacaatacatctagaatagtccttggctagggcatattttctgaatatgacgctctt

SEQ ID NO: 421263 - DNA, 350 bp, Homo Sapiens
ggtggttatgaatgggtacctaccaacaaggtatcaaatccatggttgggcatttctgccatcaaggcaacgatctgccttggtacttgaaggcatttggcttctgcacagtcttctattaagggaaatgataagccttatcacttaactcagtgctaacagtgggaccccagctgatgctctgagagagtctgatgggacaccagcaaggaggacaggaaatggaacatgacagagacacacttggtctctagtttttctctaggggtaaaacaggcaaaattaacacatcttacctgtcaagtaaaattacaagaataacatgtatgtatgtaagtgaacctgtgtga

SEQ ID NO: 421264 - DNA, 530 bp, Homo Sapiens
  misc_feature (285)..(311): n is a, c, g, or t
caccgacgatcatcggcactgagagggccagttaggggcagaaggagagcagttagaatttgccagaaggtgtgggagcggaagaggtaaggtgatgtgtaggggcggatgtcctgggccaggatatcgggaggctttactcttccccactcccactaaccggaggtcccgagaggaacggggtctgggctgctccctgccacctgtcagcaggtcaagccttccaccggaaactgccccttattcaagaatttagcttctctcaaaaactccgaaacccctttnnnnnnnnnnnnnnnnnnnnnnnnnnncaaggctccgggcctgggacccagcacccaaagacatggattagccctatccactaggacagagcatggcagacccactaagcctgggagagagaaaaggatctggttcattcttagtccccagaatgaccaagacaaaccccgttagccaaacccctaaaaaactgtggggcttaggttagattagctccaagtgtttgaccttgagggggaacaccc

SEQ ID NO: 421265 - DNA, 534 bp, Homo Sapiens
gaggaccctgctatcatcggcaccatgtagaaccaatgaaaaactagatatgaaagtagacaagaagttaaggaagacggattgtttagttggggtaacaaggatgggtggaaatgtgatggagttatggaatacaggaagaagatcgggtggtagtgggaggagagatcaacagttcagctacagacaaggagagtttcatgtgactctagggagatgtggggtatttgtagatcagatagattggggtattggtagagcaggagaagagtggggtttacagttagacttggaaatctggagtgtttaggtgatagttgacatcatcagagtggacgagaacaccaggaagacaagtagaggaagaagaaaggaaggccaaaaatagagctctgaggaacactgacgtgaaagaaacagatgaggtggcacaagtagaggaaactgagaaatagccattagaggtagggaaagaaccagaagagtgttgtttcagtatgcaagggaagaatggacttcaggaagctaaggttc

SEQ ID NO: 421266 - DNA, 129 bp, Homo Sapiens
  misc_feature (53)..(78): n is a, c, g, or t
gtggtgatttgaggatcccctattatcggcacgggattggcgagtgtgctacnnnnnnnnnnnnnnnnnnnnnnnnnntgcgatgaatagcgaggtgccgatgaatagcgaggtgccgatgaatagcga

SEQ ID NO: 421267 - DNA, 524 bp, Homo Sapiens
tgagggtcctgcgatcatcggcacggacactgggtagtatgcaaacaggcagtagtgcttattattatttcatgaaataatgcctaaggtggtgtcccttctgggaaacacaggcccatgaaaattcatccacaggggcaaaaatacactaatttatatccactaagcaataagatataataaagggaaccctaagcggaggtttgaaatggatgatctgtgtattcaaatactccgtatcatcctaaaatgaaggtggcatttacaacagcggtgcccatgcaatcctgcgaatgaatttgctacatgatatatcctaaagctgtggttaacccaagtttagcatccatgataacatacccatgcttctataagcaggaggaacctagagttgattttagggaaatgaaataaaagtgaaggggggtgacactcggggcagggcagaacaaatgcactgcatcctggagatgagctggaggggaaggggcccaaggagaggtgtgagatgggatatgagaaag

SEQ ID NO: 421268 - DNA, 447 bp, Homo Sapiens
tcgctattcatccggcaccgaactgccccagtacacacagccagtaaagggcagaggaagatattaaacagcgcacagggctgtgctatttagctggtccttcagggtcaacgaggtggtatctcgtgttaacccaattgggagggtctttttagaagagggtcatctgttctgatccacagctcacctttttcccatttaatagcccgtgttccttctccaagccccaggctattctaaggacacgttgtggttaggcaattgaaagttacacagtctctccttgcaacctttaggaatttcacaaaggataaatccctcatttccagggaaactgcaacggggtccaacacctcataagtcctcagtgcaatttcccaaacaagacggaaagaaaatggaagagaaagctgagcgctttcacaattagcaaactgttttagtccg

SEQ ID NO: 421269 - DNA, 131 bp, Homo Sapiens
cggtggtgctctagaggatccaactcagggcgagctgcagctcagtttgggggcaggttgtgagaatgggtaccttggcaggtgacaagcctgctgcttcagcctttgcccgttttaaaaatccctttagt

SEQ ID NO: 421270 - DNA, 463 bp, Homo Sapiens
ctatcatcggcacagacttcccatccaatggatctcgatacaggatataaagtggactcattccaattacagtgacctcgaaatgagtcctgtattgttattttactgtacactacctccccgtggttgggagtgggtaattttgctgctgcctgctgccttccttgtgatgtggtagcctgtttctcaggctccctctccgtgaatcgaaccctgattcccctgttcacctgtggtcaccatggtatgtgccctgttgactaccatcgaaatgtttgatatgtgtgcagactgttcgaatgggtctgtcgcctgcatggcgtggctgttgctgatctggccgagtttatctagagtcaccaaagctgttggtgcccgccccctggccggggccgtagagttggcttgaccgggtaggtttatgatctgataaatgcacgcatcccccccagcgaagggggtc

SEQ ID NO: 421271 - DNA, 448 bp, Homo Sapiens
ctctagaggatctctgctatcatcggcaccttggagactcaaatcagcccctttttcattacctcttccaaaggagagtggtctggagacacattgatgttgcagggcctcaccctgctcaggagggggttgaggtgtcatgctgatgggtttgggtgagggaaaagaaagaggtggctccaagtgctaggccccttcctctccctactccaagtttctctacactctctggttctctggctcttgtaggcttctcagagactctctgggttggtatagatggtggttatttctgccatgtgtgggaaactcttgtgaaacatatgtgccaggggtaggaatcccaggcctcctctcctgcccaggggataccatcatctatgttagtttttaagctggtcttaaaatgaggaatctggtgccgatgaatagcgagggtaccgagctc

SEQ ID NO: 421272 - DNA, 165 bp, Homo Sapiens
agaggatccttcgctatcatcggcaccaatgaaactccatgagtacttacagagctgtattgaagtgggggacacatgtattggtatgccctcaaccgggtggaagaacaaagttttcaagcctcgtgctaggctatttttgcccatctcttgcggtcccagtct

SEQ ID NO: 421273 - DNA, 566 bp, Homo Sapiens
cttcgctatcatcgagcactactttcaactcccatgtgatcttagtctatcacatattcctctgttttcctctattttcagtcctctccactggtccttccctcatacccgaaaacatatttcaatctctctcatcttaggctctctcttgagattttatcttttctagccactgtcctacccagccaagttcttcaaaggaacagtactcaggtgctgactttactcctcacctccattcatgtttcagccatttgtgacttgggtttggtccccaccatcccatgaaaaatgccttccaaaaggtaagcaatagcctcgtagctacatatggatacttggtagtcattgggttaaccaatctactccattgaacatggttgaccacacttaaaattttattcttccttggcttttttgacactgttttctcctagttctcctctatctatatttttcactgattcttccttctccacattacctttagatagctagtgtttcacaggattttgttttctaacatgctgtctctaggtggaatcccacaatgatccccagatctc

SEQ ID NO: 421274 - DNA, 198 bp, Homo Sapiens
tccggtttcgatttctttttctgagaaatatcaaacgcttttattatccgtctcggcaacctataatatataagaaacagatcaaactaataatcttaaacatgtcttaaaaatgtaaatttctagtcttgatttctgacctccagctaatgaattattatgcctggcttgtattttcaaatccaaaccatttagtag

SEQ ID NO: 421275 - DNA, 233 bp, Homo Sapiens
gctctcgaggatccccgagggcgagctgctaggagactactcaggcactaagctaaggtctctgcttcttagctcatcctgtagcctcaagggctccccatcctcaggcaaccaggtgtatgggtccctcagtgggcctaggcacagctgtgactccttgagtgtggctctggctggcctgttgctacgtgctcgtctcttccctctctctgctcagcagctcgccccgtgag

SEQ ID NO: 421276 - DNA, 143 bp, Homo Sapiens
tatgcatgctcgcccctgaggttatgcagctcgcccctgagttatgcagctcgcccctgagttatgcagctcgcccctgagttatgcagctcgcccctgagttatgcagctcgcccctgagttatgcagctcgcccctgagtt

SEQ ID NO: 421277 - DNA, 130 bp, Homo Sapiens
tgttctagaggatccctcatggcgagctgcaagggagcagatctctcgacacccgatgggcctctattccgttccggcagctgtccgtgtcaggagtgctgggcttgctcctccccacgggagccatcac

SEQ ID NO: 421278 - DNA, 264 bp, Homo Sapiens
aactcagggcgagctgcaggatgggaggagaaagagtttgcttgcacaagcagcagtagactcctcagatatggagacagaagcctgaggaagaaaggctttttcttcttttctgggccaggttgtctatcataacaatgtttgcaagcccctggatgaatgaaggcatggctggtgcccacagagcagctcactttactttcctgacattcttaccaccccagagcatgtataagaacagggttggcagctcgcccctgagtt

SEQ ID NO: 421279 - DNA, 257 bp, Homo Sapiens
aactcaggagcgagctgcagtggctgcatgtgataactgctggcccctccctctgttctttacaaagcactttcactctcagcagcccagtagggggccaggtggcggatgaagaagtgcactctgggaagtggcttgcccagagtcatggggtagttggattctcccccagagctggagacacctcatctccctcctaggtgcctcctctgtagggggccttgtccccaggcagctcgcccctgagttgcagctcg

SEQ ID NO: 421280 - DNA, 120 bp, Homo Sapiens
ggctactcttgaggatcccaactcagtgtgctgagctgctaactcagtgtgctgatgctgctaactcagtgtgctgatgctgctaactcatgtgttacctgagctctgaattctgtaatc

SEQ ID NO: 421281 - DNA, 351 bp, Homo Sapiens
atctagaggatcccagctcaggggcgagctgtaactcaggtgcgagctgctaactcagtgtgcgagctgctaactcaggtgcgagctgctaactcagtgtgcgagctgcctgcctttggagagttgggttgtagggagttcctgctgggtttctggggcaaaatggtccccctctgcctccaggttctaccgaggccctgcttgggctgtgacatggtggctctgtcaaggtgggatgtctgtgtgtgcacatgtgctggctccagtgctgaggtgaccatggctggcctgtgcagcagctctggcacctgcctgcctccctggtgggtccccctcctctgtgcagctcgg

SEQ ID NO: 421282 - DNA, 161 bp, Homo Sapiens
tgaggatccaactcaggtgcagctgtaactcaggtgcgagctgtaactcagggccgagctgctaactcagtgccgagctgctaactcagggcctgagctgctaactcaggtgcgagctgcaactcagtgtgctgcgctgcaactcatggtgcgagctgtaa

SEQ ID NO: 421283 - DNA, 517 bp, Homo Sapiens
agcggtagcaggagtcacgtacacccagagcctactggccatcaaccaagtaagcttggaaatgcacttccctcattctttggctgatgaactctggtgcatcccttaagacccaactcaaacatcaccccattcgtgaattatccccatttcctccagggggaaggagtgtcctccactctgggcttctgcgctcacattcataactctcaccacagcactcgtccccctgagctgtgattccggctgtgtctatcttcccggctagatgctgagctccttgagagcagagacttggtccaatttatcttaaggcccccagcccctttccctccagtgcccaacacagtgctggcctagtacatcccaggcattaatcaatgcagaatgaatgaatgtttgatggaatgaattcacttggcttgctaagttgctcacggagcagacccttggtgctgagtgactaagtggagcaggtcagtcacctgggattcaccaatggttcatggcctctctc

SEQ ID NO: 421284 - DNA, 190 bp, Homo Sapiens
aggcaaaccccagccctgtagtctgatctgcgcacttgggaatgcccatcccccactgtgcgggcactccagcctcacttgcgcacatctgtcttcaaaatgtggaggaatgggtttctcagcacctgtatacgcccacggctttcttatatccctgtctcctgcccttttgcatcctatatgcaacaat

SEQ ID NO: 421285 - DNA, 146 bp, Homo Sapiens
cggaccgactgttctggtgagaagtaagcggcacgcatatcgcgccgctacttcatgcgatcaagtctttccgcgcctacgcagcgcgcgtagcctccgctcctgccgcattgtcctgccagtcgagcactgtaagataattgtcg

SEQ ID NO: 421286 - DNA, 359 bp, Homo Sapiens
agagagctaaagtctcgagtggccaggccttgcctaccgtgtctttccaggccatggatgatctggagagcacagatggcacggggcccttgacacatgaaccacagagccactaatgagtgtcacggtggtaggagaccaaaagaggggaaagaagacattacagaggctgggaagagctggggccaggaaggttccaggacaggggaacactgttgggtagaccccagtagacaagtaggcacagagttgacagtccagggtggcctggttgacatcttgcccccagcatcctggggactcagccaggaagatgggatttgggtgacaggtgggagagaagggcactgggagatttg

SEQ ID NO: 421287 - DNA, 512 bp, Homo Sapiens
cagcctggtcgccaagtacgccaaaaatacacaactgttaattccaacgaaaaagagaaagttgcaagaaaggaaatttaactatagtacactacatatgctcagtctgtgaatagtatccatgaagtcgaaagaaccgcccatgagcggtgcagatgggaaagtagcatgaggcatgggggcaatctacggagccacacttcatctcccacgacaggaagcatgggggccatccaccgagccacacttcatctcccacgacaggaagcatgggggccatcctccgagccacacttcatctcccacgacaggaagccatgggggacatcctctgagccatacttcatctcccacgacaggacgcctgggggccactctccgagccacacttcatctcccacgaccggacgcatgggggccatccaccgagtcccacttcatctcccacgccaggccgcctgggggccatccaccgagcccccctttatctcccacaaccggacgtccgcgtg

SEQ ID NO: 421288 - DNA, 293 bp, Homo Sapiens
agcgtgacattcaggtgatgtgggcatacggaatgaaataataaggatatggcataaaattgcaaccaagcctatctagtgtgaggagaaagttggaaaaacaaaaatgttagtctttactaaagagtgtttttaaatctccattgtaaaatccaatgggtatctattcatatatctgtcttgatagacaaatgcatccacttgtacaggtacatacacacaaagaaactgtataatttagctcatttgtctcttctaacagttctgtggggcaggtgacattattaccaccc

SEQ ID NO: 421289 - DNA, 100 bp, Homo Sapiens
tgagctcggtaccgtgtcgcagcaaatacaagtaaacaaaatgaaaggccattcttttgcaaacaagtttcttgccattaacaccaacagattcatttat

SEQ ID NO: 421290 - DNA, 547 bp, Homo Sapiens
tatccgtgtcggggttggctcaacaagccaagggcaagtttacggatctggagagatggaaactactttaaaccttggtagttctggctgcagtgaggaataacaattagaataattgataaccaggtccttgatgtccagtcaccacccaaggcctgcaacacatcagagacaagcctgattctctggctggagtagatgacagagctggggttgggctattctggttgcttaagctgcagtggccaaggacatgcttcactttggtgacaccagttgtgcagaagctcttgaactcacacagttgaggtctttgtggtctgggagagaaaccctttccctgatatgtgcacagtaagcatggggctaaataggtgtgcatgactttcagattacatgcaaagaagttttagaggttaagagttccaaagaggacagacaggatctgctggagcaggcctggggtaatacagaatattccagtaacaatagtgtaactgcactactacagtattaagagtaacaatattgttactaaacaatagga

SEQ ID NO: 421291 - DNA, 533 bp, Homo Sapiens
atagtacatgtgtcctcggtctcaccagatgtgcaaaagttggctatggctaccacctcctccaggctgataccatgcccaataacagaacaggcttccttacacccatggtgcttctccagctctgactctgatctacaacttcagtggctccctattgccacaggaaatattcattccccttcccataccttcaaggccctgctctctcctgccccactgacccctcctggagtcgctgcaaagaagtccccttctttcccctctgtccatcctttggagctcagattaagccccagctcctccaggaacattccccatcctcctgcagtatgcccccgtgtgcctcctgtcagtgtcccagttagtccgctcagctctcagggtttctttgagaatgtctggggcctgttttagagctcaggctctggaagaacaggaactgagtccagagactgcgcaccagcttgtgagtgtgacttgttgaagtcaaaggaagagaggctgacaggcctcccagccagagaagaata

SEQ ID NO: 421292 - DNA, 120 bp, Homo Sapiens
gtgaacatccaggtgatgtgttttccccataaccaccgtcctagattcaggtttccattgccctacactcaagttgtttaacaaaataactaacttacgtctccatttccaatcacctga

SEQ ID NO: 421293 - DNA, 532 bp, Homo Sapiens
catgagttcatggtgggaacctggactgttgggggtcactcacttacccttttcctccactggggagccagcctctccaggttctcagccaatgctagccaagcaggcagcctcacttccccttccttttttgttttggttgtgtcctgtcacttatctgttgaattctaatgttctttcataaatgatctattcaaagtgtgatcatctattcactgtttttgttcttctctgtgtaagagacacgtagcagatgcctctagtcagccaccttgcaacccctctgccatgcagttaatacatgattttttctacttttggatggaattagataaggcccaagctaagaactccatacagcccattttgtaatatgatccagacacagagatgcactgttcagatcctcgttcaaaaaacgacccaccgcatagctgagagggatgtggtcagctgatgcctccagctgttagatccttcaggatctgtctcagttttcaaaccaaggttacgctcttctctcagtgatctc

SEQ ID NO: 421294 - DNA, 571 bp, Homo Sapiens
  misc_feature (116)..(203): n is a, c, g, or t
  misc_feature (216)..(303): n is a, c, g, or t
  misc_feature (316)..(403): n is a, c, g, or t
  misc_feature (416)..(503): n is a, c, g, or t
acatcgccggagtcttcaatgctatcattctcttgtgcatattggacctatatgcatgttaccgagaaactagtgcgaaggtactgatcaggtatagctgttagatatccccgagnnnnnnnnnnnnnnnnnnnnnnnnnnnnnnnnnnnnnnnnnnnnnnnnnnnnnnnnnnnnnnnnnnnnnnnnnnnnnnnnnnnnnnnngatatccccgagnnnnnnnnnnnnnnnnnnnnnnnnnnnnnnnnnnnnnnnnnnnnnnnnnnnnnnnnnnnnnnnnnnnnnnnnnnnnnnnnnnnnnnnngatatccccgagnnnnnnnnnnnnnnnnnnnnnnnnnnnnnnnnnnnnnnnnnnnnnnnnnnnnnnnnnnnnnnnnnnnnnnnnnnnnnnnnnnnnnnnngatatccccgagnnnnnnnnnnnnnnnnnnnnnnnnnnnnnnnnnnnnnnnnnnnnnnnnnnnnnnnnnnnnnnnnnnnnnnnnnnnnnnnnnnnnnnnngatatcgccgagtccttcaatgctatcattcgctttgatcttggaccatatgaatagtcacgagaaac

SEQ ID NO: 421295 - DNA, 130 bp, Homo Sapiens
cggcagtgcacctgcattcctgtaagctctgactctagagtatccccacgcaataccggcacgagaccgatagtcaacaagtaccgtaaggcaaatgttgacacacatgaactttgaagagagagttcaa

SEQ ID NO: 421296 - DNA, 249 bp, Homo Sapiens
  misc_feature (46)..(113): n is a, c, g, or t
tcacacaaaccccctctctgggaccttagatgtgtattggggcccnnnnnnnnnnnnnnnnnnnnnnnnnnnnnnnnnnnnnnnnnnnnnnnnnnnnnnnnnnnnnnnnnnnntgagatctctggtgtatgtctgatactctgggtatgtgagtgtgggggtctgtgtgtgtttctatgcctggattcatacatgctccagtgtccctgggtgagtacatatctaggatcttggagtggctgtccttgg

SEQ ID NO: 421297 - DNA, 386 bp, Homo Sapiens
ttcgtgacagttagactctagaggagtcgtcactacgaaaccccctctataatgtcatgctccaggattaacctggcccatgtgctcatgtgttcatacggttccggtgtggaaaacacgctcgtgaaaaagcagtgagtcctgcaatagggaagcccagagaaggcaccctctgacccttaggcttgaccctgtagcactaccagccttgccctcttcagtctcatcacaactgtgacttaacagttacttgaggaaggagttggtgcattcgccacccgggcctggggatccaggaggacaggccctggatgtagcttttctttcagctgtgttctgcgcctcgaatattatggcttggcattgccaggcagcctgttcagccc

SEQ ID NO: 421298 - DNA, 124 bp, Homo Sapiens
tcacacaaagccctctcctaacacctctactcctgcccacgctgcccccagggtggtctgctccccctcttccccagactcccccagtggccactcccttggcttcaccaggctaccaagactg

SEQ ID NO: 421299 - DNA, 166 bp, Homo Sapiens
tcaccacaaaccccctcctgccttgctgtcacagcagtgacatttatttacccaaatgacgcttgctggccttgagtgccaaggagacagcagctgcttccgagtcagaggcccaaaacggcagcgcacatggtaggcactaacagacgtgtattccactgaataa

SEQ ID NO: 421300 - DNA, 121 bp, Homo Sapiens
atacccgtagttccttcgattgctatcagtttccactttgaatattggactcgactatgcatacgtaccgagaacataatgcgactctagtgtagacaggtatgctgttggatttgtccga

SEQ ID NO: 421301 - DNA, 474 bp, Homo Sapiens
  misc_feature (147)..(160): n is a, c, g, or t
tcacacaaaccccctcagtgtaaagtaagttaaattatagtcctaaggttgaatgctaataaagacagaatacaagtccaatatattggactcaaaagccctcacttaactatggtctccatgggcttcccttggctctctctgccnnnnnnnnnnnnnncttattgcttgaggccctttctggaaggtaagtctggattatctacttcacactgttttagagaagacttgtggtttccatttaccccttactccctccgctccatggcctttcagggagaacactgtgggtatcatgctgggtggcctggagggtccaagtaacaggaatctagaaggatggaccagatgtgaacaaaagaaagcctgagtaggacacaaaacagagaagtggggctgtaacatctctaagatattacagcttgctacttccactctctttgcaaatgtggtgaaacccaggctggagtcatc

SEQ ID NO: 421302 - DNA, 243 bp, Homo Sapiens
atcatcccgttttcctgtgtcatgcctgaatggcatctaatataaaatataatgggagtgtggggaggattggcacgcgtccttccttatctaagaaaaaggcactatcattatctggatctttcacacaccaattctacttctttcccttagacaaaacttagccacaaagctattcctagctgcaacaataatcagaaaatggacaccttaaactttataaattgtcacactgaggatgaa

SEQ ID NO: 421303 - DNA, 127 bp, Homo Sapiens
tacactcttgaacctctcacctcgaaaggttggactatgtgaaagtctggccagaaagcccgtgtcttgtgacagtgtctctgattgtgtatacacatgtcacagacacgggctttctggccagact

SEQ ID NO: 421304 - DNA, 142 bp, Homo Sapiens
cttagagagatccccaatacagaactgagaagtgacaacataacatagtcccccatcattaacaagagctactcacatgtaagtgactctggttgggtggcactccagaaaatgccattcctgatatgcacgccctgctagt

SEQ ID NO: 421305 - DNA, 406 bp, Homo Sapiens
ccacctaatcactgtgcccttgggttttagagagacttgcatgtacataactgttgtgtcccccaaatgagatgctgatggccagagagcagttttactgcagagagtgtgtgtaggatcatgggaagaacatgggcattgaatgccttcccatctaggtgttccttacctgggtgctgttagttactgagtggcagggcatgctgcccacagagtgaccagcttcctggcctgtaggggagctctgtgccccccacctgccacatgccgtgcgcgttacagaaggcagcatgtgttcccagtgaggatccaatggctgatggctgtggtggcgctggtgatgacagtggacgcttaatcagtgtcaggtgctcaagtactcacaacaacagatctagggaggcag

SEQ ID NO: 421306 - DNA, 275 bp, Homo Sapiens
gagcagaggcccagttattctgtgcatgtggattctaccattgtgaaaagacgttctttccacatggtatcttcttggtgcttgtcaaaagtcagttgaatgtgtatgtctgggcttatttctggactttacactctgttccattgatacatgtctgtttttgtgcaaataccatatggttttgattactgtagttttgtaatataacttaaaatccaagaattgtgatgcccccaactgtgtttttctttctcaagatttccttggctatttgt

SEQ ID NO: 421307 - DNA, 152 bp, Homo Sapiens
gcagtggtcaggccatctatcgggttatcttcggccgaaccttctggatgagcctggtgatcaccgccatctgcctggtgctggcttacccgctggcctacctgctggccaacctgccgacgcggcagggcaacctgctgatgattctggtg

SEQ ID NO: 421308 - DNA, 554 bp, Homo Sapiens
tttactgcttgtcgactctagagtatacctgagtcgcgctaaaagcgctcaacgtagattcctatttaacgctttaaaggcgaacacagtgccatcttactagagctctactcagcaatcctgtattcttatctctggtcattatctcaccgcgtcttgacttggagaaccctcgcgacgccgcgaaccctactctggatctggttaataccttcatttcacctcatggtccacaaacttgtgggcatctttgccttcttgaaatggcccccaaggccatcctggcttatggcacctggacttctacagttctgccccctgcctgcttattctcctcctccctctgattcattctctgcacagtgggcattgctctccttttacaagtgttcatcagatcatgtcagccctacacttgacaagactttccagtgagttctcattgtgcttggagtaaaatccagccactttatggctcataggacaatggtctggctctgctttcctctgatcccatcaacgatcccatcaacgactgctccccactctgacct

SEQ ID NO: 421309 - DNA, 286 bp, Homo Sapiens
gcgctagaggcctcaccacaaaccccctcccttcttcctccctctaggactccacagtgtctattgttcccatctctatgtccaagagtacccaatgtttagctgccatttataagtgagcagtatttggttttctgttcctgtgttacttcacttaggataatggcctccagctgcaaccatgttgctgcaaaaaaagcattatttaattcttccttatggctacgtagtattccatggtgtatgtgtaccacgtcttcgtcatccagtctactgctgatgggca

SEQ ID NO: 421310 - DNA, 533 bp, Homo Sapiens
agtagtgtgtctcatctcttaccaggacagatgatagcatccgaagactcggccttgaaggtcctcgatagatcgcattacgtgcctgcgcgattgcgactggatagcacggcttagaaagtgatgcacatgaaataagatgtggccgatatctccgtgtgcgacatccagcagtactgaggtctcccctccctgccttgactctgatatagctactcctgttcaacacccctcccgtgaagccagcttggaatctgctcaaaaccacaagaaaggaaggcctgattggctgactccttagggagaacctccaagagctcatgccacaagccgcaagcccggagtcagccctaaatgagcctctcctggagccctgccctccaaaaccctggaaaagcggggtcctctcgtggttctaagctccttcaccatcctgctcactgccccccagaacatggctcatctactcctccttcaccatcctgctcactgacccccagaacatggtcatctactcctccttcaccatcctg

SEQ ID NO: 421311 - DNA, 170 bp, Homo Sapiens
ggctcggtaccttagagcttggcgggtgcgtggctgcgtggtcagtcggtgagctcctggcggtgcagggcaggcggtgggacagcttgtcccatcctcgtgcacctcgactacgaccagtctgtcgcaggtgctcaagcacttccccgagcgccagcgcaacgaagtga

SEQ ID NO: 421312 - DNA, 408 bp, Homo Sapiens
tgatcagctcggccccggttacgctagagggcagagtatctgggggcatgtgacctagagaaacagcagctagggcagctatggagtgcttgcccacccctcctccaaccctagacagtgcagctcgcagctctgacagagacctctttcttccgcttgaggagaggagagaggagaggactttgtcttgcatcttggatactagcttacagtaggagggggcactggtcagagtcatgagacccccctttcaggtctcagctttgggataacatctctagacaaactctgggctacaagggaacctgctcccttgaagggaaggactcagtaatggcaggattcttcactatctgactaaagagcccttgggccttgaataatcagcagtggtaaccaggtagtaca

SEQ ID NO: 421313 - DNA, 568 bp, Homo Sapiens
  misc_feature (379)..(425): n is a, c, g, or t
  misc_feature (548)..(548): n is a, c, g, or t
gtcgagctgtgaaagagcctatccctcgccactcccatgtaaggaaaagatgtgggcaggctgatcttactcaaatcttggccttgattggcttatagtcccatcttctatgtggacatgtgtgaatcctggttgacaaaactcttcgaaatctctaacccgggctttccttgtgggcctaatgagaccggggcaagtccccctttagggtctaccctcagtgatttctccatgctgacctctaactgtgtaacttattcatctcttatgccatgccatcggtatttcctttccacaccccttcttctgaatattacatcccaacagatctgtctttctattttggggtctggcttggtctttcagatgtatcattttnnnnnnnnnnnnnnnnnnnnnnnnnnnnnnnnnnnnnnnnnnnnnnncctccatgcataggggagaaactgatttttaaagcttctccatggacaaactcttcctacttacaagggtatatagctggagtaggataagctatactataagcatttcaatattcgaatggntgtcgagggaaagcaccata

SEQ ID NO: 421314 - DNA, 455 bp, Homo Sapiens
  misc_feature (331)..(397): n is a, c, g, or t
gtacgtcgtggatgtaggtccatggatgagattggatctggagggactagcaggggctggtcgcagaatggatgtctgacacatacagggtatagaggggtgtggaagccaagagctcttctcagaagagggaggtgcccttgcatttggtctccaagctgctgggtattctcacccaacctctcagcgccaggcacccttagggcagtgccctcttaccctgtagggcacctctctggcaagcaccggggggctaactgctacccactgcactgccccaagctgggaagaaggtgagtatgcagagctaagcaggcctgcagccagatcnnnnnnnnnnnnnnnnnnnnnnnnnnnnnnnnnnnnnnnnnnnnnnnnnnnnnnnnnnnnnnnnnnnatggatacagagaagatggtgatgcctacttcatagagttcttataagaattccctga

SEQ ID NO: 421315 - DNA, 428 bp, Homo Sapiens
ggggaggacttgcggcgggacaagggtgcgacgtgattccggctgggtctggcctctcaagttaacattgtggctttcgagcagcggggatccgtttctggggatgccgcacccgttggtattatggcgggaatattccgtccggcgatctacagattatgctgtatgaagaccagcaggcgaatgagctggacgtcactttttctgacgccgattatgcaaattcattaggcgatctggatgttttgcagcgccgtttccagtttattttacgggcgctgaacgcatcaacggcggggacgatcgaggcgttggatcggcaagtggcggcgctggcggataccgaggccggcggcagcttttacaccaaccgtcggcaaccgcctgccggcggtatcattcgttgggatcgcccggctgaggcgctg

SEQ ID NO: 421316 - DNA, 119 bp, Homo Sapiens
cattgagtgggagggaacatccaaactatatcattccacccctggcctccaaatttcatgtccttctcacatgttaaaatataatcatcccttctcaatagtcccccaaagtcttaact

SEQ ID NO: 421317 - DNA, 517 bp, Homo Sapiens
  misc_feature (416)..(416): n is a, c, g, or t
ggtaagtaggatgtacttagtgacctaagagttgagcggggaggctcgactgattctttctgtgaccactgaggctactaagtggggagaagtgtagccagcttggtccctgaccaaggggagataccaactctgaacattgtttctgccaagctgggagtggcacagtttcttctacagactcttgctcttctccacctccagccctgggtctacatattcccctggtgtcctcaagtccagagtctctccttggatcttgcacagatgggaagatgtgggagaactgaggtccagcagttttgtgtgcagactttgacccagtcaccccattgtcagtgccatgctttgttctgccttctgcaacccctggtactttcaaattctgagtggcttcaggttcctgcagatatgtnggctcacttttctagaatatcccctctataggagtgtaggctgtggctgccaggaaaccctacttcatgtattttttatgttttaaaaaaattttgaggcc

SEQ ID NO: 421318 - DNA, 529 bp, Homo Sapiens
tcgggctgcgccagtggtggtgggatccgaaggccgaatcacgccgcgtgcacgaccctgaacccgggtccggctcggcgtggatcgatgcacacgcgcacctcgccgggcaagcgcgcactcgacatcggcgtgcggcggcggcatcctgtccgaatcgatggccggactcggcgcacaggtgaaaggcatcgacttgtcgaccgaagcactcggcgtcgccgacctgcacagcctcgaaagcggcatctcggtcgagtacgaggccatcgccgccgaagcgatcgccgcgcgcgaaccgggcagctacgacgttgtcacctgcatggaaatgctcgagcacgtgccgtctcccggcgatatcgtcgccgcgtgcgcgacgctcgtgaagccgggtggctgggtgttcttctcgacgctgaaccgcaacctgaaagcctacctgttcgccgtgatcggcgcggagtacatcgcgcaaatgctggcgaagggcacgcacgaatacgcgcgcttcatccgcccgtcggaa

SEQ ID NO: 421319 - DNA, 485 bp, Homo Sapiens
ggagcctgttcaggcaggatggctgaagcctaggggcaggctgcagtcagctggagtccgtggcttggaataagaacttacggtgctttctccaggcccactcatggcacccatggaccaatcagcacatacttcctcccttccgagcccataaaaaccctcggactcaggtagactcaggcagatgtcgggactaccagctgcaggaaggagatacccacttggggtctcctcaacttgtcaggacaacctgactatgggaagcacttacccactatgggtctcctctctgctgacagctggaaacccgtcaggatgacccgctgtggaagggagctacccacttctgatctcctaagagctcttctgtcacttaaatgaagcccctctccgccttgctcaccctctggttgtccacgtatctcattcttcctggatgcaggacaaaactcagcacccgctgaattgcgggactgaaaggggtg

SEQ ID NO: 421320 - DNA, 327 bp, Homo Sapiens
tcgctgggggcgagccgcgaagtaggctagacttacagtaggcactatttcctttttgtgtaaaaatgactcttaaatctagttttccactaccccatttcgcagaagacctcctttcatcctaaatttttgctcaggcatgtgacaaacatttactgagtacctaatgaatgccaggtgccaaattatattctagagagtatgaaaatgagcgagtcattgcatgggctttaaaattccagtagactagggtggaggcagatctgtaatcaattaattttattacaaagtgaggaatgtgtacattaagagagatttgcacaaagt

SEQ ID NO: 421321 - DNA, 445 bp, Homo Sapiens
aggacgctgaaagatttctggggctttccccccttggcttttttctagaagttttgggaatttaacttcaaataattccatggcttttatctgctgtaacatgcaggttaaattaagcctttctccctccactcctatggacacttgctctcatttggggtattaaacattagtctagtgaggaaagggccatttgctggcattggatgttgtatgaggcatctataggtccctggtgccctcccagaaatgtaaagttgatttgcagcaggctatctagtcgatcactggaacaaataaatgcaaggctaaatagagaggcttaggatggctcgcgtgtctaggccccttgggaatctctgaaggtccacttgctcccttcggtgccccagtgctatgagggcttgaaggccctcagaagttagctcactgaaaatctctctac

SEQ ID NO: 421322 - DNA, 243 bp, Homo Sapiens
gggggtcgcaaatccaatcaaaatcaaatttcaccccccaaaaacatctctgcactcgatagggggctattggaaatacagtctcacctggtgcaaagcacggttagcaactctcagtaggccagaaaccagatgagagaaaggggcctacatagggtttgaatcccttacccttgactttcaaagcgtcaggatatctgaggacaggctacttgagccaagatcgcagacttcaggtcagtt

SEQ ID NO: 421323 - DNA, 406 bp, Homo Sapiens
tgtaacaggtagaaatgactcatgcaccagtcccacagactatgagctagagatagagagagctgctggtattccgtaagatactgtacacactaataaccaatgtctaaatgtcaggctacttttagtaagtaaaccaattgatttcaaacaagctacccacttaattaatgtagaaatctcagggcagaagacgttctccacctctgaagcttcaaagcttcacatagaaacacatccgaacacttttcctaatcctcctggtagcctctgaaagggacgaagtccctcctctaatgaagagacaccactgcgaggatgtggtagcacagaccagaaactccctgagggctgaggtcggcaccgagtttacttagcaacgtagccccagttctgccccaacgag

SEQ ID NO: 421324 - DNA, 148 bp, Homo Sapiens
tgtggggatatgcatgaaaaattttctaaggagatggatactttaaagagaaccagtcataatttctggaaacaataaaacacgtttagggaactataaaatttcgtggaatgttatcattggactagagcaagtagaagaaggaatt

SEQ ID NO: 421325 - DNA, 547 bp, Homo Sapiens
tatgaataaagaggcagtgtgagccccgacttgcatctcgaggcattgtggagtcggtaacttgcttagggctacagggctgggtaggggagaaactaggacttgaacaccagaattatgcgcttaaccctgaagctgtagtagctctgttcctagaatgtggcaggtgcacatgggtcgctagttcccctctatcttcagaacactgtcgttgttctctcccaggcctgaggagccagtgggccagctgggctgggagggcttggcaagggccctggcctggatccccacttatggggggcagaaacctggggcctccctttcagcactgacatggatggtggtttgcatttgactgtgtgttcctcatctgtctatcccatgaggtttcaaaccacacaagggcgggggccatttcccgttttcctggttcacaactgtgtttctggcaccgagcttcacatccttccctcattgaacactcagaaagttatgaatgactgaatacttttataaagttctcccctccttatcttctggtcactcc

SEQ ID NO: 421326 - DNA, 275 bp, Homo Sapiens
gatatgccaagaggagtgataacaggacagcatacaaaccaactgttgtatctagctgcatgcatcccaagctacaagttggtgcattcctcagactaccagcctcttctccataaacgcaggtgaaaactaggggctctttttccctcagctattcaatccaacatgaatagctgcaatttgcaaattagaggaaaatgacagtgttttctctgaatggttttactccccagccataacgctaacgctaacattgggttactttctcctcagct

SEQ ID NO: 421327 - DNA, 532 bp, Homo Sapiens
acttgtttgactagacagaacggacctatccagaatcgtcaggagtgaagtacatacaaacaaatgatttttaaaaaaaggttctcgttactactcggctacctcttctagttaagggcatgccatggggcttcagcctttgagataattacttcattgtcctcttgtatcagactgttgctgatgcaaagtctgatgtcaatataagtctcattgcttggtagttaatctgtttctgataggttttagagtcttctctttgtctgtaatgatctgtagtttcagtgtgatgtggttaggtatggtttgtgtttagtgtgtgtttccggttggctctttcaatctcacaatctatgtcttccttcagttctgggacattctcagtcatggctctttcacatactggtttccctttccttccttctggaactcgtgtaaggcaattggagcatctgagtccgtcttccatgtctctttaactttttctttggtacttttcatttcttggtactacattttaggtaactcctca

SEQ ID NO: 421328 - DNA, 121 bp, Homo Sapiens
aatgggtagtgaagatggttgtaggtcctaggtgattcctaatgcccaagacagagaggtcttgatcctcagaactgcatctcactgaggagagagactatagacaatataaccgagcttg

SEQ ID NO: 421329 - DNA, 636 bp, Homo Sapiens
agagtgcaaatcactgacaggtacggtaagagacacgactgagcccactctgactgtggtgtacactgaggaactggcagggagagaggccttccacattcagctgggctcaggaaaaggaccacacaacattgtggccaccagggggcgggctgcacctgctggaccactgacccgtttgaaagccttattcttgggagtgaagtgtctttagatgggaaggatgctgtccccaggtcccacctggggacaagtagagaacatccctggggacaagggtagaggtagaagatggctaggaagccaggtgtcagtggacatagacatttgattggaagaatccatgtgtgataggggagagtgggtcttggtaagaaaggatcaggatgttgaggaagcatgggagttatgggtgttgaaggcagaaggatgagcttctggggatcccttagggatggtgtcctggaacaagctgagtggggaatacagggtgtcttgaggtgtaaggatgtcctctgcctttcctaacaccttgatcatcccggttatggggaaaagtagtagctggaggtcacatccttcccctagagatctctactccttgcttcagatgctactcgcagggcactccaggcc

SEQ ID NO: 421330 - DNA, 306 bp, Homo Sapiens
aactgatcactgtagctacaacccaaacaatccagttctccctatggcttcatactagatataattctccatagtattcatcgctgttgcatggttcgttacatggtccatcataggaattctcactggtgatatataagactcagacccaaagtattaatctagttcttcaaactatctactcatcattccgtaattaccagtactaagtcttacgttaccagctaacaacgctattccaaccggttcatcggtctgagatgggcgtaggacatgatactccttcttgctgcatcagttgatgat

SEQ ID NO: 421331 - DNA, 412 bp, Homo Sapiens
ccagcctccattgaaacccagatgttcagaaagagggacctccttgatgttctagagccaggactccagatctagcatcaggtgatgcacagaggtctagaaagaggaacctgtataatgttctagaggcaagactccagatccagcatctgatgctcagatattcagaaacagggacctccttgatattctagagccgggactccagatccagtgtctgatgctcagatatccagaaagagggacctccttgattttctagagccaggactccagatccagcatccgatgatgctgagatgtccagaaagagagaccttgatgttctagagccaggattccagatccagtgtctgaagaagctcagaggtccagagagagggacctccttgatgttctagagccaggactc

SEQ ID NO: 421332 - DNA, 396 bp, Homo Sapiens
gatacgaatcgagctctgtaccgggcgaactgaagttcaactgttggcctctgagaagtggcacgtggggtgcaagggagaaaatgagacagaggatgggtgaattcttgacattctgatgtcggcaggagctgcccccctccagtgtgttctttatcctgctactagagtgacttttctacaaagcaattttgattcactgacattcaatgcatttgaattaagtgattacctttggccaggtacaagttatatttctgcttataaacaacccgtgcagttttttttcatgactttccattgccttcaggatgagagaaaaaaagtcacttggagtatcctcagtgaaactctcttactttacttttatccgtatgatttccccagcatataggc

SEQ ID NO: 421333 - DNA, 547 bp, Homo Sapiens
  misc_feature (42)..(243): n is a, c, g, or t
agcgcggtcgtcgtatcacaccgtccggtgctagggcctgcnnnnnnnnnnnnnnnnnnnnnnnnnnnnnnnnnnnnnnnnnnnnnnnnnnnnnnnnnnnnnnnnnnnnnnnnnnnnnnnnnnnnnnnnnnnnnnnnnnnnnnnnnnnnnnnnnnnnnnnnnnnnnnnnnnnnnnnnnnnnnnnnnnnnnnnnnnnnnnnnnnnnnnnnnnnnnnnnnnnnnnnnnnnnnnnnnnnnnnnnnnttcattttttaatcagacccgttattattccaaatggtgacagggtatcactcccttaaagttcttggcttgttcaacctgggtctcacctggagcaagcccttctggaaggcagggactgccacctcgttcacgttcatgcctcgtgtctttcatatactaagcctctttatcaggcgagaacacaaaacaaacgaggtggaggatgctcttccccacctgtgctgagtcttacttagaacacattatttcagaaaatcacgattttaggcagggtgcttgagtctttagatattaaggcact

SEQ ID NO: 421334 - DNA, 130 bp, Homo Sapiens
gctcggtaccaccttccagaatctcccatcaagcagctttttgcatccttggtccatgtcccattcctggccaggcatccctactatggtacatttttcagcttttctattaagggttagggtggaaggt

SEQ ID NO: 421335 - DNA, 651 bp, Homo Sapiens
ggatcgagctcggtaccgggcgtcattcttgcgtcaggggaaggatgagaatcgcgtagaggcgaggatgcactagagattggtgaggagggagaggggtttctttatgcaggctgcagcccctcatggtgacacacacacgccccacatgtgaagtggatttatagacatctcccttctgttccagcccagcaaaacgtccactttacttcctctctcctatccccacggagtccttccctctcactccccacccatttccaggtctgatcttggggcatcttgactaaaaggtagtgcaaacttaatagtttgcctgtttggaccaaatgacttcctgacacatgaaggcaggtgtaccccccttctcccctggtctgaaattttatttgaggtgcttgcgcaaaaatctcgcacgcttgctctttcttgggtcagaaggaactcacctagaagcgcaaactctccaggtctttcggttctggagtcacctgaggacgggggggcggggtgcaatgaacacacatagtgatcctttaagacccaatcgtcctctcgagagtgaatatgtgcctttatcttcttagtccccggttgacgtacacgaagagagggaatgtctcagagatagctgggggaacagggggggag

SEQ ID NO: 421336 - DNA, 537 bp, Homo Sapiens
ctgcactctgacatgtctgaaatagcctgcatcagatgcatgttaagatagtccaacgcagcaataactgcagagcatccaatgcaacttccatcttcttcagctctatctggccagccactctaccaggtgtctatactttggtcaactttaagtaaaagtggtctgggggtgggctcccttatgtagctcatctacttctctcactgttccagaggcctttaaaagctatgtgcagtggtggggagtttgccaaatctctaccctgcccagtgaatggatgtacattaacattgtcaaatgtctaatcagcgaggcagctgcgttttgctgaaagtggctccaaaccacctgattcatgtcttccctataaaataaattatgatggcccttgtcaggtgacacctgttagaagccttacaaagcatttttcctgaatataaaacagtctccgactctttttataatcttctggtgcagggtttaggacattctgctgcatctggcgagggtatacacaaacctattccttaagtc

SEQ ID NO: 421337 - DNA, 539 bp, Homo Sapiens
  misc_feature (447)..(447): n is a, c, g, or t
  misc_feature (488)..(488): n is a, c, g, or t
ttgggaagcaacgctcctgggcctgttacctctctctcaagccctccccagcctctttcctctcatcacagccacacttctggaaaaatgatgtctgcattcactgtcttcccttccacccattagctcattgcaggcggttttctacccacaccctctccagagtcaccggtgacttttttgttgccaaatccatcctcctctgctgttcccatcgtgttagtccactagagaatatctggcatttgtgtttgtccttttcacacattgtctttgggctcctctgtcctcagccaggcaggaaagggcaaggggagtgccatgttctccagatgtcttgcctgcccctctgacgtcctttctgtctcctttgtgagctcctcgtcctccacttgaccctccttcatggggacatctccctgggaaagagatgcatctagaaacagnccaatagtgtttcctccccaccctgtacatccacgtctccnactgctactggacacctccttgtggacgtcccacaggtatctcagactctg

SEQ ID NO: 421338 - DNA, 558 bp, Homo Sapiens
  misc_feature (207)..(488): n is a, c, g, or t
  misc_feature (538)..(538): n is a, c, g, or t
gggtgtgtgggtgaggacatgttatgcagtggctgagctttagcttatgttgcatctgtaaaagtgaggctaacaagtaatgtctatggtagctcagtgtaattgtgatgatcaaatgagatgaagagtcagaaaatcctggcaaagagcatagcctgtaaaagagactcagtaaacatactgtggtgagaaagaaaagaacttttnnnnnnnnnnnnnnnnnnnnnnnnnnnnnnnnnnnnnnnnnnnnnnnnnnnnnnnnnnnnnnnnnnnnnnnnnnnnnnnnnnnnnnnnnnnnnnnnnnnnnnnnnnnnnnnnnnnnnnnnnnnnnnnnnnnnnnnnnnnnnnnnnnnnnnnnnnnnnnnnnnnnnnnnnnnnnnnnnnnnnnnnnnnnnnnnnnnnnnnnnnnnnnnnnnnnnnnnnnnnnnnnnnnnnnnnnnnnnnnnnnnnnnnnnnnnnnnnnnnnnnnnnnnnnnnnnnnnnnnnnncgacaataaaatgctactcgcaacccactagcttgatttcattaccctcntgaaggtcacatcagcagtg

SEQ ID NO: 421339 - DNA, 152 bp, Homo Sapiens
aaggcagtactctaaggaggctagggttatccctaaatttattcccctgagacagacttctatcaagaaagcttctttatcatctgtaatattgaacctctatcctctctttgggggaatataagtaataattgactatgcaagaatggact

SEQ ID NO: 421340 - DNA, 424 bp, Homo Sapiens
gcatatagcaatatttacaattaacaaaaaggcagcaccgttgcagtatttaggggaagagttagcttggaatgtactgcggccctcttagtcaagctacgtgtcaataccaggctatattttctgagatgcactggacaagccagacggacttctaatgatcgtcaagcaccatatgattatgagagagggcaggaggggagcaccgcgggagagaaggagagagagggaatgagggtatgctgagatgaacggcagtttatctcccagtttctgaatatgcttagcattccatcataatctgcatacatgtggaatttaaggccagagagaacactggaaataatgttatccaagtccctgtaaggaatctgaggtccggagatgtgatcatcccaacatctcacaactatccaggaacttt

SEQ ID NO: 421341 - DNA, 180 bp, Homo Sapiens
ggtcatacaggctcttgcacaagttaaatgtgaggggcccggacccgtcaggcatggttcagcaggtggctgtgtgtctcatcacacactcagcagctgaggtcttttgcggagtgggggttaggtggagagctactgaaataagcatggagaggcacccccctcacctcctgctgggtt

SEQ ID NO: 421342 - DNA, 196 bp, Homo Sapiens
gccacttgttaagaagtcagcgctgagcaggcagctgcaaatatagcgtactgccgcgcggcaaggtttcatgcgatagcctgcacgatcaccccgtggccgcccactggccgtgcgccagattatcggcccccagcagctccagcgtctgcagctgcagcggcacgccctggccttgcgccaccaactgaatatg

SEQ ID NO: 421343 - DNA, 564 bp, Homo Sapiens
gagctgggcagcacgatcgctgccagtgtggtagctgcgcctgcatgaaggggagagcgatctgaaccggctgcgcagccggatccgtcaggatctcagccacttcgagggcaacgcccaggcgatccgcatggtgtacagcctgctgaagctcaacctgacctacgcgcaggtcggctgcattttgaaatacacccgcccggcctactgggcgagcgacatccccgccagccacagctatctgatgaaaaagcccggctactatctggcggaagaggctttcgtcgatcggctgcggcgcgagctgcacatgggcgagttcgatcgtttcccgctgacctacatcatggaggccgccgacgatatctcgtactgcgtggccgatctggaagacgcggtggagaagagcattttcaccgtcgagcagctgtatcagcacctgattcaggagtggggcgaagtggcgccgggcgatctgttcgacaagaccgtcgccagcgcgtttcgcaagatcgatcggggcggcgcgcggcgcagcgcggaagatcagttcttcatgtatct

SEQ ID NO: 421344 - DNA, 652 bp, Homo Sapiens
ttagagaggcacatcaggaaccgctgcatgtcagcatggtcagcggagggccagacagagctgaggaaggggctggaggagcctcacacttgtgggagacccactgctccaggaccaggccagcagaggtggacgtcctctctccagcctccgacaagggaggactccagtcgtttctattggatccagcccacgcagaagccagagctgagttgagcaatgaaactgatacttcctttgcagagaggagcttctatttaaattatgaagaaaaagactcagaagaccaagtcctccctccacccctggaggagagaaaagggcgcctggatgcccctcccggaggtgagcccaggccgacgctgaattccttagacctgagggtttctgctgctgcttccagcaggagcaaggacgaagcccacatgacttccccaaaggaatgggcagggacccccaagaaccatggaggacctggtgacctgaagggatctcccgcaggacagacgtttgctgaaggctgggaagatgcccagtggggagtggaaggagagtttccccacctgacaggcagcgccagccgagaggaagggacccccgtgagtggagatttgctgggaaaggctgaggaaagtccacagaggactgaaga

SEQ ID NO: 421345 - DNA, 438 bp, Homo Sapiens
gagtactacgtatgctcatgattcccaaatatacttctcagggagctctgtcaccaccctgaaactccaaatttaaatatacaactaactacgtgacaccttcactttgatgtagaatatggatctcaaactttacaaagtcaaaacagaattctcagctcctctttccccagcaccaattcatttttccccagtctcttccatttcaaactgtggcactgctgcccactccagttgttgcttgagccaaatatctagggattaccttcgattttcctttttctcttttccactgctaaacaaactatcagtccattttattaatttttaccttccaaagcataacccaaatatatttacttgtctccatgtctactaccagcaccctgctctaaatcactgctatagtttcctccatttccagttcgccccagcgag

SEQ ID NO: 421346 - DNA, 295 bp, Homo Sapiens
ggtctgtagatgtcttatatcagaatcctgcggcatttggtagtgcttcttgagactatggtttcgtgagcttcacaagtattggaagattctcatccattatatgtttactgtttctgccccattttttcttctccttcctgggcctccaattacatgtcagtggcacagtgtatgttatttctgtctcattgttcttcactcaggatgctttaattctcttatctgtatctaatctattcatcagcccattgtataaagttaaatttagttactatgtttttctgttctacaa

SEQ ID NO: 421347 - DNA, 614 bp, Homo Sapiens
tcatctgcattacttaatcttccttcacggctgattttgatctgaccattatcagatactgctaaggtgtctgcatcgggctttctagtctagtaatgctctgtcacgtgctgcttctcatactgctttaattattaaagcttcaccatacattttagcatatgacaaggaagtcttttctcatcactctcccttttcaacatttcttatgtattgttgcaggtctattcctccagatgatccttagaactgcgtatttcaagataagttctttgaggattataattagatatacagaattctgggaaaaatcagcttctttaaaataatcatttttccttctggggctatgatatttttctggatttatctcagtgaccttgagattctcagttaggtttggtagttatttttatatatgtctctcattttttcttaggttttcaaaataattatttatctccaaataatatttttgtacttctcattccaataatggtatatttcccttgattcactccctgttatatttagttttctatttatttatcatgaattcaatcttaaactctcctgagtttttgcaacttttttttgactctatgcaaacttga

SEQ ID NO: 421348 - DNA, 536 bp, Homo Sapiens
ggcggtccatgctgcttatgtttaacttccagattaaagaatggcaaagttacaatgcagtccctggggccactgtttaggaaaggtgcatttctttcactttcaaccacggtctacaagatgtggctacaaggcaatccttccccactggcaaaaggacgtcatcaacacagttgtccctttctgcgatggtaatgtctcgctttacagactcgacaggtgcagtgctctaatgcggcccgggaggctcctttgtagaatggatgagtctgccaactcctgtctgcagacactttgaagtcccaaggcagatgaggctgcaaatggaccaaacactgaacaatgctggccgtcccgtgtgtggctcagaaattaagagcacacaccagataagtgggcttattctcctgtgagagcacaggcagcatgaacacaataccgaagagtgttcctttcagcggctccttgagtagggcttttcccctgaggcattcctcctggtggcacaatgctcacctgtcatttccacctgtctg

SEQ ID NO: 421349 - DNA, 603 bp, Homo Sapiens
agagttagagccttggtagtacgtctaaagggcctgtgactggggagacttttcagactcctcatagctctagagggaactcagcagcacaggggtataggcccatccctttctcttctcaccacaactccctcccacactgtgagggttcctgcagacacaagtgtgaacatcccagcccactcctagacttgggcaagacttaggcccttattatctgccaatgaccaccctctcccttccactctatcaagaagttcacagtgccaaaggaatgttcccacctggagccagtgcccttatctatagaccatgcttgggtaactgggctcatggaatggtctatctaatggccgtgaacctacctccggggcctgtgtgggcctcctcctagtttcatcctcccaactgtatgcccccaaaccctagcatagccaaaatgtagttgtttgcaagaatgtagacagaatgaggacaaacaggctggtatgttctcatttgtggataatgatcataaagattactaaaaaaggagacataagctcggttcaaaatgacagaggtgggaactctagggctctattcatccagaagagcaataag

SEQ ID NO: 421350 - DNA, 349 bp, Homo Sapiens
agagcattggcctactctttttatcccccactcccaccttttggggcatggggggcggttgcattagtgatttcgcaggtttggggtcttgctcctgacactttatctccatgaaaagcatacacagcagtgagcaccgtttcctgtttgcagcgcgggcattaactaaatcacaccctatgcagcagctacggaatgcacgagcatatggcatagtgcaaggatttcccgaggactcccagcagcaacgctggcctgctgcttactatcaaaacctgtcactctgtgcttgcgggtctctctatttcccactggcccaagcccatctctccatattaacgtacagcgc

SEQ ID NO: 421351 - DNA, 173 bp, Homo Sapiens
caatggcatcatgatttctcccactaatcttcagacggttaataggatgcactttactcctgtgactagctcgtgttccagtacacggacagggagacacctgggtttcctaaccaaatctgagaacctctggaactcgatttgtcctggctgttaccaaagcggggtcagaa

SEQ ID NO: 421352 - DNA, 420 bp, Homo Sapiens
ttgcaaagttgggccagtcggtcgacacacaggttcgtggagtggcgtgctgggcatatgaggtggagaaactctccgtgattgctgacggacaccactagcccattctacacccttttgggatagaaagaggccaccccctcctccagacagacacagccttcatacagcttggccaggaagccacagtctagatttcactggctcactggggcaattttgtatagagtacaacgtacccatcatccagagaagccctgatcactggactaactttgtgcacagaaaacaggcttgattcccatctactgtggtagatcttccgcttctaactcgggtcacatttggttcacttcacccctaagatcgggacggcacacaagtctcatccccacaatcattttggatcacttggaagag

SEQ ID NO: 421353 - DNA, 496 bp, Homo Sapiens
ggatcgagctcggtaccgacgtcattctgcattcatagagtactaactgtatgttattttagtgtgctcaagtcgtgtaacaacacaccgatattctatatgacttaaacaacagaaacttattttccctatttctggaggctaaaaaattcaagttcatggttccaacttatttgctttctggggagggctttcttcctggcctacaaccagccaccttctcttggtgtcctcacatggcaaggagtgagggagagaggaaggaagagagtgcaagggagaggctatgcactggtatctcttataaggacaccagttctattgtatcagggccctatgcttatgacctcatttagccttaattacctctttgtaggtactgtctcacattgggggttaaggattcaacatatgagttggtggtggggaacacataatttagcccatagcactctacctctaacccatcctgcctcagaatatctgtccttatagc

SEQ ID NO: 421354 - DNA, 412 bp, Homo Sapiens
cgactgtgtactgatgacattccgaagaagattctcccgttatctttgagttctcacttttccaactctcagctcattcctatttttattgttatacctgtcaccaaaatccacatggtggaaaagaatgatcctccattttgggcaaggaggtttaaaggatcttcctccatgatggctttcatcacagttgacccaaagctatagaacaatacttttaaacccccaccaattctttcagatgatgcacaggagccatgtgtcttactgaacagaaacctctcacattcatccttccctgaatccaagctccagactcaaggtctgggcatgtacctccttctacggggtgtctccatctgttgaatgtccttgctcaacatgatggtaagacggaaatgaccttttgttg

SEQ ID NO: 421355 - DNA, 171 bp, Homo Sapiens
tgtccgggacgggtacacgaccggctactacacacggaccctttttctactggtggtttttaccacacgtaacaccttctactttggacacgtacgttttacgactttaccgactgcaacgacacgggaccggtctggggactcctctacgacgtcgacccgtgcacggca

SEQ ID NO: 421356 - DNA, 175 bp, Homo Sapiens
ttctagatgttaaactactcaacaataaagttacatagcatccggttcacttgttctgggcctaatctatggcttgagattctaaattttttagctgacttttaaattattttcttagttgtttggtacaccttctcctcttttggctatgactaaaatcatctgaagcctctgg

SEQ ID NO: 421357 - DNA, 560 bp, Homo Sapiens
  misc_feature (320)..(507): n is a, c, g, or t
agacgtcattctgctcacttcttccacgatcccttcctgcttccctcgcacttctcttgagaacccttcctcaacagatcacactctccaattcccatctcagactctgcctctagggaatgtaacctaaggctcagggtcaacattcactggggatacccaactggccttgcagaaatggaagatggaagatagcttaatggcgttatatgagttatggaagggatgtctgacctgctttctctttaaccatcgtgaggaaggaagacgatgaggctctcatgcttctgtcttagggctttttgggtttgtagcttggnnnnnnnnnnnnnnnnnnnnnnnnnnnnnnnnnnnnnnnnnnnnnnnnnnnnnnnnnnnnnnnnnnnnnnnnnnnnnnnnnnnnnnnnnnnnnnnnnnnnnnnnnnnnnnnnnnnnnnnnnnnnnnnnnnnnnnnnnnnnnnnnnnnnnnnnnnnnnnnnnnnnnnnnnnnnnnnnnnnnnnnnnnnnttactgatattattactattagtatcattgtcatgttaaaatgcagctacaga

SEQ ID NO: 421358 - DNA, 376 bp, Homo Sapiens
gtaagacattgcaggcataggagtgaattagctcttgcagggcagaccacttgcaaaagcatgacgttggaagaaaaggaaaggcagacttaggacagaaccactaagaatgtttacatatcatgtttattcagcaagatatagctggtgtgtcaaagcctccatctagaattgtgcatatgctctgctgcatatattcctatagaaacagcaaggcagccctctcaggggagttgaccaacagtcagtcttacaagccaaggttaggatgccatgtctaccttaattaataatcctttcatcgtcctacaacccagatgacaggatgcttaagcatgtgagtcagaaccccaaaggtaaaatcctgcagaagctt

SEQ ID NO: 421359 - DNA, 507 bp, Homo Sapiens
gagtcatcctctaaaggtgaccggacgatcttaacgcttgagcgatgggtcgtcaagttatgcatacggcgcgagtgggagttcatctatgagtctgctcctgtgaccgtgcatacacgttggctcggcagactcttccccctcctgctgctgcctccattatcaccaacactgcaaaatgttctctctccaatggaacattccccccattcccgccacccctttcacaccctgctgttcgtgaccaagaacacccatttgctttgatacatcttgctgtggcatgtcaagaccattgactttcctgaaacctggctcaatggattcctatgcattttccttccagggttttaatgcaaacattttcattgagactggaaggaaatgttcaaagcaaacaaacaaaaggctttgccagccttaagtgtgctgctccctgaggcatcaaaagcagcagcttcggagagtctagaactgaagagtgtcttctacatctccctctcctgc

SEQ ID NO: 421360 - DNA, 560 bp, Homo Sapiens
tgtctgtgtgggtggagcttgtcttcttgtgcgagaatcagttttgggtgggagggccacaggacgagatgagccagtttctgtaaggtctgggtggcacacagctggtcatcagaatacagggtctgaaaaatacttcaatacctatctttggttcaaagaaccaaaggaaaaatacttcagttcctatctataggagcaattgaggaggttaagaatcttgtgatccctgactgcatgactcctgcaccgtaatttctagtcttgtggctaattgtgttagttttacaaaggtgatctggtccccatgcaaggagggggtttgttatggggaaggggctgttacctgtttcaaagttaaactataaattccttccttagttagcttgacctgtgcccaggagtgaacaaggtagcctggaggttagaagtaagatggagttgcttaggtcagatttctttcactgccataacttcctatgtcagattttgcactgtcatgatttttgcaaacaggcagtttcagtctgtctgcttctacttgttagatccacgcttct

SEQ ID NO: 421361 - DNA, 192 bp, Homo Sapiens
gacgactctcggggtcagaatgtctggttgtccagcagactcgccgcgcgctccaaccctggataatcgcgtagatcgattaaagacacgcaagagggtcgatttgccgcagccggacgggccgatcagcgcggtaacgcgattggaagccagttcgatattgacgttgttcagcgcctggacacccttgta

SEQ ID NO: 421362 - DNA, 520 bp, Homo Sapiens
gccagcctgtcgctgactcagtcgtcctgccacttgccaggtatgtgattaagtactatttagggtagtattacaaatggtatgatatatccgtggtggcttaggcttaaccagcaaagcaatccttgttgacgtggtaatcttgtctgcttttcttaccttatttcagttatattgtgtgttagttgaacaccagaggcctagttttgctgaattgctgcataatcacagagtttgggggtcactcaattcatgcttctgggtcccagttccatatctagaggttcaacctgataatttgaaaacggatgtactagtaaaacctcttgtagtgcataatcagttttgacaatgagaaattaatgcctgagaagcgtgtatatgtaaaatcctccctgtccacttttcatcttctcctgtttcgtaaactcaaaactaaagacacaaagcatgaactcatgtaagtgcagagatactggagattacagagaatcacctgcagagcctggggcagggattg

SEQ ID NO: 421363 - DNA, 241 bp, Homo Sapiens
  misc_feature (158)..(158): n is a, c, g, or t
cggttctaaatcagaactcggatataccgggagcaatggccgatctggctgggtgttgcaagcatagtcagtggcgcaaatacactggcggtgccgaaccgcgagcaatgtcgccacacattttattttttatggcggcgcaactttctttgtctccngcaggagcttgataaaatcatcgataaaatggcatcgattggtgcaaccattaaataaaagcacttggacagcataactgtag

SEQ ID NO: 421364 - DNA, 216 bp, Homo Sapiens
tgcacactacagagcgtggtgtcaggggccaagatggagggaaggaccactcctggctgcagcatccaggaaggcactctgcagtccttccttctaggttctcggcatatgctccatgcctgtgtgactgctcagtctgccatgttccggacacttgctcatcttccttatctttctctgtagcatgagaaatgtaagtttgccacagtcttcgcc

SEQ ID NO: 421365 - DNA, 199 bp, Homo Sapiens
  misc_feature (122)..(122): n is a, c, g, or t
  misc_feature (153)..(153): n is a, c, g, or t
cagcaatagtcagggcgcaaatacactggcgggccgaaccgcgagcaattgtcgccacacattttattttttatggcggcgcaactttctttgtctccgcaggacgcttgataaaatcatcngctaaaatggcatcgatgtggtgcaaccatntaaataaaatgcacttgggacaggcattaactgtacgggggatcct

SEQ ID NO: 421366 - DNA, 189 bp, Homo Sapiens
tacttcatcgagctcggtaccagtatggctgtatggattggtagtgatggaatcaactggaagtggtgtaatctgcaatgatttggcaattacaacagtcagtcttcacatttgggacccatgaagggaggacactttggaggaataagctgtgcccctgtgacagtggaggccaatactttgcttctg

SEQ ID NO: 421367 - DNA, 264 bp, Homo Sapiens
aagatcgagccggtaccggatcagctggcatctggactgtggactagtgccattattttgcctgaccaatgagatatttaggagagtatgatacaagcacagtatggaaatgtaacttcttcaacactggggctttcttttctatcaggagaagaatgacaaacatgtggccctagcaaagcccaccagtcaagcctactttagaatagagccccccaaaaatcaacagacgtatacataagctcagctggtacaagctgatgc

SEQ ID NO: 421368 - DNA, 353 bp, Homo Sapiens
cagaagacaaaaggcatgactacatggtggcaggcaagagagaatgagagccaagtgaaaggggtttcccctgataaaaccgtcagatctcgtgggacttattcactaccatgagaacagtatgggggaaaccgcccccagtattcagttatctcccagcaggtccatcccacagcatgtaagaattatgggagctacaattcaagatgacttttcggtgtggacacagccaaaccacatcactgtgttggacaaagggaagataagcatgttgctaactatttaagttatggcttagagaaaagtattattagaatggctatttaaaatttagtattatgaattcatacata

SEQ ID NO: 421369 - DNA, 424 bp, Homo Sapiens
  misc_feature (397)..(397): n is a, c, g, or t
tagcggtggcgtacactacggcgtcggtacgccgtacgcggttccggcgggtgctggtggctactgctggtggggctgctgcggctctagtttttggtgccttcttcgactactggccccttagggccaccagccggttcgcgggggcaggcctcctcgggcgcggcgggtggctggccttccgggtgttcgtcctgtaagctggtttccggtgcgacgctcgtacgtacgggtcgtggtgctggcgtttccgtagcgtacgtcggactgcggtagtacgtacggctcctactccctcgttcccttccgcctggttctgtacgggttgtccggtcgccctgatctacttcactccactgcccacgtcttcgcctgctgaggctcctctcgcgtcgcnctgacggactgaacgcttggacctggc

SEQ ID NO: 421370 - DNA, 185 bp, Homo Sapiens
cacagaaatggctggaatagtgaggtcagatacgtgcttacatattttttgtcagagaacgattcttggtcacctttggcgctgtatgaacggtggtagtggcatggtatcggcagagctgcaacggtgtaatcaatagaagcttaaaaatgccaaagagtgtgttgataagtggggatctctaa

SEQ ID NO: 421371 - DNA, 581 bp, Homo Sapiens
acaggaggttaaagatggcaggttacaggtgaaacgccctcatggatcacactgaggctaacaatgtagactctttccaaatagaccatatccctgggaatatatgtcttgtgatgagaggatgactaaaaatacctgggaaggcccggagcagggcccagggatgcaggattttctgaaggatcccatgggattggaagaaaatgctggggccgcccatacgctgctaatgccctggaggcagaatctagtgggagggagcgaccttgctcaattaagctgctgtccctcacactggctgcgatgtgagcccagggtcaagccggactgtgctttcagagcaggcccctcaaggcccagagttatgggccgtggtaagtgtgtgtgtgctggctttgatctggttgtacctgttggccatctctatgggtctaagcatatctgggaaacagggctttcgactgtgggttgtaagttataattagactaaccaaaaggtcttggttggagactaggccctccgagtgactccagcagtaactttggaaggactgtcatttgcctggggtgcacagttcctc

SEQ ID NO: 421372 - DNA, 171 bp, Homo Sapiens
acccgttatgtattgttgactatcggtctcgtgcgtatatatagcctaatggagtatacacccgcttatgggctgcattcccaagcaaccgactccgggaagacctgggcctggcgcgccgggggccgctagcggcctcacacctgtccacgggcccgtcacggggtgttg

SEQ ID NO: 421373 - DNA, 399 bp, Homo Sapiens
  misc_feature (311)..(311): n is a, c, g, or t
ctggcgtcgggtacaacggcgggactggacatcagctagaggagagagatatgccgtgatccggcagtggaatcaatgatcagaatggagaaacatcatctctctagagacagagggtgccagaaagagacaagttcccctgtggggtatagaattgttactggaacgtggctcctagccagtagcaacaggttcccagccttccctgcatccggcgtggccatgtgactattctcaccaatgaagggtgagcattattgatgtgtctctcccataccaaagcagccaagaagaaggtgtgcctcctccancctctcccctcttccgctggctaagcagagaagactgtgagagccccagaggtataaaagaggctccaggatccgtagcgaggtgttg

SEQ ID NO: 421374 - DNA, 139 bp, Homo Sapiens
gctgctgggtgccgccgccgtacctgtccttcgtggtggtctctcgaggcgcccggtgtgcaggccggccggtggagggccgcccttggtccggcctggggtcgctgggggtgcgctgctctggtgccccggcccttct

SEQ ID NO: 421375 - DNA, 471 bp, Homo Sapiens
agggtggaccatgcacactgagcccacaccaagacgtattcgggaactgctgctgggattcatgaggcacgaagagctaaattcactgaggacgctactggcggctttcctcctcagcatctgtccccttcccccttccttcctgacatcagtgaattccataccagggaggccagttccccagccggcttctggaagaggcatgtccagcacccaggctgagccactcggtgcgctctgcacccgggtcacagtgactggttcagagttcaatacgtggctggagccagaccgaaggagagtgaatccaagatttgctatgacaaagatgctgtccttcctgatgggtgtgacccagccagtgtatataaccctgggagcagcggggcagggcctgtggtatcccatgaagctgactctccccaggtagggcaaagaaagaggccccagatgccgaagcggggtgttgcg

SEQ ID NO: 421376 - DNA, 203 bp, Homo Sapiens
ggcattcgcgggtcgtgcgtcggaataggcagggaacatctgcacggtgaatggcaattcaaacgccttgcccttctcggcggcgtcaactgctccagataccaggacttgggcgtgcgccagctggatcttccgtcggcgtgacgctggaatagccctcgatcagcgccgtcagcaattggcggcaggcgcggggtagagcg

SEQ ID NO: 421377 - DNA, 154 bp, Homo Sapiens
gagacgggtccggagtggacacatggagagggctaggcgatcagtgaatgtcctttaaacagaaacattccccatatccccttttcccacatggttgacatgccgtagcgcaataatctcacaaacttgattatcccagaattaagctatgcag

SEQ ID NO: 421378 - DNA, 189 bp, Homo Sapiens
cgctgggacgtgaatggcaaactggttgatccagagtagccgaattgatgcaatgaaccaagctgttgagcgcgcttggtcatgtttttgcgcgtttcgcgcacgcataagacactttgcagaggtgtgccttgcgggaagtgccatacctgatgcgaaatcctccggttcccagtcactgtgatcctg

SEQ ID NO: 421379 - DNA, 255 bp, Homo Sapiens
tttctggtttacttgaatcgtgtctggttgtgaagccgcaccggttgtagttggctctcttggtgatggaaaacaccaccactaccctgcaggtagtttctgagggtaccccgtccttctgggaggcctcttctctcgggtgcactggggctgtggccacctggtgcttcactgagaccaagattgggctgcatgcaccagcccctgcctgggaggcaccgaacctttttgggcctgccctggagagcagtgctg

SEQ ID NO: 421380 - DNA, 302 bp, Homo Sapiens
ccttctacacgtgacggatcgttgctgcatgggggcctcctacaacaagcaagaggcacgacacctagtgggtctaattggattctgaaggcaacacatttctcatttgcctgtgttactcccgcccacttatcgagtgacctgaaaggctgacagtttagaatggggtccagaaccggagaaggctatgcgtccggtccaggctgctgtgcaaacagctctgccacttgggccatataactcagcagatccaatagtgcttgaggtatcagtggcagatcgggatgctgtttggagacttt

SEQ ID NO: 421381 - DNA, 337 bp, Homo Sapiens
  misc_feature (186)..(186): n is a, c, g, or t
  misc_feature (211)..(211): n is a, c, g, or t
  misc_feature (243)..(243): n is a, c, g, or t
aagtgagtcgggacggtagctgtctcactaaatttagagcagatggtttgggaagaggcaggatggttttcaatctacttacccacctatttccattgcgcagtgcctcacataactaatcacctgtaaagcgtcctcacctgcttttgtttccagaactctatcaccgtctgggatgtttgagcnctatcttctgcagtctgtactttcntgcgctcagattcctgggctatgtgattcccnatcttaatgctagatcccgagtttaagctccagtatttcacgagaagctctcagccgtttctggtaacaccatgcagttactctcacgtttcta

SEQ ID NO: 421382 - DNA, 385 bp, Homo Sapiens
gacgtagtgggactgtatgattgtcctcctcagtactagacacttcatccagagaggactctgagccaaccctaagggattcaggctgtagctctggttcgccgcacggaggtggcgcaggaatgcatcggcctcccctgtcctgacttgtcagcgctcctgcgctcatgcctgggagcctggaccccagctctgtcccgacttgttagtgctcccgcgctcatgcctgggagcctggaccccagctctgtcccgacttgtcattgctcccgcgctcatgcctgggagcctggaccccagctctgtcccgacttgtcagtgctcccgcgctcatgcctgggagcctggagcccagctctgtcccgacttgtcagtgctcccgtgc

SEQ ID NO: 421383 - DNA, 397 bp, Homo Sapiens
atgctggtggcttatgagctgggctggctgtggggacccttcgcttacaggcaaggtgtccctttgcagtgggcggagatctcaagagaagctgaaatgggggcagagcagcctgactcaaaggtcctgggggaagggggattgagaatctggttgcctgatgggaagtagccaattaggagggtcctgaggatggacgcagagggtgggaggtggagcctgcagaggttccccagccacatgttttcaaaaccagctgtggtctcgcaaggcactggcaggcaggcgcagggctctgcaggtgtgcaagaggttccaggcagctgctgggctcaccctcctaggaagacatttgtcccaccatcccatgctgaaaatgacccaaggcagggacccc

SEQ ID NO: 421384 - DNA, 460 bp, Homo Sapiens
cggacacaagttagtcgggacgctatgcaatagccatcagatctcccggatcctcaccaggtgatggctactgttttaagaactttacctaataccttcaacaaccgcatgagtaggtagcattaaccctatttgattaatggggaaagtaaggcttagaagttatgctgatttgcccatgatcctacagccagcaagcagttaagcttgctgtagaatccagggtgcgtgtcaaaagtcaacctcttcccatgtcacttcccagcctctccaaacttagaagctctgcagtctagattgttctcagagattaagctttacaactttattgtctctcaaatctatttccttctcttaattcccatagctacctgctgtttgggtgatgttttgcttttattagggcctccaaatcagcatagcacaacaactccagaattttactttgtttgaattccca

SEQ ID NO: 421385 - DNA, 213 bp, Homo Sapiens
  misc_feature (11)..(11): n is a, c, g, or t
ccacagagtanaacatatcaagtctcattggcttcatgcaataaaaatgtactccaatgaagactggccagcttcccatggagagctggctttttccatcatgctgtaaattataccatctggaatgcgtggtttccaagtttactgagagagaagggggctggtgaatcaggtgggatgcttttaagggtagggcctgagccaggcacactg

SEQ ID NO: 421386 - DNA, 432 bp, Homo Sapiens
caagtagtgggacgaccctgctctctggcgctcacaccagggcatgtcaacaaatacacaagaaagaaaatgaatgaatgagtgaagaagcaaaccaggaagagtgaacaaggtgccctccaaacacctcagagatgcaaatcctacagagaaacatcttcagggggtgactggggagggatagttcctactaaggtccctggaaaggcctcccagaggaagtggcgttgaggtgaaggtgagatgaagccagtaacaggatggtctgcggggagagcaggcctgagagagcagcaggcaatgctgaggccactacagggctggcttcagggaatgagaatagaggcaaggtggcagggcctcagcagagtgagaccagggagagtgggaggtgatggggccttgtccgccacagatttaactccgtacttc

SEQ ID NO: 421387 - DNA, 426 bp, Homo Sapiens
  misc_feature (68)..(136): n is a, c, g, or t
  misc_feature (207)..(261): n is a, c, g, or t
cagaggtggacggcctctaggagccgtgagaggacctggcttacagccttccagcgaggacatggggnnnnnnnnnnnnnnnnnnnnnnnnnnnnnnnnnnnnnnnnnnnnnnnnnnnnnnnnnnnnnnnnnnnnncagaaccggcagaaaggaacgcaacctggtagatgcttcaatttcagccctctgggacccggagcaaagannnnnnnnnnnnnnnnnnnnnnnnnnnnnnnnnnnnnnnnnnnnnnnnnnnnnnnacatggcacggagttggtgggcgcctgagagagctactcagctgtgaggtccttcccctggacttgagcacaggccttctggctcagggtgctgagggatggtgctcccctgtgaggggggtgcccggggcaccccagcctccctcaggaactcccaggcccctc

SEQ ID NO: 421388 - DNA, 135 bp, Homo Sapiens
cacagaaacatcacagcggtaatcaagagaactgaactaacaaaagccacactagcttggactaacatggacacagcctgttcaaaacaaagccactgggctcctaaacatttaatggacaggaaataggctgag

SEQ ID NO: 421389 - DNA, 257 bp, Homo Sapiens
actgtccccagtaatcctctgtccttcagccagccaaacagtccccccagactccagcccaaggtgattaaagcaaagacatcagggggtccgagggtcagaaacatagatgagacctactagttccccaaacagaccctgaatcccagttagggtccatttaactgcaggcaagagtgacacctgcagctaaactctgtgtcctgagtccctttcctacagctgtcttgtgcttgaccccttcctttactatatga

SEQ ID NO: 421390 - DNA, 229 bp, Homo Sapiens
  misc_feature (166)..(174): n is a, c, g, or t
tgtgtaagcctggcctgaatggcatttgggaatgtgatggtttcagagtccttaacgaagtacgatataatctcccattctttattacatgtctatgattgtgtcaagaagtcattattgccattttatttactttcatggtacaaatagccatgaattataagcnnnnnnnnnctgccagcctaaattgttacttagtgaagatgagagtacaactgatggactttga

SEQ ID NO: 421391 - DNA, 217 bp, Homo Sapiens
cctttgtggttctctctgtgaagtgcacattcttttaactgtattctcccatgagaccgttgatgttcacagttcctgataggctctgtggttccactgagcatcacatttggccattctttgccctggctgagagtacactcagtgccatgtttgatccaagaggacccggtgaacgctaaccatattcatttcgtccaggcaagctcttggtgat

SEQ ID NO: 421392 - DNA, 418 bp, Homo Sapiens
  misc_feature (57)..(78): n is a, c, g, or t
  misc_feature (90)..(371): n is a, c, g, or t
cccgggcctcacgccatgtccacaagacagagaagagaaacttgctgggcactgtgnnnnnnnnnnnnnnnnnnnnnnaaattaagcccnnnnnnnnnnnnnnnnnnnnnnnnnnnnnnnnnnnnnnnnnnnnnnnnnnnnnnnnnnnnnnnnnnnnnnnnnnnnnnnnnnnnnnnnnnnnnnnnnnnnnnnnnnnnnnnnnnnnnnnnnnnnnnnnnnnnnnnnnnnnnnnnnnnnnnnnnnnnnnnnnnnnnnnnnnnnnnnnnnnnnnnnnnnnnnnnnnnnnnnnnnnnnnnnnnnnnnnnnnnnnnnnnnnnnnnnnnnnnnnnnnnnnnnnnnnnnnnnnnnnnnnnnnnnnnnnnnnnnnnnnntaacaaataaagcccctgaagggaggcttctctgggctgcaggtgac

SEQ ID NO: 421393 - DNA, 422 bp, Homo Sapiens
gaccgttggatcacagctcatccgaccccgcgtgtaccgcgagtgggttcacagcctcatcccgaccccgcgtgtcaccgcgagtgggtcacacgctcatcccgaccccgcgtgtcaccgcgagtggattcacacgctcatcccgaccccgcgtgtcaccgcgagtgggtcacaggctcatcccgaccccgcgtgtcaccgcgagtggatacacacgctcatcccgaccccgcgtgtcaccgcgagtggatacacacgctcatcccgaccccgcgtgtccccgcgagtgggttcacaggctcgtcccgaccccgcgtgtcaccgcgagtggatacacacgctcgtcccgaccccacatgtgcacgtgtataatgtacactgtgctagaaggtcaccattatacatgcgacagcttcccatct

SEQ ID NO: 421394 - DNA, 225 bp, Homo Sapiens
ggcgagaccccctatttcattgcaactcgagggaacaaccatagcagcctctggaactgaggcaggagccctgctgtctggatggagaatgccacacagcatgtacacaggcaggcatcagctgttcaatcactcctgccgacctggcccctatttttacagcatgaggtgggaacacagaaaatgtcactatttagaaatcccatctccagccgcatggtagct

SEQ ID NO: 421395 - DNA, 158 bp, Homo Sapiens
gggaccggcttctggacctctcatttggacttctgggtcccgagtcctcctgtccctctgctctctctgatgccacggttaatcaactgaactttctcactcttatctttgattcccttttactttcagtcccagactctttgaaagatgagatttta

SEQ ID NO: 421396 - DNA, 104 bp, Homo Sapiens
agctcgggccggcatactggacttctacaataccttctcacattctctctttgaacccagacaacaaccccacaaagcaggtggtattaaaaggtaagactccc

SEQ ID NO: 421397 - DNA, 279 bp, Homo Sapiens
cagccgcccggcttctggacttctgggtctgcggaaatggtaaatataacccagtgtgaatccacagtccagtgcactgccctcaggagtctccaaattgcggtccatgctattttcaggatttgggaggacagaggagctttcccactgtaaggatcttggcagttcacagcaagaatgaggactatcaaaatacttcaacttaccctttccctgaacactgagttcctctggactcctaaccaatgtcagctgcattggttagaaggtccaggtatg

SEQ ID NO: 421398 - DNA, 467 bp, Homo Sapiens
cactcggcccggcttactggacttctggcatggtgaagtaaatggaaatggccccttccatgtcattgataaagacaccacggttcagaacataaagagagaaaattacattctaaacactgaggcggcctcttggccacagttttaccccttgtgctgaattttgtgtcacattaaggattcacactgaaagaaatctctttctataatcctgcaatctagttcaaaagcacacatacataaagcaaccagggaacatacaaaacagggataaagtgacattagcggtggcaggaattcatcaagaaaatactatgtgtcaagtgctgagctaagcattttcccactgaaccctcatagcaaattgggatgtacaatgacactgcagtcctcatcatagggatgaggaaattggggtttcaaggactttaagctgctttcctaagagcatagttcatggagggtta

SEQ ID NO: 421399 - DNA, 439 bp, Homo Sapiens
acctggggccggcatactggacttctgttgctcaagataaagtgatatagattttagtttggaacgaggctgaccctgaaaggcacctggaagcccaggttaattttatggcccttctagttcccttctctttgcttatgccattctgtaatgtgagatgggtgatagtttaaagttagctctggatcaaaccatgctctttgggagcaaggccagaaagggacatttaggccaagcacctgcataattagcttactattggactgtgtgttttctcttctccaacagctacttttgctccagatgacacactacctcattcttaaggtgacgaagcctggctagggacagctgtatagttctctcaaaacctcactgtggtatcattcctcatcactaacctcttcctccaccttttaaagtagacctttatgtttag

SEQ ID NO: 421400 - DNA, 466 bp, Homo Sapiens
gtttcatttcgggaacagctattaagttccgatggggataaatcgctcggcgggcatttctagtagcctaaaccaagttgtctcctgcatacgtggaaatggcatgatgccatttgcacaggatggcacaagtgtcatctctatatggtgacctaaagttgacactgtatgatactagaaatgaatacaaaaataaaggaaattgagagatgtgtgaagtgcaaagtaatattagttcattagttcattaattcctttattcagcaaacaaatattctatgctagagcctggtcacggtgtcttgggaagtaaagagatgaagcagatttagaagatctccctgtcctcaaggtgtctacaatgtgatactggggagtgggctgcctagaaacagtggttgtacatcatgaaaccatatccacaaagccagagtatcaaattttaatatttaatctacaaaatata

SEQ ID NO: 421401 - DNA, 171 bp, Homo Sapiens
acaaaagtttaagaaggcattgctccacaaagtatgttataacttatctgtgtgcagttccaagtaatgttggcaaccacgacactcctgtacaatgacaaaatcagcaattcttcaagaatgggactggataaaccacttggtaataatggctttcactgatgacttcat

SEQ ID NO: 421402 - DNA, 236 bp, Homo Sapiens
gcttccatgtaacagatacaaagcttcagttggcactgccgatacctagctcctgccagggttaacacagagcccaaggagaaaactgaccagctcaaactgattcacccacagcagacctcaaatgaaacttcaaatttcaggaacttgtcctctgccaaggtggaagtctcctccaaaaggaatcctctttcctaacaattacttgtgactcaacagaagtgggattgttataa

SEQ ID NO: 421403 - DNA, 222 bp, Homo Sapiens
acctggctccggcttactgacttctgcctcagcatcaatgcgcttcactcccagtgtggctgctcgggctgctaattgcccccaggtcaccctgcccatggtgttgtgggattggtgcatgactacagggggatagagcaacagggtgacggagggtcctagcaacatgacagctgtgacttaggttgtccggggggagcccttggggcagtaggctgacga

SEQ ID NO: 421404 - DNA, 393 bp, Homo Sapiens
  misc_feature (114)..(286): n is a, c, g, or t
gcctgtctaccctaactgatcagttgaccctgggacatacttctcctggacagtgagtctcatggtctctccaccatgcacctgtgaccccctcccctgctgacaacagataannnnnnnnnnnnnnnnnnnnnnnnnnnnnnnnnnnnnnnnnnnnnnnnnnnnnnnnnnnnnnnnnnnnnnnnnnnnnnnnnnnnnnnnnnnnnnnnnnnnnnnnnnnnnnnnnnnnnnnnnnnnnnnnnnnnnnnnnnnnnnnnnnnnnnnnnnnnnnnnnnnnnnnnnnnnncaagcttgcctttcccttttcaatactttgtttccactatgcttatgcccggatgatatagttctatttttataatctttcaggtgtaaaataaaattctaatatga

SEQ ID NO: 421405 - DNA, 127 bp, Homo Sapiens
tcagctcggtaccggcatactggacttctccttctggacacagagcaggaactctggctgacagacagggaaaaattccataatgcctggcaaagttctttagtaccacaggctattctcccagctc

SEQ ID NO: 421406 - DNA, 459 bp, Homo Sapiens
agtcagctcggaccagtgatgcacatatttaggatggaattgatttaaataaaatcatctaaaattcactaaatttagatttagattactacccaggaaggtgaaatgtaatgtttgcagctttctatctcttatttgatttaactataatatggttctcaactcataaatgtttcatttttggaaggcctatacaatacatttcaagtggtaattagttttgataatttctccaattatttttgctctctaatcaggaaaatgaagcatttgaaacaaataattgtgaattcattgagaggtttaatcacctctgagtcagtaggcttatcatgattttgtttggcatgctttacgattacgttaatatatcaaccaacacctgaaaaaccatgcacatgtaaatgtttagtttgattatagcaaaaaatgctgaaatttttctgaagacacacaaaa

SEQ ID NO: 421407 - DNA, 440 bp, Homo Sapiens
ctcgggccggcatactggacttcttcccaatactggcctcaggcttcttgactgagagcactttcctttccaagcactttgggctttccacgcagagagaaacaaacaacgcatggacccagtgcccacccaggtcagtggctgttcagcacaacacagcagaagggcagctccatctgcggggacttcatcatgtttgacttgcacagttgtggtcggtgccagatcacagtaagaagactggtattcttctgttacaggcacactaatgcatcatccttccaccactaaagtaaatcttagcaatcaagtttctttccagatactgtctaaactaaaacctagagggctaccactgttcaggtgctatgctgggatatgcttgtgacagcagcattgttgtctctttcaggagctagtgtggactctctcagtgtcat

SEQ ID NO: 421408 - DNA, 326 bp, Homo Sapiens
cggcatacttgacctctatgtggccagagtaccctcctgatgctcttggtgaataaaggagccaaagctaaaagttagaggctccagtctttggaaggcgtcttcagtaaaaatatcctttggggatgcttagttattctaagaatagttatagatctaataaatattgcctttgaacggttaagtttggatatgcaagaaggccagctgtgagaagaacaggcagccgtgcaagctggcaaagggagaaaaaactgtttagggataggagaaaacagatggatgccttaggccagctgtgtctgcactcagaaggtccaggtatg

SEQ ID NO: 421409 - DNA, 204 bp, Homo Sapiens
tacctggccggcatcttgactctgaacatcatagctttgtcttctctaccttaaacaagctcaaaacacttatattagcctacatttggacaaactcatctaacacaaagctaattttataatagtattgaatatctcgtggaattcattgaataccataccaaatgtgaaaaaacagaaaggtttcacgtcattcataatgtc

SEQ ID NO: 421410 - DNA, 283 bp, Homo Sapiens
atgctcgcttgagtgagcgtttgaggagttttagacggaatcttagttcagctccccacagtctcctaaaccccctggtgccacttctgggttcctgagattctcgacgagccgtggtcccgagagtggcgcggtggcctgggccagactttacctccaacgcgagagagtgatttcttccaatgcccgggccggttgatacgttccggttggttggatgttggtggttttcttgcgtacaaagttggtcgacaccatctttcaaagcaacagtgttttgtag

SEQ ID NO: 421411 - DNA, 118 bp, Homo Sapiens
tcttttctaacagaaagcagctgaaaaatccaaagctgcacatagattagcaagctaaaagcttgcatagtgttaatgctgacagactgtgccaactagaaaagggagtgcctgcaag

SEQ ID NO: 421412 - DNA, 442 bp, Homo Sapiens
  misc_feature (389)..(401): n is a, c, g, or t
gagacgattgtatgcgtcgccgtgcctatagggactgtgtcatgctagaggaacctcggggtgatgaacctggcgccaccagccaaggccggaagctcttctttcaggaaattggcctgcttttgtcggcagaacagtggctgttcgaccccctgcctgcccgtcacagtgctcttggctggcccttggtcaaggcaggtggtggagccggcgggcagccctggtcccctcctggcctccagggtctgggcactctcacagcgtctcctggcagcctggctgtgaagtgggccccacgctgtccccacgctggagctctcaagtggcagtctgaagcagcactgtgctggctgcagcgcgacatatcctgcaggctcatgggccccttnnnnnnnnnnnnnaccactgctggagactccccagggagaaagcgaggagctgc

SEQ ID NO: 421413 - DNA, 398 bp, Homo Sapiens
cccatgtccttacctccacctggaagcctctcctggcagtcattctaagggccttctcagcactggtgccctaaataagtactatttggggtagtaaaagatggaaaccatctatacattcaaaaccaggggattaattagaaccgtaatgctggtgcttcctgttaaaatgataacggagaaataactttcatatgacatgaacaaggcagcccgtaaagcagtatgtgttgaacaagatcccattttcgtaaaggatctgtaaggacaggaagtgttcaacggttgattctaggtggagggagaagaggtgttgtttatgccattcagtatattctgagatttttactaaagaacactgcttttccacaaactctaagggcagattttattcccag

SEQ ID NO: 421414 - DNA, 387 bp, Homo Sapiens
  misc_feature (193)..(201): n is a, c, g, or t
  misc_feature (258)..(267): n is a, c, g, or t
accagtattcgggacgtgtattctctgcgagcacctgtataggtagaactcgtacagctctggaaaagcagtgaattcattcccttcccttggtaatcattttctgtgagcaaagcataagtttatgaaagatgaaatctgtagcacccaagagagaaatgttgttgaactcgatttcccattgcatacattnnnnnnnnnaccacttcctttaggataatacaaggaagaacaattatacagcaactggaggagcannnnnnnnnnataaagtagactgaatgtcttaaagaagctctcaagtatctgtatctattagactatggaattgtcctccaagggaaagcattcaaaacgaaatggatgaaacacgaatggagggaatta

SEQ ID NO: 421415 - DNA, 315 bp, Homo Sapiens
aagttagtagggacgaacactgtgctagtatatgtactacagagtggttacactttcaccaaagtcattgtatcctgttctagccctccaatcctggcgtcggagcttgaagatgaagtggctggccagatgtaagggtccgtacatgttgatgaaaaacagaactatcatagatgaataatgctttacttagaagcctaaaaggagaatcctaaatgtgaagctaaattcctccccaaatagcttcaggtcagggtcacagtctgccttacctcacagtcgaaacaattatttgatgataaattgaggaataaa

SEQ ID NO: 421416 - DNA, 266 bp, Homo Sapiens
tctcttaggatctgcggatcattgccctggctgtgctaagctgttgcccacttatacttcatggacatgggtggtcttacacgaatatttgtgctaatagactctcactggctgcctggagcatgcatttcccagcctgctgttgtccagtgaggtgttcgttattttgaccctagtcaggacccagaggaaatagtctataggataggaagtatttgggctctcaaacaatagacatgctttctctactgtctgttctagtttct

SEQ ID NO: 421417 - DNA, 117 bp, Homo Sapiens
gcatggttagctgactgctctgattcagattcacaagactgcactgagatgtagaccaggccgcagtcatctcgtgtatgagggagcgtttgcttccaaggtcaccatgtgaccgcc

SEQ ID NO: 421418 - DNA, 298 bp, Homo Sapiens
aagcatggcagtatttcttaaactcttagttctagtgttatctcatcttcctattgctctgtatgcatcttatggtaactcctccctggtagttgagctggcctggttctctactcttggaaccactgaagcttaactaaaaccatgccctttctaaccacagtccatgtgagttcccataattttcttgggttgttgtaaattaattcaatcatctgccatccattcatccatgtaatgcaggaaccacggtgtcacttcattcttccctccacttcactgacttccccgttttccc

SEQ ID NO: 421419 - DNA, 273 bp, Homo Sapiens
gcttatttacaaggggatttagaaattgcagtgaagacagcatgaggaagatggccttctctcatagaacaatgactcctaattttgtaggattggtacaggagggcgaaggttcacagaaggattgcatattctcaactattgatgtctctttcccttggggatctcatgagttactgctgccatcacagaactgacctcatgggggcaatgctcccaaacccacagcaaccctgaggcaaggctggaacatttactaaagtccaggctaat

SEQ ID NO: 421420 - DNA, 278 bp, Homo Sapiens
caaaggtctgtctcagagaacaataaattatgaaaaagtaaaaattgatgatttagaagacagcaatttatccctggacgcttcaccctgacggtcagccatcgtcgccttccccctaccctcttgtgtttgttaggaagcattaatcctgtgtggccctcggctgaggggtttagtagctgtggaggcagatgtgtgtgtggcctggctggtttctgccatgggttccagctgtgtctggaggatgacagcagagacctccacagggaccccagctg

SEQ ID NO: 421421 - DNA, 324 bp, Homo Sapiens
actggtgtgtgcgtgggcgtgtgttgtttgcatgcgggtaggatgcctgcctcttcggattgctgtgcaggggcccgaacacagcaggcatttgtgagcattatgcgtgagtgtgttgtgctgggtgtgttgtgtagtgttgcatcgttccactggaggggcacaaagcgctggagtgggcatcaattccaactccaggcattcccccattagcatcttgggggaatcaaaccaagaatccaccaatccttaaggggcaagttcctatcgatctgctctacggagcattaagacctcaatgaccccagacctgagcaagccagg

SEQ ID NO: 421422 - DNA, 282 bp, Homo Sapiens
ttatgagccatctgcatactggattcagctgcccctttctggccactcagttctcattatgggcctgaaccagctcagacctgcattgccatcatggatctgtctgaacaaattggaaggtcctttctctcctgatattgctctgatctgacccttcctatgtcgccccccagctcctagacctgagcaagccaggcctggcttgctcaggtctgttcgggggtttgaggcttttggacagcatacagagacacagatgtgttataaaagaaactctgtata

SEQ ID NO: 421423 - DNA, 210 bp, Homo Sapiens
tctagctgccctcgaggtgatccatccatgacagttacaccaggctaaggcagagatgagagagaaatgggcctcttgggaaataccccaaaatgaatggaaacctgggggttccaccttgctttctccttcccccaacaggagaaactgcaggccaatgagatctctttcagcactgccatggcttgggggagacctgagcaagccagg

SEQ ID NO: 421424 - DNA, 118 bp, Homo Sapiens
caccacttcacacagtctaagcagaaaattagggaagcgaatagtcagggcttatcagctatgcagtagcttctagaagtcaacagctggctctgggagggagacctgagcaagccag

SEQ ID NO: 421425 - DNA, 331 bp, Homo Sapiens
  misc_feature (42)..(42): n is a, c, g, or t
cgccaccagcgcgctcacttctctttctaaacattacgtgcnctcctgcacacagagtgccctgggcttcagagataggactgagagctgtaagaaaggaatcgtgacaatccttccccaaggaagactctagcctgaacctttggagttgagttgaattcaacgtaaatgaatcaagttgaactgaactgaactgaacaggggcagctgctggagactcacatagaaacccactccatcgttctgcttctcctagaccagtatttggggttggggaggtctgagctctccaaccagcaaggctggacacaggccaagttgccaatcctga

SEQ ID NO: 421426 - DNA, 232 bp, Homo Sapiens
cggtataccattttgaatcagcggactccaatgaaagacccggctaccagcacgaatgtgattctaagcctgggcttgtggtttatggatgggattcaggtttacaatgtcaacaggttcttgggagcacagatccctaggctggtgaagtattggtgagaggatgcagtcctggggcacagagacacaagatcactcattctgaggtcgagccagaactgagcaagccagg

SEQ ID NO: 421427 - DNA, 313 bp, Homo Sapiens
cagatcataatagggttcgtgcttactatgagaatctaatgctgccactgatctgacaggaggcagagctcaggaggtaatgcaagtgatagggagtggctgtaaatacagataaagctttgctggcttgcccactgctcacctcctgctgtgcggcctggttcctatcaggctacagactggtagtggtccagtctggaggttagagacctgagcaagccaggcctgatttgctcaggtctccctgtcggtatgtccgctgagctgtgcaagccatgtctggcttgctcgagtgtgtggccatcttgtgagg

SEQ ID NO: 421428 - DNA, 180 bp, Homo Sapiens
catgctgtttagttacattaaagagaggaacggctgatgaggcccccctctgagtttctaaccagtaactggagtttgagtactgaatcagagtaactgggtcttggacttcaaaggccgcagtggttttcattcattgccagctcagttcttgcaaaggtgagacctgagcaagccagg

SEQ ID NO: 421429 - DNA, 114 bp, Homo Sapiens
ctaatctgtaaccctttactctaacgagctgacacagtgcgcaagtacagcctgctcataggagcccaggaagagcaggaattaagcactgacgcccagacctgagcaagccag

SEQ ID NO: 421430 - DNA, 264 bp, Homo Sapiens
ttctcgttagtcaggcattcagcttgcaaagctccccaagcacacaaggagagtcagctgactgagggccaacagaaacagcaggcagccgctgtcagccacaaagaaacgcagatcctgaaactgtcatcatacaggtgagaggatagttatgtgtgaggtgttcaaagaagtcgcgcagtcagtgatgagaaagctgtagggtacatactgtcacgcatgaataggcaggactccttaaagaacttttggaaatgaaaaaca

SEQ ID NO: 421431 - DNA, 188 bp, Homo Sapiens
atcgatgtatgatggttactcatttgacgctgctgtcacccagcaaccctaaaagagaattttgtacattctgtatcccacagacctgagcaagccaggcctggcttgctcaggtctttgtcttgaggaatggtaagatactaaaaaagtattgataacagatactgagcagacctgagcaagccagg

SEQ ID NO: 421432 - DNA, 350 bp, Homo Sapiens
  misc_feature (310)..(310): n is a, c, g, or t
cgtaccaggcgcacttctgtggatctccctctccttgcttaccagtgtcctgcccagaataatatagccgcttcatttgtcttaaactctgatctctgcctcctcaactcagcagaaacatgcaattatatgctgcacactggttgcaatattgacttttatcagagtttctgggcaattatggggttgacttggtgagtttctcttctctcaggaattacagtcttgtgtttattttacgaaacctgaatacggttgccttgtgtgtattgtcatttttgatggttgtttacaatgggagggctagctngtaccaattacttcatcatagccagaagtgcgcctgggtg

SEQ ID NO: 421433 - DNA, 336 bp, Homo Sapiens
gccgtgcgccgtacctggggcactctgccactagtctctgggtcaagcacggcgagacattgcataaagaaatgagtaaaacagcaacaataagtaatcagattttgtaataaattcttaatttatacctgaaacttggctaagtgattgctgtggattattaggactaaaggtggtggggagtctgggctctgagtattggacgtaggtagctgagagtcaacaaagtctgaatagtgaaaatatttctctcacacagtgacattcattttaagactatatgcatttagtcacattaaccatctctttcaatcattctctgtgacagacaagcaa

SEQ ID NO: 421434 - DNA, 322 bp, Homo Sapiens
gagcgcacttctgggtattgtattactgattcagacgcctgagatcaaatagaggagagattatgattcagcaccaagggcagagctagtagcagtggcctctgggctcctttctgcctgaaggagggagaaaagtggtgcagattaggcaattggggcatggacattttcatttgagaccacatgaggtagaatagccagctgttattgtctgagcatggttaactagacagtctatgtggtagttttacatcaagctgaatgtagattgttgaaacagaataattaagtttccatctagacctagaagtgcgcctgggtg

SEQ ID NO: 421435 - DNA, 316 bp, Homo Sapiens
ctccgttagcactacgcctctctgtttctcgtgtacatctttctggctattatttcgtttgattcttggtaattcatcctgtatcccagtgtcatcctttcaatctgtaataattctatattccatatatcaagtactggtcggccgtctttgtaatggcttcttcatgatgtgcttctttgaggaagtgaattttgcagtctatgctaagctgtccttatcctattggcatccactgctcagagcaggcactgaagaaatgttgtcaaggataatatagtacaacatagctagcagagttaagaaagaccattta

SEQ ID NO: 421436 - DNA, 133 bp, Homo Sapiens
caccgtataacacaagtgtttcttcttccactcagacagaagtcaccgcgggactgccacacagtgcctcagcagaggccacagagaaaggcaggcaagagtgctaaacaatacagctgataccagaagtgcg

SEQ ID NO: 421437 - DNA, 466 bp, Homo Sapiens
cctgggccgtccttggcgcacttctctgattgtcagtagtagaaagggccgagcctcttctgccatctggagggttgagcgtctcccagctccctggaactttgggatggtttcgggcccctgtgccccatggcacgtggatgcttcaaggctagtggggacagtctcttctgcttttgtggtgactcaaacgacactgtgttcttaggggaaggaatggggactcggggccgtttaatgccccctccgaagtgggcatggggcctggacatccacccgttaattaatccattaaagggcaaatcaaccgacagcctccttattatacaaaaaaggggaacagttttgttaattcattagctggttattaagtgaaaagtcccgagtcctgttggcatttaacatcacagaaggaaatccccagaaatgctgatttctttgggatttccacatgccaaatgatttt

SEQ ID NO: 421438 - DNA, 485 bp, Homo Sapiens
gaagaacctgggcgacctggcgcacatcttagttactgctacatacagtgaccacatgaccagaatgcagatcaaagtgtctctgagccctacagagctctctggtgtgatggtctggcctcctgcctctgcctggcaccccctctgcccacccatccctgtcccatagctgtgcagtgcccaactctacagggaacacactatgaaagggcttagttatggggcagtgggggtttcatggctaagcctttaaggttcctccaccctagcaagtgtggggaaggagaaaactaccctaggatgttgagtaccaatgtggagaatacaagactgcaggggctcccatcccaggaggtggcgatgacattacatttccgggtttggaacaggaaggctcatggtgtgggcggcatgagagctagtccatgagtcaggcagagaatgtttacacgtggtggtaagaaaagcagcattccaggaatact

SEQ ID NO: 421439 - DNA, 106 bp, Homo Sapiens
gagctcgggccgcaccaggcgcacttctcacgttcgctgcttgggcccacatcacgtatttccttttttttcagagccatttcttaaattataaaggcatttgagg

SEQ ID NO: 421440 - DNA, 375 bp, Homo Sapiens
taggcgcacttctctcccagcgctgttgggatcatgcattacatacaacctcaccatagactcaatctaaattacatgagctccaaataaaaaaggatttggcatactacaaacacacaatgtgtgtaatgcaccactagggaagtgatactaagtcacaaagatctgagaatcagtcctttctcaacataacatttgaatattaatcagcaccccatcggaagaactgaagtgacttgcaaagtttattctctgaagcagatcatctccctcgtgccattaattcatataagaaaaccttattacacaaatggaacagaagtacatttcagactaatctctatttcaattatcaacattcagctttgtaaagaa

SEQ ID NO: 421441 - DNA, 456 bp, Homo Sapiens
tcagggcgcacttctcatacaggaaaaaatggcttaaccacagcgaagaagagacaaggggaggggagagtaaggaaaagattcctctacttttgagacggatgctttagaaagaaagcaaaacgtaatcatgttatccttggtctggaaactgaagaaagggcccccttactgcgtcaccccaaggaaagaagaaggacctgaaactcaacatccctatgcctttctagctgtcattcctagccattgtttctacatgtccacagaccccatgcctccatcctgagccttttggacttatagagtttaggttaagcaatatactatgaataggcacatgggttacagagaacaagagaaaaggatattctcttaggaagagccaagagagaaatgggacacaacagcatgacacagcggtcaacacaggccttggatcagttgactaaccttgaa

SEQ ID NO: 421442 - DNA, 416 bp, Homo Sapiens
tacctgggccgcaccagcgcactctgtacatgactgcttgtcattttcttttttcctaacaaggctcaagtttgtcaagatttccttttctaaaatagaactactttacagcacaagtagttttgtatttttcttttacctatccatatcattattttgatgtaaacaatgtttaaaaggacacagaaaatgtcctaggcttagaaaaagtctcggttgtgtgtaatcaaagagtagctctaaaagactggaaattgtgacaggcatagtattggtcatcagcagaagcagatgaaagacggatattttactgcttgatgaagtcactggaatgtccaggcgccctctgctctggagtttgtggtgtccgttcttgcagtttacaagagtcaacctctagcagcccctgggctttg

SEQ ID NO: 421443 - DNA, 260 bp, Homo Sapiens
cctgggccgcacttggcgcacttctggatatgttcttgtggcatctccaggagggaagtgtggagggtgcctggggcatccgtaccgccctggcttcttgggcctctgcagcctctgcctgtctgaatcagctagtggagtatcccgcctcgtggaaactggcaagggctgcacaggggctcccaaatgaaactgtgactcaggactggacaagcgaattcgagttcacacagaatggaaaggtgtactttttccccttt

SEQ ID NO: 421444 - DNA, 158 bp, Homo Sapiens
gcacacccgggctttcttctctacccatctagggactacagcccagaagaatgcataccacagcacacatgcatgagtaagtcacgactactctcgctccccatgatatccagagcatcacctcaatcatttctatgattctgattaccttaaaactg

SEQ ID NO: 421445 - DNA, 381 bp, Homo Sapiens
  misc_feature (310)..(310): n is a, c, g, or t
ggcgcacttcttatatgtgggctattaggtttctcctagcatttggtatgatggccagactctagtattgctgaaaagatgtctgagcaatagatgctcatgcgaagggagagctgtcatcgaggcagatgccctaagaatgtctttatggagaagggaagtactaacctggcccgaggtgatgagtagtagcaaagaaggctaaaaacggaagggagagaagcccaacacaggaacctgtttcctgaatattggaacggccagagcaggacacctcttcctgaccaaacagaacagaggcttctacctngagaacatggatgtcttccaaaagatctggggatgcccacctttagggtgatttaataagaaattaagggc

SEQ ID NO: 421446 - DNA, 172 bp, Homo Sapiens
ggaccagtcgtgacagcccctgtccaggtactaacctgcccatagccatccaagccactagtagctctctcccaagtagtggaggcccgcaagccaaagagcatgtctacagtgggcagaggtgctaggagcctttttcttaggcactgagtaagggtgcatggctgcttca

SEQ ID NO: 421447 - DNA, 425 bp, Homo Sapiens
ccccctgggcgtttccccatcacagtcttgtcgatggctctgggttgtcactatctggtgatatctctgctctgccccattggcttgtgagccccttgaggacagacagtgatcccttctggtcactactatgttctcagtgcccagaagatggcctgaacacagtgcacaccctgtgaacatttgttgaatgaaagaatctggtagagtcaggaccagggtctaattctcctgacacagtctcactacccatgttaacttatgtgtcttttgttgatgtttaaaacaacagtatttagctgatggtagctgtccacatcaggaatgattagaccacgtgattttcccatggggccagccgccatcagttaaatagacacatcagtctcaccagcagaagtgcgcctgggtgcggggatcctcta

SEQ ID NO: 421448 - DNA, 284 bp, Homo Sapiens
gcgtggttcttgcaccctcaaagccttctctggtgaaggacagcgagatttctggagaaataatataacgggatcccacatgccagtagggtgactgtgaccacattcccacctccagcttcctgtcaccagtcccctaccccaccagcctcacaccctgagagggggcagaaggtccttctctccctccaagtatgtctcctcttccaaacggggtctccttgtgggtcttgagcaatcttgccacagccacagggggcctccaggtccccatgggggatgag

SEQ ID NO: 421449 - DNA, 509 bp, Homo Sapiens
gcacatatttcagtaaaagagactaattgatataaccgagaaataaatcccatgggtgttagagggatgcccgcatccctcaacctcaccgtgcatatggaagttgcacaattgctacgatgaaagataattcagtcacagagttgaactcccaattcattcgtgggatgtgatcagcaaggaaattctaaggaggagaagctggttaggatcagaaaaccagcgagggccaggtgcccagtagagggcgctgcagcgcatgccggtccttggcctgcaggagcagccagggggcatgtgcctgagttgggcgaagtactggcacaggctgtcctggagagtagggcaaggagagcgtgagggaggcaggaaggtccagaaagcagcaggtctccttttcaattctagcctttcagcaggcatccaggatgacgagttctgctaaacagcctgggtccctagcgggtgtaagggctgaagaggcgagacgcttccagagtcccagaggt

SEQ ID NO: 421450 - DNA, 317 bp, Homo Sapiens
gtgcctgggcgacctggcgcacttctcacttgttcagtctgggttgccgggttgctttccccatcacctacgataaatggtgaatgccctctgcatcccagccttgcccagacaccctgccctggcccttccttcctcagcaatgccctccttgggcccttcctgggctctgactctccacaccgggcttcactcccaccccattgctgcaggttcacgctgttgagtctctgacgctctggtaccaggccatacatggatgtcctcaccttgctcaggctctgacactcacactgggcaaccttcctacacagatg

SEQ ID NO: 421451 - DNA, 162 bp, Homo Sapiens
cccgggctcagtagccagagcctcaaggctacggtgagggttttgacttctgcgcagaagtggggagcccctgcaaggatttgggcagagaagaaacaaaatctgatttatacaacgtttaaaaattactctgcctgctgtgttgagaagtgcgcctgggtg

SEQ ID NO: 421452 - DNA, 376 bp, Homo Sapiens
agggtcggcccgcattaaggcgcacatctaggttttgctgtgttggcccaggctagtctcaaactcctgagctcaagcaagtcctccgtgctcagtctcccaatgtactgggattatatgtgtgagccactgtgcttggcctgctggctgtttatcagtcctcaaatagaagttcccgcttcagagggccaaggtcatgtgatgggagccaggggcttggacattctgaggcgaacaggagtgacctattcgggggatgtggccagctatcactgacagcgaggttctcatggaggctttttaggtctgatttgtgagattgatattgtccttactgattaggacacaaagaaaatggcagaagtgcgcctgggtg

SEQ ID NO: 421453 - DNA, 351 bp, Homo Sapiens
taggcggccgtttgggaaacacccatatgaatatgttactcaggaacttccaataggctggctagcctttgcttcagaatgagatcagctcttcagcatggcagcggcagacagctcctaccgctggccccagcttcctctcaagctggccctggcgctctggactcctcacacttctgcctggcaaacacctacttggtcttcaagccttcattcttcatagaggctacttgggttctgccccacacctgtcacctgaattgtcattatgtgtgagctccttgagaaaaaatatatgacttggtcatctttataccctcagtacctagcataacacctggcatgtagtca

SEQ ID NO: 421454 - DNA, 335 bp, Homo Sapiens
gcatagcgtggggagaagtatatctgaagatatctattgcatacatatgcacgagcagagaaaattgcactccgaaaaatctcagtgctgtttgttaggaaaggcaacattttcattttaagtactcagtagcaattgatgaaggtcccccccgacctccactaagagtgagttttcattttttgttatttccacagctgtacgtattttattccagcagatgcaaatagcacttccaaattggtcacaattaaagtgagtgcgaagtgtgagggagggtgaaggcttgaaaacaacaatcgctccctagagctgagcgatcacaaagctcatct

SEQ ID NO: 421455 - DNA, 269 bp, Homo Sapiens
tagtgatagcagacacatcagaatagtaaaagaggataaagacgtcctcattcttatagggaactatccccatgtaccaaaaagttcccaacatcatactgcagtccaaaaagcttcctttggataacccttgtccccttcttagttttccacctctcatgggttctcctcctctctacacctcctcccacagaattaactgtgtttccacattgctgggcacttagcacattcctcagctgcagctcatgcctcatacctttgggcaa

SEQ ID NO: 421456 - DNA, 183 bp, Homo Sapiens
accactagtattatcactgtcgcttcctgcagaaaatcatcagtgattgtgcttgccctcttaaaaataaaatccaaacttcagatctggggaaatgggaagaaacatgtaggtgtgagttattattttattacttaaaagctttatgttcccagcggcgttggatgcagtcgggtaccgagc

SEQ ID NO: 421457 - DNA, 183 bp, Homo Sapiens
ccaaggacgcattttcctgcacggtctagtgagcacttctgattcacgtggagatatcgtgtcaatggcagacatcgccaggaaagaatcagaatcctctgtactgtgtaggtatgaaagtccagaagagccgtcacaagatcctgaacaaaagccagggactgacaagcagcggcgttggac

SEQ ID NO: 421458 - DNA, 212 bp, Homo Sapiens
  misc_feature (78)..(128): n is a, c, g, or t
tagtagtgggtcaggtgtacatgcagtcctggacccaggagagggacacaaggttagggggaaattggggagggattnnnnnnnnnnnnnnnnnnnnnnnnnnnnnnnnnnnnnnnnnnnnnnnnnnnaagatgtaaaaagaccgagggtgagagactgaaggcaagagctggggccagcggtgagaggcagcgaggcaatgctcccaggac

SEQ ID NO: 421459 - DNA, 157 bp, Homo Sapiens
  misc_feature (66)..(101): n is a, c, g, or t
actcacgaaggctgatcttccctcagtttgagaagtccttgtgttgggtgggtgtatggtaggggnnnnnnnnnnnnnnnnnnnnnnnnnnnnnnnnnnnnagtacccaggtgcggggtcagagccaaacgatagtgatatatagagggagcggcgg

SEQ ID NO: 421460 - DNA, 187 bp, Homo Sapiens
ggagtgctgaggtcgctctagagatccccgactgcatccatcgccgctatcgagggcgagcgggtagtggaagagaaaccataatgaagcagagatctttaaaacaatccaaatagaacacactagaagacaagggcaggtgtgataggcataaaagaaaagcccatcgcatgcaataaccaaaagg

SEQ ID NO: 421461 - DNA, 107 bp, Homo Sapiens
gactgcatctatgcgtctcgcagaccctgatgcacccccgccatgcgtgttttatcctgggtacatgctgaatgattagatgtgtcttgggtgcctgaaacgatctc

SEQ ID NO: 421462 - DNA, 228 bp, Homo Sapiens
actgcatccaacgccgcattcagatcattcgagagttaaacagaacaggagttaggagtcttctgacttagcggttctctaagtgtggtccggggagcttcagggaggtccccagggccagagcggcttgtgttttccctgtgctgacatttgctccggtggctaaggtgaaactgcaggtgcatctgcacagtgcaaggcggcgttggatgcagtcgggtaccgagc

SEQ ID NO: 421463 - DNA, 365 bp, Homo Sapiens
gactgcatcaacgcgcgtggcaggtctctcagacttgcctcattttcaacgagcatcgtagataaaaggagggcaggtcaggtgttgaagtagggacagcccttctgctggggttagcctacatgtatttctcataagtgacgggggccttgtgtatatgggaggaggtgaagcctccttatatcgctgggtccaggtccacaccctccatgcagcctgtccgtgctggccttgcttgtcaactggccggggtgtgttggtcggctcacacctgcccgtgcctcttcccccgtgctgtccatgtctgcggtgttggatgcagtcagatggcgtcagagatgcagtcagcggcgtcaggatgcagt

SEQ ID NO: 421464 - DNA, 130 bp, Homo Sapiens
gactgcatcaacgcgcattggtagagtgctgcagaagataggtccttgtaggattgtcgtactcaaggaatgctcacttcatgtccctctgtctccatgtccagtattccagacagcgctgtgctcagga

SEQ ID NO: 421465 - DNA, 266 bp, Homo Sapiens
gactgcatcaacgcgcataccacagtgggagccacaggagctctgaggataagcagggatgtcgagggatgggacagaacttgattgaaggcagatagacctccaaattcttgactcagacagaatgatcactgatccagcgagacgtcaggatcgagaggagtgtagcaaggagtcaggagggtgggcctgcgccagtgtcgccccgactctgttcagtaacatgaaggcaaacacagaagggcatgtgcggcgttggatgcagt

SEQ ID NO: 421466 - DNA, 135 bp, Homo Sapiens
actgcatcaaacgcgctggtgccttgcagggaaaaggatggagcttgtgttgtgagaattcactgtgctcagatgctatcttgggatggtgttttacatgtggtgtgtgccaagtagagtggggatgattggcca

SEQ ID NO: 421467 - DNA, 149 bp, Homo Sapiens
tctgcatccaacgcgcgtcgcgtttatccagtagactaagatagagtgttcttttggttcagcaactcttctaaaatgtttcaagcaaagatagtaatgacctcagtttctgaaataagggcatcttcatcagattattcttctgtttt

SEQ ID NO: 421468 - DNA, 494 bp, Homo Sapiens
cactagtccaggtggcagttgatactgtgtggatgaatatgcagttcgatttctgcgaagttaatgcaagtgcctaggtgagcaaacaaagtggggacacagagcatgcccttcccaactcttgtatatttataattaaagagaatcaaagtacatattttacacataattggaatttcttaactcatgtaatataactgtatatttccactcaatttgcatattttaaaaatgtgaaattacatgggcacgtcagaaaataattcagaatgaagccatatcattttactctgccttttccactcaatggactgttaactgctcacactatttctgttctggtccttctcaaatacactttgactagggtggccaggatcttcttaaagaggaaataggtcagcgaatatctggcttcccacactcccctgacccctccctgctctcacagggggagccaagacctcctcagccaaccgtggactagtgggtac

SEQ ID NO: 421469 - DNA, 578 bp, Homo Sapiens
actagttcgggtgggctgacagcgccgtccgtggcaggctatcatgtgtgggtcgcgtgtgctgctgtcagatagcagatggcgggctatatataggtcatatactgtacttacttgaagggcttttgtttccttgaatgaccagattgtcccaaaatgcttttaaagctgcttccatgccatgagaacatagctgggatagcagctgaagcgaatggccctgcacggccaccttctggtgcaccccagctttagcgggcagtcctctgtaagcccgcatgggtgagatgtgggatggtctgtcttggtgagaaattcagtcaccataattaggtggcttcaggttgcattctttgcccccatgatttttttgtctcctttattgacctgagggttcaagagctctcaaagaagtgaaccaactgaaagttgctttctcatatttgagcaattttctagaattcatttattttggagatttatttctgtcatgtccaccaaatataaaaaggatctgaccatggggaggggggctccagttatggggagccaaccgtggctagtagccaccgtggata

SEQ ID NO: 421470 - DNA, 642 bp, Homo Sapiens
actagtacaggatggtgcatggtatgaggtggtcgaggaaagctaagatgcacaaggtctaacagcatgtcgagatcatgctgtgcgcgctggcgctatggtgagaaagacaggatggggtcagtccagccttaccccggatcaggcataaaatgtgttctaggaaagggaaacaatagcagcaaaaatgaccggaatccaggattagactagaggaactatttttagaaaatcatagattgaaaaagtaagggatgaaggggaaatcaatcttaagaatgtttttaaatcttgttcaagattgggggtaggagtgggaagaggcaggaaacaaaatgctaaaagaatgaaataaaacattttcgctttacgggacctgagatggtattgtgaatctgcatatggttatggtaggattgagcctccatcacatacataaagacagataatttttggttttaaataatgcgtggaaagttgtgtatatatctttaattccccaatctttaatttgatacatgccgtgttccactggctagttttatcatcatcaccatccaatattattcaatgtcctatatcaaaggttatataaaaagtagccttcgagtcattgcagtctgtaaacacgatggtattgat

SEQ ID NO: 421471 - DNA, 577 bp, Homo Sapiens
actagtccacgtgtgggcctacagcaggtgcaccttgtgtagccaccattttatttacatagagaacaaagttaatgttttatcaaatccagaccacacctgcatggggacacttgtaggaagcagggttcaaatcaaaatggcaatttgcttttagcctgatatttgaactccactgagcaaactctttggagttctctgggacgttttgaggattcggctcttaactctctgtgaactgagggatgaaatgggagctggaagactgaatatgttacctgaaaaccctgtcactcactatggtaggtcttgactcaagaataactgaatggtgtcattacagcctacaccatacagtgtcccaagcagagaattcttcaagtacaagtgtattgggcttgatatacctgattatgagggcaaatatttgggtaaattttgtaatgctgaaccagattagtgaataagtgcggtgtgaaattcacaaatcgtcgatgatggtcatgctctaaagctgtgttgtggggttttattttatcccttatagggacagtatgtgccattttgttttgtagat

SEQ ID NO: 421472 - DNA, 104 bp, Homo Sapiens
  misc_feature (15)..(15): n is a, c, g, or t
actagatccacgggntgggctctctctcacttatgagagccaactattagatattcatgaatttggccagctggttgactatgactagccagccgtggactagg

SEQ ID NO: 421473 - DNA, 131 bp, Homo Sapiens
actagtccacggttggctgctatcagtaggacttagtgtttgagaagagagccaggcaaggctgtgagaagcatgtggaatccaaaaatggcattaaaatacctccagtcactggtggctggtcagagagg

SEQ ID NO: 421474 - DNA, 448 bp, Homo Sapiens
actagtcactgttgtatttggctgctctgcttgggcacttgtcccttagatccattccctgaagattcactcagtttggtcacagtccagcccttctgcctcttgcagacagcctactctgatcactccagcctttgctaacctctgctttctgagaactccaactgcacgcagcagtgtggggatcatgtgttcctgggatcatgtgtcccaggacagtaggaatgtcaaacatcctgcctgtgctgtcctcacctgcttcttccaggatgggtcagatggtccctgttacacagacaaaatatgagtcatcagaaaggctagtgtccctctccttctagatggtgcagtctgtctgggcagcaagcatgcttttcctgcagagtaggggctagaagcacaggctccggagtcagagggacctgggaccagccaaccgtggactagt

SEQ ID NO: 421475 - DNA, 232 bp, Homo Sapiens
actagtccacggttggctggggaagtggggaacgggcgtactgaggagagctgctgaaggagaaccgatagagcctggtgataggaaaccaaggggaaagaagaacttgatataacagcacagttctcacttcgccttcctgctgagatgtggaagggtcccggtgctgccagcagcactcagtgcgctggaaagggtcatggctaggaagaagagagctagccaaccgtgg

SEQ ID NO: 421476 - DNA, 466 bp, Homo Sapiens
  misc_feature (61)..(417): n is a, c, g, or t
tgctgtggtcgctctagagatccccactagtccacggttgtacaacgaaagaggcagatcnnnnnnnnnnnnnnnnnnnnnnnnnnnnnnnnnnnnnnnnnnnnnnnnnnnnnnnnnnnnnnnnnnnnnnnnnnnnnnnnnnnnnnnnnnnnnnnnnnnnnnnnnnnnnnnnnnnnnnnnnnnnnnnnnnnnnnnnnnnnnnnnnnnnnnnnnnnnnnnnnnnnnnnnnnnnnnnnnnnnnnnnnnnnnnnnnnnnnnnnnnnnnnnnnnnnnnnnnnnnnnnnnnnnnnnnnnnnnnnnnnnnnnnnnnnnnnnnnnnnnnnnnnnnnnnnnnnnnnnnnnnnnnnnnnnnnnnnnnnnnnnnnnnnnnnnnnnnnnnnnnnnnnnnnnnnnnnnnnnnnnnnnnnnnnnnnnnnntaaagcgctcatgtatggtacagcatgagccaaccgtggactagtgggt

SEQ ID NO: 421477 - DNA, 294 bp, Homo Sapiens
tccacggttggtcagtgagtgccacgtggttccactcattttaacaagcgttttttgagctgtgctctgcgcaggccatgtgacaggtgtaagcaagacagacaggccttgggctaatggagtaaaactcctggcagtgcgtgggtgcaggaagaacagttggagtttggagaaactgaagcctccggaggctgaagtggtgtgtctgaggtctcagtcattctgggctctcatcttggggaggaggggccatcactgagcacgtggctgggggtcctgggccacactagccaa

SEQ ID NO: 421478 - DNA, 259 bp, Homo Sapiens
tgaggccctgcgactggccaacttctccgtttttattggtaataccaacttctttctaatttccttgaccagaaattttagagtacttttattcttcccctgatgctggggatgtcctttactctatttcattgactgtaagcctagttcagacttttatcacctaattcctggaaaaatgcaacaaagtggctggctggggaataattctggctcaaacgtcttccccagccaaccgtggactagtgggtaccgagct

SEQ ID NO: 421479 - DNA, 170 bp, Homo Sapiens
actagtccaggtgggctagtaaatggtaaatctagggctgggaacagatgttacctcaaagccaatgtcttaatcgaagtgaggttgtttcaccttatcttttcgagtttctcctcaaaattcaattttctataggacttccgtgagtttcacaaactgtataggataat

SEQ ID NO: 421480 - DNA, 254 bp, Homo Sapiens
actagtcacggtggctagtgcaggagcaggctctctttttctagtgctctgcctgtcctgcgctagcccatggtctcttttctaatgtccggttctctcttcgaagtctgtacctggcaccccttactaaatggcacacacagacacctcatatttctggggttctagtcacacctgagtcttagctggtggaaggacactatttcattttcccctttaggcaaacaatcattggaagccacacgtggactagg

SEQ ID NO: 421481 - DNA, 107 bp, Homo Sapiens
actagtccaggttggtactagtcacgggttggctactagtcacggttggctactagtccacggttggctcaattccattccagcgtactagccaaccgtggactagt

SEQ ID NO: 421482 - DNA, 546 bp, Homo Sapiens
  misc_feature (281)..(368): n is a, c, g, or t
actagtccacggtggctgtgattcatctctatttcatagcatctcagagatgtatcacagccactccaagttcctaacaagagtgagcaaaaaccagaagcttctgggtaaaagggatttaaagtgtttagaaccctttctgagaattttaaattgaggtataaaaggtataaaaggaatctattttttataatctctcttctcttttctaagtctctgaacttttaaaggagggtgatagcccatgcagagtagtagtcatgaagggtcaaaggaccgcnnnnnnnnnnnnnnnnnnnnnnnnnnnnnnnnnnnnnnnnnnnnnnnnnnnnnnnnnnnnnnnnnnnnnnnnnnnnnnnnnnnnnnnntgcaaaagccatctttgcaaaacacttcctgagcaagtcttcctctgcttgctgtgtgtccccaaggctgtagatcattgagaagaccagttgacatgatttcctccatttactcatgggtagaagatgtcaagaacaatacaaatctacatgaccttcatggtccagaaaaagctct

SEQ ID NO: 421483 - DNA, 299 bp, Homo Sapiens
ttcttagtaccaagtactctccaaagactagaattctccaactggaggtgctcctgttttagatgtgaatgaggtgattcagacgcagaatccacatattatatgtaactcgtttactggtcaatcattgctacatcatatgtttactactgtcgagtggttttctggtcagggtactttttctgggatgcttctcaatttcctatgcaaatgcattgttttggtcaatgtgatgtgcactcagggtccagaaacggaaactccattagcactcagggtagctgaattccccataataa

SEQ ID NO: 421484 - DNA, 477 bp, Homo Sapiens
  misc_feature (156)..(336): n is a, c, g, or t
tctaaggatcccactagtcatggtttgctggcacccagttatttcacaaaatactgaattaatgaaatccaacagaaaaccagttagaacccagctcctgggttatagaaaatcaattatgtgacaattcaaaatgtatcttccaaagcagtgtgnnnnnnnnnnnnnnnnnnnnnnnnnnnnnnnnnnnnnnnnnnnnnnnnnnnnnnnnnnnnnnnnnnnnnnnnnnnnnnnnnnnnnnnnnnnnnnnnnnnnnnnnnnnnnnnnnnnnnnnnnnnnnnnnnnnnnnnnnnnnnnnnnnnnnnnnnnnnnnnnnnnnnnnnnnnnnnnnnnnnnccccagggcctcacatctttatcctttaagaaccagatacagttttgttagccaggaaagcaggcattcatctttttcttaacagtgatcatagaggctgagaatgtggggaggttgtggatgatacaatagccatgtcgg

SEQ ID NO: 421485 - DNA, 522 bp, Homo Sapiens
tgatgctgctgtcgctctagagatccccactagtccaggaagtgcacagagcttgacgagaccatacctacacctgtggtttcaggtactcccggtcggtaccggagcgcgggttcgtagtcagggtcgtagctgtgataacatcactgaagaattccttggcaagcagtcagtcagccacctttgggtagtccctactttcacctgggtcgctagggttggttaatctttaataccaactgagtgacccatccccttctccaccttgactgagtcctgaaggccccctcaaaagctaggttttagtgccctatttcatggtacaccaaggagtgctctggcaccatctagagcaagccctagtcatctgcatacctgagcgaagtcttccagcccctgctggaccctgttggaaacaatgtatcctctcttggacacagtccatgccttagacctatactccaaggagcacaacctgaacagacaagcgtggactagtactagtccacggttggctagtaa

SEQ ID NO: 421486 - DNA, 616 bp, Homo Sapiens
gagccattcctacgaagtgagagttaacagggtatattatattcatagataattcccagctttacagcgggggctcagaagttataaggtgctcagaatcccaaggtgagtaggatactgctgagaactgagtttcaggaggctcagcaagaaaatccccatggtttccccccctatggtttcccctaaaacgtgcatgaccaagcacgtatgtgagcaagcacgcgcacacacctctgacaagcaccagagtcatgatgagcaggaaacacatcagggtagctttagaagatgtacaagatttcagctaaaatgcaacccctttctcctcctggatttttcataggcatttcagaatttttatgctcaaaataaaactttggatttcctttctacttctatttcaactggtgcctttccagttgtggcgagtagtactgcggtctgcctaactacccaagatacactatctgtaaactattcgtggttattcctttgcttcatgcctcttatgcaatagctattccccgtggttttactatctaaactagtccttttctcgccattcatttctgttatcctagtgtcttctaagccagtagccaagcgtggacta

SEQ ID NO: 421487 - DNA, 465 bp, Homo Sapiens
  misc_feature (361)..(380): n is a, c, g, or t
tgatgctgaggtgatctagaggatcccactagtccagggtggtagttcttaactttggaagttctttattgagaatgtatctaagtgctgcattttttgctgaatctctttggtcccaaaatagactctttttaatctaaaaaggcacgactttcctcaattcggggaaacattcttctttccatctgtgagcatttcctttcttctaatctctttcctcctcggtctcactctcttcgggtaaaactccacaagccaggcatctagacgaatgattcagggtggggccattctgctactcaggcatatctcaggtattttaaaaattgccaagaactctgataatttttattccttatgnnnnnnnnnnnnnnnnnnnnacttctcaggtggtaacctgtgaatttatccggaatacccccgggtgggcagctttctggaagacagcagccaagcgtggactag

SEQ ID NO: 421488 - DNA, 417 bp, Homo Sapiens
  misc_feature (251)..(288): n is a, c, g, or t
tgcgatattctgctaaatgggaaatgaataatacaagtaataaataataaaagaattttattgagaatgtggatgatggcgtgaagggaatgctttcttgaaagaagtaatttgaactggtctttgaaaggggaaagatacagatatgtagagaggggggaaggtcatctcacttcatggagtgggcttggagggctggagaaaagacagaagaaatgatgggaatgtgtggcctatatgaagaatagtannnnnnnnnnnnnnnnnnnnnnnnnnnnnnnnnnnnnnaaagtatggcaccaatctaatacaacacccctttctcccctctcaccattcttactgcctctgtgtgttgtggtatgtgtcgggtttttaagcaggggagctcttcaaacaaaatcttcacagatgcat

SEQ ID NO: 421489 - DNA, 187 bp, Homo Sapiens
ccgaggtggctgatcgtcagcgggcaatggccatgcaaagtgcaaggtgaaaaactgggtgggaacatagcctaaaagtagacaaggtatgcatttcaaagcatagcattttggacagagtcggaatgggctctgttaatatttttacctctatagcttagggtagactagccaaccgtggactagt

SEQ ID NO: 421490 - DNA, 526 bp, Homo Sapiens
actagtccagggtggtcacagagtcatgacatctttgggagaaggagctggtgggaattagctgtattattagatgtacatggttgggggggagatgaatcaagagcacgattcctagctttttagtttgaacaactgaaaggatggtagctccatttccggagatgagaggagtgaggagatcatgatccgggggaaatatttggtctttaacatgtgagcccatgggacgagcattggggtaacttcagtcttactcctcagcagctgctgtgggcagggtgtggtcaggtaggctggcactgtgtctgagcaagccagctctggtctgataacagagttttatctggaaggggaaacccagggctgggcttacgatctaaggtcagcagcctgtcacaccaagaaataaacgtctgttaaggcaattggtacataagcactcagaaagtgtagcttgtcaaagtggcttaattccaactaggtggttattactcagttggaattaagccaagcgtggactagt

SEQ ID NO: 421491 - DNA, 162 bp, Homo Sapiens
ctagtagccaaggcgtgagctagtagccaggccgtggactagtagccaagccgtggactaggtagccaggccgtggactaggtagccaagccgtggactaggtagccaagccgtggactaggtggccaagccgtggactaggtagccagccgtggactaggt

SEQ ID NO: 421492 - DNA, 459 bp, Homo Sapiens
  misc_feature (375)..(375): n is a, c, g, or t
agattgtctatctctcccattattcaatcatttatttaagttagtatgaagtcatggatatttattatatactttagaattataatctaatattattttatttgtttttcttaaattggccatgggtgctttttcagttgggttcctgtgtccctttgacgtactcccactatggtggggtgtgattttagcacgctgctacttgctggcactactagtacttccgaatcatcttatatagcccctcccgggtccctaaatgggataatgctttttaactctcatcataaagatcagtattgaaaaggacacacggagtgtctattgcataaagaccttgtattaggaatacgactttttaaaaagcctcctttnggatagatcttgtgcttgagctgagaaaattagacaaatacatacaatagcataatcccatttattaaacataatactagccaa

SEQ ID NO: 421493 - DNA, 113 bp, Homo Sapiens
actctagaggtccccacggttggctactagtctacgctgatggaattgggccaaccgtggagccaaccgtggactcgtagccaaccgtggactagtagccaaccgtggcttag

SEQ ID NO: 421494 - DNA, 401 bp, Homo Sapiens
cactaatccacggttggcgtgggtagaagtacagctgcactgaggactattccaactagctgtctttgggcactgggaccttaactttaattggtggggtctgtactgtcaacccaaaaggaagaggatgaagcacaaaatacgatttaaagagtttacctgagccaaagcaaagacagctgccgaaaagacttagacccaagtaacctgggatatgagctccattggggcttggttatgtgcaggttggtatgtaaaggtttcagaaagggggggtggggagacagacagtaggtcgatacaaagtggttagaaattctcactgatttacagaaatagcattgattagggactggctagacacctttaagctacaggtgtctagccaagcgtggactagg

SEQ ID NO: 421495 - DNA, 200 bp, Homo Sapiens
actagtccacggttggctagtccggaggtcctgaaagaaatcgtccatgtccccagccctcatatggttgatcatttccttggtaatttctgatatggttatgctctgtcagaagaggaataggtcctctcctctttcccagtgggatgcaagggaaagcctcagaatgccatcttgtggccagccaaccgtggagtagg

SEQ ID NO: 421496 - DNA, 333 bp, Homo Sapiens
ttatatttgtagttccctgaagatatcatgcaaggtgtccgtcttcaacatataaagtcagcctttacttatggtcctgaaccaacctctttactcttccttgtatatctgtccattcttcaacaagtcaagtcaagtaccagctcttcatgttctcctcacaggtgaggttggtagcccctcttttatattcccatagcactctctgctttttcttaacaaggcatatcccaccttataataacatcccctctctcgggctgtctcttcccaacattagagtgcagtgcctgccctctgtgtgctggtcccttctcagaccctggagatgca

SEQ ID NO: 421497 - DNA, 458 bp, Homo Sapiens
gtcggtgggtggatggtgtgaagatttttaaatgacagatggtggtgattattaaatgataaataatggcaacttaccaggaaccaaacagaaaatagtcactttatgtttctggtatgcatctgaattattcttgttatataatgacttttttaacactgttgtagatgaacagggcttacgactatggaagttgggaacttcagagaatttaaaactctatcatactgttacctctcattcctctgattagaatttacatagattaagcaagtagtctgtggagggatagacttctaagtaagcataaaagggaacattataacttggagttcgcatcacagattttttatgagtggtgggtcaaagaaaatgccatgattttttaaagtaccaaatgtaaatcgtaaaaagcttaggcacagggctagccaagcgtggactagtgggtaccgagc

SEQ ID NO: 421498 - DNA, 133 bp, Homo Sapiens
tgtgttggctactagcacggttggctactagtccacgggttggctcctttgacactctctaatccgggctgattctaatttccatatactacctgcctcccccagccaagcgtggactagtagccaaccgtgg

SEQ ID NO: 421499 - DNA, 242 bp, Homo Sapiens
tgcggtgatctagaggatcccactagtccacggttggctccatgcaggtctgttcggcctctgcatggagacaacgggtatattctgtagaaaaatcattaggtctgtgtgcatgagaggaggatgggactggcagaccggctctgtttctgcagtcacaccttgtcaaaagtcatggctgtgggacacctagttctcactttcttattttagtagcttccctggtaagaaagttcatcaac

SEQ ID NO: 421500 - DNA, 135 bp, Homo Sapiens
agcgtcgggtgcgtatcgtcgcgggggggatctgactagaggtctcataatcccaagatggtagcttcgccatggctcctcagccaacgtggactagtactagtccagggttggtagtacgctggaatggaattg

SEQ ID NO: 421501 - DNA, 158 bp, Homo Sapiens
actagtccacggttggctgccagtgttaagacgcccttcatcctcacggtgaccttgtgtggtagtactttattatcctctttggtggaagtgacaagctgaggcctagaaaagtcagggcacttgtccacggtgacactagccaaccgtggactagt

SEQ ID NO: 421502 - DNA, 301 bp, Homo Sapiens
  misc_feature (115)..(115): n is a, c, g, or t
gaaattgtgagtgattagaggatcccatagtcacggttggtactagtccacggtgtatagtccacggttggtactagtctacgctggaatggaatgccagtcaggtatggtacanttgaacagcaggcagatactgcgacaggtagtgtgacagtggatgttgccagcacttctgcaaatggaagggaagatcatatttttcagcatgatctgtgtactacacactgccaaatgttatcttaacgctcccaactcatactagggatcaaatagagttatccccagccaaccgtggactagt

SEQ ID NO: 421503 - DNA, 311 bp, Homo Sapiens
ggagtttgaggctgtagtaagctaatatcatgccactgaattccagtctgtgagacatagcaagactccatatctaaaaattaagttaactaaaaacagacaaaatattagcggccaagttaaccgtggattataaatttctgccattctgtaacattagtaattatggacactttaagttgtggtgtgtgcctcatttctatgaaagagtggaaggatccattcagaaatgtgtttcctatttaaaagctgtaataaagtgtgtgatttccctataggtgctgtgaggagtgtataaatatcaggagcaa

SEQ ID NO: 421504 - DNA, 553 bp, Homo Sapiens
  misc_feature (83)..(83): n is a, c, g, or t
atcaggtaggtcatcattcggatgggatccacaatatctgagaatatacattatgagcaacacattatggactaccggccttncataaggatcaggcatagataataagaaagagcataagaaaggttactgccttattcacacattttcttttctgaatatttcttctctatgctatatgtaaaatatgttagaacccttctttctattccaaatggtcatataaaaattataagctactaactatagctgctacttcctaaaatagaacaaagtgtttcagcctaaatgggtaggagaaatgcactggggttaagaagggtgattgagttataacagatccttctatctaattatgtatacaggtggcaaatgcagtagtaaaacagtgcttagtgtcttatgtgtgaagtgaacatggtaattaaagagggtgttctctcctagtggtagtactttatcataggggccttgtctatcgtgtgagttctaaaagaacaattaaaagagatactgtttccttttcagtgaacagcacatacttctcttatat

SEQ ID NO: 421505 - DNA, 571 bp, Homo Sapiens
tgatgctgtggtcatctagacggatccccaatattatgtcagttactagtagatgacagcgcatggtaccaactcgctgggtctgacatgattctcccatgtaggtatcatattccgattgcttgatcatggtcatatcagaaccacagctctgagtacgcactgaagcttttctcctcttatcagctatggatcataataactaaatttaggaataaccaggtaatgcacagtcatgcaaaaacttcattcattatatccatttcggttcactttccatcaatattgcccaaactgggcaatagcatgtaggatgtctctcatgctcattttcatcactaacatttaatacacagcactcatctgtgtagtcgcattctcttcaaattgttcatgtcagatatttatacttttatctttggctttccttgtggtgtcagcatttatacttaagtactttttctcaacatcacccagcaggaaggcagcttcagagtttgactctaagtctgtctgcaaaacatatgcactttctactttacatcattggactgacccactctgtgtgtgt

SEQ ID NO: 421506 - DNA, 263 bp, Homo Sapiens
gttaggtaccataacctctatgggtgcaggcgacagtgacccgttgattccaaggaaatgcgagtaagagaggtaatacaaggtcagctaaggaggtggtcgtgcgtagcatgggcaaccaaagggtttaatactgtcttctcaagccactaaaactaaaaataatacgtaaaacaacagaaaactagtacaataaacttgggtgtattcatcattaaaactcttattttcaaagggtttacagaaaaaggaaacgtctctaa

SEQ ID NO: 421507 - DNA, 600 bp, Homo Sapiens
ctagttatggaagttactagtagatgcagggaaggatagatacttaggtttcaatgtatcaccctaggggtatcgatgttcgtagttcgtgatcatgggctgtgcaggtccacctgtcagaataaatagccaagaagaaatgaaaacttttgactcaggagaataaaaatattaaggatttagtattccagaattttaatatggcataatacatttaaatatttctctaaagttaataactttatatagcaatttgaactttatccactttcaggttcaatataaagagggagcttttttgattttgtagcagaaactcaatagttgctaactgatgtgggtctgtaattctttctaagtcagaatacaaggaacggagttaggacatcaaactgtgtggggtatattttacaatccaggtctttttatcatttctatatttcctagcaacaccttacttttacctattgtgtagaaaaatatgccaaggccttgtgtgctgttggatttttttattagcagattttattttcagaacagttatatatttaccaaaagattgagcagatagtacagtgtccatgggtagcccctctttct

SEQ ID NO: 421508 - DNA, 591 bp, Homo Sapiens
caattaccattgcaagcgttaatatgggaccatagcgaatgtcaacaaaacgatgtttaatggaaccaaatgagctgatcagtgagtgaagggagtcctacggtcagagcgaagggaaagatagaggaagctgacggcataggatgaatctaggatctaggctttaagaaagaaacctaaagatgttatcctgtttcctactggttcatcttctcagtttaggaaaacaattacaaatcaacatagaggatctggagtacaacattaagtttttcagggacaaaacatggtactcggtgctaggtccacttgacgatccaggggaaggaaaaaacttctgcatggcttcactccaaaaatgtccaggtcatgtgtctgtcaattactaattatgtgatttgcataacttgctcattatctaagccctgtttattagatgcaactagaaattatcatctttggcctgtctacatcactgtgctttaactttgtatttagaaataactatagtcgcacaggaaattataaaattaggacatagagaccggtgaatcctttcccaaagtttccccaatgatagtatacataatg

SEQ ID NO: 421509 - DNA, 167 bp, Homo Sapiens
aattccatgccaggcgtaggacggtgaccacccagtccgaaggcaaggtcagtggtccaggttcaggatgatacatgagatctgaattgtcaagtggacttgctcatccttcccaatctgaaattatagaaaagatggcttttaccatcttttatgaaaagaaccgc

SEQ ID NO: 421510 - DNA, 308 bp, Homo Sapiens
gccaaatgaagataagcaatctcagccgagtgatccatgctgttgacaggaaacaaatactgagctggatagaggattgcatgataaatagtaaacttgcagttagcagaatcaaatctgatggcactcgcatactctttgctctgtaaaagaactcccatttccatccccaggcccataaaacttccacgtcagacagacagaccacagaggtacatagcttgactcccgccaagtggtttctctacttaaacgagcacctataaacttccattttagcctcaggcaaaccagtcagagcttgcacc

SEQ ID NO: 421511 - DNA, 135 bp, Homo Sapiens
tgtgctggtcgattagaggatcccataggggagttaaaatacatagtttacgtggctaagtatgaggctttagatttcaagtcttataggggatgcaagctaaatgttataagaatatacgcgggaatggaatgg

SEQ ID NO: 421512 - DNA, 442 bp, Homo Sapiens
caagttccatgccagcgtaagtttcaacagcataatttagaacaggaagttactctggtaaccatataggtaagtgggcaagcagcaagtcaaactatagccttagtttcttataaggaaatagaaagtatactttatgaccttgcattccttatcgattaactccttcctccggggctatagtatcaaaattttaggctcgtctttttaatttaagtagactgtttacaagaaggtagaagagaattttagtaaatcccatcccattgtcttcaaaacttttcggatgttttgtataggactaacgatagtgataacctttcaccttccttgggttaacacacgggtccaatcaacaaagcaatttagtcccattcagtcaaactacggtaagcccaaatgacattttaaacagtctctatcctacgctggaatggaatcg

SEQ ID NO: 421513 - DNA, 310 bp, Homo Sapiens
  misc_feature (208)..(216): n is a, c, g, or t
caattccattccagctacgtatttgcagttttgtgtcattttgggaggaaatttcaggcatataacaaaatcctatgtggacagaagttagaatatgtaagatacaaatgatcagacaattcaatccttacttggacttctggatgtggttatgatagaatactggaacatttggaaggacagattcaaaataagaaaattaagtccnnnnnnnnnctattcttaacataattaggaatggattagaggaattagaggcaagttatcctccagataagcttaaatcccattttaacaattctcaaggaat

SEQ ID NO: 421514 - DNA, 619 bp, Homo Sapiens
  misc_feature (581)..(581): n is a, c, g, or t
caattccattccaggggtaacataaataatattcatttatttataataacatttatggagcacctaataattgtcaatcaaggtgataggcactgaccatcagccaaacagcaaaatagcaatggaccatactccataggactggaaagtctagcaggaggttgcagacaaatccgtatgtcattacaactgagcatgaagaaagcttgcatcaataagtcatgtgcttgggaaacacacagcaagacacaaagcccagactgggaaagtccagaaagattcctgatagaagtgaaaggtgacaccagaaagtctctcttcaccttagcaagcagaagctgtccagagagaagagacttccaggcagagagagaaaaaatactgaggcctaaggtagcagctggcagaaactgcagagaggaaagcctgactagagcatggaatacaagagagaaggagacagagaagtgggaggggcatctgatcagaagcatccattacagtagactcatctaccgtcctcctggaaggaaacataaatgaacttttaaagtcagtccatcttggtgattcagtgatgncactccatgtaaaagatctctcctcttaagtacagaac

SEQ ID NO: 421515 - DNA, 135 bp, Homo Sapiens
cacttccatcctagcgtagtttttttcttcaagtacatcaaatccataattgtaagtggcttcaaactaataatgttaaatggttatttagcagtacacagtatcattctacaatatcaaaaaatgattgatgga

SEQ ID NO: 421516 - DNA, 560 bp, Homo Sapiens
caatccattccaggtagtggaggtggaagggttgacgggaagaggcctgatcattggaaaggtatctgatagatggatttacattcttccgctggaacagttttacaagagctggtaagatatgccagtgagaatgaggcatattcaatctcattaacaactgaactagaaaaacctaatcaagcctcaggtaggtgacttctggagggtatcacataatcttggataccaggttaagatttggtggaaacatctcattttctgaagaattttagatgccaaaaattatcaaaataagatccctcccttcatcaggtaattttatcatgactcacctagtgtatatgaatcctgtgttaggaactaaggacagagagacaaaagacatcagcactggcctcaagatgagaaacactccagaaaagcagacaacaaggcagtgtgataatgacgtatacccaggcagctctgggaccacagaagacatccaagaggataccaagaacagggaaaggctctgcacattgcagaggctcagtagctacgcgggaatggaattg

SEQ ID NO: 421517 - DNA, 266 bp, Homo Sapiens
caactccattccagcttgtgagacagagcagataaacaaacacacattcaataacagaaatatacttatattaaggctgaacatacaaaatcaccattttggtaggtcaaaagtagagtcaaatatcagcaatatggtatggttgtgcataataaaaatcatcaaaatgcagtgagagggtggatggctaagaggctgagctgacaaacacccccatcccatatcccatacacagctacgctggaatggaattggggtaccgagct

SEQ ID NO: 421518 - DNA, 616 bp, Homo Sapiens
tcctatgtaggtagacgcagtttcaccatgttagcctggatggtctcaatctccgtgacctcaaggtgatccgccgtgcttccgcctcccaaaaggctgggattatgggtgtgagccactgcgcctggcctgagagtagatcttaagtggtgagtggaagaccagaattcacagaattttaaagctggaagagacttcaagaaccagttcatttctcttatttcagagatcaggaaatagagccacaggcttgtcagtggtagaactgtaacaaggcctaacaatttcctcagtctgtgtgcctcctaccccattattctacccatcctataatttgggagaaaggagagagaggaggaaggcaagaacaactaaagagtaaagcttcaacttataataaatgcttcgaataggtgctcagttacacaggtaatgttagagggattttaacaagttcacaattcggttatgcttagttgtgtggctaactatgtacactggtaggaataatgatggacatttatattaggagatgtgtgattgcacctatagttggactgataaccagggagctgaaataatgcagcttttgtcccttattgacactggcctagct

SEQ ID NO: 421519 - DNA, 596 bp, Homo Sapiens
  misc_feature (174)..(183): n is a, c, g, or t
  misc_feature (239)..(536): n is a, c, g, or t
ccattgccagcggtatacagattataaaataattacattaatctctgtgaacaaaccaaaagaagatggagtcaaaagcatgaaaaaggcacaaatgactgtaaaaactcggccatttatatttgaaagagaagaaaaatgaatttctggcaaggaaaatcataccaatcaaannnnnnnnnnaaaagaatggtttcattaagctgaaaaaatgaacagtaggaacaattaaaaaggcnnnnnnnnnnnnnnnnnnnnnnnnnnnnnnnnnnnnnnnnnnnnnnnnnnnnnnnnnnnnnnnnnnnnnnnnnnnnnnnnnnnnnnnnnnnnnnnnnnnnnnnnnnnnnnnnnnnnnnnnnnnnnnnnnnnnnnnnnnnnnnnnnnnnnnnnnnnnnnnnnnnnnnnnnnnnnnnnnnnnnnnnnnnnnnnnnnnnnnnnnnnnnnnnnnnnnnnnnnnnnnnnnnnnnnnnnnnnnnnnnnnnnnnnnnnnnnnnnnnnnnnnnnnnnnnnnnnnnnnnnnnnnnnnnnnnnnnnnnagggaaaaagacttgtgcagtagaggagggtacatctaaaaattagatggtgcccaagag

SEQ ID NO: 421520 - DNA, 492 bp, Homo Sapiens
cccaatccatgccagcgtaatttctaatacgggtatattttatctgccaatttagagacctcgggagttcaatgatagaagaatactatatttaccatcggtgtataagacacaatggatatggttgtaatagcttgagtactttcatataaagtaaaatcaaatatacttttaccattctttcatgagttcaagtcataaaagagggtataccatttatttctgaatagtatctgtactagtggtgatttcttgactccataatgaaagaactaaatttatcagatatcaatatcaatattataaaatccttcatgccactggttttagaacagaactcacattgatgttatcatagaacaatgtcatgtcagatttttactatctgtggttaacattgcagaggacctaatatgttatatgatagttaaatgtatagcaaagagaaacgataaggaaattccaatgtccttagaggggtctggcatatta

SEQ ID NO: 421521 - DNA, 515 bp, Homo Sapiens
caattccatgccagcgtacatgcggtgccagctaggatggaagtgcaagatgacattaataccatcatcgttttgagttaagaattccggatcctttttatggtttgagtgttttcccggtgccttttaagaaacgaggggtggagtctggctacagaaaagtaactgactcccagcttcaggcaaaactaccataaagggccatcttagagcttccactgacttccttgaggccccaaatcatggacttaagagagggtgctacccagctgaggttatttctccagcatcagaacagaagatatccagaccacaacatttatggagaaaaacgtaagccaccatctctgccaccaaggaccatactctctaattttcaaaaatatatatgctcacgaaagcacaatagacaaagtgagttttataagttacaaaagaaatagatgaaagaagagatcactatgctcttgagtgaccgtgaaaggctttatgaagaagacagggctgcagctacg

SEQ ID NO: 421522 - DNA, 521 bp, Homo Sapiens
caattccattgccagctacaaacaaggtgggaaatcattccctggagtatgatgggagcttaccggtgcctggaactgaagtggatctgagatgagctatctcatttaataatcctaacagccctgatatggtcccattttatactcaagggaccgaggttccagaaggctagggaatatgcttgatatgtcatcatgaataacggatagagccataaaccaactcaaatctacttaatgtcaaagccagttattcttaatagacttctctgatggatgagggttgaaaaagtcctgcccagcaatagggggaacgactcaaagacagctagagggctttgccagccagagggcatgcaggaactctgaaggggggggtcgttaagaactaaaatattccatttgcaccgtagagctcagaattaatttccactgtcctgatggagcaggtgggaaggaatttgacctctccccttggcctagaaagtggtcctttctggaagcttctgagcttgctatgg

SEQ ID NO: 421523 - DNA, 635 bp, Homo Sapiens
caattccatgccagcgtattcagctgtgatcatgaaaatactgagttatggtctgagatcgtgtagagcaagaagccggcagttaagaaagcatagctaagcaaacgggcccgggacccatatctgctgacataccgtgctatcctgagactgccgcagaacatttgcaaagccgtgttctctaagaattctgcacagtgcaaacaggcatgaggggaaaaaatactactagggaacttctagttcttgctgaaaaggaaaattttgagctctaaatctagcactaccaagcaagagaggcatctgtggctgcatataaagctggtactccttggcttgaacaaaatccctcagtatacagtacttaaaataaacaaagctcagaacagtcagctacacaggcatgtgttttggccacatgcggccggaagaaaatagctatgcagtgtgcatgccctagtttaaaccaagcctgaataccgcacagtctcattcctctcccggtctccttttctagacagaaatacatttccctttaatgtacaagtgagaaaaaaatatgtttacaagacagtccagtgccttgataaaagcacttactttgaaagaacaggacagactacgtattcaaaaca

SEQ ID NO: 421524 - DNA, 383 bp, Homo Sapiens
aattccattccagcgtactctgtgcttacacattttacaaaatgggttcacattacacgcacactgtatcctcactccacttactagattttaactatctctatgattaaatgttcctccaataatttttgatgttgtaaacaacctatctcactgatgtgccaaaaccatctctctacggcctgacattccttccagtggtttccaatgcttctgccctttgaagaatcgttacaatgaacatgcttgaacagtctgaggctgtgctagcgggatgtttcttccagcagattccccaaccttgggtatcagtattcagttaagatacggagacttaagcaaacagctgcctacgctggaatggaatgggggtaccgagctcg

SEQ ID NO: 421525 - DNA, 624 bp, Homo Sapiens
caaatccatgccagcgtaatgacacgtctcccccattcacgtcagaatcactgggaatgtgaaggtgctgaggactggctgcacatcagatgctctgattcagcggtctgagatgggacaccctggatgatgattgtcatgggcagccaggtctgataactcggataacagcaggcaaagaaacacagagaggaacagggaacggaagtaaggaaggggaacggttttcatctcatctgccatttggggtgacgggttgtaggtaccggaaatgctctaccgtgagggtttcagaagtggttaccaactcattctgagctgggaatattaaatatccaggggaagcgaagttgtcagtatatatgcagatattttccatttaaactatatgtgtatacacacagatgtactcaagtccaatttgtggtgcctgcactcaagagcacaacagccctaaaagcctcaaacagaagaacaccacacacagtatgccggcgctttgcagtttcctctgtagaacaccacacacagtatgccggcgctttgcagtttcctctgtagaacaccacacacagtatgcgggcgctttgacgtttcctctgtggaacaccacaaaagtatgcc

SEQ ID NO: 421526 - DNA, 579 bp, Homo Sapiens
  misc_feature (496)..(514): n is a, c, g, or t
ttatagcaatagcacctgttggattactatagatgtgtgataagttgtagaatcaggcagtatgagagttccaagcttggttcttcttattcaagatggttggggctatttgcatctcttgatatttcatatacattttaggataggtttttctacttctgaaaaaatatcactgggattggggagggaatgtatcggatctgtaagtcactttaggtagtattgacaacctaacactattacgccttccaatctatgaacaagaaatgtctttctgtgtactggtgtattctttcctttctttggtgttgtgtagttctcagcatacaaatcttgggcctccttggttatgtttatccctaagtattttattatttgggatgctatggtaaatgcaatctttttcttaatttcctttggggaaattcatggttagaaatgcaactaatttgtgttgtcgatgttctgtcctgcaactttgcagaatttttgagtnnnnnnnnnnnnnnnnnnnaattttcacagttttctgcatatagatcacatcagagagaactttacttcttcctttcggatgtg

SEQ ID NO: 421527 - DNA, 451 bp, Homo Sapiens
  misc_feature (337)..(337): n is a, c, g, or t
  misc_feature (435)..(435): n is a, c, g, or t
aaatagtctatgtagaaattacaagaaatctaccaaaaaatttcctgcaaataaatgaattcagcaagtacatgagatctatgaccaacacatgaaaatcaatctcatgtatatattctaacaacaaacatacagagactgaaattaaaaacacaatacccatttacatggctcaaagaaagtggaatacttaggtatacactaaacaaaacgtgccatatatttgtgctgaaattacgaaatgctgatgaaagaactcaaagaaggcttaaataatgggaagggcttatcatgttcatggatgggaatactcaacacagtaaagatatatattatngtcaacttaatcgggaggtttaatacaattcctatgagaatcccaacaagatttgtgtagttctagaaaagcttctcctaaaatttatataaaatggnaaaagaactaaaatat

SEQ ID NO: 421528 - DNA, 597 bp, Homo Sapiens
  misc_feature (266)..(399): n is a, c, g, or t
cagaccatcatcaggtagggactgcaagcacagaggactgggacaaacggtggataattcaatgtagtattcaaggaatagaaaggtcttgtggaatactgtatcatcttcatggtgggggttgcagttgtgtttaaaaaaaatcaataatctcaaatacttaagccctcctacttcattatactttttaaagaagcagtgtatcttagcagttagaaaacttggattctggaggcagtttacttaatcctacaaggggataattnnnnnnnnnnnnnnnnnnnnnnnnnnnnnnnnnnnnnnnnnnnnnnnnnnnnnnnnnnnnnnnnnnnnnnnnnnnnnnnnnnnnnnnnnnnnnnnnnnnnnnnnnnnnnnnnnnnnnnnnnnnnnnnnnnnnnnaaatcatttgatgataaactgggataatgaacataaagttttgaccagcatagggaaagtatccaaaatatgttggctattataattcgttccttgtttcctctagaagtttatgtgcttgatcattgtggccatccttttatcgcaccagccactcattgaacagaattctaaacataaagtagaaaatagtttccc

SEQ ID NO: 421529 - DNA, 585 bp, Homo Sapiens
aatattaacatgtatggttatcacatggtgttaaggaattataagggtacaagtgtactttcgcatatcactcgttttatgctaggtgaggatatctacacaagatatgtttcttaatattaatcaacccgtgatggatacacatattattagataggtttagcatttcgggactttgaatgtacctggaaacatcacatccaacaacttaaatgaagatgaaaagagaaccaatatagtatgaagcaggaattttattacttggtgcacggccaaagagcctgtccccactgcgaaattactcatgatacactcaagatgttttactctctagtctattcattataactacaaaattaaataacgctttacaggaacgcttttaaggattgctcctcgttattagagatagcacaggaagaaaaagcctttattttaaaaaatagtctccttaaaaggtatatctgtcacgagttctgtatcctgctagtctctagggaaggcagatggatgtgcccgttcccatgtgcaggggaaatgtaacagacctgagcgagcctctgatgaatcttctctatagtccca

SEQ ID NO: 421530 - DNA, 513 bp, Homo Sapiens
caattccatgccagcgtattgaggggagtaaatggttatagagaaacagagaatgggaaaaagtataataaactagaggatatttgcacaaccatgacactaaaagattgacttgtagttattctcttgggtaccctgaggttaacacgtaatacccattcaactaagcctctataaacagttgggttttccgcaatcacagccactattcccacttcagggggcagcagtgttcagagaaaagccagatttagctcttgtgcaataaacaccagaaaccaaaagagctaggaaagcggtttacgtctatgcccaccaggaacccttctctgctataaccgcatgaatgaactggtaagaatgaggtctcaacaaagcttcaagacggacgttgttaactagttgctgccctccaagtttttggcaagacagattaatgaaaaacaggtaacttatttttatacaggctcagtatatttacaagcagaagggaattctgtacttttcaaagca

SEQ ID NO: 421531 - DNA, 503 bp, Homo Sapiens
aatccattccagcgtaggtgaataggtgtgtttactataggtgaatgggtgtatattttatttggtccctgttcctaaaacatgtatctcatttctgaggagaaattccaacgagttttttagaaaataaagtggtgtacttgggctcgacaaatatttttaaaactaagcaattttataatgggttgtatagttatctttcaattaaataatcgtaatcttacttggcaatagagtgaccagtaggtaaagcattatagttttaaaattagcatagcaaatatatagtattaagttttctttactttagctctttgcagaatcggtaaaagtcgtttcagtgggtggaatggaattgtggaaacttgagaagtatatttcattgggataaatatgtgtcagaaagagattctacaagcgtgggggggttgagttaaagaattatacaattttgaaaatcagtttgtccctgcttaatgtgtaaaaagtggtgcggtatgtga

SEQ ID NO: 421532 - DNA, 517 bp, Homo Sapiens
  misc_feature (195)..(203): n is a, c, g, or t
cctgtaccatcatcagcgtagtcgggctcctggcccatctgttgggcaaaaagcgctgagagattcccagaattcactctccctccacaacaccatcaagggccgcatttaaagagttcccccgactctcaggggataccgaagagactcctggcgctggagtcctttttttctcccttaagaaagaagctggcnnnnnnnnnccccccaaataagatattcagaatcattttatctccagcccgccacactttaattaaggtcagtcattcaaagacttctatcgtgcggctctcagcaagagcagtgcactccaagggcactgctcctctctgagcgtgacatacaagggaggcgcggcgcggaccgcagcctgcgaggaactgattctttcacagatctcaagcctctggtgatgacagtggaagagagctcagttaggaccaaaaagggcgagaacatgattcagctcccaagagggtttccgaacctatttttcctagtgaaagaaatattt

SEQ ID NO: 421533 - DNA, 418 bp, Homo Sapiens
aattccattccagctgtaatacaagttatcaacacatgtgtaacctccctttactacagctgagagtggttggggtgtccaggcacgggagaaaagaatcccaagaacatacatccctcttcccaatttacattttcagtatcctgaatttaagcttgttcaatgaatctgacagggagtgctactgaagtctcaactccaaataaatagtttaaaataaaaagttgtataaatattagtctgtgccagtggtgcggttggagagggagtgctataaacacaaagtaaatgaaatgggatctagttgggtggggtaaaagcctacttagacgggttattatagagaaaattgtgtggtgtggtgcgacagaatgtacccatgtggctaacctagaagtgctacgctggaatggaattg

SEQ ID NO: 421534 - DNA, 288 bp, Homo Sapiens
caattccattccagcgtagccagatctttcggttatgtcggacgggtagtaggtggtaggtgcctctacacgggttaatcagggggtgctagaaggttctagaaaacagagagggtgaactatatgtaaaaccagtaaattatcctcagtcctatttctcttggtagatggaaagccccagtatgcattctttccctttgggtggggaggatataaaaattagtccataagtggtggggggtgtgtaacaaatgaggtggctataacccttacgctggaatggaatgg

SEQ ID NO: 421535 - DNA, 528 bp, Homo Sapiens
  misc_feature (53)..(61): n is a, c, g, or t
gcagcgtagtaggtctgtagcatcctgatgcatatgcatattcaaacccaacnnnnnnnnngggcatcagcagtctggtgtatatcagtggagcaccaatattggatatatcggctttgaaaaaagcaagtcccactaggactggggcattccaaaataaagtgagcagaatcacccacatgtgcaagggcttcacacattaacccaccccctgtagcatgtttaaaaactgggtccggggcttgggaaagagctagggccttagggtctaggagttcccatctcagctaacgtatatggtatccctactattaggacatcaggaacgcaggtgatctagtccgggtctgaagagccagtgtacttgaacagacataaagaatctgtccctataagaaatatcatttctaacaaagcctactgagaccagccgtgaagaggcgctagctgggttgactcctctgggtgagttgcttggggtcttggcccggagtgcttggagatcccattttgagctgtggtcgctcg

SEQ ID NO: 421536 - DNA, 209 bp, Homo Sapiens
aatcccattccgattttctttctcatctcgctaactctcatacacatcaagtttagtaggcaagataattttctctcctaatccaaatctttaaacacttcacaaatacctttatagacaggaataggagttggctaaaattttaatttgggttaaattcaacaaagtcagcggtgtgcccaacactatgctacgctggaatggaatgg

SEQ ID NO: 421537 - DNA, 531 bp, Homo Sapiens
ttcctatattactaatcaagtatattttacaaaataccactgagtgtggtgcatccaagattctgaggatctaatataaattctggatctaacaatttggtttctgctcacagtcatctccaaaatttattgagtttccttagattttagatctgatatgagccattttaccatgtgaacgttattacaccctcaccatatcctctgaacgggatatcacaattctcattgctaaggtgaaacaccttaagctcagagaggtagcatcagttatataaagtcacgcagcacagaaagaacagaggtcaggcctgtaagatttcaaaatcacaccatcttagctctctctgtaccagtaacctgaagttacattcctccaatggcagataacagtacaacataaaacggtagctcttcttatcatcatcttgccaggaattaaaaattgaataggatagactgtgaaacgggaagccatctcacacataaagaaggattggttccaaaatgtgatacgctggactggcatgg

SEQ ID NO: 421538 - DNA, 569 bp, Homo Sapiens
caattccattccagcgatagctttaatggtgagtaagcggtgcagctgggattcatgcctgggtccgtccacccctgaggccccagcttgtgactcctgtgctgtgctgtccgccagccacagcacggctcacggcacaccgtgagtgccacggcatggctcatggcacatggtgagtggccccttcattcctagaaggcagtcttgtgtggtagagcactgagccgggagtcaagagacatgggttccaaatccagcggtcattcccattgttctgtgatggtgggcaagtttcttactatcttgggttcccctcgaagcctcattttccccattacatgaagggttagattctataaactgtagttctcttccagctgtaagattcagggaattgaatgtacctcgtaatgcattggtgagggtgctgccagagagtggaagatggtgggaatggcctagaccagagcaggttcatagccaagggtggttatgcagattaagggcctagtagcaggggccatagccctgctactcacagatacgctggaatgggagtggggtaccga

SEQ ID NO: 421539 - DNA, 472 bp, Homo Sapiens
aattccattccagcgtactatatggatgggattgggagtatagacaaagcttctatcctcaatgaggttacattatagagaaatactaagcaaaaaatgtctgggacagggcagaaaagacagcactgcagttgcacccgcacaggtgatgtccctcaagaacgcagttcctggagctgggaccacgttaattcttctgtctacctgcagagggcgccattgcaccaggtacgctttcagtctcaccgggtaaaactagaagatggcagctttacaaagaatttcaagaatcctaaaacagtaaaggggtcttatgtgggctaatggcatgaggtgctgaacttaagtatcttcaggtgctggagaaaagcagaaattctgcgttgaaggggagaaaatggaggaaacgtgagacaggtgtgtgtggatacgggatgtattcatttgtttcacctacgctggaatggaattg

SEQ ID NO: 421540 - DNA, 564 bp, Homo Sapiens
aattccattccagcgtacaatgatgccagggatatgaagggagggaatggctaaccaggtcagcagacgtcacaggatgtatttgagctgagtcttgaaggggtgaatgttttgtaattaataattaatgagatttggttactgatggtgcataacatttattgaatattcacaggctctgtgctaacggcttggcatgcttttagtcctcagaactgccctctacggtatagatagtattcctaattccatcagatcaaggacatggaagcttagaagagtgaggaaaatgtcctttgatcacatagtagaaaatagcagagctggggcttggacctcaggtctttctgactctaaattccacagcctgaactgtcacattatgtggcacaaagtccatccattctagctagggagaaagatggaagagacttcatggggcgagtatttgtggcaagtttttaggcacgaaaaagacaaggtagaagaaagatattcttggtaaagggaacaggatgtgtaagggcgcaaagttaggggttccactaggctggaatggaattg

SEQ ID NO: 421541 - DNA, 142 bp, Homo Sapiens
caattccattccagtagctggaaccaactctctatacccggctgaggttggtgggtcttactctgtccttcagagtgttaatgaaatttttcttagcttcccgtcgttcaaatgttttttaaacatacgcgggatggaatgg

SEQ ID NO: 421542 - DNA, 376 bp, Homo Sapiens
tatgtgtaggtcacagtcttattctagtaacttagatgatggctttttagggtagactattaatattaaccaaaagatgactacaagtgacagtgaccaatggcaagctttgttcttatgtcgtaacttcatcagctgtctcagggttcaatactgacggcttttcttatctcatatttccataagagagttactgcatttctaaagtgttctttctttcatcatcttcaattcatcatttctcagatgataccagaaagccagagctctttctagaccacgtcacacatcacatcttgatgagctgaaatgccttttcaatgccgcaattttactgcggcaggcttcatggcctgtgccctttcaacatcttcct

SEQ ID NO: 421543 - DNA, 589 bp, Homo Sapiens
tccatgccaggtagtcagtataatgtaaaccagctagtaaaatgaagtttcttttttcatcctggtgtgatttggaaacaaaattaagaaatagagtctcttttcttcctcctactttattcaacagccctcactccatatggatactgtatacttgggattttagaatattttaactcttaaaggaatgggcagtggaatcacaatatcactgatttagcagatcctgggtaaatattcgtcatgtgatcctgtggcaatcctaaataggaattcacctctttctcttaagctttcccatagtactttatatctctttaaaaaaatcagtggtttacattactacattgaaagtgttgtggaccaccaacctggtttctgtctcagaaccttagctaaaggcagggtattcaaatatcccatccttatttcctgtcatttcttgtcatgagtcttaggtcctactactatttacctgcttataattacacatttagtgtgaagtgtgttatgtttgcatgcttttctttcacattattccccctaagtgaaatgccttcatacattgtgtgctaattaatctgcagtc

SEQ ID NO: 421544 - DNA, 288 bp, Homo Sapiens
  misc_feature (167)..(175): n is a, c, g, or t
aagttccattccagcgttctttatttcttcaccagtgatggtctgaatgatgacttcaatgaagggcaaactcaggcactctaggaaagatacattactcagcgtgttatgcctgacacgttctgggagatcacaggacaatcatcttcatgtgcaacatgtggggnnnnnnnnnaatttattggttggttttgggcacatttacagttaaattccccagatccaagaaaatgacttcccagttcctggggaaaataaattacgctggaatggaatgggggtaccgag

SEQ ID NO: 421545 - DNA, 601 bp, Homo Sapiens
  misc_feature (379)..(448): n is a, c, g, or t
aatgccatgccagcgtatataagtagttatcacgatgaattctgaaacactgaaacactgtcctcaggggtctcagaagaaggagcataactaaacatagtgtggagaaagtacatgggaaagctcactatcaacaatatatactataggacaaaattacagtaacttgggtccatatgggtcactgttcaagaaatctggaaacttcaaaagccaaataagagaataagttgtcctaacattggtaactatcctgaaaatacctaaaaacaaagcaaaaaaacttagcaaatcagtaagaaatcaaagaatttgataaccctaagtgcgggcaaggatatgaaaaaacagaaatggtttgcaatatcctataaatatnnnnnnnnnnnnnnnnnnnnnnnnnnnnnnnnnnnnnnnnnnnnnnnnnnnnnnnnnnnnnnnnnnnnnnctatggcatgttgcttcaggagctacaagaatattcatgaggcaatgtttataatagataaaaaatgagaacaatttagatgctcatcaatagaagaaatgatcaatggtatatattcatgcagtggaacactatacaggtgtgtaaataaat

SEQ ID NO: 421546 - DNA, 304 bp, Homo Sapiens
aattccattccagcgtagctccacaatagtacgccaaaactatcatcacaatagtcttggactccctggtcccactcctaggtaatctacactcggtggccagattaacctggtgagtacacatatagcaacatgatgttcccgggctcaaaaacttctccaacaaccccatggccttatgaatgaagttcccagtccttagaccagaacactagggtccagtcccaccatacctttcagaacttacatgtcctggcccggcacatcccacccaccctacgcgggaatggaatgggggtaccga

SEQ ID NO: 421547 - DNA, 246 bp, Homo Sapiens
caattcaattccagcgtatggtaacatatgtgtttctaccagatggggaattggtgggagggcaggaactgtctattcatttatttcttcattcatgctattggcaggcactaagctagggaccagggctctcacggtctggctgggagataaacaggtgaacttaccagtatggcgtagaaggacaatggctgtgatagaggacaaatgcaacgctacgctggaatggaatgggggtaccgagct

SEQ ID NO: 421548 - DNA, 614 bp, Homo Sapiens
aatccattgcagcgtatcgacgtgcgtatctgcatatggcagattcgttcttgatgatttcaacgcgtggtataagaatttttccttctgggagaagccttcccgtaagccatccagtctagagcagccagctatttcctttaagtgggttatttaacagcatctatctctgacactttttatttcttttcctcctccaattagaatgtaggctccactacagcagagaccttgttcatctttatctgatgtatccctaggcctcaaaacagctgttcaggaaatgttggttaaaggaatgtattaatgaatgaagcagtgatgtagccagtatttctaagttaatggataagtttccaacataaagcaaaaaagccttgtcagtgtgtacagccatgtcactgcggaatgtacactttcctttaaaatagcaaaacgaaatctcagataatcaggcctcctttgctgaacctctgaagttcaggaatcctagtctgggaccttccttgcttttgacagagtgttcacagtgcagagatcctagaacagaatgtgaattggttcttctgccactccctcaatagacttaatttgcaagtagttctgccccaggg

SEQ ID NO: 421549 - DNA, 327 bp, Homo Sapiens
aatccatgccagcgtatcaatccaatagtggaaaaagcttaattttccggttaaaaagacaaaagcctaaaaatctcacaggctttgggttcactggccgatcgtcctgagggttaaaaacaaactgcgtgcttggggatggccccaagcaggcagagccttccctggagatggggttcctgggcactaactgtgttccaggggatctgagcaaggctgggactgggttttggcttagtagcaatgggaggaactgcgtcattgacttcatccctgcggtcatgggaggtcacaggaaaatacagcaagtacgctggaatggaatgg

SEQ ID NO: 421550 - DNA, 551 bp, Homo Sapiens
aatgccatgccagcgtatagaacccttaatgtttccacttctggaagttacgtcaaccttcattactcatggtttgtacttaaggtttagatctaagctacgacaacagcataccatattttcatcatcattactcttttaaaaatttgccttcattccagtttcagggagttggggcaaggcctgtgatattggtgtcttgaaaatatctcagtggtctgtcagatatgaggttgatccaattttaataatagttttttctacttcctgatctttaatgggttgaaattatctgggcttgtactggtagtgtagtcataataatttttgaatggtaggtgctcaagagagaaaacagacacaaagtgttctgtatgggttctatattattccccgggaatgatgtgtttaacaagttttcttttaaactatcaactacataagttttgtgcagggggggtgtcttagcatgtgcgttacaactataagtagtacacatacatgtcttctatattcatttagaaagatcatatcttaaattttttttcatt

SEQ ID NO: 421551 - DNA, 603 bp, Homo Sapiens
  misc_feature (393)..(446): n is a, c, g, or t
  misc_feature (560)..(560): n is a, c, g, or t
caattccattgccagcgtaatgagaaataagccattctgcagacagacacaaataaggcacagaacctagtgtatgaaaaaaaagctactaaaatatgagcatggaagagcattatggcttggatacattcaaaagcctcttgggtcttttaataaaacacttgataggtctgcacatccggccagagtccacaaacattactgcaaaattaacggggcagcttcagacccagcgagtgccatgccagggaagatggtttgtgactgcttctcagacagaaggacaactgttctaagggcagcaagggtggccactgtgggcatggccaaagctggcagtgtgtcttacgggaggcatactgggtcacaatgataagtgttaatgaaaagcannnnnnnnnnnnnnnnnnnnnnnnnnnnnnnnnnnnnnnnnnnnnnnnnnnnnnagaaaccaagggtgggggacgtgcagagatgtgctatgtgtgggcaagtagaggccggtctggaatactctaaaagcccatctgggcagcagcgacttttctgacacaaatagngccatgagattcagggcaggtatggctcgaaaagaaatccact

SEQ ID NO: 421552 - DNA, 590 bp, Homo Sapiens
  misc_feature (138)..(243): n is a, c, g, or t
atgctggggtcgatctagaggtcccccaatgccattgccagcgtatcagccacaggtcaggattaggataaagtatattcacgcgctaattaagatcagaacaacggtgcacagacatgcaacgagattcaaccgtcnnnnnnnnnnnnnnnnnnnnnnnnnnnnnnnnnnnnnnnnnnnnnnnnnnnnnnnnnnnnnnnnnnnnnnnnnnnnnnnnnnnnnnnnnnnnnnnnnnnnnnnnnnctgaggtacacatacatatattacacacccagatgtgcacacacacgtgtgagcacgcacacccaattaaggaatctgtctatacaagaggtttactcttggagggctgtcatgaaatcacaagctctctatggagtaacccagtttggcactgttaattcactaatggaaaaacagtatttacatccttccctcatttgaactgcatctttaaaatcatctagatcggtgagttggctctcttcactgtaacaataaaatattaaccaaaatgcatcacacaattaagacagcagatgttaccctctgggatggagctaaaatgcatctacgctggaatggaattg

SEQ ID NO: 421553 - DNA, 634 bp, Homo Sapiens
caattccattgccagcgtacaatccagttcgcagagtatatacaataccattgcagcgtagaaatgagtaagtattcaatcaactaagtgatatatggcttcttaaagaccttgatgttggtatttgataatgagatttttctttcatgcagttagaaaacttggaacagttacgtaaggaatcatctgtgttctcaggttccatctcagtagaactggtaaattttttcaaagtcagtgggaatgtatggtgtccctatccttggtgtttctctaattcttttcatctgtggcccattttcttctcatggtttgtcttttcttatatggttaaatattcagtcatcacttaaatttgggctgccaatatagttatacataatctaactttctggagaagatgaatttagaacaagcaattctccagagctggaggacgcatcagcactggcctttagagtggggtagtccagtttacagtctgactccactggttctgtgactggctcaggcaaatttttctcattggaaatatgaagatgatgatagtgcctattgaacaggaattttctgagaattaaccagatttagtacttaaagaccttggatagtactgggatataatagcaacaat

SEQ ID NO: 421554 - DNA, 199 bp, Homo Sapiens
aattccattccagcgtatggtaaattagtttccatatacatcatcaaggtttaatgaggactttagcatatggttgatctgcagatggctaatctgaggatgtgagatatagagagatacagacagccaactgaattgggttatatttcttctcgaagcaaaagtgctacgctggaatggaatgggggtaccgagctcg

SEQ ID NO: 421555 - DNA, 650 bp, Homo Sapiens
aattcctgccagcgtatatctcaccttcttcccccaagagacgggctcctctgctcatcgctggaggccaccagcctcaagtctgcatgacttggtcttgactcccactagtaacggacacaatctttcagtgagagacccaatttcctatgagagagaatctgatttcccaagatttagtcgtgtccaccatgcccataaagctgcttccgggaagagatgagtgtattgataaaagcacaggggtctgattatgtccctcagccaaagctgcagatgcgggcagatgattttacaaaagcatgagggctccaagacaataattaatgattaaccacttcagtatcctattctattcatccacagctagtcgttgatgtcactagtgcggatagtgtaacaatcgtgtctcatctcagggcatgctagatttgatttcaaaattttcaatattttctatttctgatttcaggtgtggtgccacatttacgtgatgagataaatagaagattactttacagaattatgttagaatgtttcacatggttttcaataactaaggaacaccgtgatatcatcattagtgtttgctacatcacgtgaaggcataggagtaacaccatgcctcgtccaaaaagaatcagagggta

SEQ ID NO: 421556 - DNA, 625 bp, Homo Sapiens
ccccaactccattctaagcgtactgaaacggccaaacacatctcggtaggggtttactataggttcactccaggaaggaaggtaatgtatgctgttagtttattggttggtgtgggggagagtttacttcctgctccagccttgccccctacacatgtgccacatgctttccttactctgtgctcacctctccactgcagtcctagggcacatctggacaccaaggtgtggtgagcctccagaagataacctggcctcctcaccccaggcaatgacccaggagtagcggaattactagaagaaccacagcccagcagagaagtcatcctcttcgcttattatgttattccatagtagtaactgaggcactgcagagaaaaagtctcaagattaaaacctcaaaaactcaggagtgaaaagtggaacaagcgaattatagaaaagcctggcttgaaacacactccaatcagacatttccgttttaccaagagtggtacatcacagtactctatggatgccagctaccgtagttctttttcctttaggagagactaagatactgggaaatgaacgtggtgtggtcaggaataaagtggtgacagatagtatgtgatatgtagagtgg

SEQ ID NO: 421557 - DNA, 193 bp, Homo Sapiens
caattgccattgcaggtaagcactcgagttgcagggctcagatgccataactgttcgtacgatcccataggcggtgtggctgtgctttcctatgcctgagcgataaggggagggtagacttactttgagaataaactaacaaattatcacacccaagatttaaattttcacccaaataaaaatcctcagaatg

SEQ ID NO: 421558 - DNA, 337 bp, Homo Sapiens
  misc_feature (152)..(180): n is a, c, g, or t
attccattgccagtcgtacataattcaaacagcaaatcggtggggccatcagaacttgggcagggttacgtaacattggtcaaacaaggtggacttctagccatttcatacatttttaagatctggtcatatacatggggggtaaaaatgtnnnnnnnnnnnnnnnnnnnnnnnnnnnnntttttcaccaataaaacatatatgctatctagagcccatttactctatgtcagcttgggcttcgtggtgatcaaagtgtggcaaagctaaattagatatacttatatatccattaatggggcttagaaagttaacacacaaaaagaaccaagtgttt

SEQ ID NO: 421559 - DNA, 154 bp, Homo Sapiens
cagtgtagaggctcatgggcaggaggtaggcacagatcatctgaaggggtcatctattaaagtgtgcatccagttcaatggcacacttaaagatgtaaggcacgtaggccaagagaaaattaagcccagagaagaaaagcctcaggcttgagag

SEQ ID NO: 421560 - DNA, 624 bp, Homo Sapiens
tgttttcggattcacccagaagatgcagccaatcttagtctccccgagacttcgttctcaacggggatactgagtgtgaggtgagtgtcatgtggctgggggagagtgcttgggcggatgatgctgaagactgatactgactgtgtgtgagacagtggaatgatggcggacagtgcttgggcggacgatgctgaagactgatactgactgtgtgagactgtggaatgatggcggatagtgcttgggcagacgatgcaagtgtttgaagcctcaaaggtagcagttttcagcatatgggtacctgacggatttttagctttagacttcatccgtcattcttgaatagttgaaagtccaatccaacatcctcattcaatcgtatcacattaacaatataataaatactattttaaacattagattgcttaatatatagtatgatgtggggggcgacttgtggaaaaatacaaattcacaacagacactgcaaagtaatttactaatgttatattccacaagtggcatcgatacacacagcggtgtttatcgatgccactctttttcctccatactgtagaaggaacacgaatggcataagaaaacaaaatagacttagtcatccaa

SEQ ID NO: 421561 - DNA, 297 bp, Homo Sapiens
tgtttatgcgatgcacacccaaaagctacacacctagcaggcggcggaaccgtgccgagggttgcagattcagttcccaggcacctccacataccctgccctcaggggaaaagaatttacaggcaacaaacttagctagggtccagccaagttatgtcacaacacaaggtccttcattatgctaatgccttaaaaatgtagacttgaaatgacatcccagccaataagatcacgtgacccagggagcacgcctccggcaggggaagtaagtgtcagtagattgtggccagacatgtc

SEQ ID NO: 421562 - DNA, 563 bp, Homo Sapiens
tgtttatcggatgtcacctaagacagtcccctagaatccatgtaactccaggtacaggagaagctgtcagtccttgcggcataatctctcagactgacagatctttatgggagccgagccaccaccttgctgtgtccagcaccacgtacctttctttcttctcttcatttagggtcacacacactccgggaccatggagggaggtatcagaattatcagtgggcctaagaaacaactctcccacccacttccaggggcaaatggagagagcattaaagccttcaaaaagttttcttgtccatcttgctgcccattgagtaggtaatgacgcccctgtgagccagatcattttcccagaaaagagaccttttgtggtgaccaatggttatatttcatcgttgttaatagtggactccataccttttaggtgtcttagcatagaatacaggtgacgctagttatacctacctcataaataaagtatgtaaggcagtttggctttggtagctcttgggcaaactgagtctaacacacagagtctgtgttgaactctggcgccattt

SEQ ID NO: 421563 - DNA, 565 bp, Homo Sapiens
tatggattgccactcagcaacaatgtaaatgattgtggaagagtccctggtttggcagagatctgctagaagtggattccttaagaggtatcaagagaataccctggataatcaacaatgcttttgcagtgaataaatgtgatgggggagttcctttatctttctaaccaaaaactgcaaaaacctttagaacaaagaaattattaaagcttacacaaaaccatcattgattacatttccccatgtggttttcctctctattgtagaaatcctttcctaattcaaaagaagctattattaaaaagctaatctcttcttatatgaagcacagtgtatgctgcaaatatcttaaattctgttctaaacactgttttactgaagggttagaatagcaggactattatcaagtcataagagaaaagagtagacacctctgaataaatatatggaaaatcttatcatgaaaagtggtttatttgagtacaaagagtgacatgttcagaaaagcttttgtctttttgggtaagcaacatacaaaattgctggaaaggccatatacatgtcg

SEQ ID NO: 421564 - DNA, 158 bp, Homo Sapiens
ctctacgacgactccccggtgtatcgctgccacttggtcggatccctgaaggtctatctaacatctcagcttagaacagacagaggacattaaggagagagacagcagagagttcaggaccattggcccgtcatccacccaggtcagaacccggggtg

SEQ ID NO: 421565 - DNA, 466 bp, Homo Sapiens
  misc_feature (37)..(37): n is a, c, g, or t
  misc_feature (432)..(432): n is a, c, g, or t
tgctgatcgggtctagaggatcccggtcatcgagtgnggtagaaaatcattctcgcgtgactaagggctgatcctgacttagaagttcaaaggctgtgcagagcataatatggggcactttaaaacacatctgtctagacccacattggatgataaatgccttttatctgatctctttaaactgggaaatggacattaagtatttgccgggtaccacttgtcggctaagaagtactctaggaaacttaacgtagggtatagctagatgttacttgcttctttaagaacaggatacagcacctctaccatggttcttcattcagagcagtgcaatggtagagttgaaattcaaactctggcatgtctggcttcaaaggcatgctcctgccactcaccacaccagccagacaactttgatggtcagaggtgttngtgagtggcatcgataaacaccgggtaccgagct

SEQ ID NO: 421566 - DNA, 551 bp, Homo Sapiens
tgtttatcgtatgccagagaggctcctctgttctggaacttctctcgtggcagtgggatattttaagtcatgaaggcttccatatacttagcagatctctgactcatggggctgttgattccttgcgtgaaccagtaccaccaagacttcactttggtcttcacttcgtccatgacctctaccagatccaagcacaccctccttgaaactgtgctatctgcaaccgtgcggtgtaaagaagtcatctgtggttagaggacagtgccccacaatggaggaaggaaaaaaggcatgccaatcagagagggcaaaacactcacattggagaaaatgaacttgtgttctagtaagctccatcgctctgaccctcccggcttctgagttttctgtcaccaggtcggtcggtatgtccaatcaagactgtatcccatcttggatgtcatgggattctcattttttattcattctagatacactctgattattctgcactttcttttcaacttgtttgggggacaaacagcttttatagctggggagtgaggttgata

SEQ ID NO: 421567 - DNA, 466 bp, Homo Sapiens
tgtgtttatcgtgattcactagtgctactacatggagtcctgattaatcactaatacagtgttatacactgaatacaggtttttcaaaaaagagcaaatggaaaacaccgaaagaacaaacccaaacaataacacatggtcagtgtcccaatgagccccttccctatttctcacaggcaactacaactttcacctgatactgacagtcttcaggattcccactagcagtggctgaaagtgaatggaactctgtattgaatacagttctaccaaagtaattctaccagagcacaatgaggagctacgggcctgtagtattcactggggtctgtctgggtgcagacagctaatttcgagtaaattgagggctatgctgcaaaagacatctagggagggtaagtcaggaatcagaagaacagcttttaaaaagataaagggagactctatagagacataaactgttaag

SEQ ID NO: 421568 - DNA, 163 bp, Homo Sapiens
tgtttatcggatgcacggaatctgaaacagagaaacgcttaggaaagaatttatgctatgtgactcagtccattatcggtagatattctgatatcttcagcttctgaatatatattctgatatagtcaactaatcagcaattctggttatttaaaatttttta

SEQ ID NO: 421569 - DNA, 425 bp, Homo Sapiens
  misc_feature (291)..(291): n is a, c, g, or t
ggtctttatcgttgccaccacacagctaatttggtatttttagtagagacaaggtccactacgtgggccaggctgatctcgagctcctgggtggcatcgataagcaccggtgtttatcgatgccacctcagtggtacaagaacattaccggtgtcaaatagcagagccagaacttcatagcaggactttgctccaaatagcatcttcttttaactatacctcgggtcagtccaaggtagttttcctgtgtcatatatgcttaacaagaaatactagaaagattaaaatgtnataacggctcactctcttttgtgttatcaaatgtgattggttcccagtgctagatgaagctcagtttttagaaggtgctcaagtattcattgcaagtgattggtatgcatgagtgtgtgtgcatcgataaacag

SEQ ID NO: 421570 - DNA, 486 bp, Homo Sapiens
tgtttatcgatgccacaactttacattagaggtcgtggcctgtcatcataaatctccgtcgcgatcacgttagtattacgctgctggggattgagagatagacataggattaaaataacaagtactaggcatgtctagatgataaatttaatttgctgttgctatcaggaggtctgctttgaaaaggcaattgtaatgaacggattcagaactagagaatagattgagccttggattcaaatagtcgatgttatcaggcgctgtcattcgtacgttcctatatgcggggtgtgaatggatgtgtgtgatgtcagtgagaaaagtcgagagaaatgtgtggtgtgaacagtgcggaagtagataagatgatgcgtcgaggaattgacgatgagagcagagaccgcgtaatgggatcgctgcgaattcgtgtgctctctttggagtcaaaattgacacctcacgctaggccagtggcatcgataaaca

SEQ ID NO: 421571 - DNA, 350 bp, Homo Sapiens
tatcgagtgccaccggaaatgtaatggagaggatgtaaattaacaacttgcagtggcagagagggggaaaaagcattatggaaagaattttcaaagcttagtagctgagagctgtcgatgttgtgatagctgagagcggtctgtaaatcttaattgcatctccagcttcttaatgtatatagcatggtaaaagcaggatattagagttggaataaacttaacaagcccctcattccctgtttctgaaccttttctccacctttacacgtgtgaggggtggatttgataaatacagggaagagtggtctagatcgacatcggggaccgagctcgaacccgtgagcaggggc

SEQ ID NO: 421572 - DNA, 552 bp, Homo Sapiens
tatcgagtgccaccagacagacgataacagaaggcaggtacgtgtagaaacttttcctccctcagagatgattggtcagaggcttgcagctccacaggaagggtctgcagagatcatgtttctagactacagtaggtgagcccaccctccagttttggtttttaataacattggttatttctctcactatgaaatcaatgtttattttagaaaataatagaaaggcaaagaaaaccctactcagagacaaccatgggctgttagcttttgaggtgttttcttaatatccagtaatttacatatatgtttatttgcaaagtgtgtaaagtatagaaattatagaaaacagtaacagctcccatttattatggtttgcacggtaatcttactactcaaaggaaacactgtaaaccatgtgatgcatttccttccagtcaaccaactttgctaggcttctctttttcttttgctgtgtagttaatatatgaatttatgctgtaattctttagcaggcactcccattgtgcctgggactgagctgtgagctttatg

SEQ ID NO: 421573 - DNA, 498 bp, Homo Sapiens
tatcgagtgccaccacgacaggcttaatgtgagggctggggcacaaggacagttacaatctttcttagggcatggatataacaaagtgtcagtttaagtgataccagctgccaggtcgcctggggtctgtggtctcttaaattccctacaactagggcctgacatggactggggctcctgaggcagcctgaacctgtagaaatgggagatctggggcctttcgtcacacaggggcctttagatgttttttgaggcagctgcttgcgtggatgagaagcagaaaagatcaagagttactcaccaccttgcataaagacacgtgtgcagagctcttcatcagctgtaaagagctgatggttctcaggggaaaaccagtcgctcttggctaatgaggccctagcagatgacaatgtggaaaatgagacaaaggaggccagtctgcccaccgcgaggctggtagacagcatagtgacagtgtggcatcgataaacacgggta

SEQ ID NO: 421574 - DNA, 311 bp, Homo Sapiens
  misc_feature (15)..(15): n is a, c, g, or t
  misc_feature (64)..(143): n is a, c, g, or t
tatcgatgccacagnagagcgatgagactgaataaaataaactcaacagagaggaggagagacnnnnnnnnnnnnnnnnnnnnnnnnnnnnnnnnnnnnnnnnnnnnnnnnnnnnnnnnnnnnnnnnnnnnnnnnnnnnnnnnatagggtgatactatgttttatatcacggtgggtgtgctatcctctctgatgtggctctgcctatccaagaggaaaatgtataatactacgccttatatcgcgcggtgtgtacaccttttctgtgacatcgttcgtaaaatccggtggggaatcagtgatagcacgcc

SEQ ID NO: 421575 - DNA, 293 bp, Homo Sapiens
gtgtgctgcggtcgctcagacgatccccgggtatcggactgccaccaggtctagcttttataagcaaagagtcctgaaagactgacttccatcattaccatatttgggacagaagctgatttcccggggctgaagacatttggcaagtgggaggagtatttgcatgacaagcaacaggagttttgggacatctggaggcttagttccaacgtgaccttagcggtgccctcagggccagcaattcagtctgctcaggtctaggtctgcaagtgggtgtggcagtcgagtaaaga

SEQ ID NO: 421576 - DNA, 509 bp, Homo Sapiens
  misc_feature (340)..(340): n is a, c, g, or t
tatcggatgccacggtgtggtgtgtttcttgaaaacctataaggataatgatggtgagattattgctttgatttgttatttcctgttgggtaagtggaccgtttcattttatgtcatatggaaaacttacctagaaatgtcaaagcagcttgtctagtttatccttctacagtaatttttttctgggtgaggtttttaattaagagtgattctttagttcactcattaacttaatcctaaaggtatatgttttccttatattggttttatcactgtgtaaaatttggattaaattagtcaaaatccaaaactaggtaaataccaagtaggaatagaaatngtgtttacatatgggtctcctacaaagagcaaatacttcctttattctttcttgtccttttgtgcactgggattcaccctggagcaaacatttacagagtaattatgtgccctgaaacaacagcaacaatggtaatatggacagagccacagctataggtctgataaca

SEQ ID NO: 421577 - DNA, 344 bp, Homo Sapiens
tgtgctgcggtctgatctagaggtccggtgtttatcgatgccacaacaagtccagaggtgagcatgtgacctaaggtgatcaaaacttaggatctcagatcttttactggaatgttagagaaaagactctcctactggccatatgttagggaatatacagctttggaaactactgctaagcatctagggatcataaagacagcaagccttaaaataatggcaacagaacagaagccagagtaagtggaggaaaagcaatcaaatttttgatgacactgttgagccacgggatcaattcttatctgaagccaactctacttgctcaacagtggcatcgataaaca

SEQ ID NO: 421578 - DNA, 515 bp, Homo Sapiens
tagccacacacatcaatcgccagatctcatatgaactcagagtgaagagctcacttatcaccaaggggatggcccaagctattcagtaagggatcggaccctgtgatccaatcacctcccagcaggccccacctctaacattagagattatatctcagcattagatttgggcggagatgaatatccaaattatagtgacattaatatgttgggtggctgtgaagacctggactatgtctgcggtcttcccaccataacaactagaagagttacttataccaaacagatactcaataagcatttgtttacgggctaatttaatgtgttatggcttcctctaataatggtcggcttaatttgactcatagagacctctttgttccaaaatgggataagaattcctgctttatattcatctctcagttttctaatgcaatgactagtatttctatgtgggagctccaataataacaggaatcaggttggcttaatctgtggtggcatcgataaacacc

SEQ ID NO: 421579 - DNA, 342 bp, Homo Sapiens
gtgtgtttatcgaatgcaccatgctgttcactctgagtttacagcatgagtggcttctcctcctctggtggtgggtgcggttggattctaaggacaggaatgccaagagaagatgaggaaatgaaaacagtaactcttaaataggaaatggccataccaagtgggtgaaatcccagcatgagtaatgtaaatgtgggtccaaggaaaagaaatattattttaaattacattactaaaccttttatctaagactttataagccctgtgtgctgtgcatactataatgaccttaggatatgcagttttatttaaatatccatcggggctcggttggtgctgtcc

SEQ ID NO: 421580 - DNA, 261 bp, Homo Sapiens
atcgatgcacttgcaaggtggctgcaaggccagacctagctgtgtggttattagcacagaggaggttcccctctggagagggaaggggcctttctacttcctaatgatgtttaagggatgactatcttaaccaaagggagaggggaaaagtcattggtgtgtgtgcaagtctcaatcaagttcgaataaagataataagctaaagtatgaagaagttgccttaggtaggagtcctaccttctgaagtggcatcgataaaca

SEQ ID NO: 421581 - DNA, 502 bp, Homo Sapiens
tatggatgccactcatgtctttcttcctcaatatgagttaagttaatgaaaactaagggaaggggcagaggtagttattttcttgggggggtctgacgttgggcaaataagagagcttcaaagaacagcctcatccttttctttgggagaggtggagggttgagaagcaggagcagggagatcagaaagaccatgaggttgcttctttagcacatcaaagtgccacatttggggatattcgtttctgagctcagactttcctggacatttcacatgttaacagatgagctagtgactgtggagaggaaaatagagttagtagctgaatggtaaaagatcccattaaaccagtctctcattcctgagaataggcccaacccaactaaagagtagtttctcattttaagagatggtattgtaagatgggctctcaaaattagacctctatccatgacacaggcaaacagatctttaataagagatatttttatggaaacagatg

SEQ ID NO: 421582 - DNA, 426 bp, Homo Sapiens
tgtttatcgatgccacacagtgagaactcagtcactgttgtggcagggcagtgggcagagggcaccaagccatttatgagggatccacccccatgacccaaacacctcccactatgccccatctacagcagtaggggtcatatttcaacatgagatttgatgagaacaaatatccaaaccatatcacatgctaaggggaaacatgcttaaggaaaagtaaaaggaagagcatcatgttactttgagaagttggtgttgtaattccagagagaaggagcagccagaccgggatgagaagcaacaattttagcaaagactcaactataatatagcacctgtctagccatttctgcttacagaaaaattcctctgcatagcttagtctccaaaaacattcagtggcatcgataaacaccgggtaccgag

SEQ ID NO: 421583 - DNA, 244 bp, Homo Sapiens
  misc_feature (63)..(134): n is a, c, g, or t
tttatcgtatgcaattcaaataaagccatggttattcagttacaggaaatgtttccatgttgnnnnnnnnnnnnnnnnnnnnnnnnnnnnnnnnnnnnnnnnnnnnnnnnnnnnnnnnnnnnnnnnnnnnnnnncatcgataaacaccggtgtttatcgagggcagatcaggtcgactggaagactattcaaagatgtattcagaaaggggatgagccagtctttgattttctcaattgatttg

SEQ ID NO: 421584 - DNA, 439 bp, Homo Sapiens
tatcgaatgccacgcagtacctgaggttctacatccatgacaagtgaggccattgtcatgcaatacccttcactgagaagacagtatctggaatgttagcatcagttcccctagtgctgacagtaaggttaactaatggaaaacacattgacacagtaaagtacagaagaagaggaagaaagtaatgaaaaatcaaaatgttttatattcagttttctctgtctatgcatctattggaaaggaaaatattttaagaagtcattacagctgattttaaatgtaccttttctgtgcgggctcagacataggggagaactagctctgctgtttgaaagtaactttggccagacttcaattcaaaataagaattcaagctatgtgaaaattgaatgaccttctgtttcgtggagacccgtggcatcgataaacaccgggtacc

SEQ ID NO: 421585 - DNA, 123 bp, Homo Sapiens
tatgcccaaagagacagaaactatatgaatcaacttacataagctcatctaacaacagtgctgattctgaaatagaaagcaattgtatgggcaaagcgcgcagaaaacagaaatacatgggtt

SEQ ID NO: 421586 - DNA, 283 bp, Homo Sapiens
  misc_feature (11)..(11): n is a, c, g, or t
tgtttatcgantgcatattctccattaccttcgattccagcacaaagaaaaaccatttacctgccaaagaaaatgcaattctaggaactcacttgttggctacagttggatttgcttgtattactagtatactttaaagcagagtaagggatcatttaaaccaaactgcctggtttgcccaagagaggtttttattcagttcatttagacagagtattacagccaccacacagattctaatacaacctgtgtggtggcatcgataaacaccgggtaccgagct

SEQ ID NO: 421587 - DNA, 430 bp, Homo Sapiens
gaagccttggctgcattaaaggagattctctacagatgcaaatttcccccacaaaggacagctttgcagggccacctcagtctgctggccctgtgacagccatctcaaattatgtcaaagtaatatattttatctttttcattcctcatgacttagtttgctctagaatgtgggtaggtggaccagttcatcttgaggccccttcctgatctctgagcacaggcttctgtgcccctgacctttctgggcagtcccctgggaggttttgagcaggcatgcccgctacgactgcagcagctcctttgagctaggctgggctgtccaggtcattttttgtgttcattttgcatcccaggagagtggcctagtcctaggaaaagagcctggtcttggagggcttggcgtgatggaggcccagttgcttagatgt

SEQ ID NO: 421588 - DNA, 313 bp, Homo Sapiens
  misc_feature (288)..(288): n is a, c, g, or t
tgtttatcgattgccacgacgagtactgagggcctgtggggtgtgccttgaagcctataggacgcgggcccgtcctggtgcctgccgcgaaggtgcaagcatcttgcgatgttacgtagacaaagtatctcaagatcgagtagatctttgatacggccgcaaggtggaccagaggcgttccaatgtcgaagccagcacgattgacacgtcggtgtcaagttcggtgtcactcgaggacgagtgggcggacgccgcctgattctctgatatggtgagcgaggactgcantgtgccataccgatttggcgccatt

SEQ ID NO: 421589 - DNA, 620 bp, Homo Sapiens
  misc_feature (120)..(239): n is a, c, g, or t
  misc_feature (609)..(609): n is a, c, g, or t
atgccacgagctggcatgcaaaggcatgatctctgctcacgccaccttcacctccgggcccattcatcctcctgcttcagccttccaagcagccaggactatgggcatgcaccaatacgnnnnnnnnnnnnnnnnnnnnnnnnnnnnnnnnnnnnnnnnnnnnnnnnnnnnnnnnnnnnnnnnnnnnnnnnnnnnnnnnnnnnnnnnnnnnnnnnnnnnnnnnnnnnnnnnnnnnnnnngtgtgagccaccatgctctgcctgtttctctacttattccaaatataaataaggggtttctctgatatggtgctggagacccaaaatcatgatcccgcatcaccagcagaattaaattcaaattttccctcttatacccaactctccacaatcactctactccttttaaaaatttggatgggctttccatgaccctagcagtgcttatattccaagcacacctgacagctcattgctcagattacatttctgaaatgagatggggtagaaacagatgtttgctctttcccaataaatggctacacattctgacttctgtgtctctgtttatttgttccttccatggaatgtacaccctccactccaacancctgactctag

SEQ ID NO: 421590 - DNA, 122 bp, Homo Sapiens
aattagaagacacccagctggtatctgtggcagaattgattgcttgcttgttaatggggaaaaaccctcacacatttggtcacagaagtctcctgtgtttgttgttgtggcatcgataaaca

SEQ ID NO: 421591 - DNA, 592 bp, Homo Sapiens
tgtttatcgaatgcacttatggtactgctgctcaaacatcaatcacagtattgggtacagagtagcagcacaataaggggctgatgaatcagtgagcaagtgaaataaaaactaacgctttcaaataggtttttattaaagaggcagatgctgccttcagatgggactgacttagatggttctttaataagctgaataactaatatcaaattataatccattaaaatatgcttagacagctgaggtaatatagtcaaattacatttttcagagtaactaaagagatggataattaacatgattctcagatttactgattaatatgagatgtgccaaataaccctgtgatcttaaggtacaatttggacaagcatggagtgcctgtgctactgattaaagaggaattcaggcactctagatgacagatgtgcaggatggcaaagttacggttgataactgaaagtttagaaacatacttgtactttacttaagcagaaatacaattctcttatgcctgggaaagacgtcctgagagatgcaccagtattccagcctgggaaagacgttctgcgagatgcaccagtattccatc

SEQ ID NO: 421592 - DNA, 294 bp, Homo Sapiens
tatcgatgcacactataatatataatattatagtggtgcatgaatgtggcaaaagccatgaaggtggttggagaatgactaaagttggagtaacagtgatctagtctaaatcatcctttttagatgaagaagtgagtttagcaatggtgactgtttctggggttttctaatttcaagttcccttggccttctaggaaaagcttataacatcagtatttcccacacgaatttacttggccacgtagatagttccagagtgtgaagtgcccaggggcatcgataaacaccgggtac

SEQ ID NO: 421593 - DNA, 271 bp, Homo Sapiens
tgtttatcgactgcacttgggtggaattctggaagcactttcctgaggaagtcacatataagctgaaaactggaatatgagaaaagtaccccaagcaaaaagtggaggcatgggggtgggattcagagcaaacaccctgcatttggaaggaccagtgtcaggaactactgtgttttactgattaattataagatgcattttccatcacattaaaaatccctgaaatgaagacatgtcctacaattgatgacatctgaaattcacggaattt

SEQ ID NO: 421594 - DNA, 430 bp, Homo Sapiens
tgtttatcggatgccacgggttaccaggtggctgtgagcatttacccgttgggggcctcagctcccccacctgtaaagcagctaagtggtcagtgttaaaatcccactcaattatctatagtgctttctctcagaaagcagagtgttactcttcatggaggagaggaaatggcccaagcgtgccgcagccttctctgatgattaaatcctgaagagtacaaatgttcctgcaagcaaatgacacaggatgaagaatgtgaagttgaaatgggtttgggctcatggctgaaggcaggagcctaaatttgttaaagaagcacataaataaattaaaagcatcatgcgtttttatttagcccaaatgcatttcggttgctagtgctttttgagcgcggttgccgtgcatgcgtggcatcgatcaacaccgggt

SEQ ID NO: 421595 - DNA, 591 bp, Homo Sapiens
ggcgtttatcggttgcacggatcaagttttcatatctgcagaaggcatttctacagctatggtcaagactgagcgggtctgtaaagattctatgtggctggtggacggtgcagaaagcaagttcataaactaccacgaatacaggagagaatgatttctattgaaagagtcgagtaggatatggtgcatggagccagtcctgaaaagggtttggtttcttgtagcatggtggaaattcacattcacattgctgctctgtgctctttagcatgctacagtgaaacaatgggcatgccagccgttatagcagtgtcgattaatgcattccttgaatgtgtagattaatgtgttcctgggatgcctccttaagccgccagtgcacctgaggtgtgttggatatgccttctccccgggtgctgcttcgctcacatgagcccttttacacatgggtcttttgtgtgtatatttcacaccattacctttatgaataaaatacagatctagcagactttttacagacatattatcatctgacagaagtgtctacattataatctagtggggactctataaactataatgtgcatagga

SEQ ID NO: 421596 - DNA, 241 bp, Homo Sapiens
tgtttatcgattgccacggagagagaggaggttgtgttaaggtggcggtaaaaggagaaatacaccaagtggtgctgggctgtggcaaagcagcaggaaaactctgtgcacacctagcccctcaaacaggaaccactcagcccagcaatacttaataatacacccaagattgtttcctttagttcatttgggttcaagatataatatattaagtacctcttgcccccttccttgttattta

SEQ ID NO: 421597 - DNA, 574 bp, Homo Sapiens
tgtttatcggatgcacacagctgttagtccttttggggtaccatcttgctacagacaactaacaggctcacagtgtctcacttcctcctagggtgagccaatgactgatcagcacaggggtgcgaaagactggcctcctcgtggcaatttgggacaactctgcaaggtgtgggctgaggcctttgttgcgcctgcatcacagctcagcttctccctcatccagtgctgcttcctttaccttcccgccgccgggtgatgattccaagagcatcccctgttaaatgggtcgacctcagaatgtgcttcctggaaaactttagagatgcaaaatgtaaatacatcacgtttttattaaatggatagactgccttttccaaaatacagtgctgtaaatggaattttatgcctcctatatattacattttgaaaaatggagtaggttcagaattagaagacaattggcaaataactttgttatatggcataggttaccatagtaattactgtcggggtgatactggaaaaataatttaagttttcttattatccttttcttctttagaatatcaggggg

SEQ ID NO: 421598 - DNA, 344 bp, Homo Sapiens
  misc_feature (151)..(181): n is a, c, g, or t
tgtttatcgatgcaccatctgaaagaataaatcacttgattcacaggtctctagcatgcatcagaattatcaagggaagttggttataaatgtacgttaccatgtcaatcagcaaaaattctgactcaaggatctgtattttaataacctnnnnnnnnnnnnnnnnnnnnnnnnnnnnnnngatacagaggtaggtgagcgaggacctcactttgaaccaggctgaattaggaccaagtgcaacctcccttcacttcagacatgagcattcacttccatctctgtgctcacccccaggaggggaagccaccagtgccagtggtggcatcgataaacagcgggta

SEQ ID NO: 421599 - DNA, 521 bp, Homo Sapiens
gattgcaccacagccatatttcaagttttcagtggcttgtgattggccaattggctctgttgtatgggacagtacagatataggacatatgcagaaattatcatgggacaaccctgctgtagaattgtcaccagtgtttctggaatcactgttttcgtgcttgaagtatttagtgctccactttgaaatgctaggaaatcgtgtcttcccttcacattgtcaactcttggtgattatggtggactagggaggtgaagcccttgggcagaattgggatgggagtggaaagtaaactgctttgctgtggactagaagtagaattgggatgaggtgtacccggttctcatgagtcccttcccctgtctgcactgttcctttccttgtgaaccctttatttaccaaagcccttcttacaacttttccacctccagcctgtgcagaggcagatagatagtggggacctgttgtactttgttcgtgcatcttcactagtggaaataagagttctcttaggctcactg

SEQ ID NO: 421600 - DNA, 533 bp, Homo Sapiens
tgtttatcggattccgatggcttatggtcgtgtaatcattcatcccctgggactgagactactggggtactgcgagcacgaatgagaaagtggggatcaggtggctagacaacatagtgactgccacaatcatttgcttggtgcaatcttgggtgaattacttaacatctgttttggtcagcttgggctggtataacgaaataccataagctgggtaacttatacacaacatgagtttatttctaacagtactgaaagctgggaagtccaagatcaaggcagattcagtgtctagtgagggcttctttccgggttcatagatggcaccttcttgctgtgtcctcacagggtagacggggctagatagctctccaggtctcttttatatgggcactaatctcattcatgagagctataccttcatgacctaataatctagaagcccccatctcttaacactatcacattagggatggggtgtcaatatataattgtgggttgagaaggacactaacattcagaccatagcagca

SEQ ID NO: 421601 - DNA, 492 bp, Homo Sapiens
  misc_feature (404)..(404): n is a, c, g, or t
ggcagtgatgctgtggtcgatctagaggtccccggtgtttatcggatgcacccgccagctaataaagcaccggggtcctgtcacgtgctaacagaaaacttacggcaatgggaagagagtggccatgtatttccgaagctctagatggtaacattccaagaaataaaaacctagagtggtgggaggaccaaagagaggctgccatttaaaatcaaccctaagtcccaacatcaccgttcacaagatggtaacatcactggtgctggcggaacgcaggtcagctatattttcaccaattccctctattcccaagtggtgagagaagctaagtgtttgcggcagttagcaggttcaaggacatgtactgcataataaactgcgagcttagccattgcttctgatgnggggggatctctttaccaccagtcaagaacttgactttcagtttgtagacaagttcttgagtggtggcatcgataaacaccgggtacc

SEQ ID NO: 421602 - DNA, 109 bp, Homo Sapiens
ttgatgtcaccatagacagattatccgcagtatgccaaagacacctctgggcacatgtactaggtgtgtatacggcacgtgacttcattgtcagtgtacatgtgctggt

SEQ ID NO: 421603 - DNA, 503 bp, Homo Sapiens
tgtttatcggatgcacgcaatccttggtgtggcttgtagttgcatcccgtttagtctctgtctccataggtaacgtgacgtatgccctgcgctgtgtgtcttctccccttcttataaggagaccagtcatactggtttagggcctacccaaataacttcatcttaacttgatcacatctacaaaggctctaattccaagtaagatcacattccccggtatggggggttaggacttcaacatatctttctaaggaacacaattcgattcaaaacacttatagaattttgtgaaattaaagagaaactaaaacaaagtgcaaggttaagcttatgcagatttcactctgaattgcttcctgataatcttgattagcgaaaagaatggagtggagtcatatgcggctgacactggaaaagccaggactctgagtgagttgtgggagtgtcttgaatgtgaatgtcactattatcgtataggtcccccaaaatgaaaggttttcctc

SEQ ID NO: 421604 - DNA, 245 bp, Homo Sapiens
  misc_feature (140)..(148): n is a, c, g, or t
tgtttatcgatgcacgcacatactagttgtgtgcgtggcacatacgtgcttattagaagtgagtggctctttccctcaaaatcactcaacgtaaacagctctatattctggtgtatgtctggtaccagccttggagtgannnnnnnnnctgtggtgtaatacctcgtactcgagccactgtttgaagtctgtgtaggtctcgtctctaggggagggggcgggctggattctagggcactgtggct

SEQ ID NO: 421605 - DNA, 189 bp, Homo Sapiens
tatcgactgcacagtttaaatgccatggccccctgaccttttcttagagaaactcaaaacctagctgtctttcatttccagaactcttcttctagatttctttttaccattaaccaccccctattcttcggggttttctcgagtgtggagtaggagagaaaaacacacaaggggtggcatcgataaaca

SEQ ID NO: 421606 - DNA, 314 bp, Homo Sapiens
ccaaggatccggtgttatcgatgccaccctaggccattaatcctcttcctcgtgcatatgagagtttccatattttatttaatgagaaattttggttcaaaggtatctgacttggtaagctataacaagtcccttggaaccaaaatcagacccctgagtcctcagctttttgtcctggcttctctcagtgactttcttctccattagcatatcaacgggtaggcatggaaattctgtgcttggccccctatggaaaagtcaatctctgctgtgaaagttaagattttgatgggagatcaaaataggtgcggtgg

SEQ ID NO: 421607 - DNA, 128 bp, Homo Sapiens
tgtttatggatgcacatggaaacctaacagtttgtcactgaggcatcaagagagatattgcattttcttggtggcaaagaagatttatcaccacaaaaatgttcatctcaggtgaggagatagttaag

SEQ ID NO: 421608 - DNA, 508 bp, Homo Sapiens
tcctggacataatgattgagagtctcttcatgtccagtggccgttgtaacaggtccttagcgatcgatttcgtattcatgcataggacaacattagtcagtaagatttccatgttgccttaccttattcttcactcaaaaattgtccctaactcgggtaatggcagtgatcaagtcacatgctctcactttggtcaccactgtattctgggtttcaaagacttgtaattcatttcattaagactctccaaaccatccccttaaacatttgttgaaatgtctctgttcttcattagcgttttattacgttacattctctaggctccagaaaaacgaggcaagaaataggaggatttgttttgttgggccttattagctttgttggggtggaagttggggtcaaacaagccaaaataacattatcattaaacagatcgagcggtactttgaagtggagggaataaggatataaaaggaagtgaggggtgtaagtaccctcttggatttgt

SEQ ID NO: 421609 - DNA, 354 bp, Homo Sapiens
ctgtttatcggaggcactaaccaaggagagatgcttcccccctccatttgcagaagcgcactctcacgcaggggcacaaaaaggttaagataaaatatcctacctagccctcttaaaacatctactgcatgtagttgcaaagcaaatccgttgaaacttacatattcagcaaggctcaactcttgctaatactgctgttaaactgtactttgatcatttcttacctccatcaggtggacaaaaatagccaaggacacttatattacatagtttagaaaacatgtgaaagaaaaatctttcagcttagtgagtaccgtagaggaaaaaatacttgagtagtatcaaaaagttaca

SEQ ID NO: 421610 - DNA, 534 bp, Homo Sapiens
gtttatggtatgcacagaatagaagtggtgtgagaatcagaggaggtagacagaggttaatcgatgggattttgccttagcatttggtatatgatcaataggagggtagctattaacagatatcctcaacgagcagtatgtctgtttggctttgcaggagagggacctacgtcattaaattgtgttgttactgtgtgccaagaaggctccatctaatcctattgtaacatttcaagagtgtaaacataaaaagagctaagcatactcacaaagagaggacagcattgaagagtgatctgtatgaaccactggaaacacgagaaccacatttcgggtctttagaattctactgaagggtaccagccacgtttcttcacaccactccttctcccttaaaatatggactattcctatttcaaaatgggaggtgagagaattggagagtgatgattttttagtgggcaaaggccgttttccaactcattcctaaggatggcaaacataatacttcagagtgatgacggaggggggcag

SEQ ID NO: 421611 - DNA, 574 bp, Homo Sapiens
  misc_feature (520)..(520): n is a, c, g, or t
tatcgcatgcaccttcaaaggtttctctgtgatactcactccaacctaccaaaacataaggactgagtatatctatatcatttcttaagcatcaaatgctgaaataccatgattttcacagactcaacatttcatatacagtcgctgcttcagagaactgacacttttttactaagcacttcctctcttcaagtgtctgcatgtgcacatcaaatgttttaaaagatcatcaaaacaaagttaacttcaaacatcgcacatttcggcaaatgtttccaagaataaatcatgagccaaccgtcagcatctgtattttatccagagaaagctgtcattcaccactcaactcttcggaatggagcatttcatttcttacctgagtcgggctagtcttttcttcaggagctgtggaatgttgatgtggatcttccttggctccctcagagggttctcttataattcctgcctggccccctgggtctctgaagacctttggctccatgctctcgcttttctgtgncctatccaagatcccagagtgcacagaacctcctgctgtggcatcgataaacag

SEQ ID NO: 421612 - DNA, 595 bp, Homo Sapiens
tatcggagtgcacttcttatcctaccctcccggtgctcaaaaccactcatgctggcagaaggatccctgaagctaggttcacgaaccaaccggggtcattcgaaggcccagcccagcagcagaggcccaacttgagaggccctcttgggtcatgtctcacaggttggataagaaggtgcatcacgatggtgtttcagaaacagaaaaccggtcattatatttcagagaataacagaagagctctctgacaccacaaagactagacctgcgactagctttgaagaaactacattgctgaaatctggctataccgaatagatgaaccagggggtgatgattcacttgacctcagctgagttccctcaactatgggtctcttctgggcatttgaaaccgtattcaattttcaaaaattcggtctgccaagcaaaatttttccaatcattcagaagtggtccaaggtgcacatctcaggcctcagggattcccagtagtggagtcccagattgttgtgtttccagataagtggaaattcattcatctgcatgcacagtacaatgtactgtggcagagatggcgtggatcgataaaacgg

SEQ ID NO: 421613 - DNA, 234 bp, Homo Sapiens
tatcgatgcacgtgtacacactgaagacattcactaagaatgtggctaagggactgctgccatgtacacactgaagatgttcccaagcatgtgaccaagggaccaacgccgtatacacactgaagatgtttccaaagaatatgaccaagggaccgccaccttgtacacagtaaagacattccccaaggttcagtcatgggcctgtgaaacatcacaggaaagaatgatgtgcag

SEQ ID NO: 421614 - DNA, 460 bp, Homo Sapiens
  misc_feature (111)..(405): n is a, c, g, or t
tgtttatcggatgcacattcatatcactattattcataactgggtaaaacatgaaagccaaccaagtatgcatcagcaaatgaatagataagcacaatatggtaccatagnnnnnnnnnnnnnnnnnnnnnnnnnnnnnnnnnnnnnnnnnnnnnnnnnnnnnnnnnnnnnnnnnnnnnnnnnnnnnnnnnnnnnnnnnnnnnnnnnnnnnnnnnnnnnnnnnnnnnnnnnnnnnnnnnnnnnnnnnnnnnnnnnnnnnnnnnnnnnnnnnnnnnnnnnnnnnnnnnnnnnnnnnnnnnnnnnnnnnnnnnnnnnnnnnnnnnnnnnnnnnnnnnnnnnnnnnnnnnnnnnnnnnnnnnnnnnnnnnnnnnnnnnnnnnnnnnnnnnnnnnnnnnnnnnnnnnnnttatcaatgtatacttgaaatgtacagtgtaaaaatgggtggcatcgataaacag

SEQ ID NO: 421615 - DNA, 444 bp, Homo Sapiens
ggcgtttatcgttgcacataccacatcttaacacgtgtattcaatgtttagctaccatctataagtgagaagatgtggtatgtggctttctgttcttctattaggtcacttaggataatggtctccagctccattcatgttgccacaaagaacatgacttggttcatttttatggctgcatggtttttggtgatgtatacataccatattttctttacccaattctctatggatggacacctaggttaattctatggcttgggtatggtgaatagtgctgcaatgaacataggggtgcatgtgtctcttagataaaataaattattttcccttgggtatatatactcaatagtgggattgctgggtcaaagggtagttctattttaagtggtgagaagaatctcaaaacttctctccaggggggcatcgataaacaccgggtac

SEQ ID NO: 421616 - DNA, 131 bp, Homo Sapiens
atgtcactactcgcttgtttactgtggttacagtgaaagcaaggtctgaggtcagctcctcgtatcgaccagcacattcctttctcttctgtggccatagaatattccatgcagtttggactggctctctc

SEQ ID NO: 421617 - DNA, 266 bp, Homo Sapiens
  misc_feature (21)..(21): n is a, c, g, or t
  misc_feature (33)..(33): n is a, c, g, or t
tgtttatcgactgccacccangtcgttcccaanggtgcggggattacaggcgtgagccactgcaccgggcccaggtaaggcattctaagtcacaggatgagacaggaagtcaacaaaaaatacaggtcataatgactttgctgataaaacaggttacagtaaaggggccagccaaaacccactaaaaccaagatggccacgagagtgagctcgggttgtcctcagggctacactctcggggcatcgataaacaccgggtaccgagc

SEQ ID NO: 421618 - DNA, 201 bp, Homo Sapiens
tcagtcgggttacgatgcacttccggatgtggctacagacttcgtgccagaggtgtagaaaaacagaaattagctggagtagaaataactatttttctctgctcctaaactattcccaaatctttaaaactcagggctacccatgaatcttcaactttgaaaccacccttcaaagctcttgaggggtggcatcgataaaca

SEQ ID NO: 421619 - DNA, 187 bp, Homo Sapiens
tatcgatgccacaaaggacttccttttggtggacatctacagatgttagggttgccagaagcaaatcccaggaatgagatcagtattttcattgcatcttaaatgtataaccttccggtgggagttcagttggtctgtggttaagtgggtgtgcttaatcattctcgaaatggtgatcagatgaaat

SEQ ID NO: 421620 - DNA, 541 bp, Homo Sapiens
  misc_feature (275)..(374): n is a, c, g, or t
tcacaagttggctttttctagtctttttcatctcaggatgacactatcatccacccagtagtacaagccaagtatctagaagttagccttatactccacatatatccggtcagccaggtatgattaaactaatattcaaaagctatctcaaatagtctcctctcctctaacatcatggctcaggtctacaactctctttagagtcctcccatggattattatgtcccaacagtacatccctccatggaggaagttgaagtaattagggaaaaatnnnnnnnnnnnnnnnnnnnnnnnnnnnnnnnnnnnnnnnnnnnnnnnnnnnnnnnnnnnnnnnnnnnnnnnnnnnnnnnnnnnnnnnnnnnnnnnnnnnngtaatgtttgagaggtgcgaatgagaccatgttgctctcctgcttgaacctccctcaaagcttcccatctcacctagaagaaaaatcactctccttagtcaggcttacaaagtcctacatgatcatgcacgtgtctcctctttgagcttattgtgtgatctatcctc

SEQ ID NO: 421621 - DNA, 396 bp, Homo Sapiens
tgtctatcgatgccacttcagcagatctgtgtttaaaactaaacagtgaatatgcttaacacaatctttcttcatacccatccaggaaggctgtcagcaccttgaatgggccttcatgattagcccggtttcagtgtattaagagccctgtaaatcataaaaactttatattattaagcaatttgaatttgatctctgatttcaaaaagatttggacctattatatgacaaactacaaattcgtgatgtttccactagttcggggaatacaaatattatcacatacctaatacagatagtaatgtcacctccaactccacataccgccctatgaatcagtgctgaatggcaaattttcacctattgaagtgaggagagagaagcaataagatacgc

SEQ ID NO: 421622 - DNA, 557 bp, Homo Sapiens
tatcgattgccaccccccaagattatggggaacacctctttgacagaagaatttgggcttatgtggtacttgttgcaaccaaggagaccccaccccatggagaactgtggagagtctcagtaagtgggtgttaggagggacatatgggattggggtttgcgttgggtgattttaggaatcgttcaagggattgaagtattctggtgggatgctgtccggaactaggggcaattctacagtggaacatcttgttaatttatctaagaggtgaaggaaaggtatggggctagagctgtattgggtcaagaagccgccagcagtcatgtagatgggaaaggcggtgtctggtcattgtcatggttcgttgtggttggtatggtgatcttgtttttatctgtgcacagagtagtcttgtttgtgttttgccccatcacagccatagaagtaccttgtctaacgttggtgttctgtgaagctgtgttcatcccaacaccatggcccagcagctagtgctgggtcaggtccctgctgatggctagtaggggctcctttcttct

SEQ ID NO: 421623 - DNA, 584 bp, Homo Sapiens
ctaaggatccggtgctatcgatacacccagcactctaagtgtagtaggtgtaattagagctaggtgcaggtgctgggcggacataggaaggccgggtaggccagctgttgtcaggagagtttgtaaggaatagtgaggcctcagatgagatctaagggtaagtaggagttagccagataaagaaggggctgcgtaaagagtgtgtcagggctaagagtgccacagctgaaagagcatacttctgcagtgaatgggtgtggcatcgataaacagcggtgtttatcgatgccactaacaagaacattgtgagtggcttcatagtctgtggttagatttatattagctatatgtgaaaatatcccatcaactaaaacccctgtaataatatccaagctctaggcgtgattgtcacagccagggagcttcttctgttccattgaccactgggtgcaaggggaacctaaatcaagcacaaaagacacaccgtcttccaaaaactagccccttcttactacagaaccatgctgaacttggcttaccttaaatcccattcttgctcccaggaactctgaaatagcagcagt

SEQ ID NO: 421624 - DNA, 606 bp, Homo Sapiens
ggatgccaccgtatgaggagaaataccttgatgtaactatacctgcattcgggtaactattcgcaaaaatgactgcagagatagactacggcaaaccacaaatttattagcttcaccatccctccaaccatatatgtaagaagagtcttatagaatttctagcccatatcatttcctcatatgatgcaagaccataacacccttcttatactatgatatggatggcttcacgtattaatacctttctcctttacccatgtctaagcctaagaaatcagaggggcttttcgttggggtataacaagaactctaaaaattagcgaaatgaaaatatctgattcgaatcctttctaagagtgggaacatttagcctcttatttctaagggaccaaattaaattgaaatgaaactcttctttatattcagggtaacaggttacttatccaaagaagatttaggcgggaagtggtgcacatgtgggcaatatattcatttatgaatgttcaacattgaaagcttcagtgatgaaatgagtcgggaggtacgttgtttatgactagtaagctttaaaagcctcccgtttcatatatggagtgacagatcatc

SEQ ID NO: 421625 - DNA, 366 bp, Homo Sapiens
acaaaggtaagatcttggtgaataaagcaagatcagaatggcaggtcttagcatcctggcccggggacagcatgggatgcaagcaacaaaccagggctcctagctgagctgggcctctcgcaagggacaaaccccatgcaggctgatcactgagggctgcttcacatgctccgggctgacatggaactaaaaaggggagggctgctttggctagacaggcccttcaaatttcctaaccttgttcctggaggatttcccagcagtccctatccttcctccaaagtttcctgagattcagacgagagagtcacagaacaggtgcaaaatgagagagataccagggaactgggtggcatcgataaacac

SEQ ID NO: 421626 - DNA, 187 bp, Homo Sapiens
ggtgttatcgatgccaccactttgtgttttaaagacagtaggaataactatgcatctccgggatagtccgttatgctgcatgatatcgaaccccacaggttcaggatacacaaataatgtcctccggtatgtgtaagaatctgtcctaagtaagtggcagaaaagactattctattaacatgatttt

SEQ ID NO: 421627 - DNA, 216 bp, Homo Sapiens
gttgccacctagcgcaaatgaaatcaaattcagaatacatctggagataagcaatagaacttactacgggtattgatatatggagtatgaggaaagagaagaatcgagatttacatctagacttttaacctgaagaaccggagtggatggtgattctattttcggaatggaaagggttatggtggaaaagactagatggggtggcatcgatacaca

SEQ ID NO: 421628 - DNA, 174 bp, Homo Sapiens
ccccgactagctcgaccagtacttaggttcttccttcagaaaggatttccccatgacttgaagagcaggctctcgcacgcaggcccgaaacctgctcagcctccccgtggccctgagcctgtctattgaaggccccgcctcacccgccagcggctcctgtcgggctagtcgggg

SEQ ID NO: 421629 - DNA, 140 bp, Homo Sapiens
aacatgaacactcgaacctgtgaggagggcaggaggacttctttcatttacagcagagacaagcagcccacagcccatgacagcagtgctctgtgtcaccccatgtcccatggccctgtcgtggctagtcggtgggggta

SEQ ID NO: 421630 - DNA, 589 bp, Homo Sapiens
  misc_feature (271)..(271): n is a, c, g, or t
  misc_feature (370)..(370): n is a, c, g, or t
  misc_feature (558)..(558): n is a, c, g, or t
  misc_feature (565)..(565): n is a, c, g, or t
  misc_feature (579)..(579): n is a, c, g, or t
gccggacgagcccgacatgctctgctggtgtcccgtgcccatcggccaggctgggcttatgccgtctttctctatgtgggaatctggcttggagccagtgcccctacctgactacttatctttcgggggttcccacatcccccctcaacagcgtatttacacgggacagttttatgttggtggggtggctgtcttctatcacatctcaagttatctggtggcagtgaaagcgggtcccccacctggtcggaacagagcctgacactcaggncacctgaatgggacatgaatctgcacctccatgagggaggcctatgtctcccctgtcagaccctggggctttccggcagggggccatggtatgtcccgncacagcctataatttcctacccattccctgttctgcagaaacctgcctctgcgtgatgagggtgagtgtcgagaggggtggtggcatcccagaagtcaacggcagttggttcagtgactccccaattcccgccccagaaggctcctcctccagccttgggtggtctgcagggatgctctcctcctggntgtgtgngctctgatgcagantagccctcct

SEQ ID NO: 421631 - DNA, 142 bp, Homo Sapiens
tgtgttaggtcgttcttgtgctcatcgctgtgctgctcgccgccgtgctggtcctcgcctgatggggtcgaagagatccttaacacttcgtaggagtcctcgtcgcccggcaggcatcccacggacatgtctgtcgggctag

SEQ ID NO: 421632 - DNA, 204 bp, Homo Sapiens
gagactccagaattggggcatgatgccgactctgctgctgcttgtgggctgctgctgacctgggggagtgggcgggtgctgggggacgggacggtctgtgacaatgagctccaggagatgtcccctcagggaagtaagtacgtcggtagggcccttcaaaatgctgtcgggctagtcgggggggtaccgaggcgtcgaattcgt

SEQ ID NO: 421633 - DNA, 223 bp, Homo Sapiens
tgtagtgaggactgatgtagtggggacagggtgtacatgcggttctggtatgactatggaagcttttatttagactcaaagactgttcagagtaaaagtttaagaagtactgctctatataattttattaaagtatgccttattagatgaggaaaactgaaatattttaatacaagacctttatgatgtagaacaaatgggcatgaataaatggtagatcaca

SEQ ID NO: 421634 - DNA, 158 bp, Homo Sapiens
tagaggatcccccccgactagcccgacaggccctggtcacgtggaaaatgggagtaaacccggtcgtcctcccagcagcaggctccgcagattctgaagataggcacagacaaaagagatattcctctggctaagtgggacggtcgggctagtcgggg

SEQ ID NO: 421635 - DNA, 152 bp, Homo Sapiens
acagattacatgcagtcctgacccagattagccgacgtcagacacatatggctacagatttctttaaatctgattataggctgaggctttccatgagtccacataaggaatggatgggcaaacattcaggctcactgtcgggctagtcgggg

SEQ ID NO: 421636 - DNA, 240 bp, Homo Sapiens
ttagcaccgacagtcagctggccccatgccacaccgtggcttctcggggactggcctgcattctcacacccgtgcttacaggcaaggatgggcatttgttgctcccctgccagcaaactcctttggaccaggaatcgatgccgatggtgttagcatacaagtcccgcttcaaggcacgctggtgaaacactctgagacggtcatgaaatcggcttttcatccctgtcgggctagtcgggg

SEQ ID NO: 421637 - DNA, 166 bp, Homo Sapiens
atgacgatagaagcggcggatgatgtcctaggagcgtgcgagcacacgaagtactcctgcttcagccgcagctccgtatccctcaaagaagtatacatttggatacaggacgcctggagatgactcaggcaagtgcctcagatgtgccctgtcgggctagtcgggg

SEQ ID NO: 421638 - DNA, 245 bp, Homo Sapiens
gggtaatgggctttgtaatgtgcggtgatgaggggtacactacagaaacaaactctgcagtctgttcttgaagaacatgctactcagatgtgagacatgctgagtctcagtgcctcgtttcccaacagatgtgactttggttccttctcagaatcaaatcctgcccatgcctataatggagactcctcagcagagctcacagctctgcattgcttgtacgggctagtctggggttgatgatcttt

SEQ ID NO: 421639 - DNA, 187 bp, Homo Sapiens
tgcatcgccggtctggatcgtttatggtcggaactacgactgtgtatcttgatcgtcttctgaacctccgactttgcgtacttgattgaattgaaaacatacttggctggtcggggctagtcgggggctgtctgtgctagtctggggctgtcgttgctagtcgtggtgggtacctgagcgtcgaatt

SEQ ID NO: 421640 - DNA, 179 bp, Homo Sapiens
aggaatgcatatggctatgcgcagagttcagtaaagagaacctggtcgaagtacagaatgcgtggggaggaatagtgcctgataagttaggtagaccaaagaagacaggcttggaatgctaggcacggagtgtctgtcgggctagtcgggggggtaccgagcgcggaatcgtaactcag

SEQ ID NO: 421641 - DNA, 147 bp, Homo Sapiens
ctgtcgccacagtagggagacttgggaacggtccgtttaaaggcaaaactgtggagtcctagcaggtgtgtgtgttaatggcgagggtgtctgcagcagtggccatcaggggcaggggcacgctaggggtgtcgtggctacgtcggt

SEQ ID NO: 421642 - DNA, 606 bp, Homo Sapiens
ccccgactaggcccgacgagggtagttgtgcaatataaaaccaggtgcctgctaaaggtaggctctcagtctcctacagaaacatttgaatagtgtgctatcattttggctatttacattttgaagcaatggctctctactccccaagcgttggactacagcacttctgcttgccctctcctggtggctggagttttctcttgactcctacctcctgccactgaggtacagcccacaatacagggtgaacagccaggaggtcacatctcacatgaaccccaattgccacagcagcactccagcgccacatcagagagtgaagcctgagctgcaggaggagagcctgcaggcctcctgggtaggaatgcaccttcacaataatgagaacgggaacagttttaggctcagtttctatttataatggtgacatggaaaacattctgctggatttccagcatgagtctgtaaagagacagctccaagagttccattgtgacagcccacctcattcacagacactgtgaaatgctaaaatggcttctgaaacagacactcaaagcattggagagaaaaacagctctcagtctcagaaagattatccgagag

SEQ ID NO: 421643 - DNA, 185 bp, Homo Sapiens
tcactctcctgcacattgaatgtccactctctcaatgcaacctgggcacttttctggcatactcatcctcacctcatgttttcccacagttgctttttctccccccctctcttcccagggcataccatttgtcttcactgtcgggctcgtcgggggggtcacgcgctcgcattcgtactcctggt

SEQ ID NO: 421644 - DNA, 194 bp, Homo Sapiens
cccgactagcccgacaggtcacttagtgtcagaattatttataacattgagatggcacagtgcaatggagagcagcccaacccatggacactttctctttgaaagctcgatcaatggacctagatcactgtttactacttggtgtctcggcctctgccatgtttcctgtcgggctagtcgggggggtaccgagc

SEQ ID NO: 421645 - DNA, 228 bp, Homo Sapiens
  misc_feature (18)..(18): n is a, c, g, or t
  misc_feature (152)..(152): n is a, c, g, or t
cccgactagcccgacagntgggaagtgcagcagctcagtggagtctgcctcccctccagacccccggcaatgcaggtcagcctcgttggaagcagatgctgcaatggagtttgacaggcagagtatttattatgtgatcaatacctatgggntgggcaggggcaggaaggaggattggatggaggctgacactttagccagccctgtcgggctagtcgggggggtacc

SEQ ID NO: 421646 - DNA, 555 bp, Homo Sapiens
ccccgactaattaaatggaacccctctggccaggggatcccagagaaacttgaaaactgagttcctagccataagcagacaggagctcagacttaccacattatatcctctcccttgctaaccatcatttggctttctttcctaagggttaaacagaaacaggccatctcaaaagacttgttccatcactgtttccaaccaaccacctgactctgcccctcgctttatacaggtttgacacggccaaccaagcaacattccttcctgataagatttgcacacccagaactagcttctgtttgcatgaagtggttctggtcagtttacgggggctgcacactgagtgccttcatgtcctctaattcaccttttgacacatggggccaaattatagtatacttaaatgttatgttttcaccccaaaatgaagatggcatgtatatgacattcatattaatttactgtgcatttgcgtgccctccttttgtgaatattcatagctcctcctataacttgagtatgtatacttagccattctgttagcataaattcctg

SEQ ID NO: 421647 - DNA, 139 bp, Homo Sapiens
cccgagctagcccccccgactagcccgacagtggtggttgctgggtcgcgttacctagttggctttatggcaccagctgtaaattacagccctccctgttccatcctaagagatctgtcgggctagtcgggggggtacc

SEQ ID NO: 421648 - DNA, 194 bp, Homo Sapiens
cccgactagcccgacaggcaagccataaatatgaagttaaggacaccagttgggtgagaaatcaatacacacagtgatggtattggcaacacggcagcagctcctagcagccaggggctggcgggctggctgtgttcaaagcaccttctgtaaagtggggcctgtcgggctagtcgggggggtacgagctcgaa

SEQ ID NO: 421649 - DNA, 229 bp, Homo Sapiens
  misc_feature (115)..(115): n is a, c, g, or t
  misc_feature (146)..(146): n is a, c, g, or t
  misc_feature (168)..(168): n is a, c, g, or t
  misc_feature (214)..(214): n is a, c, g, or t
ccccgactagcccgaagctccactgctgtcctgcttgatcaatttccacaccaaaactctaatcatgtcaccctctctgccatcctaaccccactgaaccctctgttggttttcntgttgtttgtgacgatcatctcctatatccngagacctggccctctgtggccnctgcatgtgctgtgcccacccaacctccatcgtttgtcacacaccnctctgcccgtgtcgg

SEQ ID NO: 421650 - DNA, 178 bp, Homo Sapiens
cccgactagcccgacagcctggttgaagagcaggtatttgcttgtccgtttccctagaaactatgagaatcactggtgcagcgggcactgagctggcatctgctgagcggaggaggggcaggcggttccagcgaaggcggaggcggctgacctgggcgccctgtcgggctagtcgggg

SEQ ID NO: 421651 - DNA, 284 bp, Homo Sapiens
ccccgactagcccgacagacagactcgcattctccttctccacaggccgtaggtctccagccgggcctccggccctgtcgtcaagggcctgactgttcccatccggacttatggaagtggaggagggaattttgagtccaagctggggttttgagatcctcaactttaccaacatctcccctaatctcaccagacttaggaaacacttggccttcagcaaacttaagagtaactgatccaaatacagatgccccccactgtcgggctagtcgggggggtaccga

SEQ ID NO: 421652 - DNA, 172 bp, Homo Sapiens
ccccgactagcccgacgtgaactttgtctgggagagagctgggaaaattccacagaggtagagcatttatgctgaaaagaagggtaccatcatgaagtcagaaaaaggcatggtgtgtttgaggacaggcacatttcacatagcagaaatgtgcctgtcgggctagtcgggg

SEQ ID NO: 421653 - DNA, 487 bp, Homo Sapiens
cgaactacgcgcctggcctcttttccactttaaatggaatgataaaactaaaaatgaaaaggacgagagagaaagagtctttttgaaataatatttgacaggatttattaagaagatcacaatagtagctaataacaataaatactatttgagtgctcattatgcaccaggtacttttctagatatttgacatatttaatttagtgtatttgcagttcattttcctaacttatgagatagatattatttttacaaccattatactagtgaagagatcaaggttcaaataacatgcccaaagttatataagaataaagtaactgaaccactgtaactccaatgattccaaagctcttggggaaatgaaaggactctcagagaaggagagcattacatgggtggtatgcctgcatttgggttttttacatagaatcaacatggcagacggtacagaaaagccacggaggggtgggagcctttggctata

SEQ ID NO: 421654 - DNA, 189 bp, Homo Sapiens
cccgactagcccgacagcaagtgaggggcaggccctcagagaggagacttccctgcggagcccactctgctggtttctgtgtgcttcatttggctctttgcttctgcagataacctagacccactgacgctgcgacctaacactccgcttcctatgctgccctgtcgggctagtcgggggggtaccgag

SEQ ID NO: 421655 - DNA, 384 bp, Homo Sapiens
ccgcccatagaagtgttccctgatcaccgcattcatgccaacatctactgtttattattattttttttattatggccatccttgcaggagcaacatggtatcacattgtggttttgattgcatttcccttatcattagtgatattgagcattttttcacatatttcttggccatttgtatatcttctttggagaatggccttagcccactttttgatgagactgcttgtttttttattttcttatagattggtttgagttggttatagattccagatattagtcctttttcagacgtatagatggtgaagatttttctcctactccgtgggttgcccatttactctgctgactgttccttttgctgtcgggctagtcggggctg

SEQ ID NO: 421656 - DNA, 154 bp, Homo Sapiens
cccgactagcccgacaggcaaaaacggcaaacgcagccctcccatgctcaagggaggtctcatcgctctgccatagtcctcacaaatctccaaatacaaccaagatgtgtctccctcacagccctcgtccaagccactgtcgggctagtcgggg

SEQ ID NO: 421657 - DNA, 195 bp, Homo Sapiens
cccgactagcccgacaggcaggagatctactcaaggagacagacatctccaatgccagtgaagggcgacagctgcatctgaatggctcacttgaaggcctgccttactttaattgtgagcatgctgcagcttgtctgggctagtctggggtgggtacctgagtctctgaattctgtacatcatgtgtctatagct

SEQ ID NO: 421658 - DNA, 238 bp, Homo Sapiens
tagcccgacaggggcgtatctgtgagccaaggaatggatgtttctattcacaaagcctcttcagtctcaacgtacagctgatcaaagacagacagaccttcagataaaagaagcaatgtgtaaattatgtatcagtttttgaaaatcctaaccaaatgggtctggagagctatcaggttagtgaacaagaatgcatctatgtgctgggatgtatgaagtcctgtcgggctagtcgggg

SEQ ID NO: 421659 - DNA, 167 bp, Homo Sapiens
tccgggagacacaggttgtacgggagggcaggcggtccagccagagggtaggaagaacaggttgtttacctggatttccataggatccaggtctgaatgagtgctgggtggggaaggggaggtgcagggaatgaagaatcctatgcctgctgtcgggctagtcgggg

SEQ ID NO: 421660 - DNA, 182 bp, Homo Sapiens
gacttagaggatcccccccgactagcctgacagacccaggaggagcggatctgccagagaggccagcagggggctgagcttggcagtgatggagctgcagaaaggatgttacagcccccacttctccctgccatcgtgggagcagatcagtgggctcagtgtggctggtccacatgaggcca

SEQ ID NO: 421661 - DNA, 175 bp, Homo Sapiens
attcaggcccacagcaagtgcttagaaatgctgggagggtaggtggctgggaggcctgtctcaagtttacttttgtgcctactatatgccagacgctgtgacttaggggagtggaacaagctttgtcacacacacacctaggttgaagtcctgctcccggtcgggctagtcgggg

SEQ ID NO: 421662 - DNA, 165 bp, Homo Sapiens
ttagtttgacttagaggatcccccccgacaagcctcgacagcacaaccgtaaccagcaaaacaaaggtctcaggcagataccaagacacaagaaagggtgctggcagcagagcaggcagtaagctgggtccaggagggcagaagaaaagacaaggtagagccgag

SEQ ID NO: 421663 - DNA, 285 bp, Homo Sapiens
  misc_feature (46)..(108): n is a, c, g, or t
ccccgactagcccgacagagcaggttcaaccatcatgcctattacnnnnnnnnnnnnnnnnnnnnnnnnnnnnnnnnnnnnnnnnnnnnnnnnnnnnnnnnnnnnnnncgggacagcgagctgtcgggctagtcggggccccgactagcccgacagacagatatcagctctaataattacttccaccgtagcatcattcatcatgctgcttgttgtccaagatcgactgcagcataatataccagaacaccactcttgttgaacaggagggctgaagtcgtctca

SEQ ID NO: 421664 - DNA, 170 bp, Homo Sapiens
ccccgactagcccgacgcttcacaggcagtggaggttttattgggcagctctggcagatgaagtttgaaatatatcaacagtcagatagattagaagtgggtagtggcatcaccagctttctctcctctgccttggtcttggtgtctcaaccctgtcgggctagtcgggg

SEQ ID NO: 421665 - DNA, 288 bp, Homo Sapiens
ccccgactagcccgacaggcgttgtgtgtgttctcccagcttcctttttatatgatgcctatgatgctgtctgatgttagatgaaaagctcctggcattgaagtctatcagcagaggacaaggggagggaggccgtggctcattcctgcaagaacagacggtaagaatggagagggcagaggtctgtgtgtcgggcagaaagggcgtcaggatacgatgttctttagcggacgggctactcagcaaattggatggttagtcattttcacacggtcgggctagtcgggg

SEQ ID NO: 421666 - DNA, 202 bp, Homo Sapiens
ccccgactagctcgacaggaggtgaacattccttggtgggtgtgctttggtctgcaaatggactgtcaattctcagaagggatctgtcttgctgcacatagttggaggaacgtgccctgcagggaatgtctagtgagtgggggtgaaaggttatatttgcatttatgaagggctgtcgggctagtcgggggggtaccgagct

SEQ ID NO: 421667 - DNA, 201 bp, Homo Sapiens
gcgtgcagctgctgctgcggtcgcatctgcgagctcccccccgcatcgcccgccgggcgcaggtgtcactctcgcgccgggccgtacccatatccgcagccggtctccaaggtgcaccgcctctggcatgttggcacactgtcggtcagggccgtcggcacgccggctccgtcccttcggggctgtcgggctcgtcggggg

SEQ ID NO: 421668 - DNA, 181 bp, Homo Sapiens
cccgaccagcccgacagccgactagcccgacaggcatttgtgacataaacagcagctgaaagaccataaacccatagcccttagatgtgttcagggcccaggcagcagccccttgggatgtcccaagcccaattcaaatggagggaatgggcgagcatcttgtacgccctgtcgggctagt

SEQ ID NO: 421669 - DNA, 185 bp, Homo Sapiens
tggctgcggtcgacctctagacggatcccccccgatagcccgacagctctcgcccagtcgctgccctctcctttcccgcacgccgcggggcctgggctctccctgccagctcctcctgtgtccacttcagccttcccggttccccaggcagcctgtcctgtcgggctagtcgggggggtaccgag

SEQ ID NO: 421670 - DNA, 215 bp, Homo Sapiens
  misc_feature (171)..(171): n is a, c, g, or t
ccccgactagcccgacagcatgtccaattagtctctgtcagcaaagtggctaatggacatgctgttaaatatgcaaataatgtatttggtttccctactcattctttttcttgggactagtcctaggtgagatatagaggagttgttgatgatgctagtggataacgtttngtgccataactaaaagtggaacactcctgtcgggctagtcgggg

SEQ ID NO: 421671 - DNA, 148 bp, Homo Sapiens
  misc_feature (66)..(66): n is a, c, g, or t
gagatcccccgactagcccgacaggcaggagatcctactctaaggagcgacatctccaaggccagngaaaggcgacagcggcatcgaaggctcacggaaggccggccttacttaaggtgagcagatgcagctgtcgggctagtcgggg

SEQ ID NO: 421672 - DNA, 167 bp, Homo Sapiens
cccagactagcagtatggaaagatggtggggggaatgagagggcattccaaatggaaggtgcgctaagtgcaaaaggcctggagacaagaggcaagtggcctatccgcaggaacgtgacagatactcacagggacggtcgggctagtcgggggggtacggagctcga

SEQ ID NO: 421673 - DNA, 186 bp, Homo Sapiens
ttagatctaagctaaggaaggactggtgcccgcaacaatgggtcaagatgttccagtttaacaaaaggtgcctaggttgggaccaccgggaccgggaagacctttacgagtcctctgacatctgactacccttggtacctgactggacactgtgctgggtaccgacacaggcacgtgacacgtcct

SEQ ID NO: 421674 - DNA, 172 bp, Homo Sapiens
cccgactagcccgacagggcagtagcaacggtttacagggactcagcagggagcctataagcggctgggaccctcagcttggactggcagagcagaatatctgtgtgtctgtactttattcatctgtcaccgggtcaggggtctgcaaggagtgctgtcgggctagtcgggg

SEQ ID NO: 421675 - DNA, 236 bp, Homo Sapiens
cccgactagcctgacaggagacgggctagcctccgtggcccaccgtccgcggccaccaggaaagcactgtttctgccatcccccatgtctcaggttcccaaggccacggggaccgcgccagtgcaggcctacatgcaggtaggggcagctcacactgtgcccctcccacatggccacacggggtcaggccaggggctgctgtgctccttgctgtcgggctagtcgggggggtaccg

SEQ ID NO: 421676 - DNA, 124 bp, Homo Sapiens
gagagagatagggaacaagtgtgttttgtgtggtgggggggaagtgatatgtgtggttggtaggaagaggtaccagtgacttccaaatgtgtgattctgtcttaagtgttctctatttaccacc

SEQ ID NO: 421677 - DNA, 151 bp, Homo Sapiens
cccgatacgcccgacaggacaaagtgtacatccggggctaggtcatctgggttggtgagaaccccttgccagcgctccaggcccttcagcgtctcagtaggggagaggagggtcaggcagggtgggcaatgtgcggatgtaattaatgcgg

SEQ ID NO: 421678 - DNA, 309 bp, Homo Sapiens
cccgactagcccgacagcgggcaaatcacgggtgtaaatctaagagtccaaaagctgaagaactgggagtcggaggttcgagggcaggaagcatggggcacaagagaaagatgaaggcgggcagactcggcagactcagcagactcagggaatcagctcttccatcttcttcggtctgctttattctagccacacgggcagctgatgggatggtgcccacccagatggagggtggatctgcctctcccagtggactgactcaaatgttaatctccttgggcagcaccctcacggtcgggctagtcgggg

SEQ ID NO: 421679 - DNA, 525 bp, Homo Sapiens
  misc_feature (94)..(103): n is a, c, g, or t
  misc_feature (217)..(217): n is a, c, g, or t
tgatcgatggacatcaccttcacaacccatttactggtatgtaactagtctggtaatcctgtcagggggcaaaaagaaaaggacaacggttaannnnnnnnnnaaggaaaaacttctctaaggtggccagtgcagctctagattcagagaaggggaatatttggaagcagatggtggaaagggtcttgtggaaagtacacggggctaggaatcaggncacctgcgatactaagtgttggtccacattggggtgaattagaaaaggcatctgatctctcagtggtagttcccatcattgttaaattcaacacttttttaatgaatgtctcttgcgaggcgtgacgtactagaaatagagcacagaataaaattgtcttgcagcttgacttgattccggcccaatccaaaactcggagctcctccagaaagttggcaggcaggaggcaaggggaggagtcagggtggctaaggtatggtgagcaatacagaaagatgaggttccggcgacaggaaccatgagacacg

SEQ ID NO: 421680 - DNA, 380 bp, Homo Sapiens
caggtctctgccaggtgtaaacctggatctgcatgtcatccagctgggcatcttcggtgtctggtactgtatctgtactataccaagagttttgttttaagaatatagttggaaacaaagcagtgttaaggtaagtaccagctttgttgactcttgtccataactagctgaatttaaacatataggtatctcctatgttctctctacatccctgccacctggggccacagatgcttatgtggcattgtccttgttcggcatgcatgcttttccattactctgttacaaccgacggaaaaagtaaaccgtactctaaagttttctttaaatctgtaatgtcaatcattcacccacacttcccaccaaaggtcataatctca

SEQ ID NO: 421681 - DNA, 559 bp, Homo Sapiens
  misc_feature (112)..(163): n is a, c, g, or t
gtgtctgtactttgatttcgcgagcctagcctagattagaacgagacagagcctatagctatctttgtttatgtttatgttttcgttttgagacaaagtctcactctgtcannnnnnnnnnnnnnnnnnnnnnnnnnnnnnnnnnnnnnnnnnnnnnnnnnnntgggcttaagtgaccctcccaacccagccttcgagtagctgggactacaggcacatgccaccacacctgtgctagtttatgtatttttagtagagatggggttttgccatattgctcaggccgggcttgcactcctgagcttaagtgacccaaccaccttgacctcccaaagtcctgggatgacaggcatgagccactgtacccagcctatagctgtcttatcactgctgtttcacatgtgcttggtcccattttaaaaaatcactaacatttgttgtactcatacacaccccccatcccctcaacagacaaacacacacatgccctccaagtactctcctatgtgctgacttgcaagaactgtctcctatcacaacagcctgaggttgatatgag

SEQ ID NO: 421682 - DNA, 243 bp, Homo Sapiens
tctgggcttcatagtctcccatggatacgagcacgatatatgaaatcatagtgccatagcatagttcctagagtcaccaatcctatctacatgcttacaatggaaattgagtatgttcaataaactgggacatgtctaaaggaagctataacttacttaaattatataattgacacagaaagaagcaataagacgtgatatgtctgatttatggggactaatatgattttactaacaggtcct

SEQ ID NO: 421683 - DNA, 159 bp, Homo Sapiens
ctaaccttgaagttcagaggaagtccgagacactaatgctcccccaaatgcgactcagtggtccgacagtcaggagaccagaatccagtcccgatgttgtcgccagcaccaaggtcagcttggaaagtgatggtgtgagagagacaaggtagagccgag

SEQ ID NO: 421684 - DNA, 528 bp, Homo Sapiens
tcaggagctcttttttctccagctgatgaatctttgcagatagaggtggacacgtcgatctgacaatgctaggagcgatgcagggtttccaaagtatggtgatctggctaagcgtggatgatacctggtcaagatggtgaaaggaatgggaggtgctatggatttagtgtccagtgcgaaaaccaaagtggtggtcaccatgtgagcattctgcagagggaaatgcacataagatcatggggaaatgtaccttaccattgcctggaaaggcaatgtgtcatccgcataattactgacaaaggctgtgtctgattgtggacagagaagagagggttgaccctcttgattgagctctgggaagagggcctgaacagttggatgaccgtacagaagagtactgggtgtgatcagggagttatcaccaaaagtcatgccaatgcagcagatcgccaatagaactatggatatttggtaccaggctgggtgtacctcattttaaacacacaagatctacttgggaggaccatc

SEQ ID NO: 421685 - DNA, 133 bp, Homo Sapiens
aatcctctgggtgcatgctggttagctcttgtgtatactgatatcgttggcactcagcgactcatcaatctcataaaattatgagtaattatatggactaatcatcgagtaattagagtgacatgtctctaag

SEQ ID NO: 421686 - DNA, 543 bp, Homo Sapiens
tgacatggtactgatgggggtcacgcttgactacatgcagatctgatatatcagagttctgacactcatatagtatatgaaactagtgaattagcaagatgatataacaccatcatataatatgacctattgggtagagtatgctgattcataaacatgggaatttaaaggaggtatattcagtgcaagagtctccatttcagaagcatgaatccatgtggataatcttaatacaactaagaggttacaggataggcttgggttacactgcgctgagaaatccatcataaaataccctcaagatagagactatgtttcaactgacagcttggaataagatgagagtgaagttgttgtgaaataagagaagctagatcctgcttaaaagaggagactccagctgtgtataatgatttagggtaacaaacctgtggctcctctggcccttgttatgaaaggagcacatatatttgctggattctatctttatcacctctgtctactgctatccagacacggtagagccgaggggtagggagctcg

SEQ ID NO: 421687 - DNA, 249 bp, Homo Sapiens
tgagacatgtcatacagtccaggagatggatgtgacagctcatgtaccattcagaattgcctgaagtggtgtggggtggagtgagaacggggggaagcactcaggtaaaagtacaatgagggtgaacttaatgtggagaagacaggaagggggagaggaagggaatgtcatgaatataaaaaacagggagcataaaaacaatgcgaccaattaagagtattgtccagagacagacaaggtagagccgag

SEQ ID NO: 421688 - DNA, 253 bp, Homo Sapiens
gaggagcagcacgatagcagttgtcaagaacaagcaccttatgaaaggcagcaaagggagccaaaaaggtagttgatccattttcttagaaagattggtatgatgtgaaagctcctgctatgtccaagaaatatcagaaagacactaatcaccaaaaccaaggaacaaaaattgcatctgatggtctcaagggttatgtgtttgcagtgagtctttgttgacttgcagaatgatgagacaaggtagagccgag

SEQ ID NO: 421689 - DNA, 188 bp, Homo Sapiens
cccctcggctctaccttgtcttcggctctaccttgtctagagtctagaccaacaggcctccacactcacgtcccagagatttccctggtcccacctactcccagtggcaaccagacttctgcacataggagagatgtcatactcagagtccagcctccagacaaggtagagccgaggggtaccgagct

SEQ ID NO: 421690 - DNA, 419 bp, Homo Sapiens
ctcggctctagttgtcctgagcacacattcggcctggtgcgtagcagatgattagttgagaacaaacgggtcagagcggtcgggaacacagcagtgtgtctcctctacttcagagaacagcgtcctaattctgcttttcagataaatctttagactcatcctcccacgactccttaacatgagatcaccgggttatatatttaatgaagaagtaacagatgttccttatggtgcagttctacttgagttaatgtatttcaccagccaatactactgtattccctattcagtaaacagtatatttaatacatatgtagtacagtaaatgctcttgcattggaatactgcatgtacaatctgatgaaaccctaaactctgtagtttagttaaatggtattgtagcattgtcctgggtcctg

SEQ ID NO: 421691 - DNA, 387 bp, Homo Sapiens
cgcatcaaatactagagagcactgagttactggtgactcgtggtggaccgcagctcatctagatggttgttggtcatagctgcataggctctgtgttgtagctttacgaaggaggtaccatagaacacaatgccagagatgtgtgacttagttggagcaataatatacttgcagcctagagcaaaaggccaagctgtcctgagagatagaacagtattcccaaattctaactagactacaagttaagcatatatgttgcttgtaggaatatattgacaattgcaggcacagtattccagtcacgtcatataaatgcaagggcctcagcttggggactctgaagaactgcagtgcgtgtgcaagctctcaatctcacatgtcgcttcc

SEQ ID NO: 421692 - DNA, 242 bp, Homo Sapiens
ctcggtctaccttgttaggggtgacctggacaaagctgacccaaggatccatccaatacaatcagcctggatgaaggacattaaatcctcaatcacagagtatagctaacgaatgaaacaaaggcaaataacttggagtagataaatccagagagttatccagtaacacaattcaattttattctcaactacagcaaattccaataagcattttgctctcccctggctataactgcacacat

SEQ ID NO: 421693 - DNA, 190 bp, Homo Sapiens
agagtccccccgtggctggctggaatgtcagaagatgaagcaattccgaacgggcactcttgctcagtaagagctgcaaatgtggatgggcagcaggtactccctgagggtggaaggtgggccggatggaggctgggtactgcctcacatgtgaagggtcacccatgtggcagatccaggccagttagcc

SEQ ID NO: 421694 - DNA, 210 bp, Homo Sapiens
ggatagggtgaagtcatggaagggtttggaatgtcatgataaaaagggtgttggagataagctattcggacggggagagtattatggaaatgtttccccagcttctggtgcagaggtaatccatttgggttgggcgggtaatttttatcaacaataaatcaaactaggtgcgggcggggcagtgtccagtgctccccaaactggattgtg

SEQ ID NO: 421695 - DNA, 152 bp, Homo Sapiens
ctcggctctacctcgtctgctacggattatcctgagggagtagcagacaaggtggtgagtggaactggtctaatggaatgcctataagctatgtttctgttagttcgtatgttttttaaacatgaaaccttatttcttctggagaccaagtt

SEQ ID NO: 421696 - DNA, 627 bp, Homo Sapiens
ctcggctctaccttgttctagagcacattcccagaagcagatgggggctagatggtgatggagggcaggtattttcaagttaaaagtaaacattggtattcacatttcccaaaagaagaaatagaagtttataggaattacataatttgttcaagagcacagctaataagtgagagagccggagctcaaacccaggtcgacataacttcatagcctgtttcctggatcagtctcctatacagttttcaagctatgtcataatttgttcagtgtttgtcttttccctgagggcaggacatttgtctttcctttgtctagcctaccatgggcatctaataaatagtaaatgagtgatgagtaaagtcatgcatgagagggagagggaatgagaatgagagctagggtgagagggaggtgtggtatggaatctgaaaggcagcatcataactggtggcaagcgtttgtcagtagtagatgttcacagggagtcactagaactctcactgagtcccaggtgagaagccagatggatataatgaagtaataagctcaagagttggggggtggggatggtagcagaatggtttgaaagtttttctggcagcttccttgcccttaggtcgagag

SEQ ID NO: 421697 - DNA, 379 bp, Homo Sapiens
  misc_feature (79)..(120): n is a, c, g, or t
atattgtctccccagtgctagacagcactggcatgctctagaccagaaacttgtgatggcatgaatgcaaaatgactgnnnnnnnnnnnnnnnnnnnnnnnnnnnnnnnnnnnnnnnnnnaatgcagtatggccaaaagaacatctgtagaattccagataacccaaataaatgcctgtcctttctccatttctcctttccagacacaagatccagaacgagcttcgtttctcattttagacaaagacgtctgcccccaccactccaatcataaatcacattagatagttttaaacgctatacacataactttgttgacatgagcaaatctccatattttttttaacttggtctccagaagaaataaggtttcatgttt

SEQ ID NO: 421698 - DNA, 591 bp, Homo Sapiens
gtctactgtctagtcatatcttgggcacttttttccaggatagggcactttgtctacatcaaaaagcggtttagacagatccttgtctccaagattttctgatgggtctgggaactgtctgcgcctcttcaaggcagaagctacttctcctattaccttgacattttttaagccaaacttctttctaaaagtatcaaaccatccttggctggcattatattctccagctttagatccttcaccttcctttgactttgtcatataatgacttggcttttcttaaatcatattagaatcagtaggtatacttttcttacagcaatcctgcacccacatacaagctgcatattcaatatgagataaaaaagtattttgcaaaaagcacaaggttttcgcaccagctggcacaggtgtagcgatggcttcacaaacttccttttaacaatggtcctggcttcatttaccttgaaatggcaggtaaccacagctgcagaacttaatctagtacacatcaagcaattcaacaatttcttgtaacgtcatcactttgctctgctttttgggagcactccaggttcacgggggccgtcg

SEQ ID NO: 421699 - DNA, 721 bp, Homo Sapiens
tgttataagcgtgcgtgactgggaaacaggtgcacgtgcagtcctggctatgcatccatgggttcaattgttggtttatagatcccacaaataagtgagaacatgtgatatttgtcttcctctgcccgacttatttcagttaacatagtgacctccagttccacccatgttgttccagatgataggatctcattctttttttgtggctgaatagtactccattgtttatatgtagcacattttctttactcattcatctgtggatggaaacttaggttacttctaaatcttggctatcatgaacagtgttgtaacaaacatgggagtgcagatacctctttgatatactgatttcctctcttttgggcatatacccagcagtgggattgcgggctcatatagtagctcaatttttagtttttttgaggaatctctaaactgttctccataatggttgtactaatttacattcccactaacagtgtagaaaggcttcctttctccacatcctcacaagcatttgttattgcctgtctttaggctataactataagccattttacctgtggtgagatgatatcatattgtagtttagattggcatttccctgatgatcagttatgttgagcaccttttcatattcatattttgactacaatattaaactgctttgggatcaggatcaatgaccctggattgtggtgaatacttttacattccg

SEQ ID NO: 421700 - DNA, 583 bp, Homo Sapiens
ggagttctggcttgccagaataagaaacaaaatacaagatttccctgtgcttggcatagaacaatctaaacgcaggcctgatggagcatgtaggttgtgaggatggttggatttcttgttcatctaaagctgtcaaggaggctgggagccaagggaataaaaggcactgcttaatgagttctaatagaagttaacaggtaactttcacagtgatgctagaagtagatgtaatccctctccattatatggcaataataaggaatacttttttctcattacgtgtgtgctctggagagggaaaaaaagcagttcatgttgctgctcagcatcctctcagagcggcatcataaaactcagtccttatattagcaaggttcaatcagacccatgaaatgagggcagcattaaaagaggtgtcccgatgagggatagagacgggacagctgggagccttgtaaagcgtctaatcaggtcacaattgcacttcatcctagggctgccatgggagatctgagttaggcagctgggagtaccaaagaggcatggctccaaaattgagacaaggtagagccgaggggtaccg

SEQ ID NO: 421701 - DNA, 421 bp, Homo Sapiens
  misc_feature (292)..(336): n is a, c, g, or t
gcggctctagcttgtctaaacccacagcccatcatatctctgggtgtttctccagacagctttgggagagaaagcacaagactatgcctttctatttactttagatcataacagtgagcaatgagggcatttaaagacccccaaacaggggctgaatttgttgaattgcttgactcacctctcagcaaatgccttcccatgtgtcctcttcccagctgaactgtgagctgcctgggaaagccagtgcctgactcttcgtatctgtgttcacagctcagagcacagcagggcnnnnnnnnnnnnnnnnnnnnnnnnnnnnnnnnnnnnnnnnnnnnnttaatgatttgtatattttactaatagttcttgccctccttaggtgatgttagcacagcaaagcttggttaaattacactaaggt

SEQ ID NO: 421702 - DNA, 617 bp, Homo Sapiens
  misc_feature (284)..(434): n is a, c, g, or t
tggtaccagatgcaggtaggatacagtagggagactcggctctaccttgtctggtatggttggctctgcattgaagctttcacatagtaaatcgtgagtacacaggatgttatttgcacagagaaaggggtcaacggaagtagaactttgttagggatattaccataacagatcgcagaagtgagcttcctgaagtcttaagatcataaagcacactcacgtgtaaagaataaagtggaaatactcatttaatcaaaaaccctcctttggcacatctactcctnnnnnnnnnnnnnnnnnnnnnnnnnnnnnnnnnnnnnnnnnnnnnnnnnnnnnnnnnnnnnnnnnnnnnnnnnnnnnnnnnnnnnnnnnnnnnnnnnnnnnnnnnnnnnnnnnnnnnnnnnnnnnnnnnnnnnnnnnnnnnnnnnnnnnnnaacactgcccggccagcacttagtttgatgtattgttgataaaaataaccagcaaaacaaaaatgtattacctctgcacaagaagctgggaaaacatttccataatactctccctgtcagattagcttatctcgaacacagttctaatcatgacattcagaaccttcaatggattcacctatc

SEQ ID NO: 421703 - DNA, 510 bp, Homo Sapiens
ccagtgtctgtgcgtagtgggtctcataaatacccgcaacgattctatttcccaagccaagtggtggtcaatctctaatcgggcacactggtttatggcccacgtagggccatttatatccactgtcaccctgtggccaagtctccttcatatccacgttcattgtattactccttgatagctgacacttaagtaaatacttaaagaggaacaaaaaaacgggcttttctgaaagcagttataaatattttacaggacctaataaattcatgacacaagagagcatggacacgcacagaaggggaggaaccatatttataaaatttagcctaagttgtattttttataaataattcatttcttttcccgggcactgtttgagaagcaccaagttattcttataccagaaaacaattcttccccatcacaagctaagtaacaactagcagaaatgatcaatgaaaatgaggcacatggataagaagagttcagctctaccaaatatcaggt

SEQ ID NO: 421704 - DNA, 307 bp, Homo Sapiens
gcacccaggggtcatagaaggtactgaacggtgattgagaagccaactgcaggaatgtgagcctatggtcattatttttggctctggctgatgcctgggccccctgcccctgtgagtactaccccagtgatgcccaggaagcagggttctgtctccactgtactacccccacacaggatggtctctgcggtccagcagctctccgcgttccaatatattccccactttctgactcttcctctagtgcccatgccctccgccactgtcagcactccacaggtccagtgctggagtgcaataatgtccc

SEQ ID NO: 421705 - DNA, 560 bp, Homo Sapiens
ctctagcttgttcatgcgtggatgcatcgggcgtctgatagaagctgtgtatggatgtctcattcagtcccatgaggcagatggatcagtccccattttatacatgagaagcggaggcatgaactcaggcagtgactctggagcctctccttttaatccctgcagcagtctttgtgatagggtcaagtgggtatttattggaaaggtcccctgctctgtcccccttacccagtgcaggtgttaagaaggggctgtttgttaggacaagtcttcagcacaaacggatcctgcttgcttactggagctgctgactttctcaggttctgagaacgaggtaggagagttgcagaatcagaggggcaggagcgctgtgtccccgggggttgccctgaactggcagaggatccaggtgccagaccagaatgacgaggaactcaccacaaggcctggctcctcgcggggaggaacacggcagatcagataacaagactaagcatgtgaactccagatgcatagtcttggctcaaaattggggtgccagaccagacaggtagagccga

SEQ ID NO: 421706 - DNA, 557 bp, Homo Sapiens
  misc_feature (365)..(386): n is a, c, g, or t
ctcggctctaccttgtcgggggaacaacaaaaatagtataaagacagtgatattatggtaaaacagtaactatataaaacccccagaaaatgagatctctggcttggttctgttttttattcctttaaaaggcacctccaattttaaaagtagtcacttaggagaaatacttataaaatgagtagtatttccctctttactaaacttacttgaaatgtgcaaaaatgcactgagatctatgagatcttttaagatactgacctgtctctctccactaagtaatggtaaactgtagaccctacactaaagaattctaggcttttacttagtttcatctttgttccctgagacctctttctgtcggnnnnnnnnnnnnnnnnnnnnnncttttttaaaaagaacagttcatttcctcttttctaatattctgtgtttgatgtgctgtggatgtggaaatcagataaccaggtttgtgtgtttattcagcaaaaatttaatgagtgactcgtatatggcagacactagtatacaaagattaaaaagggggtgttcctatc

SEQ ID NO: 421707 - DNA, 527 bp, Homo Sapiens
ctcggtctagcttgcgggataggtcaaagaaatgaggggaactgagagtcaactattagagggcgagtattaaggctatgctatatactgaaggcttttttatatagaaggcaagactatttaggatggtcttgttagtgggctgatagagattattgggcataagtgtattagtcactctgtactcccaacctatcctttgacactgtcctaagattgtagagagaaaaagtagtgttgtaatatccccaaagagaacatgctactctaatccaagaaaatctcctttatccgaggggatttcatggaggaggtaaagagccccgactcttaaaaaagatatgacatgagtcttatgtagaaacagtaggtttataaatacttagaaaaattatagtctatataaaagcacatgtatttaacgtcttgtccagaacttccaggtttcattcctgagactttgccttttgtacggaacttattccttaaatctaaagtacggttcattaaaatacaaggcgagccag

SEQ ID NO: 421708 - DNA, 584 bp, Homo Sapiens
  misc_feature (520)..(520): n is a, c, g, or t
  misc_feature (522)..(522): n is a, c, g, or t
cggctctacctttcgccccttgcttcggtgggggcagtgagtcagggtgagctcagcagagagtgcaattaaacatcagcaagtatgatcccaccgagtgtggaatttctaataattcagtcgtggctctcctactgtgactccaggaaacaaagtctgaatctctttttccacgagagtttgaagaagtgtggcctgaaattagtgggtttcttcaaagccaggcttgtgatgtgctttcaacttttgcatccagcatgaactggttagggtagaagatgtggcttatgtgggatcaaacagtatagagggtgggctcgctgcaaattgtcacttaacgtgtgcatctatgtaattattcctgctcagccggactcaggcatttcaatatctgagccaatagcctgtgccttctagtgaatttggggtttggtattgggctctttgttcatctctctgagatactattcagcatgctacattctgacacatggacatgtttctccccatccctttcttngnagactctcttaaacttttaagggcattatatctgaaataagagcaattagtgacaatagctt

SEQ ID NO: 421709 - DNA, 290 bp, Homo Sapiens
ctcttgttacatagcaggtttctgtccaacctcccgtcccaggatctaggggaggtgtgaatgtaaaggcaatgagaggacaaggcattgcatggagcttcaagtgagcttcagccgtgcatggtgaagttggaaaacgaaacctgcatgtgtgtggtagatgctcagtggctcccaatggattttggtccctcacatggcactcctgcttgccatgtttacaaatgtgctccagtgggtatcacttttagacatgccctccaaacgagcctcattgagtgtcagatttt

SEQ ID NO: 421710 - DNA, 413 bp, Homo Sapiens
  misc_feature (42)..(117): n is a, c, g, or t
ctgtggtcgatctagaggtccccctcggttctaccttgtcannnnnnnnnnnnnnnnnnnnnnnnnnnnnnnnnnnnnnnnnnnnnnnnnnnnnnnnnnnnnnnnnnnnnnnnnnnncggcgggctttggtataggttagacaggaatgggggtttgggtagattattgtggggcttagaagcttggtgggatgtgctgatctctcgagtcttagtaggaaagctgagatgtcggttgagacatggatagagaatctgaaaataatccctcaatctgaaaataataatccctcaaatatcacttttgagtttataacaaaagggctttcacatgtgttggctcatctgtcctccatagcaactgtgtcaggtagacattttctagacaaggtagagccgaggggtaccgagct

SEQ ID NO: 421711 - DNA, 601 bp, Homo Sapiens
ctcggtctaccttgttcacttactttaattcagaaacatgcagaactcaagatcttggctaatctctacggagggtgaaggaggaagatgaagtttaatccactgatgagagtaagtacgcggttagggcttcattttctgctttctgatagatcctatggatggagaggaccacagtgacaatcacagtggaacactgggctcatccggagtagctttaacacacgtggtgtgagctgcagggccactagagaagtgacagccacagacactgtctcccatgatgattagctggcctggaacaccagctcttccttatctatggtgggtatggcacaagtacaaaatatataatatgtatcttggatctctaactttcccaatgagaacagagtgacccagaaacatggtgtgaaatatctaaagtctcatacttggttcatggagaggagggaccagattccaacttccgggctgcaattgatattattactttcttatgatttccacagttactgcttgtgttattatgtcttgctttttcagatgagttagtactctgcacagacaaggtagagccgagctcggctctaccttgtct

SEQ ID NO: 421712 - DNA, 460 bp, Homo Sapiens
gctctaccttgtcaggagacagtaggtctcacctcatgtttataatcttaaagaggcattgcagtcactgaaaatctgagatcagtgaatcatcgccaaattactgagaagtaatagttgcaacaactattacagcttttggcaaaacaacaataccacaaccaccaccaacaaaatcagtaccagaagagtctgctaactccagcatcttatcaatactgctgtggtcatttcagcatggtctaaatgctattgtcatcttggtgtagagtctcaaagaaggaggtttttagggactggggccactgcatcaaagagacagtgttgacatggggctgatgacaagggctgcaggagcaggttcgtacgggacaacaaagaaattctcatagggtggatttgtcacagacatggcactcagggagaagagacaaggtagagccgaggggtaccgagctcg

SEQ ID NO: 421713 - DNA, 290 bp, Homo Sapiens
  misc_feature (144)..(144): n is a, c, g, or t
  misc_feature (239)..(239): n is a, c, g, or t
caacaacaaaaattactcatagaacattttccaggtcaggaaagatgagaagagcgggatagacctttccagatgtaagacccccaaacctaaatatgccgggtacgtttaaggcccctttaggggggataactccccctctgncctcagcccagaaaagcttgttaccaataggccttggctggagggttggggaaatgtcccatccttcacggaaggtgtgggattgggggtcagtnccattggggtacctgcttgccccagccaccagtgagtacccactggagaca

SEQ ID NO: 421714 - DNA, 580 bp, Homo Sapiens
  misc_feature (259)..(304): n is a, c, g, or t
cggttctagcatgtctatgagtacatggctaagcaaaattatgaaaaaggcgagtgagagtacatacatatggtataatcatattatatgaatatagaccactatattaatatatgtcagtgtgtacaccagaaaagaaaaagtttaaagcaatatacactaaatagaaaagaaattatggaatgggagatttatattttttatattaatgtatttctgtaggtttgagtttggtaaccttggattacatatgtcattnnnnnnnnnnnnnnnnnnnnnnnnnnnnnnnnnnnnnnnnnnnnnntaactgtcatgttaggaaaaattcttgggacatttattttatggtaacgagggttaaaatttaagaggagcttggaagggcagatggaggttagggcaggagacaggcagtgtaattaaggaaattaaaataagtggtcgataagctggactcttacttggccagcagtaaaccaatcaacactaagttgaggggtaacaggaatgagaaaatcacctgaacataaacataagagaaggtatttcatagagtacaacagatcactgttcatccata

SEQ ID NO: 421715 - DNA, 232 bp, Homo Sapiens
taaccatgcagtgtcaagaaatgatttggattggggtaaaagtaagcctaagtacaccaggggttcaatgccagtttttactttgatttcattttcatatttatggctaaaagctcctcctcacatatctccgggcatctgaacctcacagtccatcccactgcctggctgtctcatagttgggatatgtagaatgtcacaactatgagacaaggtagagccgaggggtacc

SEQ ID NO: 421716 - DNA, 494 bp, Homo Sapiens
  misc_feature (249)..(249): n is a, c, g, or t
  misc_feature (403)..(403): n is a, c, g, or t
ctcggctctaccttgtctattgcaaggagaagctaccagaacagaatgctttctggaatctgtgtcaaggagagagtaaattaagaggaatgggacctcttcacataggagcgaaaagagcccaggggatatggaaaagcaggaagatgaaaaaataggcatttctcagtgaccctgtggcctgtcctcttcagtccttgctggccccagatgtgataggtagcaaagacatgcaccctttgcatctgnccagctcagcctcacattctcccttatcaagatggaatgtgttctcagaatctcaggcctcactattgggaggaaccagaaatttttctgcagtggcccccaaatggctggccactgcggaaaacttctagcctcccttcctgaacagattgtngctatccatcattcatatagctggtcttctgtctcagttccctgtttatgctcctgtcctcaccagggaactgagacaaggtagagccgag

SEQ ID NO: 421717 - DNA, 633 bp, Homo Sapiens
  misc_feature (517)..(517): n is a, c, g, or t
ctgagatctagaggtcccctcggctctactatgttacacagttcccctcggttagggtgcttgattcaggcacccaagaaagaaagctcactttactcaaaagacccagccaacatctgatgagcagttactactgaactaagatcaggaagacattctctatgtccacacctaaaaggaagaatggtgtccaaatgggatccacaatgtctcataaaagcgaacagaaaactatttctttatgtgaagaatctcggtgcacttctatttcccacaataaggtttataatttttctgtcttttcaataaggcatagcagttagaaagaaataatgccttaaccagaagtacttttaaatcactctaaccaaatgcaattgcagtggaaaagcccaaataaagtgaactagatggtaagatttgcgaagttactgaactgagttgtggtaaatgtccttgttgggtggtcgtttacatgtcctaaaattagagccacatttaaagctacacttatttnggataacgccctcaatgagttaaaaatgattatcttttcatgtaaataatgttctaaatgcaatatttttgaagggttgagtatatgaagttgagacatcacgtcacaatagctaa

SEQ ID NO: 421718 - DNA, 522 bp, Homo Sapiens
ctcggctctacttgtttcacatggctggggttttgtgggttagctctgaagtcagatagatctccattcaagtccaagttcttggattcaatgtctcattgctaacttcatgcaactgatacagctaaagatatttgaccttacgtcaagatgcctgctattctgtcagaggtgtttcaggttgtaaatcgtgaatgtcccatctcttagagtagagagcataaagtccttgtctcagaatttgtgaggctctagttttcctgattttataaagaaatgtgctttgagttctgccactgggtttagcttacctgattcttacttcctcctgttgtatgtcatttaacaattttgagggtgaaaggatgaagatggagtagtggtgggggagctgttgattagaggtgactagagagcagtttttacttagttcctgtcttaaccatgttttgatatgcaccccccaatcaaattccttttaacttgtttctccctatcccagacaaggtaagaagcgagggg

SEQ ID NO: 421719 - DNA, 456 bp, Homo Sapiens
ctatgttaccaaaacccataattgggcaattatacttcgttggtattcaactcatggatttaaatgaccaatcagaagcggtttggctgtgctgggtaaagaataggaaaagtatgaagcaaaatttcatggggctagtttaatatacattattttcttcttttataaatttggaaaaaatttgatgtagacactagaaatctataaaggaaataggatatttgatttctagttcctaaatggttatgctatctggcaaggctataaaatctctgtgccttaccttcttaaccttcttaatttctaaaattaaaaggctgctatactatcatcgtgaaggataagttggcaatgccacttaaaatgtaaaatgcatttacgcttccctatgtatcccaaagaaggccaatacttatgcacaaggaggtgtgtgcattccagcatcatgggtaacag

SEQ ID NO: 421720 - DNA, 509 bp, Homo Sapiens
ttctagttatgttaggtagagaaagggggaagtagacattcacgccatccacattcaagggatgtgtacttccaatgtgcacaaatatagtctcggggggtgcagcattcctgattcccagaagaaatcacttccaccaagaggaacaatgtggatggcactaaacttaaagttattactgctcagtttatgttctttgtgctagtgaagtacctagctcagaaagaagtggctctattagcaggagcaattaactgtaatcatgaagaaacagggctgctgctacataattgagacagagcagaagatatctggcactctggtgatctaccaggatgtctttggttactagcattgtggattaaactctacagccaatcatagccattaataagggcaaaataaacagggagtcagatcctgcagcaatgagagtgggagaaaaccctcccttcacatacacacagacacaaccctcgcttcacacacacaccagacaaggtagagcc

SEQ ID NO: 421721 - DNA, 703 bp, Homo Sapiens
ctcggctctaccttgtctcaatcagcttttaaaagccaaaattacctttggcctatggcactgctatctgataccttaaatggagtatttgctaccaaatgaaactaaataggacaagaaagagctgctcatctctttattgcaccatcatttacactaaacttttccacaaaagggtaatgtttctctttaacctcaggggcacatgtgagtcatggctctttcagatcctaactatccagtgatatctattaagtcaccgcttgtacctttaacacagtttctattcagtcctcctggcctcccgcaaggactgcattagtctagtcaaccagtagtgctgctgccgaagttacctattcctcatgcttgactctaagaacctcttcctttctttcttcttgttttctaggcatagggatttccagctttacaacatgctatgaattatcctcctctgtgttaacacttgtgttaacctcatccgaagtcctgggggatgtcctgttcaacctgccatttcacccatagtagagttggtccacagtgaaaagtggtgaaaagactgaagtctttataccacttgcatatattgttcccgatcctgcgtgtacatttcagagaactggtgaataactctcgctccatgcttctgtcagagggtactcttatattctcaattaattaaagtggtcctattggt

SEQ ID NO: 421722 - DNA, 507 bp, Homo Sapiens
ctcggctctaccttgttttccctggggctgctcccctgcttgcccatggcaggatttctgaaggccacagtcagcctgggaagttaggatgccagggagttggcatggagtccctgtgggacttggtagctctggggggcttctgaggaagagactcattgttactggagtgaacgtcagaagctctgcattggtggattagtgagtcctttcctcattttctcctcttgtgcaggcttcttgttcctaatgcactcattctaactgatgagataattacagcaaaattttgtatagctactagaaccaggaattccgtcgacacaattagaattggtaatccttaccttcaaatcttcattctagtgaaacctaaaataaaattagcattgctttcaagcagagcttttgtgcttaaattgccccatttctgttccatatcttaaggctgacctccattccagatttcccatttggggacttggatggttctcctgtggagacaag

SEQ ID NO: 421723 - DNA, 187 bp, Homo Sapiens
  misc_feature (59)..(59): n is a, c, g, or t
ataacgtaggagccattcactaactggcagcttttactgccaccgttccccaggatgtngtcattatttttgatttgggaaggtcacagaccgctctcggaccaggtggagacaaggtagagccgagtctccctactgtatcctaaataatcttctggaaagacaaggtagagccgaggggtaccga

SEQ ID NO: 421724 - DNA, 399 bp, Homo Sapiens
  misc_feature (268)..(268): n is a, c, g, or t
tcggctctacctgtcggacatccttctcataaatgtgcctattcaattccgtctgcagaagcagggaagcaccctgttttgagacctgtcctgtggaaaggaagaatggtgtagtggaaggtgcagtggtctgggatggagacctcaggactactcctggtattgcacaggtctatggctctttacctcagttcgcccatccttaggatgaagataattctacctgccctgtcccttcccacggtcattaaaggattatatgagattnggagtcctaatggcctttgatggagaagtaccaatgtaagggctcatttttccccgtcttccaatggccctccccgattcctacatgggcatgagcgtctggtgcttcggagacaaggtagagccgagggg

SEQ ID NO: 421725 - DNA, 510 bp, Homo Sapiens
  misc_feature (37)..(37): n is a, c, g, or t
  misc_feature (55)..(55): n is a, c, g, or t
  misc_feature (208)..(208): n is a, c, g, or t
ctcggctctacctgtctgatgaccaaacatttatttngtctcatgtcactgccanggtggtgtggttacctgccccatgctcattttattctttggtgggatccctgtggccaagggactggaaccaaaagacttaaaactaattaaacattggaggccagatgaagatggaggttcacaggcacgcattaacccttaaaaacctttngagcaacataaccaaaaagcagtgttacaaaagtgacttgtctatgagttctgtgtgtggagccatgagctgttgggtaatctgtatgcccatctttaattgggagggtctgaactaattttatctgttgaaactggcccttacaatctcatgtgcccaccccttctgtgatagtccatgggcctactgggagggtgcttgatactgtattgctttagcagtagtgccttggcaatggaaagcagattggcctagggggattgaatagttttcaaattctagagacaaggtagagccgaggg

SEQ ID NO: 421726 - DNA, 291 bp, Homo Sapiens
ctcggctctacctgtctggtgtgggggcagcaagtacaagactccaagcatcccctctggtggttggcagaggatttcagtctgctgggctgacgaagtggagaggctgccctgggcttcaaactggacctggtactacctccaaccctgtggatgtttgctcctgtaacatatggcccaatgcacctgattgccttagttttccatggaaaagacaagaaggtggttttcactcctctaccatgtttattcagcctcgttaactccactgagtttgctctgataggccag

SEQ ID NO: 421727 - DNA, 531 bp, Homo Sapiens
  misc_feature (200)..(214): n is a, c, g, or t
ctcggctctaccttgtctataggtaagtggttcattctttcctggagtctaccgagagtgttctaaaactctcagagcttatcagaatcctctatggcaagcttgtccaacccacagcccgcaagccatatgcgacccaggatggatgcgaatgaggctcaacggaaattcgtaaactttcttaaaacatcgtaagattnnnnnnnnnnnnnnnattttcagtttttgtccatctgacagttgctgttgttttcattgttaggatatgagttccagttccagtatttctgtggcagagccttttgttctttagcatgtagggatttatttaggtctattacttgttttcactttctctttgccttttcttaaatttcaactttaataatagcctttaatagaataacagtgcattagctttcattgactacatgtatgctgaagaattcatgctaaagaaataataaggaatgtgtgccaagatgtggctatgaggatgttcattactagattgtttataatagcaagaca

SEQ ID NO: 421728 - DNA, 169 bp, Homo Sapiens
ctgtcgatggtgcatgatactaggaccgcagcctgtccggcagcagccagagccgagctgctgcagaggcgattcagaagctccctcccctgcccgggacagagacagacaagatgccagcgcttgttgtccctgacatcaaggagatccgagtcagcccgactcgttc

SEQ ID NO: 421729 - DNA, 152 bp, Homo Sapiens
tcggccgccggattccttcggccgccgggattccttcggccgccgggattccttcggccgccgggattccttcggccgccgggattccttcggccgccgggataccttccgccgccgggattcctcggccgccgggattccttcggccgccg

SEQ ID NO: 421730 - DNA, 290 bp, Homo Sapiens
tctacaggatctctcggcgcgggattcttacctacatgtaccaacatgccagaggttgtcaccttggagacctgctgctggatatgggtactggccctggcgcgaggatttacaccctctcccccggaatttcacatgggccagcgatgagttcaccgggacgccgccgggaaccggcgacgctttcccaagggcacggggccccttcttctcgggggctgaacccatttccaggggggcccttgccctttcacaaaggaaaaggagaacctctcctcagggaatcccgg

SEQ ID NO: 421731 - DNA, 275 bp, Homo Sapiens
ctggacaacccaacaatgggccgccttaggaggtctgagtcactatctcaaagtcaatcacccgccagtaaggatgggggtgggggtccagctgtccagactccagagaatgggcctctttgtccaaactctggtgacccaaaggacagctgggttgggaagccggaggggggacagccctcgtgttccccgccggtacccagtcccccggatgaactgacatcaggtccgtcgatgctggcgcagggtttcaccacactgggaagcagttgccg

SEQ ID NO: 421732 - DNA, 512 bp, Homo Sapiens
  misc_feature (238)..(238): n is a, c, g, or t
cggggtctagaggatcccggcactgcttcggatgacaagtgaacagagtccattgaaaaacaaagtccatggtgttagattctagtgcacgcttaagaaataaactggagtggccactagctcatggaagtgcatttccagctgaggccaaaggcagcaaaggcgcaagaagctgctagagctgacgttagtggaagcagggtctataaattcagagtggcaaagcaatttgtagaanggcccagttacaaagcaggacatttgccaacctgtgaagtcaaagaacgttcaatctcactttctacaaagtgcttcactgaaaatgctaatgaggaagctccctaaaacaccatatcctgagtgtcggagaaatatggtcaagatggtgatggagggggagcagagatcgatcctctaatagggttggaactgtgtcttttccaagcatcacacacacacttagtgaagaacctattactgcagtcacattccacctcgtctgcacatgcttc

SEQ ID NO: 421733 - DNA, 493 bp, Homo Sapiens
  misc_feature (49)..(136): n is a, c, g, or t
  misc_feature (149)..(236): n is a, c, g, or t
  misc_feature (249)..(336): n is a, c, g, or t
  misc_feature (349)..(436): n is a, c, g, or t
gagccccaatatcaaaggacatgatagtatgaaagactcggggatatcnnnnnnnnnnnnnnnnnnnnnnnnnnnnnnnnnnnnnnnnnnnnnnnnnnnnnnnnnnnnnnnnnnnnnnnnnnnnnnnnnnnnnnnnctcggggatatcnnnnnnnnnnnnnnnnnnnnnnnnnnnnnnnnnnnnnnnnnnnnnnnnnnnnnnnnnnnnnnnnnnnnnnnnnnnnnnnnnnnnnnnnctcggggatatcnnnnnnnnnnnnnnnnnnnnnnnnnnnnnnnnnnnnnnnnnnnnnnnnnnnnnnnnnnnnnnnnnnnnnnnnnnnnnnnnnnnnnnnnctcgggcatatcnnnnnnnnnnnnnnnnnnnnnnnnnnnnnnnnnnnnnnnnnnnnnnnnnnnnnnnnnnnnnnnnnnnnnnnnnnnnnnnnnnnnnnnnctcggggatatctaacagccacaacagatcactactacgcactagaagctcgcgacg

SEQ ID NO: 421734 - DNA, 304 bp, Homo Sapiens
  misc_feature (56)..(144): n is a, c, g, or t
  misc_feature (160)..(244): n is a, c, g, or t
gcgtacgagccccaatatcaaaggaaaggagttacatgaaagactcgaggatatcnnnnnnnnnnnnnnnnnnnnnnnnnnnnnnnnnnnnnnnnnnnnnnnnnnnnnnnnnnnnnnnnnnnnnnnnnnnnnnnnnnnnnnnnnctcggggatatctagnnnnnnnnnnnnnnnnnnnnnnnnnnnnnnnnnnnnnnnnnnnnnnnnnnnnnnnnnnnnnnnnnnnnnnnnnnnnnnnnnnnnnctcggggatatctagcagcaatacctgatcactacttcgccactagcttctcggtacgat

SEQ ID NO: 421735 - DNA, 210 bp, Homo Sapiens
  misc_feature (128)..(128): n is a, c, g, or t
  misc_feature (145)..(145): n is a, c, g, or t
gacgaaccttacatcctagtgagaaaggtggacaaataccaacaaacatagtaagtaaattatacaatatattaagtgacaaaaagctatggggaagaagtaaacttaagtagggtaagacaatgggngagtgtgtgtgatgganggggcaagctcgtgatgttaaatttagggtcacggaaatccttttacgtgaacaggagatatcga

SEQ ID NO: 421736 - DNA, 147 bp, Homo Sapiens
tacgttatgtattcatcatgaacggcttatgtgcttcaagcatagcacctataggtactgaataaatgtgggttatatgtgaacatgatatattattaaacacatgaaatgggactggacctgttttctctggtcactgccacacag

SEQ ID NO: 421737 - DNA, 501 bp, Homo Sapiens
  misc_feature (240)..(240): n is a, c, g, or t
gaaggtacaggaaatgggcagcgagttagcaggagaaaagtgagcctgcagagccctgggctgtactctgaaaacaagggctgtgccaatgaggtcctgacaggtgaattcttgctgcccaggaacctgcctgcttggcctgcaggcaccctgactttgcaccaggcagagcctgctgttgcccagccaggttccactgaagatgtcaggggccatccactgtactgggaagaaggctgnagtcatcagctgcagaggggaccagcgtccgcagggggatggtttaagtagactgcacaagcagctggggtggcggcctatctgcaactggtccgaatgaccggcttgaagagttataaaactccacacatggtacaaaggccccttgtctccacgtccctctggtagccaggtgtcccttcagtgggcctcttggccaactcctgggatcgcccccaggtacagaagtgggtacaatgcagctccttcccccgtagtgct

SEQ ID NO: 421738 - DNA, 104 bp, Homo Sapiens
cttacaggatcttatgtcataccccttcgtacagcaatctcttaattcttaaaagctcaactacatattcatctattactgggatgatatctcaggctgagtag

SEQ ID NO: 421739 - DNA, 128 bp, Homo Sapiens
aaattcaataatgataccactgacagacacgaagtagtgggcacgggacgcatggtcatgacaaacagtggactgtcacacgcagttgaattttgctggatagcaactttgctgagtataaaggaaag

SEQ ID NO: 421740 - DNA, 146 bp, Homo Sapiens
ttagatagagaatgatatctgaaggataatagttgaggtacaaacattgatggctttgtaaaaaggcaaggagagtacaatagcgaaatgcgtgcttactaaactccgagtatgtagggatgataacttatctttaatgagaagaa

SEQ ID NO: 421741 - DNA, 454 bp, Homo Sapiens
  misc_feature (160)..(160): n is a, c, g, or t
  misc_feature (179)..(179): n is a, c, g, or t
  misc_feature (241)..(241): n is a, c, g, or t
tactctaagatctcgtgtcatcccttcgtaggaggaggtgactcatcagaggcagctggacagactgagagacctgcacacgcgcacctcttcctgactggctgtgtccatggcagctctcagcgtgaaagcgagacacgcgtggagctgacgtaggtancagtcacatgcgtggtccnatgctggattccatctttgttctgtgaggatgaggcacaactccaccctacccacactgggnaataaagtggaggagagagaacttgtgaatggtggagagctgttctccagagctgcgggctttcttagggtctgtggatgaggctgccactgcaggaggggagggaactaaggtatgagattgtgttcatgggtgagaaagtgattttgccaagtcaggtattccctggcctctgtgtcagggtctgtccttgggagacaggattgggttagc

SEQ ID NO: 421742 - DNA, 215 bp, Homo Sapiens
ccctcgtggatgagagtaagagcatgagagaggaaaggtctaacttggcaccaagcagctagaaccacactgagatcctgccacagagattcctacccaaggaatcagtggacctttgttggattctacgcattgtttgtatccagataatggggccaactactattgtgttaagagccccagagccctggtatgcaatgggctctgtctctcga

SEQ ID NO: 421743 - DNA, 546 bp, Homo Sapiens
ggagaagcacagtggctcacgatcaacagaatccttagcacatgcagatgttcaacagagaaaaggcttctgtcactgccgcagcaggatgtggcttgctgcttcctaactcgtcattgaagaaaacagagactgtgatgtataagatgggctgggcagaacacatccagaaggagcccatcttcacggggaaaactaggaagtgtccctgagagccttccagggctcagagtaccttctgtttaaattacatgtgactacacaatactgctagggaaacgtggaaagtgcttctagtgactttggcattctaaatcagaaactgtggacttaggggactgatgggcatatttatgttgtctagttgaaagaggagatgtcggaaggaaaagaagatgtgaaatgcaaacagcaggctccacagacagtgtcagagaacaggacgtgatatcttgagttgtggttaactggagagtgtgatcctcacaagggccttggtacatctcacaaaaatagggtgattctgtctgacgaaaggggatggac

SEQ ID NO: 421744 - DNA, 340 bp, Homo Sapiens
caggatttaggtcatcccccttcgtgccttctgttgacttagcaccctgctaaattcaaaagcgaactctaaactccatctatatcatacattctttcgaggaattaactgttttctctcaaactgacattctgggctccacctctagcagttctatgtttgtaagcaccttcttcaatctctgtttccttccttaaaactgtggatagtcaccacagtaccaatttcccatgtgggtactgatgatgacttgggcatatatgtgtaagtaaattaggatagcgcctaaatgtttcagattaatctctaggcacactgaagtgattcccaaactaattta

SEQ ID NO: 421745 - DNA, 249 bp, Homo Sapiens
atgagaagggttggttaggccaccctccaagtgagataaaaaggaggcagcagggtaggatcaggatagagcagaggcatcaggagagctatggcagggaggatccagctccaagacaccctgatgcagtctcgggagtggcctgggaatctgtatgtctaacaggcactcaggcactgctttggacgcaggtcactgcactaagcttcgcattaacagggatccagcaaatagcatgcagccccacga

SEQ ID NO: 421746 - DNA, 693 bp, Homo Sapiens
taatctagaggatcccgtgtcatcccccttcgtcaagaaatcagcaagtgacatagctcctcccctgggaatttcacatctggaagcctgatgtcccaggacacagtggtcatttctacttccagcccctgttggcattggagctggaggcctggaagctgtggctcccttcaccaagaagagaacctgatgttgaagctcctggctcatgccctgcccccaactcaggacctgaggagggctcctgctgcgctctggccctctggagttcagagctgcagcctctccatccaccatgggccaggtctgggtgccccccaggtcactgcttccaaagcagctcagctgactttgcctccatgactttttaattttgacaccattagttgtaaggagaggtgatttctctaccattttaaagtctaagaaagaaactgaggcaacagaaggtgtgcccctcagacagtagaatgcagccctttgcttactaggacacactggaatcacatggttcaggagggctcagctctgacatttcctgggagcctctcttttcatggggggcagtgcaatcccagtttaaatgctggtctgggtcaggttgcttcttaccatcaagccatttcatcacattcttggggtcatgatcgggcaaccaccccaccatataagaaacggtacctcgacagataa

SEQ ID NO: 421747 - DNA, 573 bp, Homo Sapiens
gtgtcatcccccttcgtgcttgactgatcacagtaaccaagcccttgtgcctcctaggaaaggtcacaggagactccggagcctgccactgtcaacagtgatgcccgtttggctgcactgtgttggaatgatttgataacctggttagaagcagggaaaccagaagctggagccgtcaccgtagagctctgtttcaattgacaaatgcaagccagatgccttacagcagctcctcttctacggacttcagtccctctacaagaaacatgcattgtgttgccaccaccttcaaagtggcagccagtgtgaatcctggggagtttatgtgggactcaggatccaaaggaggcacccattcatcagatatatattaagaacctgcctagtgcaaggaactgtgtggggctcagcaaggaatcccaaaatgagaaagattagcccctgccctcacggagcatacactctagaaaggttgtaaaaacaaactttgtatattttagaattggattagagcaaagtcaggttccctccaaattagaaaattgtaactagatgctataatgtataatggat

SEQ ID NO: 421748 - DNA, 126 bp, Homo Sapiens
  misc_feature (67)..(67): n is a, c, g, or t
gggtgctctagacgatcccgtgtcatcccccttcgtccacaacacggctaggcaggtgtgctcaggnggtctgaggtttcacggatgttaatgtatgtcagaaaagagtctctcctcagagttcac

SEQ ID NO: 421749 - DNA, 416 bp, Homo Sapiens
cgatctagaggatccggtgtcatcccccttcgtgtattatttatcctgacatttaccatgcactgctgtgtgttaagcactgtgcttttctatagattcgttcactttacaagaagcagaaatttcagattatccatgggctagaagggttggaagatggtcttaggaaagtctctggcctgtcccagatctgctaaatgtatgggtgtgctacataatctctcagggttcttccagcccaaattggctaaaattctatgcagctctgagatctagtttctccttctaacagaagccccagtggagcttccaagcctctcttaaccttgagtttccccccagaaagccaagcttgagacaagggcttgagtacagcttttttgaagcgactccaggaaatagaagtggggaaagag

SEQ ID NO: 421750 - DNA, 166 bp, Homo Sapiens
  misc_feature (43)..(54): n is a, c, g, or t
aggaccgtgtcatcccccttcgtcagtggtaagggatactttnnnnnnnnnnnncctaccatgaagaacaactcacctatggcaagttttggatctgtaggtcagagaagtgaccttttaacacaaatattattggaatggcgttgtcaggttactttcactgggg

SEQ ID NO: 421751 - DNA, 434 bp, Homo Sapiens
tagaggaccggtgtcatccccttcgtactactgttagaaagtcatcatggtgtggtagaattacacagctgtgtctccatctaggtaattttaaataaatcatttaactttttcatattgggtattcttacctattgaaagcgaagaactaataccttgtgttcttactagagtggccatctgctggatttgccagcttgacagtcatttctccttcttcctaattttcctttgcacaaacatcccccacaacatgcagtccaggtattatgcttggtggtaactggaacctcactcaatctagaaaagtaagggttagccttgagacatttaatgcaacaacttgaacagaggtgggctctttccactggtaacttaaagtggccagagccaatcattgccaccacttggggtaactccaggactgagacatg

SEQ ID NO: 421752 - DNA, 430 bp, Homo Sapiens
ctgcacatgctaactacatcagcccagcatgacagagccacaccaggagcgtgggctctattcgaaggagggatgggtgagagggggcatcccacccaagactctgattccgggccaatctagcttaatgccggcattgggagttttgccccagtcggcacctgctggatgtgtggaccctggattgaaaggaggcgcttcggctgctggatgtgtggaccctggattgaaaggaggcgcttcggctgctagatgcctggaccctggattgaaaggaggcgcttcggcatgctggatagtgtggaccctggattgaaaggaggcgcatcggctgctggatgtgtggaccctggattgaaaggaggcgcatcgaatgctgaatagctggaccctagagtgaaaggaggcgcttcggatgctgaatgtgtgg

SEQ ID NO: 421753 - DNA, 404 bp, Homo Sapiens
ctctagagccggtcatcccccttcgtatggaaggtgatgagaagccattgggttgtaagtctcaccggaaggtagaaccaacacagtagataagtggacagattttgtatatgtgaaagaaagaagtgtagaggctattcattaggtttgtcctgcaaactggaagaatggagtcctcactaattgaaatgaagacgactttgggaatgggagagtgggaggcaggtttgatggagaaaatgtcaggtggttttctgagatgtctattaaatattaaccagaggtgccaagccaaaggtacacatatgggcttggactatggtggagatttctgagctagaggtatacatttgggagtcatcagcacacagatgatgtctgaagctatggtagtgggtgcagtc

SEQ ID NO: 421754 - DNA, 149 bp, Homo Sapiens
ccccttcgtgagatgctcttgaagggggtggtcaggcctgggtccatggttgcagctccctggccaggttgggctgagacctctgcctctcccagtgagaccaacctgccctctggacggatggaatggacactgtggagccgatgatg

SEQ ID NO: 421755 - DNA, 544 bp, Homo Sapiens
gtaatgatctcggtaaggtgtctttcttgggagaagcttccctgaccacccttgcccaatgcactgccgcctcccctaataaatccctggctccccatgagcagggccgggttgtctttgttctctgggcctcgtgtggcccctatcacgtgataggggcccagagattatctgaatgaattgccctgattagtgagcgcatgttttgcagatttatggaggctgaccctgatgaggtcaatgtgctcaggacagagattactgccttcccaactgaggggattgtgcggagtggaatccaacaaacctgtcatttcatctctctgaaattatgacaataccaccacctatcctacaggctgctgaacagcatgatgatggactgtccagaccttggtgtcaccctaaacttgaagcctgagctctacgtgcagacttgaagcttgctgcaaaaggccattaagctggtgggcttaaagcctgagaactcccctctctgtcaccagcacaggagttccttggaatgccagcatgaggttgcgga

SEQ ID NO: 421756 - DNA, 460 bp, Homo Sapiens
ccttcgtctgccgccacttacacttgtgtgtggagactgcagaggaaagggaggcatatggcctaggttttgaacttgggagtcaggctggttggttacctggggcctggcatagctgatatctgacaggacggcgtcagttacattggcagagcctgtggggtctcaggttgaatcatcccaccagcaggcacttgtctgtgagtccagagttcagtggatagggcaggatcgagggccagtaaattcatctgataagcccccactctggtatgtcagccctcgaagacactggatcctgcatcccacagtcagcccacagttctcagtgagatcagagcagctaatgctgcggatgctgttctgagacttcccgggcagccgcggatgctcatcgtgtcgtgccacccctgtgagggcagttgcacccctgcagtggcacctgcagttctgacagggc

SEQ ID NO: 421757 - DNA, 458 bp, Homo Sapiens
  misc_feature (176)..(189): n is a, c, g, or t
acaattaggtcaagtggctaattgcacccggagacaggtcttgcggtgcaatacgctacacagtgcattattcacccgagactactagctcccaaagtaaggagatagggattggaaatacagcactgaatgtatgtgtggttattgcaagcacctgtgattttaatagtcgctgnnnnnnnnnnnnnngcagaaacttgtagtgtggtggccttcctttggtctttatgcatacgtaaattgcttacctccttctgtaatatttattctacagcattctctttccagtagggtatacttttccctacttagaccctgtttcttcagaatttatttattttcttctggaacccctggctattataaaggccatatattcctccactgtttacctgtatctacaacttctcagcctcttcagtaagcaacatggtccatcaacttgaacagcttactgg

SEQ ID NO: 421758 - DNA, 572 bp, Homo Sapiens
  misc_feature (227)..(235): n is a, c, g, or t
ttcacatgaatccaaagcatgcatgtcgccattcagatcaaacactgtaattatttcctgtcgatatgttgagggatatgggacacaggtcacaagcttaaatgtgctgtatatttttcatatttttaatctatctatctaatctctccaatttctagtctatgtttcactacctgtttgggcacataaaattgatagtggtaccttgatttagctgtcacttcggnnnnnnnnngcacacagtgtaagacaccatcgctccaagctgaatacaagggagcacttctatcggcccatgccttatacagtaatctttgaattccaccagctgaaactgctagagtactttactctttttccttcctcctcaaaattcaggagtaatgagaattccctgccgttaccgactactagccctgtactgagattacatcagttcatttagctggagcttttcaggcactccttggcaggaattgaattccttataacagtccttttgccttaggaatctgcccaaaagacgattcaagaaaggattctgctcttaaaggtctgttcagcatataact

SEQ ID NO: 421759 - DNA, 586 bp, Homo Sapiens
ccaagttgacacttaaccctactgctcatgttgccacatcagggcatatcctgctctctgggtccaacacttccctgcactccttctttcctggagttgagccactcacagctgggactgagtttgtagagtaatgtctcagagtcacaaatcctggctctgtgggaagcctacatccaaccctagcacagagagtgaacctgtaacccaagaccccaggtgtcacgaataggttggcaagatcctgggcataagactctagtcccacggacacttcaagcacctgcacctagaactcagcaccactgcacttgcttgtaggtcatgtgatatctgacatgaagagacagtccccttggctaaatctccccattatgaaaaaaataagaataggaggacctcaaaagcccttgacaactaacattctttacaatatactttacagctggctgctcctcagacacatcaaggcccctcacatctcaatcttagtaacatgtgtcaactttgacctgtgagttcttgaaagaatagtctatatctaatgcactgacatttaaatatattgagccatggagtaataaca

SEQ ID NO: 421760 - DNA, 457 bp, Homo Sapiens
tctgaggtgactctagcaggatctgtgtcatccccttcgtcatactcaaagcacaggctcatttagccctaaatgtcttcccagcatttccatctgcgcaccagcacagtcccccagtgtctgactcgtagagccaccatgctcaaatttctttatggatttattagccaagtgcttattccaagacacaatagcttagtcttaaccagttttgtagtatagcttgatagaccccttaagcctctttcaatcagcagcttaccctcagagcctcttcttttccttttgtaaacaccaggtttatcttttgtaaacaccaggttgtatgagctggagggtttgccaacgactggatgttgctcatggtggaggatgggccatcagcagtcagacctggaggcttccccttggttcagagtccacctcttgggcacaaacctacgaaggcggatggaca

SEQ ID NO: 421761 - DNA, 238 bp, Homo Sapiens
  misc_feature (26)..(26): n is a, c, g, or t
gtgtcatccccttcgtgccagctctnattccactcaaatagctgcttgtcaaggagggcaggagcactgtttgatagtaagaaatattccttctggaggttgtctcaaccagtaagacccctgtcctaacaagggacacactctgggtattcagtccacacggactagggaaaagggacaggctttcaacaagggggccaaaggatcaaggttctaaaggattctgattcttgacgaa

SEQ ID NO: 421762 - DNA, 181 bp, Homo Sapiens
ttgtcataccccttcgtgcgcgtgacatcttcccagtgagcacttcagagaccagcggcaattctctcacccaggctctctagtccagccaggcctagccattcagggaccatgaaccggttcctttctggtgggccctggaagaagggatcccatcatacccagctttcagcaaggtatt

SEQ ID NO: 421763 - DNA, 434 bp, Homo Sapiens
ttgtcatcccccttcgtgggacaggatggttggctcagatgttcctcagagacaaggaatgaatctctgggatgaccactcccagattccctagctcaggacacacgttcaggcgcatctgccatacaaggtcattctcggggtaggcttaaggtattgctgtcagatgcatttgccatcagggagggagctgctctctcagagtcggatgacccacttatcccaatttgcttgggacttttctggtttcagcagtgacagttttcggtcccagaagccttagttccacctaacccagacagtggggtcagcctagctcagaggaggatgctggctggaaaccccaggcaggcagagctcagaagtctcaagataccaacaattgccacccagttttgagtacttacgtgccagatgctcaatcctcatgtctc

SEQ ID NO: 421764 - DNA, 457 bp, Homo Sapiens
gcgactctaccgagctttgtcatccccttcgtcacgttgtcttctgcaccccaggggtcaatgggatctttgagccaggacgtttttccagtttctgaatccaattgtaaatccctcatttttttaaaaacctctaccagacttttaaaaagttgtcctcaaaaaactttctaatctagagagagaaagagcacggcaacttctaagtgatgctggcgagaaagtcaggagacttggcacttacaactttctaaagatctgaatgcaaatgtcatttggagcattggagtatgccgaggcccctgggtgatgaaagtgagggagaaatgagagggcaggggtgcgccaaataaggggggatttcactcctgtccatccctgggcttgtgtaactcaagggtattgcagagtccaagtgtgctcttggttatactgctaccatgaagagggatggaca

SEQ ID NO: 421765 - DNA, 454 bp, Homo Sapiens
  misc_feature (420)..(420): n is a, c, g, or t
ctcagtaatagactaattccaaacaatacgcttatataagtcttaggctcttctctagcatttcacatacattctgacttatcagctaattcttgactccttagacacagggaccacagagctaattcaaaatcagatgttgcaaaataatgaatctacataaagtatattcaacatccttttcaataaacctcttaagtttcttagaagctcttttcattggggcaatgggctttcacaccatggaacaagagtctgataagcctttaccccaaagctcagacttacagaggacacaactttctcataagaaatctcgagcaatgaccgaccagactgcaaagactgtcctacataaacaggctctgacagaggcccaagacatccatcaataccaaagcacgagaagcctaccaaaancctaatcatggcatatacctatgcataccttccc

SEQ ID NO: 421766 - DNA, 121 bp, Homo Sapiens
ctggtagctgttggtcatattacttatatacctgttatttgatattttattgatagtgttgaagtatttggcttacatttgttgtaataaagtgagctccttaacagtcgcatctctccca

SEQ ID NO: 421767 - DNA, 647 bp, Homo Sapiens
tgatctagagcatcccatgtcgcaagctcattaagtctcagaactgtttattacttttttgcctgttatattcccactaggtctcattagggctccacatccttgctctatgtttatgtagaatattaaacattattccctttcatctcaatggaactggttctctggttcatccggactttatttccactttgcattagggaatacaaaactgagccatgtttaagcaacgtagtgtcaatcaccccgtttagattccattttcccaggcggaggagaaggtaaataaattggatccagtgagaagcctggatattaggatgtgcccatcattgtctctttcagcagaactccacacagaggacaggcaatcccctaggctctgcacgggtcactgggcactccaccctgctacacagcatcagcataatccactcccggagccctttgtggggcggtgggtcttgggcagcctgttttccccacagctgctgtccttagaccccttcatgcttcacatgcgttaaaaggacctggtgttgacaaacaagctgaggctcctgtgggatgaatctccccactgggaggtgctcttctgtgtgccgaaagagcactgtttgttgctcaagttcttttgggcccccata

SEQ ID NO: 421768 - DNA, 118 bp, Homo Sapiens
caggaatatttttggagagtcagaattgagacgagaatgagccggagagaatgaattggtatttcttttctgagatgtttatattgagagaaaccgacagacacctccctattgggga

SEQ ID NO: 421769 - DNA, 365 bp, Homo Sapiens
taataaacacattcatagagtaggcactgtgttacaccgcaactgggaagcgtgctctccaacatcaagttattaacaataacagaatatctaggtagaaaacaaggaatagttgcataacccaatagccatttataactgtaggaattattctttgttactttctacaacatttaaatagattactactcattaaactttatgaatgtagaattacttctgtctactccaacacataaaggtaggagctatatgaaccatcacttagagatatagcaagtacaactctttatatctcaaccttcatgccgacagagatgagtgagtgaactagggaatcatacagtaagaaatacaagacaata

SEQ ID NO: 421770 - DNA, 455 bp, Homo Sapiens
gtcccatattgatgtttttacagcgtccagtgagacatgtctgtatcccaaagcttgagaagcattcagtgagcattcatccacaaaccgtgacctgaagttgtaaacaaagctaaattctcaaagtataccaagatatcaggactatcagctcccatttctacagagttttatggcacacaaaaggggctctctcatgcctcacacgttgtatcttatgagcctcagaatagctcatcacctccctctacatggcggaaggcatcagactccaggaggtcaagggactttagtctaaggtcgagtagctcctaactggtcacaccaggaaataaaccctcctctcagctcaaatctttttttcctatactatctgcttctacactacattttctctacagctgcttctttttctaccctatctcatctcccttcatactcaccactataaccct

SEQ ID NO: 421771 - DNA, 108 bp, Homo Sapiens
acatacgttaagtgtgcatctgctagagtctacctgaatcagcatgactgtcttttaactacatctgtagtactataatggtgaatatagagtatatcatctgtcata

SEQ ID NO: 421772 - DNA, 136 bp, Homo Sapiens
gctcatagaaagcagacagcaatgttagtgtaccagctttaaataacttacaaagtcaatgtcatgcaatgtaagtgctatctgaaagccatcacttcagtgtttgctagcagcccccaagctggtgataaaaaca

SEQ ID NO: 421773 - DNA, 398 bp, Homo Sapiens
  misc_feature (128)..(128): n is a, c, g, or t
tttctatgagatatctgtgcatatcagcatgtcatgcatttcactctagattctgttgatctttgtattattcatctctttgttaattatctgatagaatctgactccttctctgtgttatcctgaanttctttgagtttcttctttgagttcctcacaacagctattttgaattctgtgtctgaaaggtcatatatctctgtttctccctgattggtccctggtgccttactaagttcatttggtgaggtcatgtttttctggatggtgttaatgcttatagatattctttggtgtctgggcattgaagagtttggcattgattttaatcttcacagtctgggcatgtttgtgtctgttcttgggaaggctttccaggtattcaaagggacttgggc

SEQ ID NO: 421774 - DNA, 176 bp, Homo Sapiens
atatatcttttagtggatatgtggctttctaatatgctaattagtccctgaaatattagtcactagttaatattcaaacaattaatatagagataacaataatctattaattatctgatcccttatgtttctcaaggtaatgacagtagcaactttgataagtttttgtccaacag

SEQ ID NO: 421775 - DNA, 515 bp, Homo Sapiens
ccccacggctggcttaggacattatctagtttattggaccagttttgctagccagactagaccctagaaatttgaaggcgcatttcaactgagggggcagagcccccaaagcattatctgacctggctgcctgtaagaatcaaataagctggataatcgccatggtcccagcttactctgtggacacagccagacagggggtaggaaaaatacagaaaactccaaggggtcgcttttggtgcttgtcaacagctctgactgggaggaagtcaagacaataaaccaagaaaaagatccagtgagttctgttgcctgttctctattttgaggggacagtccctgctttgtttccctcctcttgggagaaaggctgttccctgaaatgctcctggcttccgagaacagttctggaggcaacttcataatgtgctggctcggggttgatcagaagcaagcaagcagaattcaccctgcccccaggatcataccccgagccaaccgtggactagtgggac

SEQ ID NO: 421776 - DNA, 322 bp, Homo Sapiens
ccccactactccacggttggctatgggtagatgcctcacagtaattaaggcttcttgtgaatcgaatgttcctattatagattagagaatgtttcctctaaaccaaggcttgcccaacttgaactacagaccaaatcctgtttttataaatagttttattggaacacaacgatgccccttcatttacatattgtctatggctgtttttgtactacaaaagcagtgttgagtagttatgacagagatggtttggcccacaaagcctgaaatgcttactagctaatcctttatagaaaagtttgctgatccccattctagactt

SEQ ID NO: 421777 - DNA, 514 bp, Homo Sapiens
ccccactactccacggttggctagtaataagaacacaaagagagattggtatcttgtaagctgagagaggatggatgtcatagagagacatgttgtcgagacactcaaataaagagacaataataaagatagtaagtgaccacaccgaaactgagaggtaaaatacgttggtaaatgtggtgaaaagatttttaccacagttgagagaaaaggtagctcatcagcagttaaaaggtagctgattacagaatgctgaagaaaacttaggaagttaaaggaatgaaaaaagacctatgcacactacaacttttcataatatcttgtctatgaaagaaaaaggggacagagaatgacacatagaaggaaatggataacttttagaaatcctgatggtggtaatgagacaaacttgtgcaagtttatacaatgaaacaaaagaaaccatggctaaatacttacataagagagtgaataaatgacgaacatgtaagtatttagccaaccgtggactagt

SEQ ID NO: 421778 - DNA, 486 bp, Homo Sapiens
  misc_feature (362)..(362): n is a, c, g, or t
  misc_feature (457)..(457): n is a, c, g, or t
ccataaaccaaccatttttcaccagtctacccacctacccacccaacggagccattatttgggctatatctatctgcctatcatacataatatccttgcaggaattaatccagcatccatatgagtgtaactcatacctaggctgataacaaaatctgaaaggtttttcactgaaatatatcaggtgactaaagaatttcacaacccaaaagaggagggtatatcgatcctagtggaattctatttcatggattttgttctgcctttattgacacagttagacattaaagagaataagtataataacaaaatttataagaaatgcttatggaatattttctaattttagctacaatgatggngtgtttatattctggtggttgatttttatatcaatctttatgcagctattatcattacccaaacaagtagatattattgcccctttaataacagngaaggaaactggaatgtaagaattgaggt

SEQ ID NO: 421779 - DNA, 464 bp, Homo Sapiens
aggatccccactcctccacggttggctgggaccacgaggttccagaggcccccaggtgttttcgcctaagggagcggcccatgacaggggcaatctgctctgctctctgctttcgtccacttggaacagagtgttcctgcctctgaaacataagagaaagggggaaagacattggtactgagcactgaagactgtcggttcacctggacccagaacccagtcataacatcccacagaacaagaacccttctctcgcaattcctccaaccaccatacttacggacactggcatgtgacagcttccagaaaatggaaatgcccacccaggctttcactcacacaaggaaacctgcatgctgttgggcagtcatattttttatttgagatgatcagcatttttctgtacatttgactacaggataacaataaactcatagtaatcctacagccaaccgtggactagt

SEQ ID NO: 421780 - DNA, 351 bp, Homo Sapiens
tggctccagggccagccaacctgcagggcatggtgttgtattcccaggctttgtctttcctgaccagggtttgctcttgctgagactccattggcacagcttatttgagggcacgcctgcacctgcctgcagaaacacctcgaaacagctctggctgtttggaaggctggtcatttgcaagcagaagcatgggaagcattattaatgacatgtggtgtggaacaatggtcgtaccacagacctgtagcaccaagatcaaatcatccctgatggaaagcttggccaagactggcccagtgcttccaggctggtgcacacagtgccacgatccccagccaaccgtggactagt

SEQ ID NO: 421781 - DNA, 344 bp, Homo Sapiens
aggcggctcttacacacagggttctgtgcatagaggtacatggcaaagctagagaggaggcatgtagagagcctcgggccttatggggcttttaggagtgcctagttcagcccttttaaatgtgggattaccccctcagtccttgtgaggcagaagtcgtggctatgaatcttgcaggcaacatttgtatttttcatgcatttaatggtggggacaatggcagccaattgggtaaaacccacagaatgagtcttttggatgacaggtttacgcacttgcccccagatggatgttttgaattgggcacacgccgtagcataacatggaggctatacagcgccgtt

SEQ ID NO: 421782 - DNA, 158 bp, Homo Sapiens
actcagagtcaattcccccaccggtgaccatccatttagggagatccaagttctctttttcgccaatgatgtagctgtaagagaactctagcttctgtcagagatctccagttagattcccatcttgcacagactcgggttggctgttacaatcgaag

SEQ ID NO: 421783 - DNA, 404 bp, Homo Sapiens
gccgtctgggtcttgcaccagtgcctctgaggtcatggcccatggcacacggccgccctgtgcactcgcctccacactgagtttccatttttcccagttaagccccatcttccggaaatgctgctccagagggtctctgtcccctcttgctggtggggcaagggtctgcgcatcagaccacattgacccctgcaccaacatctgctccgtcctctccctctggacagctcagcttataaaacaagccttggtcaggaaaatctaaaccacttaaggaactgggcagaaagaaactgaatgcagggagaagaaggctgtggagccacggacaggagaggagacataggggagtcacagggacttgccacccagatccccattgcctgtgaggctatcagggcgtt

SEQ ID NO: 421784 - DNA, 277 bp, Homo Sapiens
gccacgtgctgtggtggagtgcccccttgcttccatactcctcatttatcagtgcaggacttcgtttgatcaaagagtctcccatctaaagaaatatttggaaaccaggagccatttcctttattttattcaggacataggctcagcaaggtctctttttaaatgcagccaagatccacaacaatccaggactgcattctgccttcaggttttggggtgctctggacacagaattcctctcctagtaaatgaggggaacggaaggagtgagggcctg

SEQ ID NO: 421785 - DNA, 461 bp, Homo Sapiens
cgactctagtatgcatccccgggcagtacggaattgtgcgggtcagtgtgctgtgtgtagtacaagtactacgactagctgaagacccctacccagcctatgcgttgttggtgctgtttcaagaatacaaatggtaagaaggctcatttagagttccaacagcaacgtgattggccaagtccgggcttggaaacaaccttggatggagctgggagatggcagaaatgggatgcagaatgtatcagaacacagagtgtgaaggctgtagtggtggcagagggtggctcctaacagcaaagtccaaagatgggcaggtcaaagagcctatgtgaaggggaggccagagaaaggtcaaaaacaaaagcatgacactagacacggaggaacttgggagtacagctgcggataagatgctctcacatactcaggagatggtggttaggaccctgctgctccagata

SEQ ID NO: 421786 - DNA, 437 bp, Homo Sapiens
taccgggcagtacggatgtggcaggcctgggcactccgcatggtgacggcagcatgtgcagcagctcggacgctggactcgaactagcgctagcaaagggaaattgaacctgaggagcctggggtgtctcgggaccaagaggtaggaaccacattgggctttggggctgccaagccccaggcacgtgctcccaccctgagctgggcccctctctccacacctgctccgtttctctttctctcacttccgtctgggtcccgtgtgtcctctggagtcgagcgtgcaagcgttgggacttgcaagtgctcagtattccctaatctcgtgacctgagatgacctgagcgttagacctcaccccaaattcctggagaaggaggtagactggcacagccgggccaggcactcgccaggaacaatcaaccatggcggaggggg

SEQ ID NO: 421787 - DNA, 404 bp, Homo Sapiens
aataatgtggcaaatgttttatttctcttgtatgcaagtaactgactctcaagtatttttaaaaacacatcattacacttaagtaagaatgttataacctacaacattcttacatatttaatattattgacatatttgaatattgtttattgcttctgccattatacacagaatagttttttactttcctgcttcttagacttttctctgacagcttagactttttacaaaatgagccatcccaccagttcctgtggaattcattgtttctcagtgtttgcaaagttacagaacattgtagtgcttcagcacatctccaaagggctccttcctctgccttcctgccatctttcctgctgttgtttttctcactgtgcctatctggcagagcaagattgtggtga

SEQ ID NO: 421788 - DNA, 129 bp, Homo Sapiens
tcagagtcttaggctgccccagcaccgcagctccaagtcccgtcagcctacagtggggcgggataagggttcccaacctgattttatgtattggaaaactgaggcacgggtcagtaaaaagccggctcc

SEQ ID NO: 421789 - DNA, 304 bp, Homo Sapiens
taccatcctgtctatgaaaacaggtttcccaaatccaggacttcacagctctcttaccaagtagccaacggctcctccttcagtgttcactctggatactggaacatttcgcaatcaaaacccccttctcctccaggaactgcacggttctgccgctctatggcggcagcctcagggcccgtcagagggaagcttagctgaataactaccgtggcgtcacctcgtgtttccaaagggtctccaggctgaaggatgcagcgtgtgagaagtttaacaaatgcacatccacatccgtactggcccg

SEQ ID NO: 421790 - DNA, 474 bp, Homo Sapiens
ccggtacccgggcaggacggatgtggaaacagaattttatttgtgtgctctttgtttctagggaaaaacaaaagcaacacaggtcactggactctaaacatatgaagtttgactatttacagaggaagctcttggattcatttctagatctcttccttcccagccctgatttccttccctttctggggagaggcagctgtgaagagctgccaagtctctctgcccactcaccctggtggcactgccagctctcctctgttcccactgtcatctttgggtcctggccctcagcccccatcgcctagaccctgcactagtcccccagctgctcccctccaagggctgcttccctcccatccagagggaccacattgtttcccaagtagtctcccaagagcacgctgaggtcctgggcacagctttgctcaggtgcgtggagtggccccactttgtatgcagaaaagtctaggctca

SEQ ID NO: 421791 - DNA, 393 bp, Homo Sapiens
ccgggtagtcggatgtggctggattttggctaccagcccctccgagtgactatcctcctctggctggagctgggctgctttgcattgcaaatacccttgtcgaggaggctgctgccctctctgaaagaggctccgttgagtttggttttgtgttgttcgtccccatcctggcaggtccagctgcccagcttgttgctgaatgcaactgagttcccaggctgtcccttgccaattgggcccagctggggtcacatcatcctggcctgtctccgaagagccttggacttctacagatgggagtgtgactcttgactctgttactttctgggcctcctcttctggaaagtgagcctaatacaggtggagaagctgcagcagcgagaacttagggca

SEQ ID NO: 421792 - DNA, 508 bp, Homo Sapiens
taccgggcagtacggatgtgaccgaagtgaagtttgtattaacttccagcgagtccaaagagaaggctcttctcactgcctaactcttagcttgcatcctacctgtttctacagatttcagagctccctatagcaactctgcaattgggcatatccctattattccaactttgtgaatataaaattgaaaccatgaaagattgtgggactgactccaaatcccacagtctataaatagcagagccaagacacaaacgcaggagtctgaccctccagggccctagatccttatttttcagactattgtgtataagtcactccatcaagactatcagcaacagttgttggaaaggtcatgggattccagggaaatacgtgattcctcccaaatgaggttctcaaaagataagactagacttgataccataatccatggatctgccaacattttatgagatggaattctctacaatggaggatacagatgggagcctctgatgctgtcttc

SEQ ID NO: 421793 - DNA, 596 bp, Homo Sapiens
tgccggtaccgctgctgtctgaacgctcgctgtccccgggtggacataggaattcatcacagtccccctcgaagcccgggttgctctagaagatgaaactcaattgctgtccttgatctgctgctcactagaggccctgggttgggaatcggaatgtaaatgtgtcacccatcctagagaagaaagtcctgcagtgtgacatggcttcattttcaacagctgagaccctctgccacaacaactctcacagccccctcatccccacccgccgtggaaaccaaataaaagcagaaagctctggtggaagccgagctgggggcgatggggcagattgtagcccgtttctccttcccgtccccctccccactttggcacctgggacctgctcagaaccccagggtgaaggagacatctcaagtgtgacccattggctgcttctgctgcgggagagggagagacggggtggcccatgtgaaagctatgcctcctgcagccccgcaaagcctgcaaaagctcagccagcatttgatgggattgtttctgctgggaccccctctctgctgcgtctcgtgcaaacgttgctgtgaagggaggca

SEQ ID NO: 421794 - DNA, 585 bp, Homo Sapiens
ggtaccgggcagtacggatgtgtgggagtgacaacgcgatgctagagggtgaagacctgactatcctgccttcactaagcctcaaaacattcccggaagataagcatcattgtcccatcttgtagctgggacacactcaaaggatttaaaggctttgtaacggtgcagtgataggattcgaacccacgtctgtgtgaatctaagcccatgctcgttccactgcatcacactctctaccactagtgcctggcatcattgaattgctcacttcagatcctttgagaaatgaagatctccatttttccccacaaaagaaatagcttgggcctatgggatgatatttacatgaagctgttgtcgtcaacatcaaacaggattcctcatttattgtttcaatccgttttatcccactcaggcacacactctccataaaatgaatgccttgcattcatatggtatttttacttctttcatttaacatccctgataacataaacatctcccaaatcccccaaatccctctgtttcttgcattacagcagggttgggggtgtgagctggagatgctaaggagaaccattcaat

SEQ ID NO: 421795 - DNA, 429 bp, Homo Sapiens
ggggcagtcggatgtgaggggaggagtagtccagtacgaaatcaagattatggccggggcaactataatagcatagtagccatgaactaaaatggggaaagctgtatatggaagagcctaggaattccgccttgggcatgttcagtttgcaaactctaccaactaaattataactaaagatatggagtaggtagataatattcaagttgagtttgagagagaggtctggcttggaggttgtcaacacagaaacagcaaagccataaaatcggctaagaacatcaggaagtcagctgtaggtggaaaagaacaaggactgaactcaagggcacttcactgataaaagggcagagagatacagaaaaatctgtagaggagactgaaaggatatgcagattccagaactcttgccctgaatcaatctagcaa

SEQ ID NO: 421796 - DNA, 339 bp, Homo Sapiens
  misc_feature (57)..(201): n is a, c, g, or t
tggcatgatacggatttgttgcacaacagtggtatattcacactctctgtcgacatnnnnnnnnnnnnnnnnnnnnnnnnnnnnnnnnnnnnnnnnnnnnnnnnnnnnnnnnnnnnnnnnnnnnnnnnnnnnnnnnnnnnnnnnnnnnnnnnnnnnnnnnnnnnnnnnnnnnnnnnnnnnnnnnnnnnnnnnnnnnnnnnntagacacaagatctttttctcacggttttactcgcgatgccagaaggaaataatatcgttgtgtatatgaagaaaagttttaataccattaggtggacaagtaaaatacacgatcgagtgaatcagaaattagcgttt

SEQ ID NO: 421797 - DNA, 399 bp, Homo Sapiens
caagtagtcaatcagcatgctatcgtatcttggggcagatttataaggggaacgggaaggcagaacagaggtgagtaaatacacgttgaataacatagactcacgttctttcttcccttcagtgtttgctgtgtaggctttccttgccatgtgaccctagtattcagagctgtctcctaacccgggctgatgaccgcattttttacgagataagagatgaaaggattttgctaggacagcccagtgttgtattttaaacaagtctgcctcacaagtgtgagggccacaacaatacactgactcttattacagggctgggtaggatttgtagcaagctgcctaggcagtacatttgggtctagcaaataagtttgtactcactaccccacagagagagcg

SEQ ID NO: 421798 - DNA, 310 bp, Homo Sapiens
tctctctgtgggcgggctcatccaccacgcccctctgcctttcccgagggatgctggtgcttgtgacttgtccagcagggaggtgggtttctgactgcccctctctgaccctgactcttagatgctcaggtccagggcagctgtgctcacagacgctgcattctctgtgcgtccggcggaggagatgatgggacggggaactctcgctgtcgcccaccccataaagtgtaaccggtctcttccttgcaccttatcaagacatgtaacgttcaacttgtgcaaggcgtaagtgtccccacagagagagcgt

SEQ ID NO: 421799 - DNA, 346 bp, Homo Sapiens
gacgctctctctgtggggcatgatggttggtctctctaagggcttggtggactttaacatgtgattctgtgattccagacttgcctgaagataccccagctcccccctcccgactatccagctgcattcctgctctggaccctgctggggctgccacacccactgcacggcagggctagagagatgtgcagcctgaccctacccctgagcctgtctgtgaaggtggagatgggcatgcacccacagcccatgaggcaaggtggtgtcctgagtgtgctgtgagttcaggcgcaggaaggcctggcttgttgcagcaggatgttcccacagagagagcgtcgggtac

SEQ ID NO: 421800 - DNA, 308 bp, Homo Sapiens
tgcagatctggtgtccccgagtttacatgccaggactttggagagggaccagtaatggaaagtggacccacttcagacaggaggtcaggaaggcctcgtgtggagtcagcctaagcccctaggggagaaggggctggccagattgcagatgttcccgtgtcccagccgcttgcccaccgtgggaaggcgaggggcacgcaggaggcagccaggtccagatgcccgccgtgggaaggcgaggggcgcgcaagagaccccaccctgagggagcctgtatggctcagcgctggtccccacagagagagcgt

SEQ ID NO: 421801 - DNA, 507 bp, Homo Sapiens
ggtaccgacgctctctctgtggggctttgcagctcctccctggcgagtcccttttggttaagcacaggcagtggaagttagtctctctggtgcaccaaagtcttgcctttggtaggaagacccctgagagatgctcagaccccactatcctcgagacaggtgggccttccacatttctgctgtacctgagacagaatctggttcactataaagacattgtttaaaatgtcccctttccttccctgccctgagaaacatatcaatcactgagttctaatgattctcactcctcaatattgggctgccacatcctgggtttcccctgggttatgtgctcatcatctctactggactccttccttgccgacctgcctctagtcttgcctgcctccaatccacataccatgtcattactagagccagctgactctgaaagatctaaaacatattccatgtcttcgttgtgtcaacagtgtgaaactcaagtcctacgcaggacctaggtga

SEQ ID NO: 421802 - DNA, 558 bp, Homo Sapiens
gacgctctctctgtgggggcagcagggtggggtctatatttttacatccatctctgtccacatacaccattcctaaggaccggagggtgcgtctcctaaaatgacggcacccctcgcatgcacccaccgtcagcacgctggaaagcggctgcagggaatcccgtgtcatctgtgtccaggccgtgttcccagctccagaattgtttcacaagtgtctctcatagctggtttttttcagactggaatccaaggttcatattccatctggttattaatgtctctctagcttttcttaagatataatgggcacgtagtaaactgcaccacttgatgattctgacccatacaaacactcatgaaaccatcccgaccgtcacggcagcgagcactcaccccacgcacacactcatgaaaccatcccaaccgtcacggcagcgagcactcaccccacgcgcacactcgtgaaaccatcccgaccgtcacgggagcgagcactcacccaagcgcaactcatgaaacatcccgaccgtcacggcagggagcactcaccccagcgtc

SEQ ID NO: 421803 - DNA, 533 bp, Homo Sapiens
tcagctcggtaccgacgctctctctgtggggagggttctatttgttgctaggctgaagattaagtcattcgaataaaagcaagtgaatacatgagcctatgttttaacaacaggtggtggtgatgtattgatatggggtggcccaggatgccacaagcacttggggaccccatagactatcctcagggacagcattagtctcaggaaaagaaacgttgggttagggttctgatttgtgcattgtccagaaagagatggaagtgaagtgggtagattaatacatgggaaaaacagtgacttctggacttttcccttcccagattacctctatctcacctagccaacattctactataaaggagaaggtaaaattctgagagattctaacaggaatccatacattttacctattagtgctaaattttcgttctttcaggcaatgccctccatctcgatatgaagaagaggatatctggtgatcagagagaagagtttgatctccacagttgcctaaagccccacagagagagcgt

SEQ ID NO: 421804 - DNA, 113 bp, Homo Sapiens
tcttccttgggaaatacatcctcgggtttccctcctccctcgctggcctctcctctcagactcttctgcctgctctactccaggtgcattgaaatgccccacagagagagcgt

SEQ ID NO: 421805 - DNA, 443 bp, Homo Sapiens
  misc_feature (266)..(297): n is a, c, g, or t
gtataagagtaagggacagatggaacgtctgataatagttcaaacatgccgaacttggtaaacagaccttccagggagtaattagtcttattagcgcaccaccctttcactcctgcttccatgtagaactcatatgagggggggtaatggatcaggtatatgatctatgaggctacacagaacctggtataatctaggccaataagatactcctgggatatcttaagtaaaatctcagcgtattagcacctaacatagtggcatgnnnnnnnnnnnnnnnnnnnnnnnnnnnnnnnnacaactaatggtggaaggaaacatactgaatgaatgacagaaatatagtctaactccccaatcaccaatatgaatacactcacgcaaggtgtggcaagccacagacccggacttcagaaactccagacgaggacagcggcccctcc

SEQ ID NO: 421806 - DNA, 454 bp, Homo Sapiens
ccctgccagtttactccatggcacgagcatttcaaaggcaagaataggcccctcctgaccccgctcaggcaggcctcagggcaagtgggagtcactggaagactcaattcctctctctgcgtttccacccgaggcaggtccagtcaccagagagagaagcagccacctcctttctcacggcagctggcaaagcaccgggtggaggacagagccggtcggcccaactgtagcttcggggctgcccttggctggtctctgggcagagcccggtgctgagggcttgcagtgggaaaggcacagcttgaggaatgggcatcagattcccacctgcggccccggaggggaacgggtcaaatacccaggcggacacacagacgtgcgggccaggaagggtcaggccccacagtccgcagggagttgcaggaagggagtggcgtggattccacaggcccca

SEQ ID NO: 421807 - DNA, 467 bp, Homo Sapiens
ccatttactccatggccatcgccggcttccttggctctgaccatggggctcctgtgccaggctcaacgtatcagcagagccaggctatgcacatgctgactgacctcactggtgacttctgcagtgtcagcaatgggtaatgacgctaagagagcagattctcagccatgataggggccacactgtagccccaccctaggagagtggcaccctgcacctctatatcacccctgggttcctttccatcattcagtccctgctctgatgcaaaggtaggaggctgtgaactccgaatccaagcctgctgtctgctaggcctgcgtgctgtcctccttggcaggtttgggaaatggggaatgacttgagccagagcctcctccctgaattatgggcaatgtagcaggtcagggctctctgcctgccccagtacccagtctgtgcctctccaaacccttagccatggagta

SEQ ID NO: 421808 - DNA, 232 bp, Homo Sapiens
ggcatgtggtatacactaatttacatctcactccttgaaaagaggcgtataaagcatgatccctgtctcaaagggcttagagtctaactcgagaagactaataatactcatgaaactactcatctcaattgaaggcattataataaagtgctaaaatgtgtggcccctacttgtgataaggttcaaactagcaaatgcaggaagactagtagaatttaaatcactatttatg

SEQ ID NO: 421809 - DNA, 439 bp, Homo Sapiens
tgccatgtactccatggactgcacacgtaaccgtggcacaccacagctacagtcctgcagaatggccaggattcgaacagcagaattaggggagaggatattcagacacagccagtggaataaacacaaggcacagatcagaagtgtgtgttggaagtttgattcagttggatcaggggttataacaggcaactgctgggagatataagtcgggtctagacatggaaagcagtaacagctacagagttgggctttcattccactggaggcttatgagcaaggaggtgacatgatcacagcgggcctttgggtgactgactggcagtgagagataaaaccaacaggaacagggggagcctggccagggaggctagttagggggctatcgtagcagtctaggcaagagacattggagccagcatgaggtggtggcatccag

SEQ ID NO: 421810 - DNA, 488 bp, Homo Sapiens
  misc_feature (66)..(419): n is a, c, g, or t
tctgaggtccctgcattagtccatggcgttaccagtatacacacattaaaaggactaatattgaannnnnnnnnnnnnnnnnnnnnnnnnnnnnnnnnnnnnnnnnnnnnnnnnnnnnnnnnnnnnnnnnnnnnnnnnnnnnnnnnnnnnnnnnnnnnnnnnnnnnnnnnnnnnnnnnnnnnnnnnnnnnnnnnnnnnnnnnnnnnnnnnnnnnnnnnnnnnnnnnnnnnnnnnnnnnnnnnnnnnnnnnnnnnnnnnnnnnnnnnnnnnnnnnnnnnnnnnnnnnnnnnnnnnnnnnnnnnnnnnnnnnnnnnnnnnnnnnnnnnnnnnnnnnnnnnnnnnnnnnnnnnnnnnnnnnnnnnnnnnnnnnnnnnnnnnnnnnnnnnnnnnnnnnnnnnnnnnnnnnnnnnnnnnnnnnnaatgaaaccaggtacaaaatattacatgccatgaaattgtagaacagacgaactattctctagtgaaaa

SEQ ID NO: 421811 - DNA, 458 bp, Homo Sapiens
  misc_feature (256)..(334): n is a, c, g, or t
gccatttactccaggcagtagcttggtgaatattttttacatttagagtaactacggtatttcagattgtcacatttatgagatgataaagtgtatccgacggtgaacatgtatactttattgcattccgctccttggtacataatcaacatgtacggtagatctcagtggatctcatgggactctagtcaaggaggcagaagtgggaagaacaccgggtcagaaatgtggagatcgtgggtctggttctgtctgnnnnnnnnnnnnnnnnnnnnnnnnnnnnnnnnnnnnnnnnnnnnnnnnnnnnnnnnnnnnnnnnnnnnnnnnnnnnnnngaccagatgatctttaggattcttttccacttggatggtcttgaacttggataaatgtttccctgtccaacacggaaggacagggaaagagaaggtaagaagttaaacagtgagcagcacagta

SEQ ID NO: 421812 - DNA, 366 bp, Homo Sapiens
acagaggatcccgccattactccatggcggaacgggaagcaaacacatccttcttcacatggcagcagcaaggagagggctgagcaaaagggggaaaagtccgggataaaaccatcagatctcatgagaactcactcactatcatgagaatagcagcatgggctaaccgcccccatgattcaattaccccccacggggtaacatgtggggattatgggaactacaattcaagatgagatttgggggggacacagccaaaccatatcacactctgtctgaattattaataaaatattttctaatctaaagtaatgttccaatgatattttagcatttgacactaagtttcaaaaatttaaatttaaa

SEQ ID NO: 421813 - DNA, 459 bp, Homo Sapiens
tcagtccatggcgagatagcatgccgctcctctagcacggagtcccatatgatctgcaaattgctttataattgaatgactgtgatttctctcttctcaatgaaaattctagtggtgcccaaatgacgtgttgaattaaatctgcatatcctaactgaaagtaagaaaactttgggctgaggaaaagggagcatttttcttacaatgtcattttctctcctcgctcattcatgtctctgctgttcaggtattctgtttctctttacaatgtgggatttccttgttttctctcctacccagtggccaaaaacctactcatttcctgaaactcattgcaaattctttttagtaacgcctaccctgaacacattttctttcttccctatctcccccgcctcacatgcctaaagtgtggctataacagccctgcatacactggaatagttttcatacctctct

SEQ ID NO: 421814 - DNA, 454 bp, Homo Sapiens
  misc_feature (114)..(125): n is a, c, g, or t
  misc_feature (190)..(384): n is a, c, g, or t
ctgcatttactccatggcccactaaattattcttataatctactaaaggatccctatatgcagttgaaaaacagtgctatacaaatggcagtaaaacattaacatctgggaaannnnnnnnnnnnggagacggagtttcgctctggtggcccaggatgtagcacaagggcgcgatctcagctccacaacnnnnnnnnnnnnnnnnnnnnnnnnnnnnnnnnnnnnnnnnnnnnnnnnnnnnnnnnnnnnnnnnnnnnnnnnnnnnnnnnnnnnnnnnnnnnnnnnnnnnnnnnnnnnnnnnnnnnnnnnnnnnnnnnnnnnnnnnnnnnnnnnnnnnnnnnnnnnnnnnnnnnnnnnnnnnnnnnnnnnnnnnnnnnnnnnnnncgggcatgagccattatgccgggcccagagttagtttttacacttctctgtagttccatgtccagcagct

SEQ ID NO: 421815 - DNA, 493 bp, Homo Sapiens
tctagaggatcctcgcatttactccatggcgatattcctaagtgatcattagctgagtcaggatgcagcctcagagtccttctcagcacagcacctcaaggaaccactaccaacacatcatttggccatgtgaaataaaatccaaaccactcattcctcagctgagaaaaactgaaccacaaagatgagccatgactgactgcccgggtctcactattaggagcagaccgggaactatcaaaaccccttaccccattcctctaagtcatttctcctccctaactctgacagtctgtgaatagcccttggagcaggggtgggggtttgctattacactaagttccataagagtacagataacgggtttctaacaaggggaaggagcaacacaggaggcttaaaggaagatgtgcatttgagcaggctacagaaggatgctatttgtgggaaccagtgaagtatgcctttagcagaagaaaagttaggatagggg

SEQ ID NO: 421816 - DNA, 307 bp, Homo Sapiens
  misc_feature (95)..(105): n is a, c, g, or t
tagctgttctagaggatccctgccatttactccatggactgctgatatgcatgttatgtaacactgtttctatagtatgagaaccgagagagagnnnnnnnnnnngcttccggacaaggtaatttggtacgtaaaaaataatctgccagaggcttgggaaaatgtacctgtaattcttccacacatgggcacttacacccgctggcctgccgaccaattctgccttcaaacgcccggggagcaaaacaccattcacacaagaaaggcaagaatgtcctttccgctttcagaatctgggaccaccagg

SEQ ID NO: 421817 - DNA, 469 bp, Homo Sapiens
tgccatttactccatggccacatggaatggcatcgtttcttgggaacaaagaaaactggactatgaagagccacagagaagtcagcaaaccccagagaatccaagcttctcaaggatcaaggcagtctctcacaggctctgaaaacaggaggcggcagtcatgtcccttctaattaccagcacaaccacctgcaccccacggtaaatggacggttactgcacgtccccagctgccctctgtggacatggagctaataagatgtgaattcatggaggaaaatctgcgaaaagtggactttgcaagtagttacaatctgatactacctgcacaattattaaaataagccacccaagactatttcagccatattagcaaagaactaatgaggaaacagacatcataaaagaatgaattacctacataataaacctgcatcttccagaatgaagccattagaaatggatcagt

SEQ ID NO: 421818 - DNA, 263 bp, Homo Sapiens
ggcgctcagaggaccccgcattactccatggctagattataatttcatatgggaaagaactactccttttatttctttggatctctgtcctctaagagtttagaacaaaacctctaaaatagtcaacaaatatgtgtgaggagagaaagaagctgggagaaacgctgaaaagatactgacagtgggttataaaatagcagaaggtctctgcaaggaacacagcaggacagaaatgtagaagtatggctctaaaaactcaacag

SEQ ID NO: 421819 - DNA, 269 bp, Homo Sapiens
gtaatgagccagatgattggagacaggtagcgtgacaggtaataagtgtcagagaaggcagtctgacaaagtgcctctgaatgttgctatcagagattgttgttccaggtcagacacagcagtctgtcaaagtgcctctgaatgttgttatcagagaatgttgcttcaacctgaaccactgaaacgctgtacgaccaaacacccgggagtacccctgatttacacacactggtgactaactgtacgagcatggagggcacaagcaactg

SEQ ID NO: 421820 - DNA, 104 bp, Homo Sapiens
atactgacctagaccgggcatgatcctggaccctgcctcatgcacagagacttctggactgctacttcgatgctctgtgtgtcatgctctttgtccccagaagg

SEQ ID NO: 421821 - DNA, 194 bp, Homo Sapiens
  misc_feature (154)..(154): n is a, c, g, or t
  misc_feature (174)..(174): n is a, c, g, or t
tacgagtgtgaaacgatgggccaacaggatgggactcgttccacgtaagcacaaaccacatgcccagtcttcagttgacatctcagcagtttctgactcccgcacgagccaagttaggcatgtggtctgtgttgagttaggaacataagacttngctggttttctatgctcctnttcttagaagccccttccca

SEQ ID NO: 421822 - DNA, 182 bp, Homo Sapiens
  misc_feature (142)..(142): n is a, c, g, or t
ataccacatgaaaaggtattacagtgtggggaaatctgtaggagtgccagctccacctacaaaagcaccctgtcatcagcccagagggccacgttagcatcctgggaggttctcctgggcagcagccagcatgtttgcttgnaaaggctccacagaagacgaatgggttctcacaaaacctg

SEQ ID NO: 421823 - DNA, 181 bp, Homo Sapiens
atcgtgtgctgtaatagtatcacatcgtgcacatacacacaaatctactattgtctatctcaagtatgcagttagcgtttatattcctgaaatggatttgactcagcatagaaaagttcccacaacaactcatttcgagaccatttcaaggtctgcctatttaatgtagttcaaatcctag

SEQ ID NO: 421824 - DNA, 158 bp, Homo Sapiens
aaggatggacttcgctgtatccggcacagcggagagatgcccttgaatggggtggctgcatcacaacccgacatgctgggcgtcagttccagtggacaggaatggcaggatcagctggtgatacgtgagagtggtcgtcaataattcctgtgatggaa

SEQ ID NO: 421825 - DNA, 207 bp, Homo Sapiens
gtagtctagggcgtacgtgtatgaatgacgaacggacataccaagggacagacgttgaaatcatatagaggttaaactctagcaagtatagaaatctgtttagtggaatggagtagcagctaatctttaagacccatggatagcattttagtagtagcacttaacatacagaaaagaaaaacaaatcatccagcttctgatcttcga

SEQ ID NO: 421826 - DNA, 173 bp, Homo Sapiens
aatacaaagcaccaacgtcatgtatccagccgctgatctaggccaggagagcgcaaatatgaataaaaagtagccaccaagaaaatgtgggggccgtaaggtgggtggaacatgacgagcttaggggagggtaattcacgctctggctctcagaagaggcaacacttgagccg

SEQ ID NO: 421827 - DNA, 283 bp, Homo Sapiens
  misc_feature (139)..(152): n is a, c, g, or t
cttagacgaggataacgccaaaaatggaatacagacgggtgtaaactacagaatctctccatctccatggattcctctactggctgtccaggcatggccctctaggatccatgctgtgctatcctgtcatgcctaggcnnnnnnnnnnnnnngacttacccgattacgaggacccagactttgagattctcaaaggggctgtgactcgatagagcttaagaactttgttactccctggtgactgcctggctcaagggaccaaaaggatgccgaaattagaggg

SEQ ID NO: 421828 - DNA, 341 bp, Homo Sapiens
cacttcagtatccagttataaacatgcaccgtcatttgtgacagctgcctagtcatctaacccaaggcagaattaatatactctgcctctctgaccttacatatccctactagatagaataatgacctgtatatgccatacttttttaaatacgaatttcagtcttcaaggacctgaatgtgcagcagttttaggtaatctcttcatatcacttccctgcttatgacctttcaataggtccctcttgtctactaaacaaagttcagattcctcagcaggaagtccaatccaagtctaccttcaggccccttaatgcctctttaacctctctcactactccc

SEQ ID NO: 421829 - DNA, 168 bp, Homo Sapiens
cggggacctctcctaatgtacagggattactctggaataaagagaaatactgatggtatttaagggcataggactagatgcgatcacctgaaatgtgagtataaaagagagttcaaagactgagccctgagacatttgaacatttagcagtaggatacagtagggaga

SEQ ID NO: 421830 - DNA, 253 bp, Homo Sapiens
atgtatctatctagggtgcgcccatatctgctcgcctccttcctcaacacactccaaacataatgtgctacatttccaggatgacccccaacactttcctgccacagcacctttgcgtcgtgagactctcttccaagtacaccattctcctctagtcaggactggtttcttgtcagctccaatattccccctcctacccccacaaaaggccttttgtaggatacagtagggagatctccctacagtagggaga

SEQ ID NO: 421831 - DNA, 135 bp, Homo Sapiens
tgagtacagatcaatctcagtcccttctctgagcttctagattagaaaataactcacagagaggaaataacattctttatataagtattgctgatacaaaagaataaggcttaaatgtaggatacagtagggaga

SEQ ID NO: 421832 - DNA, 127 bp, Homo Sapiens
gcacttgccttcacttaattcctgagatcattttatcagtacatactgagagccccttccttttatttaaataaccacagggtatgtttttacaacttattatttgttatacacaaatttcaaacat

SEQ ID NO: 421833 - DNA, 372 bp, Homo Sapiens
acagggctgtgttattacatctgaggaagtgagctattctcgtgcgaagtcctcatacatgtggcaaactactacccaagcagatgcagtccttaccctctactgtttctgtgtaacaactgattcactcctctaacacctgaaatatcccctactacttcccactggacctaacctccccaaggacaggcactgtgtgtcatgcatctttgcaatcccctctctaccacttaagaccagtcccagcaggtaccaggaacttagtgcattatttttttaatgactgaatgaagctgatggtgaccacaaagtccctttaaaaagagcctaagcttttggaacaacacaagtttctacatggttatgatccag

SEQ ID NO: 421834 - DNA, 213 bp, Homo Sapiens
cgggcgtcttaggacgtgaggtgtaatttgcagaaggatagatgggttcatgtgagttagctatggttcatctcttgagtgatgggggcggagttgttatagaatgtaagaatgcaaagatggaatggtcaatgtggtatttgggcattcttccaaatcctggtagctctttgggagaagcataagactgcttggtaggatacagtagggaga

SEQ ID NO: 421835 - DNA, 449 bp, Homo Sapiens
gagggaagcctgtcacatggacttactagtctgtctgatcctcttcctcatgcccggtaccctgctgtcctccgcaatttagtccgcatctttatccctaaggaagtcaagagttggtcttcaccaacacttagcctcctgcaactgcctcctaaggctcatgggacactaaagcaagcatagttaagtactctaattataaagcggctgagcttgacttacccagataatgaagccatttggtatgattttccctgactgatttctctaaaagatttcctgttctccatcacacttggttatataaatgaagaaccatcatagaatgtaaatacaaaatctggagagccacagcaggaggtagagctaggagaaggaggaggcaatggtgggtcttgagacaagatagttacgaacatgagaatcaaacctggtaatcatgatgcctg

SEQ ID NO: 421836 - DNA, 256 bp, Homo Sapiens
cggtactcgatcactggatctaaatgactagcatacggagagctgaggctgtcatgttatttattaaattacttttacagccttaagttcgctcgggagcccactctgtgtgcctctttttcttcaacttcagcaatggccggaccaaggtacacatcctatttttattacacacgtttgagcccacagatctctgccgggcccatgggcttgtggcaagatcaagcagaccttcaggtaggatacagtagggaga

SEQ ID NO: 421837 - DNA, 394 bp, Homo Sapiens
ggaggatcacctgtcgctagggtatcctaggcaccggatagaggctgggtgacgcagaagtgaatgaagcagaattctgcttttatggagttgggctaatagaggatgagagcagtcataacaaaccaacaaatcaataaataatttcagagggtaatagtgccgtgaagaaaaatcagctctctgtgaggagagtgactggcatagggggaaggccactttacaggaaccgggcaggtagagcccctgagggatgacatcaagctgagccctatgcgatggagccagtgagccatgcagcgatctatgggagggcattttacctgcagagtccatcagagcaaaggtcaaggactcgaaagagctgggctggttttaggatacagtagggaga

SEQ ID NO: 421838 - DNA, 183 bp, Homo Sapiens
gtcatgcgtatgcgactcagaaatctagccgacgccacagggaggtacgacaatgacgacggggaccggcaatatctgcataatctgcaagaaatggctaaagaccataagacacacggcatttttacttgagtcctaaaatgaacatccggtgatattggaccttcccaatcctaaacaaat

SEQ ID NO: 421839 - DNA, 156 bp, Homo Sapiens
ataaacctgatgtggggacgatgacaggctgaaaggagggcagggaggccatacgagagcacatcttatcctccaggcttttctctcttaccttccctcaattccttctgttaaatacctctttgatttctccccgattctcagaaattaaaatgg

SEQ ID NO: 421840 - DNA, 178 bp, Homo Sapiens
ctccagactccatcctgtgggacagttctttaaagagcatcacaattcctccaaccactgggcatttgtatgtgctattccctctttcgcagaatgcaataccctccctctgcctagctagctaacttctatgtatctatgactggaggtcaaacttttctcaatgaattccttccaa

SEQ ID NO: 421841 - DNA, 511 bp, Homo Sapiens
ggtagtgtaaacgaggaaaagtatgcttgtacatggtatgaccatgggtctttaaaaactaggtccctttttatgcatggatgctattatttttcctagatttaacggtgaggggatgtgcattttcttgagggggtgccgatttggtgcagtgctgctttgcatatattattaaatcaaatagttttataattgaatatgaagtagggcaaaatcctaaacctagttagtatgggtgtgcatttcctgcgtattcattttcctgtgttggtttacatagtttcttaccacttcaattcggaggcattttagaggcattttctctaatgatctggcccatagatcgtttcataagtaaatgggatcagcagggttttatgtctcctacagcagaaggtgcctgggctttagggttgaatgcatctgggtttgaagcctggagcccccacgtttcctgggtccaggtgatcttctctggaacaatgaggggcatagttcattgtagtaggca

SEQ ID NO: 421842 - DNA, 426 bp, Homo Sapiens
acagggcagcaggtaagtctcagaagaatacagcttacggcagataagtactcgggctacatcattcctaatgggtgctctggagccagcctaacaaagtttacatgctagcttcaaaacgataccactgattccaagtaacttaactgcatgccagaacaaagtctagcgcttttgaaaagaatacaacaaaatctagcactcaatgaagtacaattccctctccttcatctgctgctgctgcctccttcttctgtggctcctggtgctgctcatgtgctcgttcagtgtggacctgatatctctttcgtgaagcggcagctgaggagaaaccggtgctcatcatggctgacaaaaagccccaggaaggagtcaagactaagaacaatcatattaatttgaaggtggtgttgcagtgtgcttccg

SEQ ID NO: 421843 - DNA, 116 bp, Homo Sapiens
taccgagggttgcttcacgatcgaaagtatccacagcaccgacatgaatttgctgtggtgccccaggactctacctcactgcacagtgtggaaaccacagctttcagttgtctatc

SEQ ID NO: 421844 - DNA, 481 bp, Homo Sapiens
  misc_feature (45)..(256): n is a, c, g, or t
gacagagtctcgcactctagtcacccaggcggaaatgcaggggcnnnnnnnnnnnnnnnnnnnnnnnnnnnnnnnnnnnnnnnnnnnnnnnnnnnnnnnnnnnnnnnnnnnnnnnnnnnnnnnnnnnnnnnnnnnnnnnnnnnnnnnnnnnnnnnnnnnnnnnnnnnnnnnnnnnnnnnnnnnnnnnnnnnnnnnnnnnnnnnnnnnnnnnnnnnnnnnnnnnnnnnnnnnnnnnnnnnnnnnnnnnnnnnnnnnnaataggtatgagacaccaccccagccaatgtttctcaaagtattaaagatacttgtctacttaatgtggcattggctactttttaaaaagaaatattggtgaggtatttggcaagggagtaggaataaggtgaaggaattaccttgggagaaaagacttccacagagctctaatggctttacacttaaaggtgtatctcaatatagactacattttccccctgtg

SEQ ID NO: 421845 - DNA, 496 bp, Homo Sapiens
  misc_feature (195)..(241): n is a, c, g, or t
agaggatcacgtcagtaagggtgtgcccagtcttacggctcacgtaagcatattggcgtatagttcgattattggtcttccatctcttcctttttagcctctgaagcttctatggttctcatggtaggtcacctagatccgtcctctgactctcatcttttcccatatgatttctacctcttaatatttttactnnnnnnnnnnnnnnnnnnnnnnnnnnnnnnnnnnnnnnnnnnnnnnncgtatctcgagatatttctgtttcttccacttgaccttccaggttactaatgtggaaaaacatgactaaaatagaggaaatatgacatattttactgtgaagaaaggacgattttgagagagccataactagcttcaacattagtagtccttaacataatgtcgtatagtccatttatgaagatgttataaagctggctagaggaaactagcataatttacattaattcatatttattcaggatatgtacttcaa

SEQ ID NO: 421846 - DNA, 457 bp, Homo Sapiens
  misc_feature (161)..(212): n is a, c, g, or t
gcgttcagaggagtccccgtccagtaaggtgtgcccagtagttaggatcctggtgtatgtctggtccagactctcttcacaaatcacagaattataatccaaaaagaagatcaacccggttttccccaccccaatccaaaaatccctttaactgcaactcnnnnnnnnnnnnnnnnnnnnnnnnnnnnnnnnnnnnnnnnnnnnnnnnnnnntacagtcaatagcaatatgtgggtaatattaagtacatgggggttcactttaatgatctctctgcttctgttggtttgagatcttaaagcattgaaaatatatgtatgccctctggttataatttatgaaaagaacagtctgtcaggacaggcaattctggccatccaccacgactcttccgtatttctctggaatggctgagatgacaaatcccaatggcttcattaagatcaatcttcttaag

SEQ ID NO: 421847 - DNA, 462 bp, Homo Sapiens
agaagtaggtgactggggggtctctgaggggcatgaagaggggcaggacattcaggctgtgagtgacttgtgtcctctcctctcccagccccctcctcatgatcatgacacattcaagtgaaacattgttcctgtcccacctggtaccatgctgttcagtcatttcagtcagggaaccacctgggcagggtaaaaatttcctccagccacctgctgctacctcccatccccttcaggaaactctcctccagtttgagtccttgatcctgtatgatttctgctgtggagttataggaaatcacaagtttggaatgctgcccaagggtagagctcctgtatttcctatcactcacagcaaacgaacttgtttttgctctattttctttgctccccaagcaggatgagttcctcgtcataacttctttacccttcgggccatctgctgaccacacaggaatctgc

SEQ ID NO: 421848 - DNA, 211 bp, Homo Sapiens
tcggtgtagtgttctagaggatcccagacacgtatggcattcaaatctgcgctagaatgactccaagggttgctttcaagtaagtcacctgtcagttgtaggtttgggggactctagagagtgaggctcctgtcacatcttaagaagcggcttctttaggtactacataccccaggtgaggaccatccttcagtgggcacacattatggag

SEQ ID NO: 421849 - DNA, 440 bp, Homo Sapiens
  misc_feature (114)..(167): n is a, c, g, or t
tccataatgtgtgcccagcctttatatccctatggcaaaagatgctggactttaaatcctgatttcacccctagccttgtaaccatggacaagggcttcagcctttctcggctnnnnnnnnnnnnnnnnnnnnnnnnnnnnnnnnnnnnnnnnnnnnnnnnnnnnnnatagcaaccgataagcaaacactgatagctctgatctaccacactgtaaggggctagtcatgagccggcgtcagctttgttagtagccttgtccaactgatgactatatttgcatttgtggtcaactaaaaattcctccacacctctgagaatggcatttggctgcatgccatagaaacctgatcgtggtggcttatcataatagctaagagatttatttttctcaaatccagagataggcagtccaaggctggtgcaggggtaccgagctcg

SEQ ID NO: 421850 - DNA, 440 bp, Homo Sapiens
tgctagaggatccccatactgtgctgagggtatgctcttaaaatttccaatttctgaaaggaccgcaggatggaaggctatttcgtgtctagtaaaaagcactggatcaggaatcaggagaacggggtccacactagttctggcaccggcacaggagccgtgaacagactcaaattcctctcggcctctaaatgcgtagatgactttcatgtgatttttgagctaaacctccccttcccattgcagggcagagagcatgaccatattagtgtctatcaacaaagtgacttgcattctgggtcctaactgatgccagcaaccccacaatctcagaaagcctggcatgaaagtgaattatgactttgtctctttctgggctaagccatctatatggctggcaaatgtatacttgatgaatgctactgggcacacattatgga

SEQ ID NO: 421851 - DNA, 499 bp, Homo Sapiens
tccccccataatggtgccacttttatcacatctcaggatcggataatctcttggcctgtaggaattttttttaattaagatttttatcatggtcatccccttcccccttccagttcatttaagactgttatgaaacaaaactcattatgcttcaaaatctgacagagctaaggccccggagaaagtgagaggaggcggtagcagggggtgcttccttccatttccccccctccgtggttttctcctgtggttggttcacttaggacggcccggagcctactgggttgaggtgagtagggtttcccagacctcgcagggtccatccacgggaaagtctgttgtcagccagagaagagaatgctaccttcccagggcagggggtttctccagacaccagtgctcaggatggaagaaaaaaggaagcagactggagaggaaaggagagagaagtgaggtgcatttggcatggctcagctggaggaatactgtcactagagaa

SEQ ID NO: 421852 - DNA, 489 bp, Homo Sapiens
gaggatcccctccataatgtgtgccatagatggtctttatccataaaggagatctgaatttttagagttcctgaatattttcccccaagtttctgtcaaattcctgaagtcccttccctatcacactcagtttcctgaagctcttcccctacacctgctcctctgtctggctaacagagttgtcatgtctcagaaactactcaccactctggtgagactctcttcccaagcatcattcttcctcaggatgaggcctttttctactacccaagagatcaagaccctttttctaacaagacaaggttatatctactccattttcaagagaaataacccctctggttcccatgcaaatcgcttaaattccttcatcaccagaatctctccaacaggcccaactccagcccagctgtgaacactgctgtcatggagacaactccaaaatgaaagaactatgcaatggcctgaaggtgctaatggagagccagt

SEQ ID NO: 421853 - DNA, 499 bp, Homo Sapiens
  misc_feature (353)..(395): n is a, c, g, or t
tccatagggtgtgccagcctctacaagcctccttaaatgtacccaattttagtgcaacttcaaaatttgaagtagaattatatccacatatgagaaagagctgagtgaaataagtcactaccagaaaaaaacaagcaaaaacaatggtcaagtacctatccctgtttcaatcacttctgctatgccgaacagataaatcatgtgcaagccatgctgccctgtctgccattgatctcagcttcaatctccaatgcccactcctactaggaaaagacacacaatattagttcaccatcagccctcaaaaatgcagcagatagtattctatcatacatttcttccgtcttctcccnnnnnnnnnnnnnnnnnnnnnnnnnnnnnnnnnnnnnnnnnnnattggtggtctccaaactcagttagcctatgcctgagagtgaaaaacctttgaatggcttgccaccactggcttgggtgacaaatatttgacatataatgcctt

SEQ ID NO: 421854 - DNA, 502 bp, Homo Sapiens
  misc_feature (357)..(413): n is a, c, g, or t
ctccataatgtgtcccaggctcaacaagtcccagaatggaacctcattggctatgaggtcgattcctgagtcaattgtaatggctagataagggaagcaatgctatgattggtctggttggagccatatgcccactcctggagtctgcttctcccaaacacatggactgacacttggtattatgttgtacctacccactcccccaaaaatattgggatgctatttccagaaggagggagaatggatgctggtcaggccataattaaatatattcacctcaaatgaaatattcaccggcagtttctactccatatcattcataattgcaataaggatttgccttctagaccagaatgnnnnnnnnnnnnnnnnnnnnnnnnnnnnnnnnnnnnnnnnnnnnnnnnnnnnnnnnnaattttttatggtatttagttagaaataacgtagtcaactgtggctaagctagaggctgctgacttagaaacacagtcataggccatta

SEQ ID NO: 421855 - DNA, 393 bp, Homo Sapiens
ggtgatctcgaggatcccctccataatgtgtgccacactgttattttcagttatcaaaatcctttagatatagcccaagtcttactcccggcattaaaacttcccttacaactctaggtacaggaacactaatggctcacatactattcattcaacacgtcatggaaatcactttctttttatatagcagtctttttcttccaactaagtcataagcttcaaaggagaaaccacaactagactgtatgtccttctttgtatccccatcacctagcagagtgtccttcatactcaaattccatggagatcaagtggaggcacttggcttggccctgaaagctctttaagtcagaaaggctactgaattagctaccactgggccacattatggag

SEQ ID NO: 421856 - DNA, 512 bp, Homo Sapiens
  misc_feature (183)..(288): n is a, c, g, or t
ggtcgttctagaggatcccttatgctttcattacagagggtgctactggatcctgagagttctagaaactgcccgtggttagtaagccacagagatgggattcgaattggggttgtacttcccagtatgacagtcatcctcaaagtggggtccaagaccagctgggatcttggtagatgtgcnnnnnnnnnnnnnnnnnnnnnnnnnnnnnnnnnnnnnnnnnnnnnnnnnnnnnnnnnnnnnnnnnnnnnnnnnnnnnnnnnnnnnnnnnnnnnnnnnnnnnnnnnntgtgctgtgtatcgccatgtagcccttacagcaggagaagaagttcccttccttcctgtctccaggttatcagcacaaagtgaacatgagctgctcagacctctcaagcaacacacagtcatgcaggtcttgggagtgaaaagtgctgtgccagatgccatggggacacaaagaaatgtgagcttcctgccctgcaaagcatattccctaattatcaaaaccag

SEQ ID NO: 421857 - DNA, 425 bp, Homo Sapiens
  misc_feature (288)..(317): n is a, c, g, or t
tccataatgtgggcccatggtgggtggcattgtgatttcatggtttttttggtgtttgtctgatcctgtttattagaaagtgaggagaggatgattatgttccttcatcctctcagtgtcttagtactccctacacctgcgttatgttatgacctaccttggcgatctgccagtttgggggtcagcttaagtgagaattcatattctgcttcactggaatgagaaggctctcctcacatattatcatgcttctcaagtgggtatatatgagccaacttgattatgtannnnnnnnnnnnnnnnnnnnnnnnnnnnnnataggaagtcacagataaaaatagagccaagtgtggaaagtgacagttgagagggcgggggattcaagcttttaagtcaggcgatcaatcgtgcaaattatgtaagta

SEQ ID NO: 421858 - DNA, 441 bp, Homo Sapiens
tccataagtgtgtgccagtgggtaaagcaaagaatagaaggtcgtcgtatgatttcagaaaatgcccttttctcatatccaagtcagaatgactggggcaagaatgggagaagacgtgaagataaaagggaagtgatgactggtctgtctctgtcagttgcttctttttctccctaattttaaaaccgtaatgtctgcaaatgaaaggatttagtgttcaaagggataatacatctttttagagggaatgaacagtatggttactgaccaagtgtaaatttacttaagtgcacatttaggggcttctcaggggttctagtattatggttgcatatcacctgaaatcgaatttggtcctgccctaatgtttcatgtggcaaagggggaaatgaagataaactgaaatgaatgactaaatctaggctttttaataattatttt

SEQ ID NO: 421859 - DNA, 464 bp, Homo Sapiens
  misc_feature (251)..(264): n is a, c, g, or t
agaggacaccggtcagtaaggtgtgccacggaagtgtgtgtacactcgctgtgtgcccctcacagagataagatacacagagggctacgtgcaaagtatcctcccggccccccacatacagacaggggtaccattccagatcaagggaggcatatccccagcagtgagcatgtcccctcataaacaagtatccctccaaaagacaggcacttcttccaaaggcatccatctctcatatacacgtgcatgtnnnnnnnnnnnnnngtaatagcattttttttaacaaggaatgtgatattgatgtctcagaaacgggttgttactaaaatctctataacctttgggtgtccaatgaaaaggttaccagaaagaaaagcctgtaatttgggaagctcttttacaattattttcctgttgtgctgaagtaatttggcttttcacctttcttaaccctactataatat

SEQ ID NO: 421860 - DNA, 112 bp, Homo Sapiens
gcaggagaccaagattaaaatcactgggttatactgaaggaaatacacgtaaactcaagaacaagtattctatgcatacaattaaaattaaagatatgaatttgtaactacg

SEQ ID NO: 421861 - DNA, 288 bp, Homo Sapiens
tcccctccaaatgtgtgccagttagtcgccttttggtctgtccccaacctttccttctgcccccacaactttctaagggttgtcatcatgggcatgctaataaaatagtcgaaggaaggtaattccaaacgggactggggaaaggctggcttatttgtgtggaatagagttgttttaaatcactggtaagaattgatttaatgtttactttcttctccctgagatttgatatcagtattttatggtatgtcctagaaacatacaggtttaagtttaaaaggtgaagag

SEQ ID NO: 421862 - DNA, 460 bp, Homo Sapiens
tccataatgtgtgccaggaacaagcaccagggtgggggtggatagtagtaggaaggcaagagtgggatttagagatgtggcactggaggtgacaatgggccattcagatggggatgttcagtaggtagttgcagccatggtggtggcaagcaagggcacacacccagatttggaattcattggcacagaggtgggaaatgaatgcatgaaagcagataagcttttcagagctgatgactgaacctgaactaggaaaggctgatcctaagtctgggagagcatccacactgagggagcaaggggaggaagaggtggcattagagggaaagtaggaagggcggtgagtgtggtgaaagaactaggaaaacaacacaggcaaaaagtagcaggagagaatcctcctcgaatgaccaaatctgcaaaatgaaacggagatgttcaaggaaatggtgaacgacat

SEQ ID NO: 421863 - DNA, 427 bp, Homo Sapiens
  misc_feature (253)..(305): n is a, c, g, or t
ttcagtaaggtgtgacagttataaggtcattaacgtccctgagtctcagtgtccttaggtataaaataggactagtaatgcttcgctcaaatatcatcatctccgtgaggcctcctcccgggtgtcactccctacccccttccggctttattttcctccctagtttttaccaccatcttttatcccatgcattaggcttaccttttctgatgattttctgttcctatctccacccacagggatgttaattctnnnnnnnnnnnnnnnnnnnnnnnnnnnnnnnnnnnnnnnnnnnnnnnnnnnnncccagcaacaatacaaagtgcatgctcagaaatttgggggaaaaatttatgagatactattgaattgtatccaccccagaggagtgtcaatgtatgcaaagtaggcagtgtggtgcttggta

SEQ ID NO: 421864 - DNA, 178 bp, Homo Sapiens
tagaggatccctgcttgctgcgggcactgcgtgtggcggttgcggggttcgctgcggaactcgctttgcggcttcgcgcgcgctcagacaaccgcagcgagtcagatcacgaagcagtcctgtccttcggcaggactgcaaccccgcaaccaccacgccgcaggcgctgacatacggg

SEQ ID NO: 421865 - DNA, 452 bp, Homo Sapiens
ggtgtgccagctgagagacagaatagttctaacagaaacacatcgagtgtgcttagcaacagccagtgtgaagaattcactgcaggtctcctgcagccgtggagctgagattttaatacagcaaatggataggatcaggtgcctgggataagagatgggtggggctctgaggttaaggtcaagaacagaaattctggggtgatgtgtgaagagcagatgagtttagaattttaggattaagacccacaagctgggagtgaggatacttactcctttcctccattttttatttactaggagatgacgcctgggagtcagttgatctctccgagcttcagacccatctcttaggtcctttccaaatctatcatagtatgatcatgacaaccaggagtaagactggggtgggaaaagggaagaaacggtgaggggtaaagagaaaagggaaagaa

SEQ ID NO: 421866 - DNA, 158 bp, Homo Sapiens
gtgctctagaggatctcctccataatgtgtgccagtgtcttctgtctttgaagtacttactccctgaaactgactgcaatgtaaaggttgtgattgtggtgttttatatcagaccaggcaaggtgcaattgccatgaaatggcaatttgtcaaggaaa

SEQ ID NO: 421867 - DNA, 453 bp, Homo Sapiens
gacaagtgtgcacttactgtaagacttttggttctttacattctgacactttccatcatttctacaattagcttatggaccgggctgaaaagccactgcctgtctgccacggcacaatgaaagtacgaaatagtaacaccattttcttcctgacaaagatgacaaacctcccaaaaggataatttctctctggggataaaaccacacaaggctctgaatgggatctggtttaagagtcttctgagcctgaatgccaattatgcaggaaatcgtgcaggaactagtatagatgactaaatcctcactccttgaagttagaaagaagagcctgggtacctggaagacaaaacagaacatatgcactacatataaaggtggaaaagtcatacgatttaagagcatgaaagatacaagaataggatattataaatgcattctctcattcacttccgt

SEQ ID NO: 421868 - DNA, 462 bp, Homo Sapiens
  misc_feature (103)..(144): n is a, c, g, or t
  misc_feature (153)..(406): n is a, c, g, or t
gctgatagacatggaggtcacagaatgagagatggggcataaaacatctattagtggaagaaaattgaacctatgcataaaaggcattttcatccaaaaagtnnnnnnnnnnnnnnnnnnnnnnnnnnnnnnnnnnnnnnnnnngagacagannnnnnnnnnnnnnnnnnnnnnnnnnnnnnnnnnnnnnnnnnnnnnnnnnnnnnnnnnnnnnnnnnnnnnnnnnnnnnnnnnnnnnnnnnnnnnnnnnnnnnnnnnnnnnnnnnnnnnnnnnnnnnnnnnnnnnnnnnnnnnnnnnnnnnnnnnnnnnnnnnnnnnnnnnnnnnnnnnnnnnnnnnnnnnnnnnnnnnnnnnnnnnnnnnnnnnnnnnnnnnnnnnnnnnnnnnnnnnnnnnnnnnnnnnnnnngtgttggccaccccaaccggcccaaaaagtgttttggagatgcagtgacctgatgt

SEQ ID NO: 421869 - DNA, 224 bp, Homo Sapiens
  misc_feature (45)..(126): n is a, c, g, or t
taatctaaaagttacctgcaagggcattgaatttatgtaatttannnnnnnnnnnnnnnnnnnnnnnnnnnnnnnnnnnnnnnnnnnnnnnnnnnnnnnnnnnnnnnnnnnnnnnnnnnnnnnnnnagtagggtcatggtaagttaaatgcagagattaaaaagcacttaagactgtatttgatgtgatggactgaatagcatctcctccctaaaattcatgtg

SEQ ID NO: 421870 - DNA, 248 bp, Homo Sapiens
tctataaggtgtgcccaacccactgggtgaaaacgctggaggctctggatgctgcctggtggcggctgtgagtgatcaggtgccagcgtcagcatcgggtcatccactgtccagaatccagcaccactccctaaattccaacttccccccaacacggggcctgctctgtgggcttcagccggctcggatgtggtctgcagctcccgtcccgtaccctctccactcccacaccctgcctggacatggtt

SEQ ID NO: 421871 - DNA, 489 bp, Homo Sapiens
  misc_feature (100)..(257): n is a, c, g, or t
  misc_feature (334)..(440): n is a, c, g, or t
tagctgttccagaggatccccgtccataaggtgtgccagcagcagtatcacaatcaccaaaaggttgaacaaacctagagtgctcatcagcagatgaagnnnnnnnnnnnnnnnnnnnnnnnnnnnnnnnnnnnnnnnnnnnnnnnnnnnnnnnnnnnnnnnnnnnnnnnnnnnnnnnnnnnnnnnnnnnnnnnnnnnnnnnnnnnnnnnnnnnnnnnnnnnnnnnnnnnnnnnnnnnnnnnnnnnnnnnnnnnnnncgtagagaattcggagctgaggggaagggcaagagttctggtttaagggctgcagaattccagtggggggaaaggtnnnnnnnnnnnnnnnnnnnnnnnnnnnnnnnnnnnnnnnnnnnnnnnnnnnnnnnnnnnnnnnnnnnnnnnnnnnnnnnnnnnnnnnnnnnnnnnnnnnnnnnnnnntaaacaaattttaaaaggtttacagtagagctgggcacacattatggag

SEQ ID NO: 421872 - DNA, 139 bp, Homo Sapiens
atgtggtgtggtgttctagaggatcccttcttttccatgggatatttttaagctctgtattctagtactcagaagaatacttgggaaatgatgttcagtatatgtttggtgaaagaatcaatgggcacacattatggag

SEQ ID NO: 421873 - DNA, 486 bp, Homo Sapiens
tccagtaaggtgtgccacagtacagaaattgcatagaagaagagcagagcaaggacaaaggagccctgggccacaccatatttctgtcctgactgtagctgtttggctaaggagcccgtactagccttggaggaacagctttcgatgctgcaaggaaagcacagaggggggatagctgatgggagtggtttcagtggtttaggctgactgggtgattctaggtatgccttaggccagtggctgctgcttcttctgtacatgaatgtcatgaatgtctgagtagggagtgagaggttcatgtaaaccttttatgttgtaggcccagctgtgtggccatgggagggtgcttggcatgattaggatggaaaactttttggcctacactgatcatgccagagcgatttaatatttcaataagaatttaagggatagactcatctgggagtcgtcgtcttggcctgttttctcaccagtgttgtgggtgtt

SEQ ID NO: 421874 - DNA, 496 bp, Homo Sapiens
tatgcgttcagagggtcccctccagtaaggtgtgccaggatcagaattttagctggaaaggatcctaaaaaccgaaccctaatctcctgtgttgacagatgaagaatcggaggcttaatgtggcccgcccatggccacaacagaactcacaaatggcagagctagggagattaatgactcataataaaaaatggaaaaacacagatgtttcatgaattatattcaaataaagctcctttcttacagagaataaccctaagacttcaacagaataaggggtgccaaggtggcatctggtgggagagaaaccaggggattggtctggaagtggggttcgaccagctagaacactgtttatttagattagtaaaaatagcagttttctaaacatactcttagtcagactttacagactttacatggagagtctggagttttacaagtgacctcaaggctgtctggttcataatgacctccagtgggagtgggctctttt

SEQ ID NO: 421875 - DNA, 537 bp, Homo Sapiens
ctgtgtagctgttctagaggtacacgtccagtcaggtgtgccagtttcatggggtgtagcagtagtgtaggaggacagaagtgtacttcgagtgaagataggaagtaagaggtaggtcacagctgaaggggatgaaaataaggatgaggtggaggttgggaaaggctgctgcaagcatttagcaaaaacaaaaacacgtcggctgtggaagagactctgtgcttcactgaaggccaactgagattaaaggccacaaattgggggtggcacgcatccacttggtggcatgattttttttctagcgttacaagttcaaacataggtccaaataagggaaaatatagtgcactggagaccccacctgaaaaggaaatgtgccattgtggggtatctagtgtaccatagctgtaaagaatgacatgatgctggtatttgggtaaagtatacaaattatacacatgccttatctagaagcagcagcagctcttccctcccccgctgtccccactacatcctcccatcagcactccaaagtct

SEQ ID NO: 421876 - DNA, 120 bp, Homo Sapiens
tgattctagaggatctcccgtccataaggtgtgccagtggattgcatgttcattctagagcaattggaaaatacacccttgccaaagaaagtctaatgtcccctcatgtgtccggggttc

SEQ ID NO: 421877 - DNA, 528 bp, Homo Sapiens
  misc_feature (305)..(448): n is a, c, g, or t
cgatctagaggatctcctccataatgtgtgcccacttactgttcccccaaacttctgttcttataagctatgtcaaagctattactccaggttgtagtgcttttttttctactttactttgatctaagtcctgtctttccttcaaattttggctacttattgcatgaagctttttccaatatttccattcttggtggtaattttagtctaagaattcctgaagtactacctaattgaaacacacatttgatacttggatcatgttatcttgtattataacttattactccattaatatatcctcnnnnnnnnnnnnnnnnnnnnnnnnnnnnnnnnnnnnnnnnnnnnnnnnnnnnnnnnnnnnnnnnnnnnnnnnnnnnnnnnnnnnnnnnnnnnnnnnnnnnnnnnnnnnnnnnnnnnnnnnnnnnnnnnnnnnnnnnnnnnnnnnttaatatgtcctatttctttagcaaaatcattggctccttgaggggagagagcttgtcttatatgcccctttgtaattcc

SEQ ID NO: 421878 - DNA, 204 bp, Homo Sapiens
gtaggaatcgaagaagtacgtgccgtccttcgacatcgacaccgtatggtcggcgttctcgggcgtgagcagggtgagacccttgccgtcgaagcccaccttgtagaactgctggtaatacggatcgacgcccttctcgcggccgacgccacggaaccagatcgtcttcgacttcggatcgatgcgcagcacctcggtgacgtt

SEQ ID NO: 421879 - DNA, 222 bp, Homo Sapiens
tttgtgatcgtagtgaatacattggacttttggtacttacagtcctttgatcactgaaaggggccatggcttcaggaatgatgcataaacccattctgtgcacttcagcaggcaggcagggtttgggcattgggtcaatgcagaaggaggaggaagaattctgcagtcactctggggctgctgctctcatcagtgagtcactaatgggcacacattatggag

SEQ ID NO: 421880 - DNA, 510 bp, Homo Sapiens
tccataatgtgtgccaggatcaaatgagactcaggctgttccttcaaagacagaaacttgcagagctgcacagcagcaggcaaacattgagaagggggtggaaatttgatgtactgtgaataatgaaggccggatctttaaaaagaaaaagggacggggtgctggcagaaacccagctctgcgctagcacaatctgtacacctggctgcctttgcccttgagcttctatttcttggggatgggagagggcaaaaaaagtttgccccagacactggcttctgtttgaacaggaagtggggagtcagtgatcccagaggggacttcagcatcaggacatatgctttggtggcctcagcagacctggcctaggcaggctttcaggtggcacccaggtgctttatggcctgcaggtaaggccccttcatccgggtcagacttagcaaataaaaatataggacactcaattaagtttgcattttggataaacagtgaagaagttcctagtgtaag

SEQ ID NO: 421881 - DNA, 180 bp, Homo Sapiens
gaggatcccctccataatgtgtgccactttgtgctgattctcttccagagtcgacatctgaataaccgtcagtgagcctgcttgctctgttatagggtctcagggcacctgctcacgttgacaatgatattagtgaaacggcagagcctcaccgagactgccagcaaaaggacaggccac

SEQ ID NO: 421882 - DNA, 490 bp, Homo Sapiens
acacacgaagttagtggcaaacctctgcccaagtattaaaggataaactgggcaatcagatttgaatctcaaaactctggactaggaaatcagaagaatgaactactgtaagtcaatgatatgaacgagtccaagagacaaagtagagggggaaagctaatcagtagaaaacaggcagatgaagatgcctggagagaagcagagctgccaacggagaacagacgcgagagctgtccgaggtcctgataccctgaggttctgattccagtcaacctgcagactcacatctatcctgaaatgcaacccaactccaattccacagagtcacaatgtacctaaattatttggacagacacagaagtcataataatataatttaacctgatgataggccctgtgacaaaaaggcctaggcaaatggtaattttcaaaagcccagtctgcctgagactgaagcccagctctgggcacacattatggaggggtaccg

SEQ ID NO: 421883 - DNA, 479 bp, Homo Sapiens
  misc_feature (63)..(164): n is a, c, g, or t
tccagtaatgtgtgccaaatactggtatttcaacaggacggcttttatttttaataaaataannnnnnnnnnnnnnnnnnnnnnnnnnnnnnnnnnnnnnnnnnnnnnnnnnnnnnnnnnnnnnnnnnnnnnnnnnnnnnnnnnnnnnnnnnnnnnnnnnnnnngtgtaacagctttttataggagttctgcctcctacagcttcatactggaaaatacgagcaaaaaaatgttgagcacatctatgatgagtaagggagatgagttgcactgtatggagaacctgatcccaggcctggccccacctttttttaactgtgaggcctgaggactatcccaggccatccaggcctctggtgtcacgtctagatagtgaggaagaacccccttccatggtctctaaggtggttcctagatctattattccaagcactagctctcctatgagctgtactgttgaggggcagaggggtcaaaag

SEQ ID NO: 421884 - DNA, 123 bp, Homo Sapiens
tccataatgtgtgcccagcatacctatcagtccaaactttttgtattattcaaatactggaagtgtctattttgcctgtcttgtgtgggcaccatctatgtgtaaatctgtaaacattaattt

SEQ ID NO: 421885 - DNA, 508 bp, Homo Sapiens
agaggagtacccgtccagtaatgtgtagcccatagtttggtttacatatgcttaacacacaagacttaaggatctcccaacatgtgatgcacggtctcgatgaggtttcaaatactgtccaattgatcttgtggtttccatcgagggtgtgaaatccctggttacccaccaggcaggcagtggtttgaatacctgtgatctcccacccctctgggtgtggttctggagtgccgtgggaggttaggacaggctgggagcggaccgacagcacaaatagaccatacagtcattcctgcgtctctgtgtaaggttccagattcatgggccaggcttggcttgtgctgcgttactgtaaaccaggatgagagagccacagccagagagccacggttcattctcgcactggtcatgtgaaaatcacacccccacagccttgccttaggctttgaaggaccccttcatgctgctgcttgtaccatgtagctaagaggcacgagggctgaccagc

SEQ ID NO: 421886 - DNA, 166 bp, Homo Sapiens
tccataatgtgtgccaccaaacaggaataggagaaatccaatctcagttgtatttaaggattccaccaaaccttcccactgtaacgaaccccagggatatgcagtccaagagatttgggaaggttcctgagcttgtcatttttcataggttgcaattgcactgttc

SEQ ID NO: 421887 - DNA, 501 bp, Homo Sapiens
tctagaggatctcctccataatgtgtgcccagacgtggaacgcttcaatcagttatttggcttggaggtggcagtgacagagcttcacagaaaatgttttttctcagttggaagtctgacactctaagaaataaagtgctgtgtgacagacccttaaccaaggaagagtccagaggacttcatgatgactcagaagcatatggacaggtacctcctcacaccaggagacctgtctgtacaatagtgagacaagtggagaatttctgcgcctacgtttttcccatttcaaaaagagtctggcattgattacattctgtgatcgaaaagagttttgtgtatgttcttgtccttgtccaggatcacagataattcattctgcagagaggcggtgactgtgtgcataaactgggtcctgttggtataatcatgtgcctcacctgttttgaccctatcagaatgctaaagatgcaaattaactctgaaggacacatctagacaatg

SEQ ID NO: 421888 - DNA, 468 bp, Homo Sapiens
tccataatgtctgcccaaggggagtgtgtaggtgggcatgggagtgtctgaggagatgcagctacaaagccccacagagtgactcatgcctttcacaatgactttcctatctcagtaaagccctgtattctatgagaagttccaaattggtaatagcagcagcaatcattgcatcattgcttttctgactttttactctccagtttcaacttgattcatattcatttaacctccagaggcacaaacaggcagcaaggtcagcatattgctcgctccttgtttccacgttcaaagcatttagcatagcaggtttcacgagcaaaggtgcaacacctcctataagtctacacacatgcagttgcgtggttgatcatgagactcaccatgagtttcatttctcactagccctgatgttctttccacttaagaacaggacttcattatcagagtgtgagtggctcacggcca

SEQ ID NO: 421889 - DNA, 464 bp, Homo Sapiens
taaggaacaccttgagtgaaaggataactagaagccatcattttagcatatggtatctagaatatcccccacagtccataaccccagatgaacacagaggaactctcataccacggacagagaggacctactggctcaccggacaccagctgtcttggcctaagcccgactgtgagaaacacacgatctttcagaaaggatatgtacaggtgtgcatgtgtgcacagacaagtgtgtgccagagagggtggaagagagagggaatagtcagaaataggtcaaaggcaactgcaggttcataggttcaagcttatatttcctttctacattgtagaatcagactaacgagaaaggagggccataagtttaggaacacgacagatttgtttctgatcacagctcaagtgtttaattactttgttactttgaacaagttgactcccccattcccagcttacatcatc

SEQ ID NO: 421890 - DNA, 515 bp, Homo Sapiens
ggcagcgttctagaggatccctccataatgtgtgccatacttatattagcaatactacaagccctgtcaggccccatagtacccagaagggataaaaaccacccaagaagatatactataagacagctgaatagctccatgggagatataaatgtgtggcatgctgccttctccttttcagacctgtcatcattatctaacattgacaataatatttgtggctattgaaaaaccatgccagcctttcaagttccaattgcttcccacccaaactatattaatatctattccaccactccctgctaggtcctacctatcaatgccatcccatgcctctccaactgcctaggaaacttcatatgggaaatcagaatacatagtgaaataagtatttgactgccattgatactaatcagctccaatacttagcacaattggacagatatcagctagaagagcagttataggagctttcctgctaccacaaaacattttaaaatatgtcggaattttcc

SEQ ID NO: 421891 - DNA, 418 bp, Homo Sapiens
caggaatgaaggcctgagatcacgtcttcttctccttggagtctgtgtcctttttcctgaattgtcttgtgttgtccttgccttgggcatgttacttcctcagtgtcatttctgactgggcacctgtgtgaggctgctcctgtggaggtgctggagacaggttacaaatacatagaagtcattgaacttgtgtctgtctgtccaggccacagatgaggtgtgttggttgtccattatatcatatttgcacccatgacacttaccttccttctgctgggtcacctccccacccagaccttaagtctttgaaggaacaatgatagtcaactccagggaaattagcatttacaaggtacggagggacacagaaacgcactctgctcatccttactctctgtcagcggagtctgctggccgt

SEQ ID NO: 421892 - DNA, 461 bp, Homo Sapiens
  misc_feature (65)..(137): n is a, c, g, or t
  misc_feature (162)..(416): n is a, c, g, or t
tccatagcccacagaatatatatgttatatccctgaatcaaactggactggagggaaggagggannnnnnnnnnnnnnnnnnnnnnnnnnnnnnnnnnnnnnnnnnnnnnnnnnnnnnnnnnnnnnnnnnnnnnnnngcaatattttactaataattgttgnnnnnnnnnnnnnnnnnnnnnnnnnnnnnnnnnnnnnnnnnnnnnnnnnnnnnnnnnnnnnnnnnnnnnnnnnnnnnnnnnnnnnnnnnnnnnnnnnnnnnnnnnnnnnnnnnnnnnnnnnnnnnnnnnnnnnnnnnnnnnnnnnnnnnnnnnnnnnnnnnnnnnnnnnnnnnnnnnnnnnnnnnnnnnnnnnnnnnnnnnnnnnnnnnnnnnnnnnnnnnnnnnnnnnnnnnnnnnnnnnnnnnnnnnnnnnnncactgggaacactggcgagacataatgtacaaaggcaatgtggaa

SEQ ID NO: 421893 - DNA, 531 bp, Homo Sapiens
cgctctagaggatctcctccataatgtgtgcccacatttctccaaatttaaaattctaattacgggttgacatctttaaacatcttggtgatataccctggagggggtggaaaatctgtgctgattttccctactgcatctgtaggtgaaaggatttgctggcatcccaaatccatggaacttaataaggacagaaaggtacttaatgctttcctggccctaacaccctacttatttaggagatgagaactcaagtggctattccaactctctctaggtgccatccccaacttcctttcctatagcctagtctggatcagtggttcgtgttactcatctgtgcctggcacacagtaggacctcaaacaagtttgctgaatgatgagttatttgaggttacacacataggtagtgtcaaaactgtcctgactcctgatccaagactctaaacttctataaactgcccagactttggagtcaaaaagattctacttagagtcctagctctggcacttacaagatgtgttttta

SEQ ID NO: 421894 - DNA, 263 bp, Homo Sapiens
gctcagaggatcccctccataatgtgtgcccatccatcaacacccgccaagccagtctggcaggcatccgtcacccagcaagtggtcccagtaacttcccctgcaggccctaggtctgactcttaacctcacactatcatatgtacctagagacatgagcacaattcaactcaattaatgtttattaagcaacctctttgtgctgaatgctgtattcttttcttttaattcttcagccatagtcctggtcacacattatggag

SEQ ID NO: 421895 - DNA, 275 bp, Homo Sapiens
agctctagaggacccctccataatgtgtgcccaggaaataaatgtttcagggcatggaaatctgagtacgtctagggacatgaggaatgaggagtacagaggggccatttccttttgaggacagtaagggaaacaggtagggcctggcacctgtgcacaaagctgaacagagcaggcctttaacacctcacagttcttcccgtgcaagggatggattttattttcatcaagggagacgctgacctctgggctgggcttgaagcaagaatgaaggg

SEQ ID NO: 421896 - DNA, 278 bp, Homo Sapiens
tccataatgggtgccaggcccagagaagaatacggctggtgtacaatcagaggattagcagctgaattcagaagtgtcaattttgcccgttactttattttgagtcactcctcccatgaaatgaagaagtggtttaagcccagtagagctgaatggtgtctgtgtacacatctcaggcagctgatttaatctaatacgtaataagcttatttaaaaataactgtcattttccccatttgcagatacaatatacgttccttgtagcaaatttgcagttt

SEQ ID NO: 421897 - DNA, 247 bp, Homo Sapiens
acctgtcagtgtatctagtgtcctgcatgtgtccgtgtatagcatagtcttgtggcgtgtgcttgcaatgtgtgccttagtgtactgcatttctgtgcatctggatagggtatatagtgtgtagtgcctgtgtctagatgtctgtagcgtccgtgggtctgcctgtgcgtgtactctctgcgggtccacacagacacgagggacatctccaaacaggtggacaaaggctgggcacaccattatggag

SEQ ID NO: 421898 - DNA, 141 bp, Homo Sapiens
tgtgataatgttttcaaggtttatccatgttgtagcatgtatcactatttcattcctttctagtgctgagtaacatttcattatatgaatataccacattttatatatctcgttcaccgttagtgggcacacattatggag

SEQ ID NO: 421899 - DNA, 506 bp, Homo Sapiens
tgctctccctagccaaaataccgggaaaaggacaacctagcaagacagaaaaatgctagacaataagtgctctactccagccaaacaccacagaaaatgaaaaaaattaaaatgaacacacccctccccatgggagcaatggttgaatggcgtggggagccaggactttaatctcaatgatagatagtgagcacccccatcccctggcctattcagcatcagtgaagagcatggccttccacccctaatccatggcattgaagcaccttcccccttcctgctgggttgttgtcagggaagaactagtagaaagccaggacattcaccacggaccagcattcatggggccaccttccactcagtgtggtgttagtggagattaaggggggaacagtgactagacatacctaccactcccatccaggaagagatccgtaaagtcctagtggggaggtgaattcctacctcatccagctgaacagaggggcctttgcggtatcagagaa

SEQ ID NO: 421900 - DNA, 460 bp, Homo Sapiens
gattcgtttgctcatacccagattaggtctcagtaaatcaaaaggatggcaaagagtatatttgggcaacagcaatatacaagtttaccatgcttaaaattcttacttctcttacaaaacaaaacaaattccttaaaccaatgttttaatcttcaattggtcatttaaatacttattttctataatattgggatcactggtgactaagggctccatagtcacaagtgatccaaattagttgtgactctatctggtgtcttcaactatggctgggaactacaaaacatttctttacaattgatggcatggccagagaggactgaagttggtatgtgatatgcttagtagaacgccgggtatatgtaagcattcgagacaatttagctatggtaattactactcaaacaatagggataaaatgtaattggtatttcatagttccctgagggtattcacctcc

SEQ ID NO: 421901 - DNA, 211 bp, Homo Sapiens
tctagaggatcccacttgatgtggctgactaaaattatgatatacagataaaccagattctgaatcccagtccaaccacttctaactatatgacattagacaagtaactcaacctagctgaggctgatgacctaattggtaaagtgggaaaaacaatcaaaacctatatctgatggctattagaatgtttaaatgggcacacattatggag

SEQ ID NO: 421902 - DNA, 495 bp, Homo Sapiens
tccagtaaggtgtgccagggtatggtagggtatgagcaaatgcctatcagacagcaattccagaatactagtttcaagtgtgtaagttttaggaggtggtctaaatttcaatttggatggtgactgtatgctcttgaatgaggccactggtttatgactccatctgcctcactggtaagaggagacagtatcagtggcaatcaatgaacctagccaaaaaggctaactataaatattggctgaatgcttcaacattcttaggggaaatagataaagttttaatgatgtactttcccactgtactggcagccaagtggaatttggtcatattcttcctagtgttaacatttaaaagatgtaaacattttcatcatagtatctaaatatagaactcatttggtttcccacaattaaatataatcatcagaaaggaaaatagatgattaacagaaatgtaaatggtaagttatttagtcccctctcaccaaaaccaat

SEQ ID NO: 421903 - DNA, 136 bp, Homo Sapiens
gccggtggtagttgacttatttatatgtctgtaaactgagagggttggacatgacagatgattttcagactctgatcccatcagaggatgctgggggtaatcgtgagaacatgatgttggggcacacattatggag

SEQ ID NO: 421904 - DNA, 183 bp, Homo Sapiens
actgcacccggctagaggtacatttggatcaagggagtacttgccagtcactggcattctacatcttcagagattacaagtcaacaataaacctctgtttcagtacccgctggcccctcatttgtcctactaaggaacctgtcagggtccatggtccatacgtgctgacagctcccacctggt

SEQ ID NO: 421905 - DNA, 309 bp, Homo Sapiens
gtggctaggttccttttctggccacaagttcacggtgcacttaaattcctggcatggtttttcatgttccattttaaacagccttctggtccaggtcccgtgtcatgtgaccggctcagtggggccaacagagaaatgagcccagtgggcctccctctcatgggcaccggtaatgctcaagttcctccaattggacatctgcccaagttactgaggtcccctaaaggaggaggttttctggactctggagcctccatctctgctaccaccaccattcccatggggtggaaaagaacatgggcttggggg

SEQ ID NO: 421906 - DNA, 494 bp, Homo Sapiens
gagctgttctagaggtccccgtccgagtaaggtgtgcccagcagatgtctgtgtgaggccgggggtgagtcatcgtagtcagggcagggagatgtgggtatgcaaggagaaggcaggtctatgtggtccaaataggactgactgtgaatgggcaattccacctagaaggggaattaaaagtaataatgttgctgccgagcctgtctggtaccacacacggtatgggacatacagctctgttaagttcctactcttaagagagaagtaactaactgaatgccttacctagaatgggtttaatagataaggtgggcaaatggcatgtatggggaggagagaagagtggaatctgcaaaggaaggaacctatacagcctttttactattagccttggcgctgaagcatgagctatgtcccctgtatctagttctaatagaacagtattgagaagcttcagacattcaacttttcagtggcatttagggaaagctaaa

SEQ ID NO: 421907 - DNA, 148 bp, Homo Sapiens
tgtgccagctgcttcagtggccggtgtgcaggtgcaccaatacagggctgccactaagatgatattttcatggagctgtctggggaaggagtagattcaagttaaagtgctcttaggcattcagtgtagacagagttctacagtcatg

SEQ ID NO: 421908 - DNA, 510 bp, Homo Sapiens
cgattcagaggatccccgtccataaggtgtgccagtaaatatgcacaattatgatgtcagacgggaaacatgacttcatcttaaaaaggcactgatgctgtaaggccccctaataggtgtgaggagatccatgtgagtcagccacagccctacccctacagactcccaaatccaggttttatcatggcgagggtctttgtgtaggagaattaggtggaagtggaaccaagagtcagggaatttatatcctcacttcagctcctttataaggaccaaggccaagacacataattatatcttcatttttctaagaataagataggacttaattacctcaaaggaatgacatgaaaactaactaccaaagccctctaatgtctttaaaacttgctacattcacgcatggggttattactgtcactgtgtgtgcgtgcagacctggctgcaggaggggcacagagacaaaagcatggggctccccaccctgccgtctccccgcggacttacctg

SEQ ID NO: 421909 - DNA, 170 bp, Homo Sapiens
gcggcgttctagaggatctcctccatatgtgtgaccagttcgataaatttcttgcccccacattagaggttatatagaatggacctatcaccattactttatgattaaaaaggagtaacatttctatttgaataaataaatcatagatctgacatacacagaaagaactg

SEQ ID NO: 421910 - DNA, 464 bp, Homo Sapiens
  misc_feature (193)..(249): n is a, c, g, or t
tccataaggtgtgccaaataagcatgcaggaaactagcttatgcaaaatagcaataataataacaatctgttcatattgaaaacttgggaaatttggcagtgaaggagaatataggacatgccggtgtaacccagtacaggattccctctacaaccaccttcatgcatgtttggcaggcaaatgggaaatgannnnnnnnnnnnnnnnnnnnnnnnnnnnnnnnnnnnnnnnnnnnnnnnnnnnnnnnntgaacggcgacaagcgggcagggggaaagagcgggactatgtagtgtagtgtttcgacgtccagcagtaagcattagccttgagggctcgtggtttaggagtgaaagtttgggccatcacagcagggagagaatcctaacaggttgacgtgctgcctgagggcacagggggtgagatttgggtagagaacaaaagaatgaacatagctgaagtca

SEQ ID NO: 421911 - DNA, 119 bp, Homo Sapiens
ctctagaggatctcccccataatctctggccaacaacaccaagtctacatgctatgccaccatagcactctgcatatacttccacaataattaccatatggtgggcacacattatggag

SEQ ID NO: 421912 - DNA, 484 bp, Homo Sapiens
gtggtgttctagaggatcccagtaagtgtgggccacttaggaaaaagtgacagctgggtggccctaagggaaggacgtgttctgcatcaaaatatgtcccacatggctgtgtggagcatgtggatatgtcccataggtgtgttcaagtgtgactcaacactcaagtgtggagtgttgtttgcccaagtagtctttaggagtgtgtatctcaggtataggagtgcatgtcctgggtaacagtatatctgagagtgcatctcagcatgccccatatgtatgtgggtgcacaattgtgccttatatgcatccatgtgcattcacacatgcagatgcgtacaagtatccctaatgtgtgttcctgtgtgtgtatcctgcctgtgctgagaatgtgcaagtgtgaatattcctcccatgtttaactgagtgtgtgttccaagtgtgttaatgtgaaaatatgttccagctgtgtgtcccatgtgtgtcc

SEQ ID NO: 421913 - DNA, 463 bp, Homo Sapiens
ggtgtgtatgtccatattcacaccgacggcttggaccacagtcccctcttctaggggtctgtccaagaattcccttcagggaagtcaccctgtgtgcctctcataactggcaaggggggatgcccagccccgtggccacagcagacaggaccatgcattcatcagaagccaaggagattggatctatgggtagcctctcagtgggcagaaataaaaacttggcctaaaagacatgagtggattatattagactatagtatcctctcattgggagcatcagatgggatactgggtatcagggggaaaagctgaaatacataagagagaagacagtattcagatctcccaaggcagtcaggggaagccacgagtgagcagccaggatgagtaagtcagagccatgccatagagaagttactctggtagagtgagattaggaagcggaagtgggaaaagcagagag

SEQ ID NO: 421914 - DNA, 496 bp, Homo Sapiens
tccataatgtgtgccattttaaagcactcactctggtgccagcttcttagattaagcatcttacatgcattacctactttaatcctcggtgaatgtgagtatcagtttcattttataactgaagaaacgggcactgagacgggaagtcacttttacaggctcacatagatgatagttgatagggctgggagtccatctgagagcctgtcctccctaaacatcatcctgtccccttcctgatgtgaatcaccaagcaagggacaacacaattcatagatccaggacaaggtttatggcacatacttctaaggggtgggacctggtatcatggacacggcattcaagagatagtacatggtatagagtctgtcacaaaacagacatcacatggtgcatgaagcatgacccaggggtaagaggcatgggatgccgctaaagggagacacacaggacaaagcaagaggaacgcagggcctgctacgtggcacagtcacag

SEQ ID NO: 421915 - DNA, 459 bp, Homo Sapiens
tccataaggtgtgccaagggggactgatcttattctggggtgttttagcccaagcagaaatcaatgcagggttttctgccacctgcttatttggtttccagtcaagcaaaacaagggacttatctccctcacagatcagcatatgagatatgcttcagatatgttcgcctgtcagactcataaacacaacaagatatgccagctgcaatgaagagaagccctgtttcagttcgtggattacagactgcaacatccatcagcatcaagacaaacaccttcaaactactgtccttggcgtccagcctaacagatctgaggaatgtgataaaggaacactggattcccaaggtctgctcaggtttccttccataacaagaagtagccaaatacagctgaacaggcctggtaagtaaaggagaagcctccttccttgaaacacttggctgtattctcaagaac

SEQ ID NO: 421916 - DNA, 485 bp, Homo Sapiens
gcaaacacccccagagatggaaaactgcatagcttcggttttccggttaattatgggacactggggccttgggttgactgatgagcaggacagtagttgggacattctgcattcaggaaaatagagtggaaggcaaatgtctcccactgagaagtgtaattgcagagttggccatgatcttatttttagatggaaagttttcactgaaagaattcttttggcagcaagagaagtagcacagtggtatgctgaaagctgaggtgggaactggtggcttcccttacctggtaacgagcaggtttgagctggtccttcccaagcacagtaaataaatgtcacttggcatgggagaggagagaggaaaaatgcagcttcccaggccgttcagaagagcagttttcttggttaaataagtttgaaagtcataggggcctttttagttgaggactgagaaagagctttctctggtcaaatatagagttagt

SEQ ID NO: 421917 - DNA, 475 bp, Homo Sapiens
tccataaggtgtgccattcaggagtgatgtccaagtcacatgttaggtctgtggcatagtcagtttctatttgatacacttaaagtctcagaggcacagaatgtgaatatctttcttgaagggaactgaacctcacctgcggctcagtaactggtagtttctagttcacttacccttcaggttttgagtggttcagcctaagttgggcacagtcctagatgtgggatctgaatcatggctatgatttctgtctttcagatggtgtaaggatcactagatttcccttgagagtaaaagatcgaaagcattcacagcaccttcttggcttgggggaaaaataaaagcaactagtaattttcaccattaattcagtaagattctaagaagtgtaaactggcttttctcaccgttgttgaaaacagcccactcaggtttcttaatcacatcagtgaatacggttatttgggcacttggg

SEQ ID NO: 421918 - DNA, 515 bp, Homo Sapiens
  misc_feature (53)..(66): n is a, c, g, or t
  misc_feature (80)..(308): n is a, c, g, or t
  misc_feature (310)..(341): n is a, c, g, or t
gcctagaggatcccctccataatgtgtgccaactagtttacatctctatatcnnnnnnnnnnnnnnaaacttggtttttnnnnnnnnnnnnnnnnnnnnnnnnnnnnnnnnnnnnnnnnnnnnnnnnnnnnnnnnnnnnnnnnnnnnnnnnnnnnnnnnnnnnnnnnnnnnnnnnnnnnnnnnnnnnnnnnnnnnnnnnnnnnnnnnnnnnnnnnnnnnnnnnnnnnnnnnnnnnnnnnnnnnnnnnnnnnnnnnnnnnnnnnnnnnnnnnnnnnnnnnnnnnnnnnnnnnnnnnnnnnnnnnnnnnncnnnnnnnnnnnnnnnnnnnnnnnnnnnnnnnncttggttttctctgaggagagatggatctaacccttgatcctaaaggtggtgggtgggagatgtactcaaagtatgaaatccagtgtgtgcccatcgatagctccttttcagtaaaatggttctcatggctctaaaggtgggaaagagctcatgcacattgtgtgaccaccccc

SEQ ID NO: 421919 - DNA, 497 bp, Homo Sapiens
gcgttcagaggattcccgtccagtaaggtgtgccaggtattggctatgcctagtttatggagggtgtctatcatgaagggatgtcgggttttatcaaaagctttcttgcgtctatgaggtgaacatatgggtgtggtttttaattctgtttatttgatgaatcacatttattgatttgtgtacatggaaccaaccttgcatcccagaataaagcctacttgatcatggtgaattaactttggatgtgcacatggatttggttagtgttttgttgtgtgttttggcatcaatattctttaggaatatggtcctatagttttcttttttcatggtgtcttggccagctttgggtatcagggtgacactggcttcatagaatgagttagggggaagtcccttttggatttttgggaataatttcagtagaatgggtaccagcttttctgtgtgtgtctggtagaattcagctgtgaatcaatctggtcgcgggctttttg

SEQ ID NO: 421920 - DNA, 403 bp, Homo Sapiens
gggcggagcttcatctcggcacacgtcaaaacagaagaggaaactattcgtggatcaagaaagctgaaaccaaaggcgtggtccaggaatagacctgacctagtgaaaggagcgcctacactcaactgtatctctgctacaaattcaaatgcctttctaggtctctttacttcgctttcaagctcagtctaggtgtaaatctatcaccttcaatataactggataaatatgtaaactttcattcacactaataaacgtgaaatgtaagctctacagaaacaaaaagcacagtcacaaataaagcattaatctaatcattagatattaaatgcttgatataatactatcactgtgtgagattatttttcaaaatttggttttctcatctcttggaaaacaagaa

SEQ ID NO: 421921 - DNA, 331 bp, Homo Sapiens
ctcagagtggatcagcatagtcaggatctagtctggtctttctctgtgaccttttgtgtggcaggagtgggttttcctgttccccaggccctctaatatttccagacataaagttccaggaatcccatgcttccctcttgaggggccatttcagcctcaggaaaggccttcagagacttagaaggaatgtcgtgttccaaggaatgaagaggcagccttgatgtgccgtgtttgtcaggactggccttgggaaaggtgaaataggacatatttttgcctttttttctgcaactcttttctcttgacttttactgaggtgggaggagaggaa

SEQ ID NO: 421922 - DNA, 507 bp, Homo Sapiens
tcaaccgcccacgtcccaccgcaggcagcgggagccgtcgagcagaggctcgcatcacaggccctcctggaggggtgggcagagggcagcccgccaacaccgtctgtcatccagctgtcaaagccattaccaacacggcaagataaccatccttgtggggaattattatttggaagtaggaccagaaatgcaagttaaaccgcaagatgccaccacacagccataattaaaaagacaaatgccaccaagtgctggcatgatgcagaagagctagagtccttccacaccactcgacggggcacgagtggggcagcaactatgggaagaattgagcagctcccggaaagacagccacagagtgaccactcggccagccctagagcagtgacaccctcgtccacacaggcacgtgcatattcacaaacagtacactagccacgatagccccgacgtccatctgtgggcgactggagaaacgaggtatgcctccactcaggggacactgct

SEQ ID NO: 421923 - DNA, 125 bp, Homo Sapiens
ggctaacatagctctagtcagacacagcacccctcacggcattcctcattccattctgcatgtgcaaatgccgtcgcccagcacacacatccctccgagtcagctggcagggccacccgtgccag

SEQ ID NO: 421924 - DNA, 136 bp, Homo Sapiens
  misc_feature (58)..(58): n is a, c, g, or t
aggaatagacgccattacgcccctggccgccgtcagctgttcttgaaacgcttcctgnggcttccttgacgggtcggagacgggccactgacgtacactgtgtgccaggagtccccccggggcagcacacatttcg

SEQ ID NO: 421925 - DNA, 310 bp, Homo Sapiens
gcccaccgtccacgagagaatcacagactaaatgctatcgatatcacaggttgcttcatctgctcagcaaaggagcgcaggcatacagagagttaaccttcgtggcaaacatgctttatctataggaactagattataatatgactatactatctccctcaaagttcttccactcgagtgggtggggcgataggcacggaaaccttcctcttctcgtgaggtttatgtcacgagaatgtatgattatctagattaaggtcgtgactaatgtagctagggtcatctttcaaggtataaaaggtagtctgag

SEQ ID NO: 421926 - DNA, 389 bp, Homo Sapiens
cacaggacaaatagagcacgaactcactcagtaaccacaaggacagtatcaagccatcatgatggatccaccccaaggacccaaacacctcccattaggccctacctccaacactggggaccaaatttcaacatgcaatttggaggggacatatctccaaactatatcagaccccctacacatcctgaacagacactggaaggaccactgctccagcctcttcaaataaggactgtgatcttccccagaccagagactgggacacagacggacatttggaggctgacattttgggctttgttactggttattacaacaaaaaaagaagaagaagacggcacacggacgggcggaggaccggaccaaggaggacggtgggaggacacgaa

SEQ ID NO: 421927 - DNA, 342 bp, Homo Sapiens
acgatcgggcctgtggcacgcaggatagggagcatgtaaaatactgatccctgagttcaagatatcacgataatatcatggagaaaataacatggaaaattagagcacagatcgatgctaaattatatccagaacagggagacagagaagaaggaaaaatgaccactcacagtttactcttccatcccctgagactagagcactgattctgtcattgatcccagatcctaccttaggatatatgacgctttgcacgatccgtaagctttaggcaactagattacactaacgggcctcaacttttacgtcagcaaggctgctctcatttataggctcggctta

SEQ ID NO: 421928 - DNA, 282 bp, Homo Sapiens
  misc_feature (161)..(194): n is a, c, g, or t
gagctgtcttggtctgaggcagagatgtgacatctagtaacgtttagtaactttccctagtagatccatatcagaaaaaattgcagtattatgactagcacttgcatatagcatgtggaaaacccgatgccaccagagtgaaggatttccttaggagttgnnnnnnnnnnnnnnnnnnnnnnnnnnnnnnnnnngatctttccacctcatttgcaaaattgcttccgttataaggcatcaatgacaccaacatgcaaattcaccttcttttccacataggtg

SEQ ID NO: 421929 - DNA, 322 bp, Homo Sapiens
caatggttctagatcggggacgagcaataatagggatgtaaattagataggaaatagtgtagacagcatgacatagactaatccaggacagctaacaaggagcagcatagcaatttaaatcgcgggtaccctgacttcaaagcctatacccctacaacggggccataggtaagaggatgaagaacatatgccagacagtactggattcaaatagtgtttcctgttaaaagttgagagggttgtggtaagttttcaaacctctctgggccccatttaattatctgcatgaaatagtatctatcaaaaagtgcctccaagactt

SEQ ID NO: 421930 - DNA, 285 bp, Homo Sapiens
tctggagagaagggctcactcggggaacactttaagatcgagatctgctatcggctcatgataagaaaatcattatcctagctcttcatgtgcagggagaatgaacattgtctgtatgagaaaagttaatatgtaattcaaccattaataaggctaaagagctaaaagatatgaagcagtaactcagccagtccagaaaccccaagcagctctaaggagttggctaattacacagaccatatgtgctctggcctgtaccaaccaaatgttctaaaaactttctga

SEQ ID NO: 421931 - DNA, 360 bp, Homo Sapiens
aggccccagtgatgctcggggggtcaggataagaaggagacatctgctcaccagggaggaagtggagtcaggggatgagtgattcaccagagacgaagtcaccagaacatgaaggtccatgataaacacttcagacgagtccattgatcatcttcaacccagagacaaaagttgccaagtagacggcttaagtaccccgcttcagagataaagaggagaactgcaaccatttgtctccatccagctgtcctcgtgcaggtgccttctaccactcaacaagtatttaataaggatgtgctttcttcattcaatacttgaacccctaactctcaacacatgacctaaaaatactgcaccatg

SEQ ID NO: 421932 - DNA, 178 bp, Homo Sapiens
tgggctgaaccaggggcatcctctccaccgagtataaatgctctgtgcggcagtctcaagtgttctcatcgttgaggtctcgttgcattggacagtgaaaaaggcagaccagatgaaaaccactttctacaaggcaaacaataacaacagcttctgtgaattaaacatctacggtgcc

SEQ ID NO: 421933 - DNA, 134 bp, Homo Sapiens
gtaataaaatagactgtctcgctcttctgctgatttactaaatcactggatctccttcagtccaaatcaccaccaagggtcctggtgttttcataacgatcagccatctcattgatctgagacgccatcctacc

SEQ ID NO: 421934 - DNA, 409 bp, Homo Sapiens
cgtgtgtcttgttaacttccaggaagtcatattgccggtgtactcccagaacctaagagacaagagctggctggcctcaggtgccagcagccaggctctcctgtggctgtgggacccccaggctttggagcaagcctgctctgagttctttcctgcaagggttcgggatcctcatctcactttacattgtcaagggcccaaccctcggagcctctcttcctccccgtctggtccctgcttctccactgtggggtttgcttcggctgtcccatctccatgctctcagccctctcctcctgtctctgactttggaacaccacctcaccttggctttcagctgtgtgactgccctcaccccaattctctcttgtcatgaatcagggagccccaaaccttcggcagagccatg

SEQ ID NO: 421935 - DNA, 405 bp, Homo Sapiens
actacctagacctgaatcaacaggaaacactacaaattaccacaccaaagtaacaaaaggaccagcactactccctttgcaaatcccccaccctttacttgtgtggcagatgaaaaattgaaattatgtctgatagctcccttcccacaaccaatcagtaaggctgtggagccaaatcttcatttgcatagaagtataactatgtaacttcactgcagcctctgattggttgcttatccacaatcagatgtctgcatagggtgtagctatagtaacttcagcctctgataggtcccctcctgcaaccaatcagactaataatgagccactacttcatttacacagggcatacaccaagtaaccaatgggaaatctctaaagggtatcaaaaccccagacacttct

SEQ ID NO: 421936 - DNA, 119 bp, Homo Sapiens
  misc_feature (17)..(17): n is a, c, g, or t
aggcatctagaaatggnaataatgatacctacctcctgagacatacacagcagaacacctatttctgcacagctctatcatttcagttatctttccctgctacagcgcaaatctctctt

SEQ ID NO: 421937 - DNA, 316 bp, Homo Sapiens
  misc_feature (12)..(12): n is a, c, g, or t
  misc_feature (58)..(58): n is a, c, g, or t
gctgctcttgcngagaactcatttgacagctggagcacagagctgctctatgggcagngagtgtgtcccaccggagcttgcgttgcccaccctcgtgcgttcccgtgctggctgtgtgcggctcactcttggagatgggctttatcatgagacgcgccgtggtccaggcgcctggatgttgtttgtctggagagcagctgccgctgctttacttggtagggacgtgacccggacaggtttccctcagccagacgaagtgtggaaagtcacgttctatcgtgtgtacccttctagaattagcccaagtcatgagtat

SEQ ID NO: 421938 - DNA, 233 bp, Homo Sapiens
ccacacgatttccaaggtagagaaggccgcccagggagggtctgatgacagcttgccgtgcaacctggtgcaggaaacagatcatcccgcagagagcagacgccgagccagaagccatcatctcttttgtttgaagaagagaaaatgacaccatatctcggagttagctgctgccccaacaaccagtctggagcaagaagaaattttcctagcattgagctatagtttagacc

SEQ ID NO: 421939 - DNA, 239 bp, Homo Sapiens
aaggcgttagaacatgttatacaaaagcagacgagaagaggacacagtcaaagcctatagggagattctatcatcaacaaggatggttccaaccctagggcactaacgcaaagtaaagaagggattaaaaataagattatcccacataaaaccctagatctttaaaatctacaactaaaatttgaagatccctttaaaaagaatttgattctagatgaaagttaacaataaggatagat

SEQ ID NO: 421940 - DNA, 178 bp, Homo Sapiens
tacgttgtctctcagtctctgccagcttatatatacatatgatactctgtgtgatagaaccaagagagcgcctgcccctgccttctactagaaccgcagcgtgtatacaccatatggacagggtgtgacagtgtgcacacagaagatcttctacttggaggctgtcttctttatttca

SEQ ID NO: 421941 - DNA, 329 bp, Homo Sapiens
gctagttcctttttggaatttagcttgcttggattcctttacattgacagctctttgaagagtttctgagagactataactttatagtagctgatatgacctatttttgttgttaggattggagatgatggtctttttcattgctctatatcaggaactgattttgaatgaaaaacagctccctgctagtatagcatgaccttactccacaatgctaagattctgcaatgaagtggttctattgaggttctctagagactctatacattatataacttgacaacatattcctggcacaacgccatgaatgtctgctttttgtcatccca

SEQ ID NO: 421942 - DNA, 316 bp, Homo Sapiens
tagatgaatcatagctaggtctatggactctacaacacctaaggaaggaggccaaagcttaattcctgagcgatgagacatatactgatcctggatcagagacttctgagggcctaatggagacccaattttatgaaccacaaaagtcttccagctgttactgcatccccaggaaccaccatagagagacttttgttttgactgtgtatcaataagtaatttggctcagaatagtttttcgccagtccttttctataagtcaacaaataaccacttgcaagaaataagtgctctctgctctttatcccagtgattt

SEQ ID NO: 421943 - DNA, 300 bp, Homo Sapiens
cgagctcgacccctctctcccagaaaaggaagcagactcagagtaaaaatcaaatggaatgctagagaaagcggtacccacccataaaaataatttccatcctgttccatttatagatgaaaaatgaaggcccagaggattaaatacagacagaatttatgttcctaatactgatgccaaggacaggaagaccttgactagtctcgggaggacgccctgcctgaagtaccaacccttctgcagtggtgagtgactggcacagggtaaaactctacagtaatgatttgcattgcgctatcc

SEQ ID NO: 421944 - DNA, 248 bp, Homo Sapiens
  misc_feature (62)..(62): n is a, c, g, or t
gtggcgcatctctgacatcgccgcttgcgattccctctaagcaagactaggcaaagggaggnaaacacaaacggggattagaaaactatagtagcatttgagggaggagaggcaaaaagcaatactgaaaaccaagatatcttacttctctacctacaaccttctttgcataaaatgatctaatgcaatccatgtaaaatgatatcaactatagaataagccagccaattttggaataaggagaggta

SEQ ID NO: 421945 - DNA, 150 bp, Homo Sapiens
caaatcattacctgctgaaatagtcattcccagtttatataatcagatagctagagggtaactatagacaagaaagcctgtgggttaatttgataggaaagactctaacctcattgagagaaaacgaacagaaaatattccttttctggg

SEQ ID NO: 421946 - DNA, 111 bp, Homo Sapiens
cccagaaaggaatacaaatcagtggtacggagacgcgctgtgtgagagagacggatacgtggagagaagagggatgccggcgcgggtgttaaaagagacaaatctggccgg

SEQ ID NO: 421947 - DNA, 360 bp, Homo Sapiens
  misc_feature (100)..(153): n is a, c, g, or t
tacccctttctcccagacaagggtaggcaacataccataatggctaaaaacatgatgaagaacactgaaactcacttggctgtgacaccttgagccattnnnnnnnnnnnnnnnnnnnnnnnnnnnnnnnnnnnnnnnnnnnnnnnnnnnnnncgtattagttgggtctacccagaaacagacaatgagacagacagaagtgcaagagatttattagtttgctgtgaaaattttggggcgaggagggtgaagaaagtagaattggagacagagcctcagactatgaggcaaatcagacaaaggcctgccaacctaatggagagctctgaaataaagattacccattaggggagttcccac

SEQ ID NO: 421948 - DNA, 397 bp, Homo Sapiens
  misc_feature (338)..(338): n is a, c, g, or t
aggtgctcgagttgctacagaaatagacactcattgctgtcatatgtttcagactgcatctctcaagcagtaaaattaaaactagttttgacttgagaagttttacagcctttgagatacctggagatccaaagggctatgtctctaaaccacagctgagagtcgctctcctacaaaactgtggtaaatgcatgtcattactataatgatcaacacaaatacacaccaaaactaccttccaaatatcacgcatgtgagacagaccgatgtcagcaggggattcccgggcaactcgcttgatatggtagcacatggcagcagaggcagcttggggcttngctgccaacaaccaaactctgtttgtggcatactctttttatagccctactttctaata

SEQ ID NO: 421949 - DNA, 337 bp, Homo Sapiens
cctgaacacagaggcactcactagccaggcaacttataatgaattatttaaattctctgaatgtcagtttttgtgtctgaaaagtgggaggtcttagtacttatgttacaagatggttgtgaatataaataaaataatcgtcttagtgccaacacagtcccttatatatattagccaagaaatatttcgtgacttgctgaattaagttttgtcggcatagctgtgtcatcatgcaaattgaaatatgggttaagaagcaaagtgtcaaaagagctagtatttgagtaaagcaagtggattttttagtatttttggcaaagagtaaaatttttggcgt

SEQ ID NO: 421950 - DNA, 344 bp, Homo Sapiens
ctgattctagagtatacacacttttaaaaggtttttagaacacagccaaaataacatcatatagcaagccaaaccagaaactggcttgggtatagcctggctatattgtcagtgacataaggaatccagtcctgctaactgtgtcacacctgagtctttaaatgatctcatcactgttattatgtcatacctgcagcagcttctgacctcattaacactatgttctatgataactgacagaagaacacttcatggcaatgcaatttgaactcagggcctggcacagtggtaacactaaccagggaaataaatactcaacaagagtgagcagagctatatctgta

SEQ ID NO: 421951 - DNA, 274 bp, Homo Sapiens
  misc_feature (71)..(88): n is a, c, g, or t
tcacttcagttattcctgtctttattttactgtttgattgctagccttggttcccagagcaactgtctaannnnnnnnnnnnnnnnnngcacattgcatcttctaacatgtctgccggacctttagccctggttccatgaagatggggatgaggatggtgacactgagaagtctccctggcacacaacagcatgcttagatgagcccaagctcaggtcagtttattattttctttcagacatatagagaaaggagacagattggccattagggt

SEQ ID NO: 421952 - DNA, 411 bp, Homo Sapiens
acacaaccctgacctcttcccactgtggccacacctacagctgggacaagtttgccaaccacacagtgagaggggcaaactgaatgattcgtattccttaggggagaggagcacgaccttagagattgcagtcagagacatggtggggcaggacacacagctgcaccaccaggccaggtgaggatgacaagttcacataaattgcagtctctgaaatgggtggcagggatgtatacacaagaataagaagtcacaaacgtcagagtggaagcaaagtagagagcatatggatgagattttcaaaaggatgaaatagaaaggattttgctggcagggtctaccgcagtcttctcaggcagagcgaggctctggctcatgctttcctatttaagattttctaaactggcacag

SEQ ID NO: 421953 - DNA, 157 bp, Homo Sapiens
aagtcctttaagaatttaaatgtgaagatagaggtcatacatgatatacattaagatgaaagtaattaagagctagcattctctggggacctgctaagtactaggggttgggccaagtgttttacaaacattatcactcgaatccccacaacccttg

SEQ ID NO: 421954 - DNA, 187 bp, Homo Sapiens
agccagagggagaacatgtcaggcagaaagagaagcaaatgcagaggctatgaggcaagaatgtgctttgctgtcaagaacccagacagcaagacgaagatggttaggagaggagggtagggaggtagagcagtgtgggtaccagagaacggagaaccttgcaggtcattgttaggactgaattatc

SEQ ID NO: 421955 - DNA, 300 bp, Homo Sapiens
tttgaattttagactggaactatcaatagtgattttagaactagtgttgctggcattgggttgtatgatataataacagggatgtgaggactgttctgtgctgactagttcacttaagcggtatctacattacgctaagccattctcctaattcaatggggaataaatatccaatttgatggggaaactgtcatgataaaacaaccagctgattccattttcatctcttcaagctactgctaaagtagagagtaaagaaagccctgagtccaagtcaaagctaacagagttagtatttca

SEQ ID NO: 421956 - DNA, 347 bp, Homo Sapiens
attgacagtaaaggaaagtgagcgtaatgttgaaaatttaaaagtaacataaagcttttcaatcacttggtaaaaatagcattgcagagaaacattgaaccctccttaaatgtaaatagcacgattcatcgaacatctagtcaagatgactaatctttttttctagtaacgctcaacagtctagaaggtacagaaggcggtgggtatcaaggtttataaaaggtcaggaattggaactctggggacctggttgttctcatgagggcacataccaagatcagggtgagctaggaagtttaagtgataggaagataatagatttatttagagaggggaaattgagacac

SEQ ID NO: 421957 - DNA, 123 bp, Homo Sapiens
ggggtaaaacaacggtcaccaaattcttaattttgttcaaggcggtttccgggggaaaaacaacgtttaggtaattcctttttttggttcaggctggtttcagggggaaaacctaggggtagg

SEQ ID NO: 421958 - DNA, 132 bp, Homo Sapiens
acaaatcagacagcctgcctgccgcctatttcccttgtttgtattataataaagtctctgctgcttaagacaccttcaatcttgagagctgtatttacagtgtggaattgtttgaacactggatttgcagat

SEQ ID NO: 421959 - DNA, 150 bp, Homo Sapiens
gagagtagcagaaggaagttatttagctttagttaacgattctcccaagcaatgtgggatgggccaggtggtttacactatggaagagccagaggggagttctgacaataaaggaagacaatggggaacggggatcccatgggaaaaatg

SEQ ID NO: 421960 - DNA, 111 bp, Homo Sapiens
aacaccgccccggaaatccggaatttggggcaaggcggtttctggggggaaaaccacttccccgaaaaattggggattggggcagggcgttttcagggggaaaaacctttt

SEQ ID NO: 421961 - DNA, 244 bp, Homo Sapiens
gaagtgtgctgcttgaggagtgagctggaatgaagggcgtgtggaggtgtgagaattaggtgggtgtggctgggatgggtacagatttgatgggggtcattaggccagaattttccagttaagaagcttggggggaggaaggtaaaaattgaattggagacccatccaagatctgagttgaggcaggtgggtgtcagattttaccatctttataattgaaccgagagaatgcaaaatacaactg

SEQ ID NO: 421962 - DNA, 192 bp, Homo Sapiens
catgacgtggcctcggtttgtagacagaagtaacttgctgtttttaccactgctatttatacctatcacccaaatcaaagaatgggccacattcctggatactgcattccaaattgtaaagggaacttctccttccttgctagtatctctggatggtgcagagatattagaagggaagtatctgtgcatctt

SEQ ID NO: 421963 - DNA, 185 bp, Homo Sapiens
catcctgatggctgactctagaggataaacgtttgccacgcagggtggagaggtcttcggccagggtattgaccgggcctaccaaagccttgcggtcgttttccttgaccttgtcgtaggtcatgaagccgccgtcaggggttttgtacttggccaggatcttgttcaccgtggcgaagttcttg

SEQ ID NO: 421964 - DNA, 386 bp, Homo Sapiens
tgaaatgtgacatcatttgtggtaccagctgaatgggtgtgccatctaaggatttactaaactagtatttctttggtttaatatgtattttaagaccacagaaaaaagtctaatccaactaagtggtccaaggggaactgttatggacttcattctaagaagcttaaatttcttatgatcatgacttgttgaccttttaatggatggattacacagagcaaattcccaaatggacaccatgagcctagatgacactgataggagaatgcaaagacaggaaactgcaagactaaatgaggcgctcctacatttagcagtgaggatgtgaggaaggagcagcaaggaaactgacaaggagtaggaaaaaccaagagactgtcatccgg

SEQ ID NO: 421965 - DNA, 403 bp, Homo Sapiens
agatgtacttccctagatccgttcccatagaaattcctcagtgcaagataatcaaccaagagagagctatgtatctccccttcttctatcatttctaattcccttcaatcaccaagactctttctttctcattttctctccaaacctattttgggatattttgtttgcaatctcatctcccttttctgcccagagtcattatccaagagttgtttttcttcttctgtgtcactgtattcctaatgtaggaggtaatacatttagttgattttcattaaacgatttagatgactttccttaataaaagcaccaggtaaagaattaatatatcttcattttacaacttcattaggccagcctcaatccagcagttaggactctaatttgtggggaaggtaacaca

SEQ ID NO: 421966 - DNA, 349 bp, Homo Sapiens
tcttcctagttcaaaacagaaatgcccaaacgtatatgaacataagaaaaaatcttaaatagcactcagcctggaaaaaagggagcaatccatatttcctactgtttcaggaatttctaccagaaactaggtgagaaaaaagaaagtctccaatagctcgttcacaatgtatctaagaatttgtttctaggtcctaaaaggaacttatgagcatgaacatccattaacactaagggctcagagaaagctgtggtactgatgggagatcagctcctgaaagcccttcctgctgaaaatcatgatgcttgcaataaacatgttcaagaagcaaaaggcaaagtgtcagagg

SEQ ID NO: 421967 - DNA, 512 bp, Homo Sapiens
gagcactcttgatagtcatcttttctgcttcccaggagccatctttggatttcattctaggacagtgagaagccattggatggatttaagcataggagtgaaatcatacgatttgcgtttcaaagaagttactctggcttctagggagaatgagtcttagggagccagcatagtggaaatgagaatagttactgctactgtcttgttctgggtgagaaatcatagcatgaagaactagaggggaaagaggaatggatggaaattcagtatattttggaggtggctctagcatatcttccagatcattgtatgttgagataatgcaaatattggagtgcttgccttctcattcttcactttcagaagaacccaggtcttttttaccctctcctgttctgccatcaggctacttgaaataactatgctcactcattatataaaatatttttgtccctaatttcctcaaaatatgggatggtgattctttgaccttttcttagcaaaccccattt

SEQ ID NO: 421968 - DNA, 435 bp, Homo Sapiens
atctgtgtgcctatacttccccactcgtaatatcaggatgaggaggcctcctctgagggtatgaagagaacagggagctggtcctccccaggggaagggccaactctgcccatgagtggccaccttctgtctttgcaactccacagcccagaggagaggctgagtgtggaagagtcccgggtggagtgaaacgggtgtccttaatgtctggggaccactcccctgacataccctgtgttatctgatattttaggggccattttgcccaactgggtaggagttgggggagtcacccactctgagctcacacacatgccctcccatgtggacttgggcacacagataacaggcgaggggcggggcaggagggtccacgtgacccttgtgttggtgacatacattctccttagcaggagccaagcccaagagaggtgt

SEQ ID NO: 421969 - DNA, 465 bp, Homo Sapiens
aaaaccagataggttatttaacaaagatcttaaattagattactgcagaagctcaactttagaatcagtggcacatagcaaggttgagcttatagacaagaccaccttcttttaagagcctgacactgaaggatgcgtgactagggtgtgagcataggagtcaaattcagcaggagacattgatcctagatcagattaaaagcaaaggggtcttagcctcagaaaagtagctgctggaacagagtacatggaaggcctgtaatttgggactgactggctaacttggtagcttttagtatggggtcaaacctaatgagacttgatattaagaatgggacttgatactgaggcttctgcctgggggattagcacagtttaaatatggcctgacacaggggtggagttgctcttgtatatgggatgtcaggagtcccagctgtgaggaactgggaattatacagactg

SEQ ID NO: 421970 - DNA, 470 bp, Homo Sapiens
aaagaaggaaggaaggaggacagacataccttcagcagctacagggaagatgaggcgggctggaaccactcactactgcccttcagaacagtatatggaagcacacgttcattggacaccagcaccattgtggtgacaccggatggtgggcctctcactatccacagttcctggtggttttgggggctgccaaaggcactattaatcatcactccgccccgagctccatcatttcaataacatactgagccaatgtgctcaagatctgcacagagctcctggagcgagccagtcctctccacttagcccttgggtgcctgtttatttcactgagccttctgccctgtgaatgagggcttcctgccaggtatcagccttggcggccaacaggtgggtaatagcgcacagggtcatgcagccctttcttcccagagaggtactcatccaaccagtggtttttgatgagaaag

SEQ ID NO: 421971 - DNA, 333 bp, Homo Sapiens
atgccatagctgactcctgagggtaaaactacgtcagggaaagacgaaattatgaaaaaggttgtttcaacactaaaaagctttttaagaaaatgcttaacaaacattgatgacgtgtcttctgtgcactaggtactgcaataatcatcatgaccattctgaaagaagttgcttgactctgaagccaaacagacctagctcaacatcttggtcttgttactcatttgtttagagactttgaaagagaaacttactcactttgagtctgtttcttaatccaaagacagggagttagtaataccttctgaggttgttgaaagagttggtctgcat

SEQ ID NO: 421972 - DNA, 369 bp, Homo Sapiens
agcaagttgctcaataaatagctcatcaccctaaaaataacgaggtctctgatgagacttagtctctaatgaaactaagcacaggactgagggggtgaagagcaagcagaaaatggatttccaccatgggctagactgttcacgtggcccagtggtggagagaatccttagggaaagcctaactccgaagcccagagaaggaaggaaaactaataaggagtgtgttttgcaggctgatttttctgaagttatccataggaaaattcatttatgtgagaggctaattagtcatgacagtgctttgctccagacataattgcattggtcccatgcagtctctgtgggtcagcctgtaatggaatttccatt

SEQ ID NO: 421973 - DNA, 388 bp, Homo Sapiens
aacgacgccgagtgaaccgggaacagtgacttgagctttgtccggggggcagaggcaaaacaaaagccttaggagacgtaatcagcagccgttcactgcggcaggacgggtggcgcggagtctgtgtttgtgcctgtgtgcaagggcatgtgcgatattttctgctgttgctaagatgggttcccccttcactggcctctcgcccaatcgaaaggtagctgctcctcattggctgcctggctttatcgaatgaccatgacgagctggagcgaagcccacctcattggcttattcctatggccattgtcaggggagagcaaatcagacacctaatcaatattttgtgaagtggcactagactcttggctaaatttgcattaaatttctc

SEQ ID NO: 421974 - DNA, 251 bp, Homo Sapiens
aaaagataggaaaagaaatatcccaataatgggatgatagattgcagaaagattagctcttcgttctattctcaaatggtttgaactctgaggggatgaaggaaataaataatacccccaacccttaaaaacatttgtgtagaaaaagtaaaagaaaacagcaggagagttacagaaaaagaaatgtttctacaagcatacaccccaaacttttccaggataagaaaattagaccaggaatttggacatgg

SEQ ID NO: 421975 - DNA, 154 bp, Homo Sapiens
cagccacccagtaggctctcatgacttgtggtagggggcgcagtcagagaggtccccctagagggaggcaggagagtctgcaggggagagagaaaaagagagtctggagacgcaacacaagacgtctcctccagcacagcgggagatggcctgt

SEQ ID NO: 421976 - DNA, 369 bp, Homo Sapiens
gacaaggggagagagggagaggaaatgcctgtgagaatgctggagttcaggctcctacacctctctgtgctgttaatgggggtcatgggcacccctcagtgtcttgggctcagccttgggggttgccaaaacctataggagcaaccaggaacattcatggtttgggggtaggggtgacatggcaaagactagctttgtggtgagatgaaactggtaacatctggaggagttcagcggctcagtccttgtcgctgaggagagagccaagaggcaggggtatggctgctggacaagaaggtgcaaggtggctgagtaaagaaagcccagactagggtggtcacagctaaaatggaacagcaaattcaggag

SEQ ID NO: 421977 - DNA, 352 bp, Homo Sapiens
caaatgaactactgctaatttgaccattgaaaacaaaattggcttgtctgttgctattatttcctataaatatactttccagtgatagttcattatttaaggctcctgtcattcttacctggcttaatctggcaactcgggaagtggatgacttcactcaacaaaagccatcttccatactgtggccagagtggactttgtagtttgtaactccgatcgtgaaattatttttacttaaaattttcttaaagttacttctagataacatgaaggcaaacttctttattgcttcccaaggcccttaatgtcctaattccttttaagcaataacctaatatctcatcactcccca

SEQ ID NO: 421978 - DNA, 131 bp, Homo Sapiens
agatgatctgtaactttagtcaccagcttagaaacaacgggcagccaagtatgagttgttatcaagaaacagagatcacacgagggcaaacagaagagcctgtcagtgaagaaagacatgaaagaaacagc

SEQ ID NO: 421979 - DNA, 276 bp, Homo Sapiens
gctggtggcttgtgcctcttcccccacgagaaactcagggggtcttctcagttctggactcctgagggttgcagaactaatggaaagactcatgggtccccgggcagcacacagacaatgcctggcctgtagagccctccttgttgtgtgtcagctgggacatttccagaagcactgatggctttttcacagttgatgctgatggactaaaatggtccttgcaaggagttcttttggcttttcctggagaactgcatttaatctgggctaaaatat

SEQ ID NO: 421980 - DNA, 274 bp, Homo Sapiens
agggggagaaacagctgctttctagagccctcaccttttccacttctctcatctttctgggttagggtctagcgggggttccatgaggatcaggctaaatgagcttagaaaaactaagcagactactgtatcagaactggatcacagtagacaggcgttttcaacaaacatatattgagtatccctgagtgctttggacaggaagaggaattatagacgaagattgtaagtcgcagtaatagatgaggcaaggagcctcttcgtaaagcagggg

SEQ ID NO: 421981 - DNA, 273 bp, Homo Sapiens
tatttttcatgatattctgattcccgcacagagatcgcatggcatgaatgcttcttgccctggtcggtgctgccctagaatccttgtctgaagtgtggtgctctgtggttgtttttctgcctcccccagagttgaggctccaggcaactgtaatgcagagatgagaccagcacgttggctgccaatctgcccacgacatatctgcatggatcctctctgtccaccccaaggctgccgccgtggttctgagactcagcatgtcaccccgtaaat

SEQ ID NO: 421982 - DNA, 276 bp, Homo Sapiens
cgaaattgcaagtgcgcctatttcgagccagcaaaccacagcctgtgggagctcatcctgagcagaggaagctgtacctgcagcccagtctcaggccagcttcagatatggttcagaagctgttagaagatcacagcctgagaacctctgttctctttaatcctgaaaaatgaaaatctgagcagttcaggctttggccaggtttcctctgttatccaggaagatgccacatctgacggcccataggagtatggagttatgtcgatggtagaattg

SEQ ID NO: 421983 - DNA, 270 bp, Homo Sapiens
gaagagtaaaggggactctgtcttacaggcagagtacaagctcaaccacagtggggtagaacaccaagtgtgctcttgaggtccctgtttctaggccttggctcctggatggtatttctggacgcactctgggccagaggggagcccgttgccctgaagggagatacccaggcctatcagcattgaccacaagctgaccaaagagcccttggaccttgagtgaatatcagcaacagccttgcagtacttgctgcaggcctggggcacctc

SEQ ID NO: 421984 - DNA, 140 bp, Homo Sapiens
ctttctgtatgaaacgtatctgcacatcaaaccctcacccctgggctatcccctaatttccatgacttcgaggacaacgaagtcccacatatttctataaacacccagctagtactatgtaggagtcgcccttgatcgta

SEQ ID NO: 421985 - DNA, 166 bp, Homo Sapiens
taatgtaatgttgcattatggcctagtaatgtactgttgcattacattaaataatgcatggatggagcagtgtggaaaagaacttgacaatgactacatctgtgacctccagccctctggagaagtgcactttacataggagcccacagatgtcttttttcttctt

SEQ ID NO: 421986 - DNA, 227 bp, Homo Sapiens
tgttgaggatacccaggttgtcgtgttggtgacagaatggaacgctgtgccatggatcgtgaaatgggacccaggaagagaagctggtgttggggggccaggagatgtaagcaggtgatgtgcccagtttcagaggttaagattttggcaggataagggcccatagtgggcatttacacggactggtttagtgctcaggagagagatgacattgagataaaaatttt

SEQ ID NO: 421987 - DNA, 412 bp, Homo Sapiens
  misc_feature (90)..(126): n is a, c, g, or t
tataacaggagtgtctttgcttttcattgctgtgccccctgtaattacagcagtgattatttatttatttattgggtatctcattgtggnnnnnnnnnnnnnnnnnnnnnnnnnnnnnnnnnnnnngattcaggaggtacatgtacaggtttattatgtggttatagtgtgtaatggtgaggtttgtgcttctagtgtgttcatcacccagacagtgaatgttgtacccaatagataatttttcagccctcatcttcctccagcacttcccctttcaagtccccagtgtctattaattccatctttatgtccacatatacccatcatttatgtcccacttagaagggagatgatgtggtatttgactttctgtttcggagttagttcatttaggataatgacctccagctcc

SEQ ID NO: 421988 - DNA, 174 bp, Homo Sapiens
gacgatacggcgactccgatgatgtctataaaccccttatttcccttttcttccccccagtgggtaatagggaagtaggagagaagccattaggcagcagggagcaaaaggcaaaattaaatgcttttgtagacactttttgcactttttgcttcaaccagggagtcgcccttg

SEQ ID NO: 421989 - DNA, 165 bp, Homo Sapiens
gcgatcttgcatggatgtcagagtcattgaggctgtttttgtgactaggcctcctttattgagagtgagcttcagggggaatgtagatgacttcattcagtcctcaccctaaaagttaaatggaagcacaatcacacacctaagaagcagaggctaaataaacca

SEQ ID NO: 421990 - DNA, 323 bp, Homo Sapiens
taggcgatccatgtcttattcagaggcctacaaagaactgtttctcactgttgagttaccgactaataaacctgacactgaaatgctgcagtttcttagtaaaccatgcagctggagggctatgaaccacactgaaaagagtttgccttttctaaattagtgttttgctcaaggggaggagcaggaactaattgtagtaaatattgcctcccagcatttagaattcgcagaggctgctcaggataaagccaggtcaaaactaaggtcaacatccttcagggttttcaatgtcagggtcattcatgtactgagacttaaacttg

SEQ ID NO: 421991 - DNA, 251 bp, Homo Sapiens
tggcgactccttctaacattttgtctgtatcatcagctgaagtagtttttttgatgctggtgttaatttcttaccattctacaaattgcatctaatttctcatctaaactctaaaaattagtctgttttaaagccctgagtgagatatttaaagccagctttttccacagttttctcataaaaatgataagcataaaataaaaggtgctggcaaatgtgggaatagactcatttcaaaaagcaaaaaattg

SEQ ID NO: 421992 - DNA, 391 bp, Homo Sapiens
tcaggcgctcacagaccacttgaaagaagacaaagacccatctcaggaagctcacagccacatgccaaactgggcaagaccaattataaacacaattggaacaaaatcatgacagatcctttcaatgagttaaggtgagaggaatgttaatcttattaccgccctctcctcatttctctcttcttgcactgctagaagaaaattcaataaacgatggctagtgagtggctcaccaagaaatgggcatcatcttagacgggccctggctgccacagccagccctaatagccctggcttctgactgatagggccaccatggccggacagtcccttgccctcaggatggaaccgtggttagggtgattaatgcatgaactgttatttcataccc

SEQ ID NO: 421993 - DNA, 165 bp, Homo Sapiens
tactgacgatagggcgactcccttcaaagctgaaggactttgtttagctgagcaattccagcccgtcgctctggcaacagtctttgggtggacttacatctcatgcatcactaaacagaggaatagccattcagcaagtaatgggggtctcataaaaaaaccaca

SEQ ID NO: 421994 - DNA, 462 bp, Homo Sapiens
  misc_feature (192)..(248): n is a, c, g, or t
ggatagggcgatccatactcattcttccagatgttctccagatcttaccaggcgctaaatcagacaagctgcccaactgagcaatgcaaaatacacactgaaatgataatgcctgacctggccattaaaggcgactaaaggcgtggtttaattacctggtggctcatttacatttccaatcctagattctannnnnnnnnnnnnnnnnnnnnnnnnnnnnnnnnnnnnnnnnnnnnnnnnnnnnnnnnacaaacagtattctctcatattttaagagaaacgagttgtggtttaacaacaaatcatccttgtgacatttgtctctggccgtgacgctgcctggggcctcagtgctccctcagcccgaattcggtgccctccccagtgccagctgttgtcaggtggggctcactgtgactcagttctcgacatcttgggaactgggatgaacaaagccccaaa

SEQ ID NO: 421995 - DNA, 227 bp, Homo Sapiens
cttgcagctttacaagacactaggaggaagtgtcctgtccttgctgtcttttcccttgtattttagatgggaagctaaaactggagggggggaaaaaccaggcccactaaggctaagcctgaggacagggcagaggaaagcacaacagatttactttcattcttagaagacagtggatggaaaagtggatttccaccaacaaaagacctggcctttttccctgagca

SEQ ID NO: 421996 - DNA, 189 bp, Homo Sapiens
tgcttgcttttggtttttatctgcatggaatacttttttcaacccctttattttcagtctgcatgtgtctttacaggtgaaatgagtttcttataagcagcatatagtggggtcatgtttttacactcatgtatccagtctatatattttaaatgcaaagtttaatctgtttatgttaaaggttattat

SEQ ID NO: 421997 - DNA, 248 bp, Homo Sapiens
ataggcgatcacgctacttctgcctctttgaatttgcttaccgggtacctcatataaatagagcatttgtcctttgtgactggctcatgtcgctcagcgtgatgtcttcgaggctcatccatgtggtagcgtgtgtgagcgtttcctgcctgccttagactgaggaatacgccattgtgtgcctgcaccacattctgtttgtttgttcacccatcggcagacacttgggtcgcctctaccccttgtct

SEQ ID NO: 421998 - DNA, 155 bp, Homo Sapiens
ttccatgtaatctgcaattgaacatgggtcagtcagtccttagagcattggctgagcgccgttccgaagggactggtgctgatggactccgcttgccctcgtggcgatcgaagatgggagtcgcgcttgttgtccgagtaccgaggctcaatttc

SEQ ID NO: 421999 - DNA, 346 bp, Homo Sapiens
  misc_feature (168)..(176): n is a, c, g, or t
tgggcagcactcaatgtgaatcaggctaacattgacgataacagagtagtctgtgcctgtcctgtgcctggacactaattggaaaaatccaacagatacctccttgatgatctctgcccatttgggcaagttccaaagagccagctccactcaaagtaacttctctcnnnnnnnnngtctgtatccctcagttgcttgataactcgggaggatatcatttccgctgatttatgtatagcctttcttagtatcttggcaggtagttgtcgtattatccaagggccactgactttgggggttttgggtttctaagtccattcttatctctgtttcacccttaccttcc

SEQ ID NO: 422000 - DNA, 229 bp, Homo Sapiens
agactcttacgaggatccccgcacgacacgggcgactccaggccagaggtaccctagcgctgctgtgctgtgttcactgcccacttcagatctgcgctagggaaatgggctttactccctacattttggcacgcaaatcctgctaaagatacagattagaaggaaatgggggcaggtgccagtggctcaccatgtctactacacatacaatacgtagcccgtgctgcac

SEQ ID NO: 422001 - DNA, 189 bp, Homo Sapiens
acgacacggcgatccatatgaaattccctcttggtatctgcactagaacatctctacttttcttaagcctcaaactttgctcatctctttgacccttcagtctctacagagtgatctgttctcctcactttccaaacattgttcaagtgtcatcttgatgaagtggccgtctaatttatttttcacgta

SEQ ID NO: 422002 - DNA, 347 bp, Homo Sapiens
cacgacacgggcgactccaaggcgagactggtaaagtttgattaagtttgaattttgtgtttggctgattgccagcctaaaccgaatgggcttgtgtgaaagttctgttgttgcttattctgttcctgttttgtggccatctctcttgtggtggggtcaggcacactgctgttgtgttgtgggttttttttagacccccttacttgctgaatggctattcctctgttgtgatgcatgagatgtaagtcccccaaagactgtttgccatagcgacgggctggaattgagctcatctaaactaagtccttcagctttgaagggagtcgcccctctcgtctggtaccgag

SEQ ID NO: 422003 - DNA, 177 bp, Homo Sapiens
acgacaggcgactcctcccaatttgaggccagtacatgtaccatgttcgtcaaggtggagcccaggtgcaagggtctgcattcagctcccactagtcatctcctacactggtgatgacgggttacaaggtgatgctgggaggtcagccatctcactgcgcttttgagggctttgttc

SEQ ID NO: 422004 - DNA, 437 bp, Homo Sapiens
gtccgacgatcaggcgaccccaaaatgaccaacggggaaatacacttttaggaggatggggttgcagctttaccaaggaggatagaccgtaaaattactatcctggagatacttctttagggatttggagtaaaaataatatttttaagattcgtggacgttaaaagtaccctagcttgctttctatgttatgcctgtcgcctcaaaagaagctctcctgtggaacccccacctcacataggaaaactcagcagggaatgggctcagtgattcttacctattggaactagataacacaggccaaggagcccggagcatttgtgaaactccagccagcaagttgcatcaaggttttagttagcagagcttggcattgtgcctttatcacatgtctggatgagatgtgtgctggtggtaaatgtgtcctactgggcccc

SEQ ID NO: 422005 - DNA, 252 bp, Homo Sapiens
ccggtccgacgtacagggcgactccctactaggaaaagaggaagcaaggaaatcctgaggatattagaagacctgaaccctaggctgctctcactcaggtttagggtttgagtttttactatctggatgacacctaggttctccgcaaaataatgtaaaaagcattctcaggttgataacaatactggtgccccctaatatgagtgactaaaagccttctctaggaagacctattttcaacctaggttgaca

SEQ ID NO: 422006 - DNA, 175 bp, Homo Sapiens
ccaatacacgtattaccactacaactagcatagttttgtgcgtgacaccccacttgaaatgatctttaatgttctgtgggcttcaagccgtatgcaggtagatagagattaaaggagagctctaacagggctagtattagcctttctggtaagaattctacccacagtatgcaca

SEQ ID NO: 422007 - DNA, 394 bp, Homo Sapiens
gtcgacgactaggcgactccaggtttaggcattcaatttattcttatttagcactttttatccagctgtcaaaggcattagatctaatcactgccattttctttagagaacagtaacctctgcaaggagatattttttcttcttttcagtgataggaagagagccaattaagcttcgtcctgcagaggtacaatgtcctaacaaacaaaacataaacctggcaactccattaaacttttgcattcgtatccctagaaaaacaaaatagggaaaaatgatgtcagccacttcaggtcccagaggttcactttctctttttttaatgaagagtatgtggggctccctttatttcttctcccttcctatagagctttatttctttagttattctccc

SEQ ID NO: 422008 - DNA, 428 bp, Homo Sapiens
  misc_feature (196)..(234): n is a, c, g, or t
acgatggcgactccacactaaggcataagtgtgtgtgtgcctgtgctgctaggtgtctttaagatgctggaaaaacaaagggaccaggagccagtgagagaggggtaaagagacacataagggccagagacgactggagtttggaaatcttgacctagagttggattttttgccaagacgaatgaagaagacagannnnnnnnnnnnnnnnnnnnnnnnnnnnnnnnnnnnnnnataagagggtttaggcaggagttaaatgaccatatttagccttttcacaaaggccagtttggcttttctgcagagaatagagggagacaagatagaaagctgaggacgggggtgtcaagtaggaagtcactgcgatactactggtgcgagctgatggccgcttggactaggagtggacagaaaagaagcggcca

SEQ ID NO: 422009 - DNA, 365 bp, Homo Sapiens
cgaattcggctctctgggtactgctattattatcccctctttatgatagagattgaggcccagcagttgtgtgacgcagccgatggctttgctctaagtgtgtgtggagggcttcacttgagggggagacactgtagacaggccttgaagaagcagacgatcagagccatggtagtctctaagaaaagtcctggtacacctgtgggtcacagggtgctattcaagggcctaatctagtctggggtggggtctgagaaagtctccttgagaaaatcaccacgtttactctgaggcgccaagtagaatctggcccggtgcaggatggggctctatggggttgggagagtgagagggatgcacatgag

SEQ ID NO: 422010 - DNA, 385 bp, Homo Sapiens
cgacaggtcttagtagcactcactattttatcatattttccaggacaccgacatgcctcccatagatctaaagccccagctttatgccatgttgctgtatggacagcagtagtccccaaattaatctcacacatttcctcctgtagcctgaacatggaattcccaacctccccatgtctgaccatcaaagcgtttaccaccttgaaagcccaagctcagatgccacctgccctaggaagatttttcgaatctcctaaactggaatgtcagaactgtgtgagtcctgtttgcctcagctccacacagctacagggacaaaacactcacaaagtaaatcggagcaggagacattttggcctgccttgtcccaaggcatcttcccagg

SEQ ID NO: 422011 - DNA, 427 bp, Homo Sapiens
  misc_feature (54)..(208): n is a, c, g, or t
  misc_feature (217)..(291): n is a, c, g, or t
gatgtgccgtatcaacaccggctggggctatgagcgacatggcaaccaggtccnnnnnnnnnnnnnnnnnnnnnnnnnnnnnnnnnnnnnnnnnnnnnnnnnnnnnnnnnnnnnnnnnnnnnnnnnnnnnnnnnnnnnnnnnnnnnnnnnnnnnnnnnnnnnnnnnnnnnnnnnnnnnnnnnnnnnnnnnnnnnnnnnnnnnnnnnnngtcgccctnnnnnnnnnnnnnnnnnnnnnnnnnnnnnnnnnnnnnnnnnnnnnnnnnnnnnnnnnnnnnnnnnnnnnnnnnnngtcccaccaagcctccagaggaagctgactcatgagatgcctggacgctgggcttctggtctccaggatgatgggggaatgcgtccctgttgtgttaaccccggactgtgtcaattgtcagaagcctctggacaca

SEQ ID NO: 422012 - DNA, 389 bp, Homo Sapiens
gaattcggcctctgggtgtctcatttacaaagcacacctggattacatctcaagcctttcatgctacaaaagacttcactaatttcaagacctgagacccttcagttatttgcatgttactttcatagtaaaaagtctgctgtcgctctcggtgtttcaactgctgtcatagctttcccttgtgttcacacattcttggaattgttaccaacttcccaaggaattcttttctaattgggcctctaggcttaattagcttttagaatggaatccaacggtgtgaaaagaagttggtcctttggcttgactttccgaggcagaagaggcaagccatcaattaaaaagcttccaaagggcagtggacaaagagcttaggagagccttagctg

SEQ ID NO: 422013 - DNA, 182 bp, Homo Sapiens
ccagaactctatgatttttatgcactcccatgctaccttgcatgctgctttatacatatagaacacaagagaagtttgtaaactcagttgtaaaatgggactagttatttctgatctatttccttcaaagggctgttttaaagatggaatgagactacatttgtcagcgtgttctgtttgcc

SEQ ID NO: 422014 - DNA, 159 bp, Homo Sapiens
gctgacttggtaagtacaaatccttaagcaaagtatgaactgactcagcactcctagtaagtgaccagattcagaggtaccctgaaggacacagagggcaatatcaggtgtattttcgtggctacaatcggtaagggtggcccagagagcctggaattc

SEQ ID NO: 422015 - DNA, 428 bp, Homo Sapiens
  misc_feature (370)..(370): n is a, c, g, or t
cctgaatcaggcatcatctggtgctcttatctccgcatctgacacacagaggctgatccctaggctaacaattagcaggttcattgtgaggacacattaagatacgacttgtaaactgcttttcagctgagaaagtatcacacagctgcgacggctcatcacttccctggcctccaactccctccaactcagcaggaacccgctaatggacaccaggagcctctcagcacctctggctgttcaaacaaacacctctcccctcactgcccctcccctgggctgccctttggatacagaggcaaagctcccagtcttccctctagcgccggggcagaccagtctggacacttgagtcacagccttcctttcntttccctcaacagggcattcattttagctgagcccctgctgcgtgtttcatggggcac

SEQ ID NO: 422016 - DNA, 395 bp, Homo Sapiens
ttgatcacctcgtaccgtaattcggctctctgggcagcaagaaaaggctgtctattcttatctgtcccggagcatatgcttctctcctcccaaggtctcaagacaggaatttgcagtaatatacattcctctaccactgagtcttcttgactcttaaactgaagtgccacattggcatttcttgctactggctgatctatggatgatagatagtttgtcccatttcttcttgctgatttaatctcaagagacaaaatcctaagcagaagttgtggtatgatctagaaaaattcaaaccaggtagtttcatgtgttactttatgcagtgtctgtcttcaaactcttcaaaacatgtaacaagagtgaaaaatgaagaattactctttttccacctt

SEQ ID NO: 422017 - DNA, 390 bp, Homo Sapiens
cgagttttcattgtctcttcagagaattttgaacaatgcagaaatcttgctcaaagacactgttcttgtacccaagactgcagaggtgagactaagatagagacctgatgaagatggctaatttgggacacaaggttacggtaattttttaatctagataacctaacaatacaatgcaagtaggactaggaggggacagaatgtgctttataaagactgatatgcctattaaacagtctgtcaaatatcagaaatattaggatagcctttggcgagtgccggggctcagacggtttacgattgaattttctaacaggtaccggtagtgcaggcgttctatgttgctgtgatggccatatgctttagataccagatggaaaggaaggtgtc

SEQ ID NO: 422018 - DNA, 477 bp, Homo Sapiens
ctcaggcatactggtggttacggggatattaaggatgtaaaagggatgttgcaaatgctcatgagaccaggttttgtggcacgctagggccaccactaattctccatgatgacttctccacaggacttgcttaagcacaggcacaggacccaccaataatcagatgtgcactctacacagactgcacccaccgagaacaggtcacagtcctgtgacacaaacccatatacacaaccgagaggttggcgttttggtccatgcttatttaacaaattcccttctgctgtgggcactaggacaggaggctggcaatactcagatgagctgtcccacccccaagtccaaagcagcagctctcaggcctcctctgctgcctcatgccattccaaacatgatggctgggcttacacacctatcttactggaagcctccctctctgtgttccctttccaccactattccattacttccacagga

SEQ ID NO: 422019 - DNA, 365 bp, Homo Sapiens
gtgtggatcacttgaggcagagttcggggccaggctggcacatagcagaccccactgatggcgatggaggcctgtctagagtggctgctgcaaagatgccagccatagtgggggctgtgcggccaggactgcatgttctatggagctggcaggagccctgcccccttatgagttagtggggtgggagcccaccctcatgggtgcagctgccgccacccagccctggctgcagacccaggcatccctgcactcttggaggtccgggaagacccctttcccccatagtctcagaagtgcctgctcccactgcctggactctccaagctcccggctcctgctctgattttggagctaagtctaagctg

SEQ ID NO: 422020 - DNA, 133 bp, Homo Sapiens
cgtcacacgagtgacccgtgtctccagtgagaaaaatagaaaacttccccagtagagccggacagtcccgcagatagccggaaattcgggggatccctgctagagatcgaccgtgcacggcatggcgagtctt

SEQ ID NO: 422021 - DNA, 132 bp, Homo Sapiens
  misc_feature (108)..(108): n is a, c, g, or t
gttccaaacagagcagtgtttccagtgaatcttggaatgagccaccctaaatacacagccagccccaaacccaaatggttgccacacaggtagccagagtatggaccnacaggatttagaataccatggccc

SEQ ID NO: 422022 - DNA, 411 bp, Homo Sapiens
gtaatcggctctctgggcacatgactggaatgcatctgcctcctcaccctccatcccagcttctcccaagttgtactctgtgccacatcagccaaaaaaagcctgtgaaatgccataccccattcttcctcttactgatctgaaacatcacgaacaccataaagcctctgataaggcctgcaggaaagaaacctgtctaaaacatgttttaaggcagcatctcccaaaggtctaactccagcacatctgttcaagtgacaccttcgaacattcagcccatcagtattccatagacacttccacacccctgtgatgtggccggccgtgcttggagccacgccactctttctacatcctgttcacctttcagagctcagtttcagactagccttctccagaatgcctttgctg

SEQ ID NO: 422023 - DNA, 373 bp, Homo Sapiens
  misc_feature (355)..(355): n is a, c, g, or t
atatgtttatgccctacagctccacgaaagtcactagataagaaggaatagctccagccaatgataccagcctcccctaaccccacaccaaaatgccaagaaacttagatatatacttaatagtctgattcctcctcccttattcccaccctatccctccacagagatgtcagaatcactagggaagctccatttggtaaactagctgggacacagccccgggccacactgacttccatcctgccctttgcggtaacacccagatagagggaggggaacagagggcagcacactatgtggccagcccatgcatccagggacaccctgggccacaacagtgccccagcagctgtcncacccctctcatagagaa

SEQ ID NO: 422024 - DNA, 151 bp, Homo Sapiens
caactccggtatgatcaatccccaaacagttacattctttttacaaatccttgcgcctcccattagcatagtgaacaaactccggtattctcatgaacgtttagtacggttagctgctgtacagtgacacattggccatggaaggactaaa

SEQ ID NO: 422025 - DNA, 467 bp, Homo Sapiens
ctgaaccaggcacactggggtctgagctctgccaggagggagaccagcacacccccttctaaaaacaggtcttccccataaaaccgtcctgcagtctgggatttatgggatggcatgttggatttgcggctcaggaatctacaagtagcaaccataaatctcacacccttgctcttgcttgtagggtgaggggaggggagctcattaaaagcctccgggaaggaggccccccatttctgcaagacaaaagagattcagccctgagtcacacctgctctccctaaggttcagtgaggagcaaggagccaccagcctgtgcctggggtggggaggacagtgggggggagctggaggaagggtgaggccagaggcagctgactggagcaggaatgttgggcccagcagtgcaggcgatggggaccagctgttctccaaccgcaggacaagagcctgaaaggaagttgctg

SEQ ID NO: 422026 - DNA, 441 bp, Homo Sapiens
ctggctcgtctgggttatggaagggtggaagtacccttccaattactttttctatgatcttagaatacagaaatccagcacagtagtattttatatgattaaacattagattattagctgagccaggctagtactccttttcctaagaagtgaatgaacacatgctaatcatttgcatagaaggcgttctgtggaatgggaagaggatatagaactcacatcagtttacttacaagtgtcctttcaggtcaacgtgttattattatgatgcttaagtgcttattacaaattgttgctatcatcttattatagcaacactttactagaaaaccacaaacaacaatgcagtgggacataatggaaagggtatcggcatcaaatgacctagttacctcccagctgtaccacttaactagttaattaggatggcactatgtccgt

SEQ ID NO: 422027 - DNA, 210 bp, Homo Sapiens
gttaggtaagctatattagggtgctagtccttccacgagacacatcaacaagttcatagggggtcgcctgtaaatagggtcctagtgactatgcctcttatttaggaggtcagtcttcgaatattattggaacaatgtacggtattcaggcctactccagaatcacatttattactatgtaccctatcctatttctagagtagactctat

SEQ ID NO: 422028 - DNA, 357 bp, Homo Sapiens
aaagtaccaaaaatatagagcacaaaacctgacatggcatgtaacacatatggtggctgctattattttactactgttgttaacatttaaaacataactgaactgtcaccttacctgtaaaatcattcctgctttccctagtaatatagaactttgcgcatatctccaccgtagcattttatattataacctcaatgacataacttttgagcactcctgtacagtcaggaaatgtgccaatatcaccacttagtttaattcctacaaactctacatggtaagcattattattccaacttcgtagttcaggaaactgaaacacagagaggttatgtgacttgcacaaactcacacagc

SEQ ID NO: 422029 - DNA, 427 bp, Homo Sapiens
aatacggctctatgggtattgggtagggtgggaagttgaccggatgatatgcttaatcctttcaatgttgacactttcagagttttaaattccagatgggatcattgttaatctggtccatttgttgtgctgtttaaaacaaagtagatgcttttacattctgtctttatttcacctcactctgaagctcagctttcagtaggtggcagtattgccaaacactcagtatcccgactggtttcgtaggagcacagagaaacaaaatggtctggcaattttagaatttcccccaagagctttaactcattagaggaggcatcaggactatgctacttctaaagctttctttatacccctgaataatggcataaccagaggtttgcagtgagtatgctcctagatgcgtgcaaaacattagcggacagaa

SEQ ID NO: 422030 - DNA, 252 bp, Homo Sapiens
atggaaacaaggatttcacgagcacgaatacctgaagagctcacccacttatttttggcactatagaaatgttggctccaagaatgtgactggcagagcttattctatgaacccaggtcacctgtctcatctgatgtcatcttctcaattttggtctataccctagtacagtagttcttaataactgaacccttgaatcccttaataagcccatcagaatcccttgagggtttattaaaacaccccatggtt

SEQ ID NO: 422031 - DNA, 242 bp, Homo Sapiens
ccggctctctgggggtagtgggtagagcatagtgaacttgtgtgttgtaagggctggatgataatgaccaccagaagcatagtaccaggtggtcagttcattcatagcagtcagtattccagctgacaactagaggactaaaagaaggaagcactccacctcacttctttggtgttcttgctccagggaagagtatacacgttgtttgcaggtgctggagcacatgaaggaccaggtcacta

SEQ ID NO: 422032 - DNA, 193 bp, Homo Sapiens
gtaatacggctctcttgggacagtcacagttgggtgaggcagcatctcttagtctcctgcagcattcagccgagggcaggaagtgagactgacccttcctcctccccgccccggaaaatgaataaggagtgattattttcgcatcatttcgggggcagaacgaagcagaggaacgggtggggaggcctgggag

SEQ ID NO: 422033 - DNA, 450 bp, Homo Sapiens
ctctggtgatgccagctctttctaggcgggagtgtccctttgacccctggagctaccagccctcttcaccctcacaggccttgccctgctggaaagaccagcttccagggcacacccagctgtggacacgtctccacccctggcaggctctgcacccgcctcaggagggcagcctctatggactgtccccatcctaaggcctttctggaggaatggcattcatctgacagacagcaaggggttcttccctagcccatttgctctggtaaacaggagaacttcctctgtgttactggcttcagggctccaaggtctgaggtctctgaccctggatgtatggcctgagttggatttcatcaaaatattgtgccttggacttctgacaactccctactcccattgccctagtcagacccacctccctctcattccttcctctctcttccactc

SEQ ID NO: 422034 - DNA, 180 bp, Homo Sapiens
tagactgttttattaggtgatgacaggatgctgtgacatagatctgagtttaagccctgggctttggcaggaacagagcaggagtcgtatatccttcctctattactccctcccaggatggatgttgcattcaggagagattgatgaaccaagtgatggaaatccagagagccggaattc

SEQ ID NO: 422035 - DNA, 370 bp, Homo Sapiens
taatctatgttgttttacaaggaaaaagctggcagtctaatgacctcagaggcgagcccattattagttcattgttgtgaagcatccttaaagcaattagaccaattgctattataagacatggccttccctagaaagcttcgattgtcaaagggctaaattcactctaagagcaggaggcagaggctgacaaaaggaacacacatcacgggatgctctcagctctgaggagctgctataagacacagataagttgcagccacctctcctctgaggctctaatccttggccagatcctttctcagtgacaatgatccacaccctcagcctgaaggatgagaagccctcctgtggccaaaagaggtaggcc

SEQ ID NO: 422036 - DNA, 199 bp, Homo Sapiens
ccaacagttatacagttgccagaggtccaaaccggtgccgggatcatcacaatgcatagtcattactatgccgtgatagtaaagcaaactgtactctacttctcagaggtattcaaaagaaaatctgtctatgcaatctgttaattgtcattcggttaataactgtttaaatatccgaactacatagcagcttcctatt

SEQ ID NO: 422037 - DNA, 336 bp, Homo Sapiens
ctaacccatcagctgtgagctggtaggaccacctctcgtctttagaaaataatatctttttgcaaattataggctgatcccggcactctgaaacatgtaaatataacactgtattcatctccactgagcatttagcatctgaagcctgtggtagccagctggtctcaaagtcatctgggatacattgattttagattaaattgatcagatttctatttacaggatagaatttttttgccattactgaatacagctgtgtttacagggaatttgtagaagaagaaaacaaaaccccacaatcggtcctagcaaagcacagagcattcagaactggaa

SEQ ID NO: 422038 - DNA, 295 bp, Homo Sapiens
  misc_feature (156)..(200): n is a, c, g, or t
cctttattccggacagcgctcttaaacattacagccctagtcaatgggtgtcttttccttgtacccactcatctcttagatcatgggttttgacgtcagaccagcctggaatcaaatcttggtcctggcacttccgtgtgttatcctttcacatannnnnnnnnnnnnnnnnnnnnnnnnnnnnnnnnnnnnnnnnnnnnagccaatcatttcatggagttatgtgagcattcagtgagtcaccattggtgaaagaacctgcctcacaacaataaagaaaatgctgaatgcacaa

SEQ ID NO: 422039 - DNA, 316 bp, Homo Sapiens
ttgtgaatgtgtagtgcgggagtaacatacaatttttgttttggtatgtcattacttctgttttatctcaacacttccactttgttcatttaagtcaaaataatttgtgaacacagaggtgcaagtgcagaaagtctgaaatgaatctgcattctggggattggcttaccattagcaatctttgtcaatgttcaaggaaggaaatttgagtgattattttaatgttctgtcatcgctagcaccagcctggaccttgatctttatgctgttgtctttaattttcagtggcagcgaaccatggcttttctttaaaagg

SEQ ID NO: 422040 - DNA, 116 bp, Homo Sapiens
tgtagatgccaaagaggtactgaatttcttagaacccaagtgcacacaagtgaacttcaggaagttttgcaactttttttccagaaagtggtgggcagccacaggaccgaaggaaa

SEQ ID NO: 422041 - DNA, 384 bp, Homo Sapiens
gccagaacaaacagtgctgtcttcaggttcagcttcaggcatttctagcctcagcgtcccaggcacgatgatggggctgtggctcctccctcccattgagaacacttcactgcctcctcgcagtggtgcctactcagggagaacagggacgctcaagctgactgagcttacgtggctgatgagttgcagagagttctccttagcctgtgccccctccctgaggacagggactatgtcctattcctccccgtggcccctgtgtggcctggcatcatgcccagttgttctagaaaccagccaacatggactgaattgattccccaaagctggagggattcatgccattcacctatccatacagtatatattgggcattggactctg

SEQ ID NO: 422042 - DNA, 307 bp, Homo Sapiens
tgttgccctcaggtgaaacccgaggcgccctttagctcgtgacgagagtgatcgtatcctgcgtaagacaggatgtctgtgctgcgctcagagaaaatgtaccccctaagtttgtgtgtgtgttaaatttattttaaacttttagtaagattcactttttggtgttcagttcagtgagctgtagcaggtgcatggactgtagtgacttccaccgcagtcaggatactcaggaaggcagcctctctcctccccgctcttgcagccgcctgtctgttcctcagtcctcctgctttgcccattccagaat

SEQ ID NO: 422043 - DNA, 295 bp, Homo Sapiens
  misc_feature (65)..(179): n is a, c, g, or t
tacctgggccttgagtcaagacagtgctccactgtctatcccgaaactatagataaatgataatnnnnnnnnnnnnnnnnnnnnnnnnnnnnnnnnnnnnnnnnnnnnnnnnnnnnnnnnnnnnnnnnnnnnnnnnnnnnnnnnnnnnnnnnnnnnnnnnnnnnnnnnnnnnnnnnnnnagtatttggtgctgaagacccgggacaggggaactccttcaggagactggtcccctgtcctcatgctacctctgtgaggagatccacctacgacctcaggtcatcagaccagccag

SEQ ID NO: 422044 - DNA, 161 bp, Homo Sapiens
tagcacagtgttggacaggagcacccatgtcctgtggagtgtggagtccccctcatccaggtcggtttggaacactgatctggaagctcaggacctcaaatcagccgtgcaatggagaacattttacgccgatgttgtaatttttatttacattacattac

SEQ ID NO: 422045 - DNA, 401 bp, Homo Sapiens
ggaccagattcaaacagtgcctagcatctaaacagcctctgtaatgattcctctcccactttgctcccaaaattggactcaagtacttagacaaaggaaataatgcaaggaattattatattcatcatatctaatagacaaagtggaggtaagaggtttgtttgcgtgcataggggccatagaggttccaggaatctctttttaagattgattttgagagcacattcgtatccaccctcatcactccgggcccttacattttccagttctcacatccaggatttcatttatttctcacaactgcctctgaatttatacaggaaagtcctacctgcctcacttctgattgggtaactggagccagaaagaagttaagggctactaaggctgggcattttaca

SEQ ID NO: 422046 - DNA, 288 bp, Homo Sapiens
tcaacagtgctgggcccactcagtgtgaacaaaagcctttgcatcttggtgccatggcatgttattaagtggaaaataattccagcatgacacagaagtgagactttatacacaaagcaagttatttaggtccagattattcatgtcatcccattcagtattgtatcaactacaggcaaagctctatggtagatgccattgggcttaaaaatacaaatgttgcatgatcctctgtaagcagtttatctccaacttaggaaagtcagatatggatcgcactggactctg

SEQ ID NO: 422047 - DNA, 256 bp, Homo Sapiens
gtccgcgctttaatgcctcataattcatctggaataatcccctatgaagccattagagtgagcccatgcagcctgtcactctgaggttcggttcaagtctcttctcctctaagaattcttttctgcctagtcattctcatctctggatatctctggttccttaggtaagcattagtatcacccaccgccatgtccactagcatggggctagtctgggtcgccctgccgcacccagcacaagcagtctcgtgccaag

SEQ ID NO: 422048 - DNA, 100 bp, Homo Sapiens
gcaaaagtgggagcaaggaaatgtccagtggctagaccatctgtggtagactttctgtgaacgcaatggacatagtaagaacttttaaataagaaagtca

SEQ ID NO: 422049 - DNA, 461 bp, Homo Sapiens
gactcgcctagcaacagtgctagagctgttcacattattctgtcatagcggtccatgattgaactcttctgatcattttggtagtttcaatcccttgacaattggttaagctagattccctaaatctcacttgcctgtgtgcacatggacacagacatcccaccctacccagcctactattctagattggtagactccagattgtcttcttgggaattctctgttccaagcctgagaaagtgtgttacagtaattttattgatcatagttatgaggcagatgaggggagttatgggaactgataactgggaccagaaaccaattgaccagcaatcaaaaacaacttttcaattatccctagaggcttctgctgtccacggtgctgtggaacactaaagaaatattcgaagtggtctctgtcctcaaagaacttctgaagaagattgacatttactgttccc

SEQ ID NO: 422050 - DNA, 259 bp, Homo Sapiens
tattcagacagtgccactggcacataactctccccagcctcactctggtttttttcctctgttctttccatgttccccttggaagtcgctgttggtcgtggcactgaggcccagatcatgccacctcctctaacaagtggctgagtggacaccccacacattctacccaagggccgtgagtggccaagatcggggctcagaagtctctgaatcttcacagctggtcacgttcagctcggtcacttcctgtaagattcca

SEQ ID NO: 422051 - DNA, 196 bp, Homo Sapiens
gacgcctggtgactgattatgaaggaagatgattgcaggagcacctctaatgatgctataaaggagccaatatattggttgcacactgggagttacttttaggcaaagaagggggcatatatcttaattgtttccttataaccttccctaatgtccttaacgcaggatgtgccattcatgaggaaggctcaacagt

SEQ ID NO: 422052 - DNA, 370 bp, Homo Sapiens
gccagagtcaacagtgcgtcctgatctatgctctttgccctgtacaggatgaccctgaaatcatctcatctaaaagcaatgcaagcagacttaccctggcaattgagggttagtcttttctttgtacacagactgtttttggttaagggaagagatatttgtctgtgtttcttaccccatttgagtttattctcagctgagctgccaaaatgatccttgtaaaagctcagccagagagtgatacccctatactcagatccctacattgttccccatttcactcagagaaaaagccagagtaggtacaggtccagaggcccagcatggtttggatgttcatttcccagctgccctcctctccttctttctg

SEQ ID NO: 422053 - DNA, 267 bp, Homo Sapiens
acactgcacctttggtaaaacccttccaaatgcctggctttagctaggaactctacaagcgttccttcaggtaatcctcctaacaacttttgctattacccgtagtccttctctccattatatggtgaggaaactgagactttgcttcatatgactccattttccccaacacttcctgctagcctgttttgctcctttgggagtatgagagtcagtgtttgctggactgtgaggctgaagatgataacatttcttcaaattggcctg

SEQ ID NO: 422054 - DNA, 140 bp, Homo Sapiens
acgtagtgcacaaaatctcaaataagtcttttatctccagtaattattactctgcttaaggcacaggacttgcaactccaggccaagcccgagtgttgtaagtacctaacactggacagggtacgactatggaagttcta

SEQ ID NO: 422055 - DNA, 230 bp, Homo Sapiens
  misc_feature (70)..(131): n is a, c, g, or t
ttctagtagcattcaaaatcttcccattgtttttttagtcttcaatttcactataattatcagcaataannnnnnnnnnnnnnnnnnnnnnnnnnnnnnnnnnnnnnnnnnnnnnnnnnnnnnnnnnnnnnatactattttcgaaatatgttcctacatcttgttcacccacagctggaagtgcacattagtgacacatgtttgaatctcttgagagattcctctacagg

SEQ ID NO: 422056 - DNA, 313 bp, Homo Sapiens
ggcacctggcgccttgattcaacagtgctattccaagtcccaggccagtctccacgccaggttcccggagccgcgtctgtgttctcttcccttgcaactccacagctgggcatccgggacagagtgtgagccacccctcgccctcatttcctttcttcccttcaccccagcatgctgggatcactgcatgctgtgtcctcgggctacagtacccactcctgtccctctcccatcctacatccactctcacagagatggcaaaatctagctcatctgcaacccttttcatgaaacttttgtcattcacagcttt

SEQ ID NO: 422057 - DNA, 267 bp, Homo Sapiens
cttgatgcaaacagtgcacataattatattgccctctaagaatcttctttacataatgtttatgtttttaatttacctattttatgtgtttaatttatacatattatgtctttatttgtcattcaaatgagtatttgttgagggcctactgtgttaagcactgctgtaaatgctgggacatggccttgctcttgtggaacctacattctgctgggtatagaaaggcaagtaaatcaaaaatcagatggtggtaagtacaaagcataa

SEQ ID NO: 422058 - DNA, 115 bp, Homo Sapiens
gagaacttactccttgctattccgaacactttgagccacggccagtgtggaggattgcttgaggctcatagttcaagactagccagggcaacataggaagaccctttctctccaa

SEQ ID NO: 422059 - DNA, 367 bp, Homo Sapiens
aacacttgggctcttacaggtgcccgctattagttatttgtggggggattaccgatcactcctaagctaagcagcatctgaaagacccccgcaagggagacgatctatattggtctgaagcgaaagtgagagtgtgttgtgccaaaaaaggaggaaatgggagggaagtcgtcaaaacctacccggttagaatgtatgttaaagaattttaagaaaggttataagagggactatggaatcaagttgaccccccagaggttaagaactctctgtgaaatagaatggccttcttttagtgtaggatggctggcctaaaggactatagacagagaaacaattggccatgtatatcgggtggtgactaggg

SEQ ID NO: 422060 - DNA, 288 bp, Homo Sapiens
tgcgaccttcactgggcacacttatgcttactgaccctatctactactaccccagtgacttaacgacctgatagtcacatagttgtttgctatttggcgaggatcctataagtacagcctgaacagtgacccataccacagcgtggccttgcccatgcgtgatgtgaggaaggaatgggtgggggcaactaagaaattgggggacagagttctctgtgctaggtatcctaggacaagccacggtcaacccacaagccacggtcaacccacaagccatggtcaacccac

SEQ ID NO: 422061 - DNA, 184 bp, Homo Sapiens
aactgcaccttcatgacgaggctgtactacaggtacatgtaaacacgccgtgactaatttaaattattttgtagagacaggttctcgccatgctgcccaggctcatcttgaaatactggactctagtggtgctcctgcctcagcttctcaaagtgttgggactacaggtgtaagccacggtcaa

SEQ ID NO: 422062 - DNA, 443 bp, Homo Sapiens
caacagtgctatagtattcagtccaataacatgctacgcatgttatagacgagaaacaatatgctatactatatagcataggcgtgtagcaggctataccatctaggtgtgtgttgggtacacgctatgatgttcacacaatgatgaaatcacctaactacgtaattctcagaacatatccatatcattaagtaatgtatgactgcataacctgaccatccaaatcacatttcctaaacttttgccaaaagttccttttaaatctgtgtcaaattcactggcgaaaggaagcagaggaggtggctaagctgagagtcagtctaattgatatgttggggctaattatctacaaaaataacgcaaagggggtcatataacttaacacttaacgggagtggggagaatggtgaaatgagtgacacagacaaacatctgtaccatat

SEQ ID NO: 422063 - DNA, 392 bp, Homo Sapiens
  misc_feature (43)..(142): n is a, c, g, or t
  misc_feature (161)..(205): n is a, c, g, or t
  misc_feature (214)..(276): n is a, c, g, or t
aacagtgcgcagtccctcttctgtaaatagtgacactacattnnnnnnnnnnnnnnnnnnnnnnnnnnnnnnnnnnnnnnnnnnnnnnnnnnnnnnnnnnnnnnnnnnnnnnnnnnnnnnnnnnnnnnnnnnnnnnnnnnnntgaggcagggtcttgctgnnnnnnnnnnnnnnnnnnnnnnnnnnnnnnnnnnnnnnnnnnnnntcactgcannnnnnnnnnnnnnnnnnnnnnnnnnnnnnnnnnnnnnnnnnnnnnnnnnnnnnnnnnnnnnngtccacaacacccgctcagctagttggtttttgttatttaagccctaggtttaatttttgtttttgtgcaggatagaaaacagatgaacacatacgttatcagggcactgtttgga

SEQ ID NO: 422064 - DNA, 123 bp, Homo Sapiens
tcaagacagtgcttctaggcactgtgtttggggtcagtgctgctgtgttggggtcaggagctgtgtgtttagggggtcaggctccgtgttggggtcaggctccgtgttggggtcagcctccgt

SEQ ID NO: 422065 - DNA, 232 bp, Homo Sapiens
gacagtccatcagaattatccatccttcgctgggctctcatagttcttggcttgtattgctattagcacacttaacacttcctacctcgtgttagaattaactatgtctgatcctcccttcacactacacctaaagcaagctgcttagacgtttgttatggcactcagcatcttgcatcaatgctagcctgcctgggtttgcctcccatcttatccagtgagtccttccttt

SEQ ID NO: 422066 - DNA, 358 bp, Homo Sapiens
tccaagttagcgtgcatcagcaagatagcagaagcaggaagagatatggccaagagacacattccacctgaagactgagagggaggctgtccggtaccatgtaacagttgtgtcagactgggacacttcctttttacagaggactataaaacccctgccctgtccttacttggggctgatgccatttcaggcctcagcccacctgcaccgagatgctcattaaaacagtgtgttgctccacattgcctcatcttgtctgttggcacgctctcagggttcgaaccaatataagagccttgcaatccgcacctgcccaagctgatctgtcaacaaagaaaatactttcatgccgggcacg

SEQ ID NO: 422067 - DNA, 240 bp, Homo Sapiens
acagctttacctatgggtcagaacaccctcttgcactacttctagtaccctttaggccctctgctggctagcaccccttgggttgacagctagctattcttttcacatctcttgcctgtcaaatctgtttaagattctgcttcttaaactgtctgaattacgtgtctccgcagatttccctgtggccagctacctcccaaaccaaacacctatataagcccaccttggttgttgttcctg

SEQ ID NO: 422068 - DNA, 156 bp, Homo Sapiens
atcagacagtgctgtagtgttccttttccacttctgattttatttgggtcccctttcttcttctcttgattagtctagggtgtggtttagttctgttctgattttttatttgttttagagatggcatcttgcgatgttgcctaagctggactcaaa

SEQ ID NO: 422069 - DNA, 221 bp, Homo Sapiens
gggctcagctcagctttccatcctagctgagttttctgccgccctccgtcctgtgtccccgcacgatagatgggtggccggaggacgtcctcttagagagtcactagcctggggtctgattgcgtccctcgcctccccagatcccccaaggtctccttcctgtgccgtcatatctgcagttgttaggactgtctagacatgctttgttcaactaggtaatc

SEQ ID NO: 422070 - DNA, 131 bp, Homo Sapiens
tcgttacttactctgaacagagtgttacactgtggttgtatttgtaaattacgtttgcttctctatctattctgcctcctcttatctactatttatgtttttctatatacctcttcttattaccttgagac

SEQ ID NO: 422071 - DNA, 184 bp, Homo Sapiens
  misc_feature (86)..(139): n is a, c, g, or t
tgtgcgccagtctccaaggcccatttctcttcccttctgatcggctctggcctctcttgtggctttagtccagagaactgagaacnnnnnnnnnnnnnnnnnnnnnnnnnnnnnnnnnnnnnnnnnnnnnnnnnnnnnnggtatcttgcaagtctcaatttcctgcttcctctcaaattccaac

SEQ ID NO: 422072 - DNA, 340 bp, Homo Sapiens
cggcacgtcgcgcagttatagttacccctgtgaattaattcgacatacataattcaactgatgtaaaaaataagtaaataacttacttgtcatttttcttatgcagtctagtttctgagaatattttaaatttatctgctgtagcttttgatacttacttcctggtcacaaaagatttataacctttaattatcaattactcacactttaaaagtttcttatttctttgaaagattggaacagactatcaaatcatggctgttatgttcctttcttaaaattcaatgtagtcattacagaaactttctgcatttttagtattttttaagaataagctgac

SEQ ID NO: 422073 - DNA, 273 bp, Homo Sapiens
aatgacggctgtcgtctggttctctctggactgagggtcctcaaggaacattctacatctttctttcaacaacacacagggacacctgatacctgcctgcactgtgcccatccagggatggactctcggactgacgttccagtggggagacagatgatgaacacagagatgaataaactatcgagatcattgcagaattatatgtgctttggagaaaattaaataagtggggtagagagaatcctgcacgtgtggttggggcagaaggtctgc

SEQ ID NO: 422074 - DNA, 131 bp, Homo Sapiens
gccagattccaggtactaggcgctgtggttaagggtctgtacctcgcattacatgctgttgtgaactctgcttcctccggagtactttcagctggcttaaacttcaggggtacttggtggcgctcgtgcct

SEQ ID NO: 422075 - DNA, 213 bp, Homo Sapiens
  misc_feature (128)..(171): n is a, c, g, or t
cccaagtccgtagcagtcaattcctaacctattgtcaaatccatttctctgtacaccactccccatatacaccactccagggaaactgaactattctttcttatctgaatatactcttcacttcagannnnnnnnnnnnnnnnnnnnnnnnnnnnnnnnnnnnnnnnnnnngggaaagggttctcaagggcccccaaggtggaggtgcagggg

SEQ ID NO: 422076 - DNA, 407 bp, Homo Sapiens
ggcacgagcgcccaagtcactattattacaaatgtttgaaaacagtgatagaaagtatgtctgtatgaggggtatacttagtctgcagcatcctgtgtaaggatccccgacggaaacagcatttcctctgagctctggaaagtgtagtaggtttaaatcaggcaccaggggagaggaagagctttcctagcagcatgtgcaaaggctccatggcaggaatggagcctggacacatatgtgagtcactaataaggaataagatgcaactaaacagaggaagtgagaggtggtgttttatgaaatggtctcagggaggttggcaggaagtggaccatgaagaggctagaggccattgcagggagctggctctgtatactttaaaaaacatgggtccaggcttggtggct

SEQ ID NO: 422077 - DNA, 378 bp, Homo Sapiens
cacgagcgcccagtactattgcttttgcagatgagaagcaccttagagcaaaccagaggttgagagattcttgctaagtaatttttatgcatcagtcaattgttaatctggactacatgtagaatttcattgttaaactgcatatagatttttctttgcactcctctgacttcttgcctctttcctacattctcttgcttcttatcttctcattcctcagttcctgtccaggctgtcctcatcccactcaccatgacgtgtcccacaggcatctccacagccatactccattcatgtatttctattaaagtgctgtcaaatcaactcccagttttctttgatattaccccagaatctctttcaaataaaagttatgta

SEQ ID NO: 422078 - DNA, 168 bp, Homo Sapiens
acgagcgcccaagtaacagcgacttctacagagtgcccatagatcatgtcatggtccagctttaataagtggtctggcttattccaagaagggattttagagtatccagactacaagtttaggtacagaataatctgtgaacatcctgacacttggggcgctcgtgcc

SEQ ID NO: 422079 - DNA, 120 bp, Homo Sapiens
cacgagcgcccaagtggcggaagctcttgtagaggctgatgtcttctttcacggcagttggcgcattagtactgccaccaccaggccgctacacgtcgatcatgccagccactgatccac

SEQ ID NO: 422080 - DNA, 112 bp, Homo Sapiens
cacgagcgccagtaccccctgtaatttagccagctgaaagtactccggagagaagcggagttcacaacaacatcattatgcgaggtacagccctttaccacagcgcctagag

SEQ ID NO: 422081 - DNA, 364 bp, Homo Sapiens
aacatttggtgctcaatgtggcaacaatgagagctaccatctgaaacaaacatatggcacaggagacgatgaaaactttcgtatttaccatggctgatttgagctgtcactgagctgcagctgtctttagatggcagctatgcacggccaaaagtatgctttagcatttttaaaccacagtatctgagtttaataagaaaatggatccatctggggatcaacataggctttccaggaactcatattgcataagtcaggatcaagtcttgaatggagatagaaattcctttcctggggtcacaagaagctttctaaggggctctatactgcaacggcagctggattttgcatgaactgtagaacc

SEQ ID NO: 422082 - DNA, 282 bp, Homo Sapiens
aaggtgacctttacatgacccccccactcggagaggtcccctgaccccaggaggtctggcaatgagcgtcatcaattgagacaggtgactctgggctcttagcttctggggggcccttgccacccactggggaggtcttttggaaatctcactccctgtccacacatcctcgcgcctcgctcgctctgatcctaagcccggccacacacctgtgaccaggatgaccgtgctcctgggcggcagcactgatttgaaatgggagggtcttggaaacccagacgt

SEQ ID NO: 422083 - DNA, 290 bp, Homo Sapiens
cggcgtcagcttctgactattctaccataaaatacctctcaagtccttctcttttctgcatttctatgacctctgagatcaaatcacctgcaaagaaccaccaggattatagctactgcctcctaattgttcccccggaatccagtcttactttcatgctaacatgctactgccatagttacttttctaaagttacttttacaaaagtcaattgaatatttcatttcctaaattaaaagccctccctgttcacaatctagcccaaccaacctcccagccctaggccccca

SEQ ID NO: 422084 - DNA, 106 bp, Homo Sapiens
ttctagtccctttacagttttccaggaacccttggtgactgcaatgtccttgtgagataagcaggttggagactgctaaccccatttaagagttgaggaaggcccg

SEQ ID NO: 422085 - DNA, 325 bp, Homo Sapiens
  misc_feature (213)..(213): n is a, c, g, or t
tggggaagctcattaaaggcactaatgagcgctccctttcatcgcaggcactgtcttgacatctccatagatgtctctgcaatgatgggcccctccctgtgtactgcctgggagagcagccagggcgaacctgcaatgggggctgagctctgtgaacaaaagaagcctcccttctgaaaggcaagcccaagttgaagtcatcagacagagatnactgagctacgggccctcaaggctacactggagcaggtctgaggccagcccagactcttgtcattagaacagtctgcaagacatatggctggcattttgctgaccaagcccc

SEQ ID NO: 422086 - DNA, 319 bp, Homo Sapiens
accggtgacagcttcctgactctaagaactagaaggtggctcaggctgcccatcctgaggcctcgtcttcctcccatcccaatcagccctctactactcctctccgtaccggtgcactttccttgtggcagctgcaactatgggctctgtttgggtgtctgccatagaatccagtatgcatcaggtacctaataagtgctgagggtagtgaggctcctgagcagccgggtgagtgacccatggccctgcctgccccacagtgagcaccctccctgccctccaggaacatacagactcgttaggaagctggaactgacct

SEQ ID NO: 422087 - DNA, 301 bp, Homo Sapiens
ggtgttccagctttcctgattggtttttgtccaatttgcttttctttcatatctgaaacctagctgcttacttggcttttcaatttcagtagttaggattctgattttgtctactctagcctttgtctttttaggtctgtcatgatgtctagtcttgttgctatgattcataggtgcataaaggctttaatttgtttagtttttaaaagacaggttagcatggtgtgcactgtgcatatctttatccaagacttctcggatcatccaatttgctgagctaaaattttagatatgcaaaatt

SEQ ID NO: 422088 - DNA, 111 bp, Homo Sapiens
gccccatcaggaggtggacactcggtttgccctgtgccccatcaggaggtggacactcggtttatcctgagccccatcaggaggtggacactcggtttgccctgtgcccca

SEQ ID NO: 422089 - DNA, 154 bp, Homo Sapiens
catgaggtactggttcgcagtgtttgtcactccagcctctatgtctgcatagtataatgctccagtggattttaatcttcctgctttctgcaaagttaaactgcttagactaactcttacgtgctttgtgcttaatacgaaattttagcatgag

SEQ ID NO: 422090 - DNA, 144 bp, Homo Sapiens
ctactgccaggtggggtggtcacgtgatgtgtgttctgcatcccccactggcttctgagcgcgacctccattgtgtgttcacctctatgcctcagggaacgtgactggccccgtggacacaagggctgggttgaggggctgtcc

SEQ ID NO: 422091 - DNA, 421 bp, Homo Sapiens
ccgacagtcctgacatgctcctgatctccttcccctgccccaccctctccttgatcatcttcctctgcagtggtgtttctcaacctcagcactactgacattcggagctggataattctttggggtgaggtctgtcctgtgcattttaggatgttgagtagcaaccctggcctctacccactagaagctggtaggtagcatgtcctcctcccctacttgtgacaaccaaaaatgtctccagagttgtcaaatgcccccaaaggtgcaaaatgggtgcgaaccatggctctagagataacttttaaaaacaacagtgacaacaacaaaatttctgttcttagaatttctgtctctgcttattttacaggatgaggttaccctcccatattcgcccttggttaggcatcttttccccacccct

SEQ ID NO: 422092 - DNA, 122 bp, Homo Sapiens
gggtcgacagcttcctgatgtgtcattagctgcactttgttacatgccaaagataatacttaagtccatccagttagagtaacaagaaccaaatgaatggatgagtgtagaattccaccact

SEQ ID NO: 422093 - DNA, 182 bp, Homo Sapiens
agaaagaatgggaaacctttgcaattcacagattcgcagttcctggtttcaaacacttgccttgatgtatgttacttatacttctcagttaaaacctctaccttcggggctagcactgtatgttcaattatatgcattctttacctttccttatcgtctctttttattactgcacaacaatt

SEQ ID NO: 422094 - DNA, 122 bp, Homo Sapiens
ccatcaggggacagatgagagggggctgctcctttttggagaatggaccttatggaggcagtatgaggagagtaactcctcaaagagaagacacccttgggttgggcctgctttttttaata

SEQ ID NO: 422095 - DNA, 202 bp, Homo Sapiens
gcaccggcccgtctcgcccgccgcgccgtggaggtggcgcacgagcgcacgtgttcggacccggatgatggtgatctatgcctgcgcagggtcgaagcctgagcctgctcctggtggatgtccgtagcggtcctgacgtgccagtcggtcgtccgacctgggtatcggggcgagtcgactcttcgagcctgtctagtagctg

SEQ ID NO: 422096 - DNA, 175 bp, Homo Sapiens
cagcttcatgaaataagatctgcacaaagccttggccctggtgaaatgtctgaaagagaagtctattgactacttaatctacactacagttaaaggaacacccatatgcagagatgagaaagaaccaatacaagaactccagtaactcaagaactccagtaaatggccagagtgt

SEQ ID NO: 422097 - DNA, 182 bp, Homo Sapiens
tcaggtctgcggttgatgaagacagccgttgttaccaagaagcaaaacctggcagattgtcctagcgtcaggattagttggtcattctctgcgtcttctccatgactggtgacacagggtggtcttataagattcctattccagcctctggctccccgatatttcctctggtgcatggggca

SEQ ID NO: 422098 - DNA, 156 bp, Homo Sapiens
cctctcagcgagggagatcagagaggactcagaggtgaaactatgccttttgacatgacattccttccttcaaaacacttttcctaagaaaattaagaaggcaaggacaagggacccagaatcctccctaaagccagacaataattaaatgagagc

SEQ ID NO: 422099 - DNA, 445 bp, Homo Sapiens
gtcgacagcttctgagcattaaactatagaagttgcacctacatctagcagaattcatgccccacccataggcctattcttgtggccttctgttagtcttacatacgtggtttttggttcctaagcaaagaggaggttagttttagagagggactcttatcatccttgcttttaagttaaaccagaaactaaatttgcctccaagttactttggcctacgcccaggaaagaacaagaacagcttggaaatcagaagcaagattaagtgaactatgtcagatttctctgagtgtcataattttgtaaaggtagattcagggccattaacctatgcccctttcaggcagaatggaccctctgtgactaactgaggtgctcaaagttaaaatagaatcaggtatcccttggctgggtccagaagctggtcgaccggtcgaccagcttc

SEQ ID NO: 422100 - DNA, 100 bp, Homo Sapiens
cccataagcaaacccatctagtcccttctcctccagaagccctaaggatttgctttattttgttctcctctagagtgggggcccctgaggaagatgtaca

SEQ ID NO: 422101 - DNA, 160 bp, Homo Sapiens
acaggtcgacagcttcctgatcttttacacaccacagctcagatgagaggattctttcccagggagagcaagagaatcaggaaatgaggctggagaaagagaggggctaggtcatggagggtctcacattagagtgtggaaacttcacacgagtggtccc

SEQ ID NO: 422102 - DNA, 373 bp, Homo Sapiens
agtgcgagctagttaccagacagcactagatcttcatgactttgtcagagtgcttcaccttggagaataatgagatgatgctggtatgtagacatgctaaggaggtcttccttgcctcacagtcctgatcaatatggaggcttttatgtagttctgtttgcgttcattcttccaatgcaaagctggagtttacctagtgggataagatttgattttcatccttgagaatgagttgttcttcaggctggcccatgagtcttcatcctgtcagcattctgattacatttctcattatcattctcctgcagtgattcatgagtatgataaaaccgaacagccttctcagtaaataagcaaagcttagcttacgggg

SEQ ID NO: 422103 - DNA, 365 bp, Homo Sapiens
  misc_feature (289)..(289): n is a, c, g, or t
  misc_feature (348)..(348): n is a, c, g, or t
cacgaatcagcaaccatctgagagttagcgttctccctacagatctctgcacatggaccccccggtagtcagaatgatgagaacagactcaattcgatgcttatgaaggaggggcaatggaggacatacactctacgtgagaacaatcacaacggggcatggagtgactcctgtgtagccagctttagggaaggcctcactctcctcaaactccaattcacctttataactgccaactgttctcatcacacatcagcacctactgatgtccctcctgctccctcagggnctctgaggacagagttctcaagctgccacccggtgcacccgcagtggtccgtgaggaancagaggacggaaagggt

SEQ ID NO: 422104 - DNA, 166 bp, Homo Sapiens
  misc_feature (85)..(85): n is a, c, g, or t
  misc_feature (117)..(117): n is a, c, g, or t
  misc_feature (130)..(130): n is a, c, g, or t
taggcactatccttaaggccaaacagaaaagagtacgcttcctccaaaggaaaagacacttccacctagaatggagggggactanagaaagcaggtggaggacagcttggtgcctangggtaacttttangggcacccaagtataaagatgcaaaggaggaaaggc

SEQ ID NO: 422105 - DNA, 374 bp, Homo Sapiens
tttttcggagtgcgtggggggatgtggatgtggaagcccttagctggccgaattaaggggctctcgcttgtaatggactggttttgctctttctttggtgttgtcttaaaatagagaggaagcgtgcgtctgtggtttctatagaaatgcgtctgaggcacaggggacacttccctgcttctcagagtgcccgagcaccatgaagcctgggagcacagcctgagagccgcgcactgtccgaggctggcctcctccccgcagctgttaggggtgcgtctgtagtttgcctgtcccccatctctccttcggcttcttctgctgatctcacctcctctgtcctggcttgcatcacttctcagcttccccgactgtgt

SEQ ID NO: 422106 - DNA, 407 bp, Homo Sapiens
  misc_feature (284)..(284): n is a, c, g, or t
gggagtgcgtgcgctgagaagtgtatgtagatcattgtcatttcttctacactcatactaattgggggaaaggatctattatttgggtgaaaatattgagtgtattagagcaaggacagtgagtttctactgatggcactgttgtaggtatatattgaacatggaatatatggttaaaacagacatagtgctcaatattcatatattaatagtggtgctcttttctcacaaatttgttctattctaggcttcaccttcttaaaactattgtttgatgctattgncatggtgtgtactttccttcttttagcaccattgctagggagttggagaaaaagtgttgtttgagaaagtcacatgagaaataatccacgttcttggggattgatatggtttcactttttgtc

SEQ ID NO: 422107 - DNA, 315 bp, Homo Sapiens
aacagtacatcactgggcacatggcatagctaatcaatgattacttgctaaataattcattgatctgcatttattgccaacaatatcttctggaccattttcttttccttcttttagcacttcacattgtttgttcaatctgacctgcttccaaaatcttcttttgaaagttctgtatgctatgacattaacaatatgggctaaattatcccacacagattttattataaaatgcacctagctgctgacatctaatgaagctagcagtacccacacttcctttctctctagcactgaactccagttaattgacct

SEQ ID NO: 422108 - DNA, 272 bp, Homo Sapiens
cttatgagatctccctacctcctccagaataaagggtctatccaagatcgattctcatttcacccttgcacccaactcatttcacagcgtcatggtgacaatgatgagaaacactgagcctggctgcatctcaattagaaccctactggaatgccattggccaccaggtctggaatcgtggggagagagctataatagtacagctggtgacagcaatggcagccagagccaggcatgttctataatagctctctccccacgactccgaaaag

SEQ ID NO: 422109 - DNA, 185 bp, Homo Sapiens
  misc_feature (155)..(155): n is a, c, g, or t
gaaagaattaataacatattattgagtaaaaatagcaagttacaaaacagcctgcagcctgtagtgtggccacgtttgtaacatcagtatatctgtttgtgtgtctaggtgtggacataaagagatatctagaagacactcaaaagtttcaacanatgattgcctgaaagtgatttgtgctggga

SEQ ID NO: 422110 - DNA, 190 bp, Homo Sapiens
  misc_feature (30)..(30): n is a, c, g, or t
  misc_feature (175)..(175): n is a, c, g, or t
cctaagatcatttggctgcaagtaacaggnaccaatgtcagccaagttaagtagaaaaggggatttattggaggaatataagcgtgtctcatggattccaaaaaaagttgacagccaagccttgggaaaactgggaagcaagcaaggcagccctgtggacccccagtggaagaancgtttcccaaccttc

SEQ ID NO: 422111 - DNA, 131 bp, Homo Sapiens
cgctattcgggtgcgtgggatacgcccccctgtagattcctgtgcaggacagcttctatccctgtcacttaacaatggagaggatcttccccagcttccttccagaggacacaaaagctcagagctccact

SEQ ID NO: 422112 - DNA, 120 bp, Homo Sapiens
ttcttacccaggctctatacttcaggtcatcttagagtcccttctcctttttcacttattcccaatgttctcaattcttccaaaaagtctctggtatctacccacgtcattcctttcact

SEQ ID NO: 422113 - DNA, 271 bp, Homo Sapiens
tgtatgtactctgttgagatcacagcactgcgttggacaaggcgaagagatgggggcacacctggaggatacagccctgattgagggaagggatgtgggaaacagccagtgaggggtgacgtgaaggacaagggagggaaaggaggctgtcattggtggtctcagcccagcagagtgcaggcaggctgggaactggggggccactgaggcctctgctggaaccaactggtgagcccgtaaaggaggaggcccccacccttaggggccaggc

SEQ ID NO: 422114 - DNA, 169 bp, Homo Sapiens
tacagctctaaaccatcaatgtgctcaaggtactgcctgatacctatttggaaggccagtagggaagccttgagagagcctgtgggagatgcaccaatgagtgtagcggacagggctccccgtatgccttcacgtccatgtatagctctccatgaggatctgcgaggag

SEQ ID NO: 422115 - DNA, 209 bp, Homo Sapiens
gcggcgggtgatcccgtgaagctgcagcactgaagctgccagcatctcatactatttctctggcctgaggcgaggcccctcagcaggaaggggcccttggttggggccataggagcccgtccccccatcacagcactccccccgggaagtttctgagtttccctttgcggtgggttcagcgtaacttagcgaatggcaacaggtgtcac

SEQ ID NO: 422116 - DNA, 388 bp, Homo Sapiens
  misc_feature (45)..(160): n is a, c, g, or t
aatcccgtcgaatcacgtccccatgctgctacaagctgtgccctnnnnnnnnnnnnnnnnnnnnnnnnnnnnnnnnnnnnnnnnnnnnnnnnnnnnnnnnnnnnnnnnnnnnnnnnnnnnnnnnnnnnnnnnnnnnnnnnnnnnnnnnnnnnnnnnnnnncagatgcacttcctctgggtgtcaagcagcacagctctccccctgccccgccagggtgtggaggctgggcggttgcccccgtaccaagggtggagggagcggccaggccatcctgcctgtccctgtggggtggccttccactgttgagggtttaactggacatagtcctgcacacaaagacggggcaggcggtgcttactgaaccgtgatttttaacagcggcatctt

SEQ ID NO: 422117 - DNA, 327 bp, Homo Sapiens
tttagaggaacccgccaaacatgagccacagcttttttggtaatttagacatactattgctgcttaatcaatccttatgcttggacaggtaaattgtttctatcctttcaattattttttaaaagactgcgatgagcatctttgttcataaagctctttatcattattattttggtatttagattgcttccttgagatagattcctagaacgggaataaaatcatatgtatacaagtgtctttctcagctctgttttcaagaggagcttttgtagagagcatagataattgacagcctccagctgctatacctgtggctctgttccc

SEQ ID NO: 422118 - DNA, 204 bp, Homo Sapiens
caagttcattaaaccgacgggagagcaagcaacagcaggaaattttcacaatcctggggtctcacagacagctgcttccacttgtgtggagtgacctacgtgaaactgctcccttcctgagagcaggacacccacagcaggaccgcaggagcccgacattgtcagtagctgtggatgccgcttccctcgcacccagtgtgcacc

SEQ ID NO: 422119 - DNA, 369 bp, Homo Sapiens
caggggttagcactacagtgtgaaaccatttccagaaatggggcatgatattttcctgtttgcagtgtcacagtttatctcactattatcatatcttgctgtttccagtgaacatgtaatacatacatttgattcgattttctgactagacaagttttctagttaagagttactgctaggtcaaaggctatgaacctttttagggatcttgagatgtttagtcatcacatgggcacgtgactctcgattgtgacgtgggcactgttggaacttggatttccaaggtgatcttccaagggggcacaggacactcagccttcccctgtgaggagggtggggagtgcagggagggtctgggttgggtcaagt

SEQ ID NO: 422120 - DNA, 157 bp, Homo Sapiens
  misc_feature (38)..(38): n is a, c, g, or t
  misc_feature (133)..(133): n is a, c, g, or t
gtatctagagatccgactcacagttcacctgagtgcangctagcgctcctttggattttcagctgtactaacttttgcttagctgtgaggaatcaaggattttgcttttgcagggcggaatttttaacctggntaaactaaacttcgcttgctttga

SEQ ID NO: 422121 - DNA, 225 bp, Homo Sapiens
ctctctgtatacatacccacttctgtcagagctcatactgtgccccccatctgagggaatcctctgtaagagcatcacttttccgcgttatccatgggccaggcagtgcttggtgctggcagggctcaagcagtgtgctattggaaaggcagaggcatcccctggagcagggttgaccagcagaactctcttgatgattaaaaacttttctccaggacctatgcc

SEQ ID NO: 422122 - DNA, 159 bp, Homo Sapiens
  misc_feature (116)..(116): n is a, c, g, or t
  misc_feature (120)..(120): n is a, c, g, or t
agtggaggagggtaagagagcaagtgtgcgtcatatcggtggggtctatttataccgggttcaggactgggggattgccaactcccctgggctgcaccctacactgctctacaggncccnacctgcctgtagccctcagtatttcactcaaccagctca

SEQ ID NO: 422123 - DNA, 310 bp, Homo Sapiens
ctggggcacttgagtttggaagggattgttaggaggttcatgtccctcttctttccagggctgttttctagggtgtctgtttcctgaaacccttgacagccaggttcagaggaaaggagtgagagctgaaggaagagacagagagaagggatatagcaagagacagacagggagaacctgtaagagacagagaccaagagaggcaggagatccagagtcacagatacaaagacccaggaagacaaatagatggactcagagagattcccagtggaggggagaggctgagagcagtagacagtggggtacc

SEQ ID NO: 422124 - DNA, 125 bp, Homo Sapiens
aactcaaaaggttattaacattggtgaagatgatcctgtctatcagcattgattgaggggctgtgggagtgactctgagaggtattccagtacctcgtcttcctactcatgttcataggctgttg

SEQ ID NO: 422125 - DNA, 237 bp, Homo Sapiens
ggcggtacgaggggcgtcaaggtcaccaagctggagagtggctaaatggaacccagaagccaatttcctgagaatttatgccagccccttccacagaccctgagtgaaaacctgaagcccagggaggtcacatgcagggcccgtgctctctgcaatagcctcccctcagtgccagcgcaaccccagttgtggcctgggcaatcaggcccagagttccagccccggcttgccgagatg

SEQ ID NO: 422126 - DNA, 302 bp, Homo Sapiens
cataatgtgatcagacctacagctggtggctgggctatgggaggggctggcatgaagtcacgggccaccatcccctaagtgtttccataggcaaggttctcattcccctagtcaggcgaggggacgggtacagagaatgcgcagcaatgagccaggaacagagctgagatgaaacctcagcctcccgtcttcagaatgagaattaatccacagaggagctaaggaacatgccgggcaccgagttgccgggtgaggggtgtgagccatgtggccggcatggccgccccaccccaacttgaact

SEQ ID NO: 422127 - DNA, 107 bp, Homo Sapiens
acagtatccccagacagattcacttaaaaaaacaactatttctatctaattgaggctttttaatctttgattgtcatccccctatttaccctaccccaacttgaact

SEQ ID NO: 422128 - DNA, 219 bp, Homo Sapiens
taaggatcccagttcagttggggtggggaaggggtgtcaggtgggtactgcagatgggctctaggacctcggccttcaagttgtgtctgcccgcctcttgctactgtcttggatattttaaagtccttttgacgttgttctgatttctgggcaggggacagagtaagtgtgtatttgctctgagactgttaatttggtattcccaccccaagttgaact

SEQ ID NO: 422129 - DNA, 200 bp, Homo Sapiens
atggtgtagcagggcagttctgctccgggaatcgtgcgtcctgagtttgactcctggctctactccttacttggaaggaaagagtcttgggcctgggctacttggaagttagggtcatttaactatgctgcagctcaggctccccaaattaaaactaagtggataccatctgcccgggtgtacccaccccaacttgaact

SEQ ID NO: 422130 - DNA, 236 bp, Homo Sapiens
  misc_feature (117)..(148): n is a, c, g, or t
aggtcaagttggggtggggcaggagggagcagtctgggtgggggccaggatcagagctgccaggtgagactgagttgtggtctgctctggggcatggcagactctcagaccatctcnnnnnnnnnnnnnnnnnnnnnnnnnnnnnnnncaaaagagttgaattagagatgacctctaagataccttttggacataacataccagcatcttatgactcaacccaccccaattgaact

SEQ ID NO: 422131 - DNA, 439 bp, Homo Sapiens
agtcaagttggggtggggcaggacatgagctcagagctcagagaggtgggctgggccggggtctgcacccagcaggccgggagaggcctgagcattttattctgcatgagctgggaagccacggtctgacttaggttcaatgaccaccccatctttctgtctttctagcatggacgagcactttcaggcgtgggcgtggacccttctgtgcccagcccatgcctcacacatgggtgactctcgggtttgttaagtaagtgccagaggaagcagaccctcactgggcaggcagcgaatgaaaggaagctctccatcccacccctcatctgccttatatggcttctctctcaggcctcgctccaggtctatgaggaaaggcgttgcatcatgatgattttgttgtttctattttagcatttctaaagttgaggtacaatat

SEQ ID NO: 422132 - DNA, 177 bp, Homo Sapiens
cccctccaggcaggccctaggtcagcaaacatatcatagggcctctggttctccttcagtctcaaaaaatgtttctgggctgagtacccacccaccctaagcagcgcctctcaccctcaatacctatctattcccacccctaacttgtaactggggtaccgtagctcgtaatttcgt

SEQ ID NO: 422133 - DNA, 198 bp, Homo Sapiens
ggatcttagtgtcacctttatgcaaggggctgaatgctatcaggatgagttctgtgacatcctgaatgtgccagagcaggcagtttgagaggaacagactgaggaaatacttgtttacattaagttactaaggcaggaatacccactctcctgtgtgccaagcaagccagtgggcagcaaccccccccaacttgaact

SEQ ID NO: 422134 - DNA, 110 bp, Homo Sapiens
agagcattgtacacatttttacagtgttcctgccctcctgagacagctgtggatcttgcttccccaggggatcaggatccatgattcccacacccaatcttgcaactgga

SEQ ID NO: 422135 - DNA, 145 bp, Homo Sapiens
ggccttgcatctaaagctggagccaggcggaaaatgaggtctccactggcaggctaggttgcctgcttagtggggagtggcgcagatgctggccctgatggggctccttcccccggtgagagcctggatgggtctgcaggcccca

SEQ ID NO: 422136 - DNA, 167 bp, Homo Sapiens
gatacagaaggtgtaaaggagtggggaaaagccagtccatcacaagtggggaatagtgcagagatgcagaaagaaacagcctatcaccagcaggaaggactggacaaagaaactgacccttagcctaaagaagccagggtaccaactgtcccaccccaacttgaact

SEQ ID NO: 422137 - DNA, 208 bp, Homo Sapiens
tagaatctagaggatcccagttcaagttggggtgggtatagcaaatccacatttgagtaagaaaaacatgatttctgcaacttgaaagaaccttcatcattctttcactctctgggctgactgagagaatttcttgggtcccctatttgggtcctatggagggatcagacttttctagttgagatctggtcccaccccaacttgaact

SEQ ID NO: 422138 - DNA, 285 bp, Homo Sapiens
gtggtatctgtatggtaggtatgggagcagagtcctgggctgatgctcaggcgtggcactgccagcagctaggcctatgggtctagaaaggctgattagagataagggactgaagtactcccaggtccttttaggtgagggatactctcaggactgggttgggtcagccagtcagaaagtagccttcctaggagctttacattggacagctgctgccccaccgatacatcttggcacacaagagttaggccactgtatctgtcctgtcccaccgcaacttgaact

SEQ ID NO: 422139 - DNA, 197 bp, Homo Sapiens
agttcagtgtggggtcaggcacgcaggtcaccgtctgccctaaccccacactgaacccttcaattagggaccaggctccggggccgcagtgcagtgcggttcggccccagcaggcggcagcagagaccacggccccagaccagcagctccaccactggtgccccgatgttcagaccgcgcccaccccaacttgaact

SEQ ID NO: 422140 - DNA, 199 bp, Homo Sapiens
cccccgttcatttctgccgggaatgactaccttcccatagaactcccagcctgacaggctgggtggggagtgggcagactggcaaacaggcccagtgaatgttggtggtgaccggaggtgagtgggcaagaataggaccctgtgcgaacaggagattcaacctcatgaatgttcagataccctccctcctcgtgccgaa

SEQ ID NO: 422141 - DNA, 335 bp, Homo Sapiens
gataaagtgagactacctctatgatgtgcgaaggatactgaggagaggaatagatgggtctgcaatacttgtacctttagacgtactcattccttcttccaccaaacagtaaagaaaataaaactagaaaatgtatgaagagaatactttcgaagtttaaaaatgagatgacaatgttaaagggtggtacacttaaaaacttccaacttaatggcacttaaccttcataacctttcttaacccttcccttcacaactctacctatccctttcatcccaaagtgagtcaggcctctttctcagtcttatccttcctaggatacagtagggagaggg

SEQ ID NO: 422142 - DNA, 128 bp, Homo Sapiens
taaatggcttgctggttataacacttcattgacctttaatagcgagctgggactaattcttgctggagctaagggacgacataagtaggagaatgagatacagtttgtgtctgagaacaacattctgg

SEQ ID NO: 422143 - DNA, 428 bp, Homo Sapiens
tatgggtattcaaggcactaagttatgtctatgaatgacaagtaccccaaagtgttctgtttgatattcttcacactttttagttggctaatcaatataaatgctgcgctcagcaaattctaagcaaatagggtgaacgatttactagatttagaagttgattttcatacaacatttgtacctatgcctactgaggcctatgaatcattgacaaactcttgggtaaactatatctataaattccgactctccccacactttgaaagaatgtctctatacgctttcttgcaagctattgcaaagctgacattgcttcgatcggcataataccagagctggctgctggcattttcaagtctgtttaccagaagaaccacccgtgtgtgtccagtcgtctcccccacaagtatgtgagtgctgtgtgggcc

SEQ ID NO: 422144 - DNA, 408 bp, Homo Sapiens
gaggatccctgtccctagtgtatcctagtaatatgagctataaaagtccatcctagggagggcctgccataccagagatgtattaatgaatccatcttacggaggacaaaactaaggctgagtggttcgtaatactgggatatgactcaaccttgtcacaacaccaaagccagtgctcttccctccaccatgctgcctcaggttacaagacacactaacaccatcgtgtagggagagatgagcttccagggctctgacatatattagacactgatgaagagattccaaagtgagctgaaactaaagatgacagcgttagggtttctagaactctcttcccacttctcaagctcgcccttaactgtatatcccatgatgttgtatttttactttaaaagaggcaattca

SEQ ID NO: 422145 - DNA, 448 bp, Homo Sapiens
tgtccgtagggtgtctacggacggtgataaatcaaacgtcatccgactatagaatcaagttcctttggcttcaggtggcagaaaacgtatggagcaactcaaaaaggtggtgcattcgtaatctagaatgagccagcaaccccctggtgccactctatgatgcagagctttcgagacagtataactgttgagatgtgttacttccactcattggtccttacccccaaacacaggcatcctggcaggacaaatgaaagttgtttgcagcaaactgaaagagtaacagccaatatcagcgtcatccctatggggcaattgctacattggagcctgatacatgaaaaatgcaatggatgcactttaggctcaagatgagagaaggaaatggcttgagaccccactatgaggtggcacactatgtttaacagctccagaccctctcatcata

SEQ ID NO: 422146 - DNA, 344 bp, Homo Sapiens
aaacatgaacaactgacctgatccagagcagatgggttaggggagtcatgctaatttaatgctgattacttgagagatgtacagtttacacattatttgaatcagaacttcataaaatatacctcaattaaaactactagaaaatattcatttgggtatggtggttcagaaagcactttgagtacttggaatacttcattatcaagtatcaactgaacataaatgttcactgaagcttacctttatcattgcagaaagagcagtcaatgaggctgagtctgtgctgcttctatgttgagacctgcctgccaaaatctacagagacccctccctgacctgttctc

SEQ ID NO: 422147 - DNA, 141 bp, Homo Sapiens
gtggtctcatgtactcccacggcttcggataccatgtatttattgacaacagtgaaacttatgtctccagtgtacatgagtcctgaacctcaaaccccaatgatatctccaataggatacagtagggagagggtaccgagc

SEQ ID NO: 422148 - DNA, 131 bp, Homo Sapiens
gaaaaacagatgtggatagatatgaagaagaaagataacatagggaagaggacggatataaagctccaggggggcagatatacagggtcaaatacgggtaatcttggaaagcctcccggactagggtaaca

SEQ ID NO: 422149 - DNA, 344 bp, Homo Sapiens
cttccacagcctgagttcattgtcatatgcacacatcatggcctaatcctgcctacaactttacaaagagcatttccttcttttaactctaaattactcctttgggtgcatcatctgcttcctctgaagttctgatgaatacacagaacaaacatttagacctgccaatgttataatgttttcaagaatttaaaaccttcaagatcctgatagtatctaatattcatgtgattcatgccttccttaaaaacgagaatgagttactattaatatgattcatcaaaatcattttacctctaaaaaaccctaaataaacacagcaactcaactgctggggaagggag

SEQ ID NO: 422150 - DNA, 246 bp, Homo Sapiens
aaatctaactggaatacagctatatgcatggtaaatattgagaagctcagttagaagtactattgaatggactgtttaaggtattccacttaccacttaccatggccgtgctgatgttgagtttgctccctgtcattgtagccacaagtgatagaggcagggaataggacaatgacagggacatgaagcaccacccagagtcctcaagtgacattaatagtggttgggaatagctggtggaagaga

SEQ ID NO: 422151 - DNA, 310 bp, Homo Sapiens
catagaggatcccctatcatcagcagcagaaaactgaattctcttgtatgagttctactgcagtaatgttcccctcctgtctctgccacgcccccacttggggaaccttcagccaacagaacctcttagattacaaaatctctacacgaacattgcttctgcatcacaattgctcaaacttgaatgccaaagtagcatcgttgtgaagcgctttatttagacgacaggctgccctttgttcaaatgtacctctttcattcctggaatttattatgggtattacgtgctctttgccaatgctctaacaccc

SEQ ID NO: 422152 - DNA, 371 bp, Homo Sapiens
  misc_feature (278)..(314): n is a, c, g, or t
cttcacagtctcccttccaccagccatactggcccccttctgttccttgaacaaagctctcacctgtctcagggccttgatactggctgctctctctcagtggtatgttcttccccaaacctcccaagactggctctatgctacactcacttttcgcctccaaagtctctcttgaagaggtcttctggtcttttagaaccagtcagtttctagcattcatggaactatcttaaatctctgccatagctcttatcactctcagatgttctgctgggtannnnnnnnnnnnnnnnnnnnnnnnnnnnnnnnnnnnnggctaattgctgttggaaaacacttggaggaaaacaaaacccgaaaagcctggtgct

SEQ ID NO: 422153 - DNA, 218 bp, Homo Sapiens
ctcttcagtacagcagtcatagagggttttttcctcatccagaaatctactttttgggaaattttttgatctattggcaatcactctgagggcaaatattatgggtagtgattatactgatcccaactccactccactacctcactcaagtcagggataagggtaggtctttttatatactttagtggcaactataaagagaaagctggtggaaggga

SEQ ID NO: 422154 - DNA, 173 bp, Homo Sapiens
gggtcatagaccctgcttcttgatggaggaggacaaagttactttgcagaagagcatgttggatgaagttacttttgtagccattttgggaaaatacaacttgacatttagaaaggtgaagtcctgcagaaggtgtggctgtggaagggagaagggaggctggtggaagggag

SEQ ID NO: 422155 - DNA, 420 bp, Homo Sapiens
tagaggatcccctaggacaactgtgagtggcattagggtgggggacagaagacaccacaaaggggctgttcgtaactgggcttaacccttgatcctgtcaaattagtcccaactcccgcattcctcacagatgtaacattaaaagagttgagtgaaagttaacagaccatgtcctccctgagaacataccaggaaacagccacttctagaaagataggaagtaggagtgtggagaaaagcaatgcactccaagagctgcctgctgtcagtcagccttcacacttccacagcctagaccaagtaagggtccttagcaacccttcagtaaagcaagaacttgtcccatgggctggtggaagggactcccttccaccagcacattccgtcctgctcacacagaaacagctatatttattctac

SEQ ID NO: 422156 - DNA, 263 bp, Homo Sapiens
atcccttccacagccttcgaatgatgcgaaagacaagaagcttgtattgtgaagagaaagtacacacgtaagagagaagtgcaggcatgctcatgagaacaagtcacacacaaaggaatcttctattctaatgtgctcctctcaattagggggtggaataatcatgaggttttctaggaaaaaaaggtggtgatttcttagaattggggtggcacctatttttatgggcatgctcggatctgttgtggtgctggtggaaggga

SEQ ID NO: 422157 - DNA, 251 bp, Homo Sapiens
  misc_feature (99)..(206): n is a, c, g, or t
cccctcccgtacacagcaattatcacctgtattatatttagccacgacacacgacagcagatgtcatgtgtgcgacacacctccctgggcaaggagatnnnnnnnnnnnnnnnnnnnnnnnnnnnnnnnnnnnnnnnnnnnnnnnnnnnnnnnnnnnnnnnnnnnnnnnnnnnnnnnnnnnnnnnnnnnnnnnnnnnnnnnnnnnngtccccaccaccgtgaccagctccaatatttttttaattgtggtt

SEQ ID NO: 422158 - DNA, 192 bp, Homo Sapiens
tgctgcttcaatgttgcacttcgattcgatcgcgcgcacgccgctcttcagagaagagatcggtgccttcgcgacgagcgagtttgcattttggaccaatgtaacgagccattctttacaatctcctggattacacgcggcgcttcttcggcggacggcacccgttgtgcgggattggctggtggaagggag

SEQ ID NO: 422159 - DNA, 276 bp, Homo Sapiens
accgcgccttatgtgacacatcatacatacgctttccctgtctcaggaatgaaggatagctgtcaaaatattttgaactataaataattaatcataaatttcaactgatttgattttgcaattttaattattgagaacagtaagtaaaaaagagatagcttattcatgttaaagaatataatagacaaacctgtgctactctttcttcttctactaatcaatcacttactcaacaaaactgtaaaattcactaataatcttgcctttcacatttgg

SEQ ID NO: 422160 - DNA, 414 bp, Homo Sapiens
cttatttgcatgtgcaagatgccaaactaaaaattttaatatctctaacagattagcttttctggcacaaattcgttgaatcctatcacctttaaatggttttactaccagtttcaaaatttacaattttggggttgaagtgtgggccaagctaagagtacttccggtaagcctaaacacactcttaaatgtgacgatcacaaatgcagttctaatgtagcacttaaaggcttccatatttacccctaccgcgttttcccaacattacactatccacctggtacctcagtcttgtcatggacttaccggttcgcatgcgttccaaatactggtttatggtactgcttctggacctacttgtgccactatatttcggcgtgggcttggctagtgacgtacgttgcctgaagttcc

SEQ ID NO: 422161 - DNA, 657 bp, Homo Sapiens
  misc_feature (213)..(222): n is a, c, g, or t
tcttgttacccagaaactatcttaagataatttttaatgtctaatatggcttcctttctggacaattaagtcttgaggacatgaactcccttctatgctgcattagaaggagaggttattaaaatgtaataaatcattttccggtccctttgggagaaaactttttatggagccaattgcaacaagtttctgacagcttattctcgttagttnnnnnnnnnnttccaagaaatcactattaatgagaccatgtttcctacctatgactggaaaacacaactacccagtatgaaatgtttttgagttctctattcaatacacacagattttatactcttgtcacttggatatagtgtgatttttatgatttgggacctttttttccctcagacactagttctgtccatgataaccatgggaatatcttcaggcagagctcaggtaacaatatgagactgcatctttgcatcagggcctctgagaaatatatcaaaataaggacatctatatttgttttatttgattttgattcccttgaaagcagaatcatttaccagatgaaacctttatgctagagtgcttctatttaccaaatagacttaaggtttctagtgtaggatataggagaactcagctcgctggcattcacagctgtct

SEQ ID NO: 422162 - DNA, 333 bp, Homo Sapiens
  misc_feature (102)..(203): n is a, c, g, or t
ctttgactacttctcaggctcagacagaaaaaccgcaacccaagcttaggttgcactcagtaggcctgttgcttgtcatggtctgggtgccgccatgctgannnnnnnnnnnnnnnnnnnnnnnnnnnnnnnnnnnnnnnnnnnnnnnnnnnnnnnnnnnnnnnnnnnnnnnnnnnnnnnnnnnnnnnnnnnnnnnnnnnnnnacaagtagttcaaacagacacctctaattccagttacatccacagggctttcctttgccttcctcatcagtatttgtatctttcctctcactgtgagaggcctggctcccagtcatatcaatgttttttt

SEQ ID NO: 422163 - DNA, 431 bp, Homo Sapiens
tgaaatgcagttcactaaaaatgcaaggttttgtgcctgctgctgtaactgcagtgatggcctcatgaatttccttttcattctttacagtggtccttatgctggattcatttatcttaaaatggcaggcaactgcagctgcagacctcaatctatggttacattatatcaagcagttcaggtgtttcgtgtaatgtcacgacttttttctgcttcgtggaagcactttcagcatcactagtggcactttgtatgtgtcccatggtgttattcaaggtttacaatattgcactaaaaacaattaaaaatatgcaagaatcagaagagattactctttcctgtgatatgtaatttactggagagacagagataatgatctcaagcagagataattcacatcacatgttattttaagtggagacaacacttga

SEQ ID NO: 422164 - DNA, 410 bp, Homo Sapiens
ttatcaaactgacaaacgcttcttctggattgaacacaaacagcatgtaaaatgtcgttaagtggttcatattttaaaagcgtgagtgtaggccaagaaagaaatctccagctactgtttgcctgcttccatcagaatgatatgtttggcgcacagtgtgtattgtatatcagtcctgttgtttatgggaaataccattcctcacccatccacgttccccctgttactaggtcccagctactgccttacagagaaggtgatgtttcatatttgcttgcttgtatgtttgtattatacggaattattcttagcgatgttaaaaatgattctttcccatgcaaggaacttttagacacccaagtttacactctgcatttgcgataaaaggaagtaggaaagtggagcaggag

SEQ ID NO: 422165 - DNA, 409 bp, Homo Sapiens
actgcagattttaagatatatggggtgaggataatttgtatacagatcataactggtctcgtacttccaatcctcttccaatcctctctctgaggaaataccacaaacaagatggccctctctaggtatgtccagatggtgcatttgaaaaccctggttctcctcaggcctcccagggaaagagtaggttcaagatttcattctcttcggaaattttctgaaggactctgcttttcaaggccactgaacactctaagagacattgcacagtctgctagctgggtgtggttctgggaagacctgacaactcagtggaaatggaagtgcttctcaactttagaaagagagagcatgtggatttaactattcctagtactttcagctgggagagggctgctcttgtatccta

SEQ ID NO: 422166 - DNA, 528 bp, Homo Sapiens
acacaggctaacaagcagattagcaggtagcaggataacttgagtagactatgccatggtcagaagaacctggccctcagcccagaaggaatcataacacctagatcatgatagctcactgcaaaaggattgtctctcctaggtggacttatgtgaaccaagctcattatgactgctatgtattaatacaaatccaattatacagcccattgtaatacaatgagagctacatcgctaaaaccaaatggaaagctaaaatccgtgccgtatctagactgtcggtgagtaaacttatactaaccaggtgacaatctattactttacgattaggaattaccctgtgaagttgactgttctgactagcacgttggctgtctacagataccacaactaaggagccagataatggcatcgtactggacttcagaagtgtagctttgctaaaatagcttgatagactctgacccacagcagggatgaccttactgaggaacatggaagcattagcccagccaagatttcctctat

SEQ ID NO: 422167 - DNA, 308 bp, Homo Sapiens
gagtatgataaatcttcagacagaccatgtcatacgaagaacatatttaggaaggatccaaagtaaaacccaaaacttttattcagcatatactatgcatactgtcagcctataagacaaactcagcactgtgtgtaagttacttttcaaaatagactttgcatgcctgtatcagaacttatatgagatgcagcggcatacaactcaaaccacaccagcttaaagtaaaacataaatatgtaggctcacataactgataaagtccgagtagatttggcatatggcatgctgtcagcatctaatttacc

SEQ ID NO: 422168 - DNA, 426 bp, Homo Sapiens
tgtcatgcggcggccagaaaaggtccaggtgaggtagtccacagcatcctgcttgtctcaataggtcttggtagacaatctcagcattgatggtggatcgtgcatacaagtggtccaaggtagagattctactggacaatggctcatatatagaacttcgttgacagaaatccttcctatggagccctgacgacatgtatgacgacagcgcccctcgatcgtccatgcaagagggtcggttggtcgtggcccaccaatcgtgaagcacgtcactagataggggtaatccacatatagcgcgtggatcttgcctattagtagtactagagtatccactgattgattacccaggctgggcagccgacgttcactgccccgagcaagggacccacgtcgcgggtccctgacgctcgaatatcgtaatca

SEQ ID NO: 422169 - DNA, 284 bp, Homo Sapiens
cttatgcagtacgaagctttaataataatttcaggttatgggcaaacaagaggtatgagcaaagcagacagtctggcacatcaagggcagctccatgggtcttttctccccacctcatacatgtattctctgacccagaagctggaacgctatattctgaccccagcttcaaggctttttccattttgatgaagtgagtccctccctttaagtcttaaatcttgtataatactcaatgttacctcatctagtgtgttcagtactgtggtttaacttcagatcta

SEQ ID NO: 422170 - DNA, 320 bp, Homo Sapiens
acccccgagtgtgctgcatagttactagactatgatttctaaaacctatcatttacaaaaggaatatagaaaaatctttctgctaaaaacttgtgggggaggtgttcacctttgctaggtattattttatatcataattattaattattcaaagattcatattactatgtattaatttgtgtcaatcagtttgttcacattcacaatactgtatacgtaatacagtttccaatttctccaagtagattttgaaattttgttagtaacataatcaagaacctatatgacaatgttttagcattcttcgtgaatcaaatcag

SEQ ID NO: 422171 - DNA, 100 bp, Homo Sapiens
ccaggatcctcatttttaagaaggggataataagaattgactacctcagtcatattggggaagactgaactgatattttgtatgtatttctagagaagga

SEQ ID NO: 422172 - DNA, 360 bp, Homo Sapiens
cagcatcaaggtctataagagacgtggctgtcctggttctttcttctttgcactgagagacattgattaccaactatgtagattatttcctgacatgactctttctgggtttgtccttgacaaaaacatccaggaaacctgcagcaacatgactaattcaagcatgtacccactaagatctttgaagacatgcattatacacatacagagtctttagaacagactcataaattcagacagacacataattatgaaagcatatttaagtttaaattaactttcagcactaactagctatggcctatattactatttaaactttcctactccccagattgtggtatttaacttcagtttagt

SEQ ID NO: 422173 - DNA, 409 bp, Homo Sapiens
tctagaggacccccgagttggcctgctagaatgacagcaatcttggggcactcatggctgtgtccagctcctccaagggagcagaagaggaaccaacaggcagagaggagaagaccggaaagccagagagtgatcgggagagagaaacgcaggggctatttgtccctgacacagatgctgagttctgccagttcctcatgggcttctctcactggcaaccaaaggagtcttgactaaattaaataccacgctggctctggcgagagcggccagggagatggtggtgctatcatcaaaagaagcatcccaggaggaagaaaaaaagtttggaagcacatcgtgtcaacatatcccagtaaatgcatacagcaggcacttctacctaagcatatgaaccagatttcttatt

SEQ ID NO: 422174 - DNA, 246 bp, Homo Sapiens
cccagaagttgtggtatggccaagctaatctgagcctggtttaattaatatctggtaataaatgttctcttctccatttctgaaatactttggattatggctatctatacctgcctttaacgtttggaaactacctctcatagatggcaaattatgtggttagttattaaacttacttctgccctcagctctcacaaatttcgatttaagaccttttactccagcctggtgtgccaaataatttga

SEQ ID NO: 422175 - DNA, 308 bp, Homo Sapiens
  misc_feature (173)..(173): n is a, c, g, or t
  misc_feature (218)..(218): n is a, c, g, or t
  misc_feature (232)..(232): n is a, c, g, or t
gtccccgagtgtgctgctgctctaccttgtaaacaatctactggttattcattactaagaggaaaaggaaaggttcttgacatggttacaccttaaccaaggcgatccaaatcaccatcacaaatgacagaacaaatagacctcaggagtcccctagaagggatgtccttagngaggcacctcgagtcatgtggtgttcccagaccaaacatgttcanacatgagatccaantacggggaagcaatcagagagactccagaacatcggagacacagatatcaatcaagaggactggtttattattaca

SEQ ID NO: 422176 - DNA, 331 bp, Homo Sapiens
cgtcctgcatattaaaatctagttagtattagttttaaactctagtagcagagcctatatgaatatgagtctcttttgccattctacttaaatgtagtcaagtaaaatgtaccgagagtaactttggggggaaatgaagtatttctctaaaaaatgattatgataaatagacctataaaaagaaataaccatcacatcacagactgtactagtaacatgtctgcagtttgaagaggtcagaactattaatataatggagatatagcacttactttgtgttgaaaggcagagtatttcttctgtttcactaaagtagcctataggtaaaatg

SEQ ID NO: 422177 - DNA, 352 bp, Homo Sapiens
aaggatccccgagtggtccctgcgggtggtcagtggggaattttaagccaaggtctggctcagcaccaatgacaggaactggtctggcctgattgtagaaagggaggtcctatgacactttcacaacatcttcccgaagacagagagtgggtggccgcttccttatcctgccatggccgcctgcttctgttttaactctgagtgcatcaggtggccacagggagccccttttgtctgtcggctgggagcacacttaacaaagcttacattcaggaacacatgcccagtagaggtcggaggggtgcgatgttggaaatgagattaaataaatgcctacgtaatattcacagag

SEQ ID NO: 422178 - DNA, 351 bp, Homo Sapiens
cccccgagttgggtctgcattgacttcaggaatagtcactaaagcggagtgaatttctggatcttaacctcatgagagaggtcaatagacctcatttgtaatataccttatgtttgtagaatacctgtcaggtctttcagcaaacttttaatgtggcactttcatttcatagatttaagcatagaacatactgttcaggaatgtgtgcaaataaatgtctgagtggggtatctaacccaggctttttaatggattactctgggatttatttcagtcagtaagattaggtttttttccattactgtcgacaaacttaaggaaattttcatggaaatcccactctgcgagtag

SEQ ID NO: 422179 - DNA, 250 bp, Homo Sapiens
cccgagatgagtccctgctgtgtcacgcagcactgcacgccggttactggggttgatacccgtccatgctgctactgtgggggagggccgagagcagtgtttctcaatctgggttccaccattcctgacgggcatgtctaaacatgtgctttccgtgttcccagccatctaactgtgcctggtgtgagcctgtgctggttactgggcagccccgctgtgagtgggcacttctgggggatccaggtatgag

SEQ ID NO: 422180 - DNA, 358 bp, Homo Sapiens
cgtggggtccctgccaggatttagaaagcaggcagtctggtaccagagctcctgttcataacccccaggcaataatgccttcctatacattgcctctaaatccatcgcaaagatgcacacagaagagatgttttcctccttccttatgtggctatatctagtttttaggtaatgttgagtaggataaacatatttgttaggactcctcacctccagtccatccctgcttttttactctctgccgcaggcccacccgagtctaattctcccacttttgctctcaggaaaagagctgataaattcagtcaaatgaccagtgaggcatagtgctctcttccaatgtcccttttacagcaga

SEQ ID NO: 422181 - DNA, 303 bp, Homo Sapiens
cgattgggtccctgccaataaatggggtttggggttggctgcctggaattgctgtcgaagttggcagctgcttggctagctttgctttctgagacccaacaacagctccaagaatgtgtccggcaggatttaagcctgagctgggaacgcacatctgtgaggctctgatgtgaatattcagcagggagatctggatttcttctcgattgcctgtagcatcaaatctgtgacgaggcttacccaggactttcttctcctgacataattgcggttttcaaattcagttatgttcccactcttgta

SEQ ID NO: 422182 - DNA, 331 bp, Homo Sapiens
gtccctgcgtactgtgagccgctccagcaaattaatcaacccaaagaggggatcatgggaacccaaacttgaatctggtcgatcagaagttttagaggcccagacttgcacactggtgtctgaaagtggaggtggtaggttgggggagcagttttggggactgtgtcagtggtatctgacacttatctcctggtagatagtttcagaattggaggacacgcagctggtgtccactgcagaattgattgtatgtttgtggggggggaagtgcccatttgatcacagaagcctttaatttgtgttgatttttgttgtgagaaaataagaaaag

SEQ ID NO: 422183 - DNA, 361 bp, Homo Sapiens
cgagtggtccctgcggtgtcaggcgggaatggcctgcttgggaagctcacaggtactttgctgctgcttcctctacccctgtatttcactcggctctctaaattgacttggctccagttaaggttggaatcttctgcaaactaggccttgagtttctccagtaggagtgtgtgtttggttaaggaggatttccctttcccacttccacagtttggtcacagtatttggggtgcctcctgggtcctgcgtgagcaatccacttccttaagaggatctgtggatcctatcgggttttctgattaattcctgtggtcgttttggagttaaaattcacaatacggacctcctcacgctgctgtat

SEQ ID NO: 422184 - DNA, 182 bp, Homo Sapiens
accccgagtgggtctgccaatactacatctaatccaagagcaattaatagattaaatcaagagtctctaattccacttcattaatacactacttcctcagaacaaaaaggaacataatctatggatgctctaataccttgccaatatgaaccaatgacattacttcaagtaatcatttgcag

SEQ ID NO: 422185 - DNA, 397 bp, Homo Sapiens
cgagtgtgtctgcaggatatttggtaaacagcctcgggttcctgttaggtggacatacaggtattggtccattttcatgctgctgataaagatatacccgagactgggaagaaaaatgtttaatggactcacggttccgcacggctggggaggcctcacaatcatggcagaggatgaaaggcacttcttacatggtggtggcaagagagaatgaaagcagaaaccccttataaaaccatcagatctcgtggtgctctggtagtgcaccagagcagtctgggggaaacagcccccatgattcaactatctctcaccaggtccctccctcaacacatgggaattatggagagtacaagtcaagatgagatttgggtggagacgcagggacccactcggg

SEQ ID NO: 422186 - DNA, 203 bp, Homo Sapiens
ccctgcttacctgaacaaaatgtcatagttacctcctagcctgttgctagaccaaggagagtcacttgaataatgaacaagactggagggaaaccacatggataatttatcattacactatcatcacatacatggaactcatcaatgaagcttacgaaaaaaattgagtcatttgtggaaaagtgtaaagagaatataggaga

SEQ ID NO: 422187 - DNA, 390 bp, Homo Sapiens
cgagtgggtctgcatgattccctcacagtgttttgtcctgaagcttctcagaacccgctgttcaccacaggacgtcttggtgaaacagtctctgtattatctgccttatctgttaggcaaatgccaaattcttccctctctaggacgaccaagttgtgctctgctcttaaactgaggaacgtctggaattcaggggtcagcccaagtcacacccaggagtaaaagaaactgaacattctctacatgcaagcctccattcccaaaatgccctcctttaagctcacgttgcctaaaaaatgaagacgtgtgggattaacacagccaagtgaagctctttcacagaggtagcatgggcttgcattatgtattatgtacctattgcatagacgt

SEQ ID NO: 422188 - DNA, 331 bp, Homo Sapiens
ggctctagacggatcccccgcagtgggtctgcgacacaaatacataatatcattaattacaacgatgcacaattttgttatacgccactgagaaagagaaattatccaaacaaaggagtctaatagaagccctaacttaaaggcaggaaaggaaagagctctatctcagagtcaggttaaacaggaagtaagctcttcataaagaacaacaaggaagatttcgttcctctaccttgacaacgggagaaagaagaaaacaaattctctcctgagaatttgatcagcaagctaagtcagtacgacacagaacttggggtatgaattcacacaa

SEQ ID NO: 422189 - DNA, 406 bp, Homo Sapiens
cgagtggtccctgcagccactgctgggcaaaacctgcccagtgggtagtgctcgtttttgctgcatgcaaagaggcaggcccaggaatggaatttgcttttagagactgctcagagtgacaacaggaaaaatgctctacctacagacctggcacctgcatggcgtggtctccctgcacatcatggcagattgttctgaaagctgaaaatctcccctactgtctaaaccctgggacttcatttatctcatgtgtcccaggacactacggggctgcctatgcaagtttacagcctaaagtgacacggtgggggacgacagagggtcacttgtgtcctagaaagtgtagtccaagggtatgattcagggataaacaggaaccccacaaaggcattcgtttgttcaagcc

SEQ ID NO: 422190 - DNA, 324 bp, Homo Sapiens
ttaataataatcatatagtaataataagacaattggggcagtacctcctttatattgatcagatactcgatttgtctataccctccagaggaagacaaagtattctactttgtttcctgagaaaatactgtgtatttatatatgaaaaaaatccattaaaatactgggcattctaaagcatctaaatgtcataagtaatatcatttaaagtggaaacagaggcagtggtgtctatcaaggatgcttatcagtgagggaaacaaaaggagtcattaagcacccttggatacctgaagggcccctctgccaaaaatctcagtaatt

SEQ ID NO: 422191 - DNA, 403 bp, Homo Sapiens
gtaatccctgctggcttttaactttttagtaataactattctgactggcgtgagatggtgtctcactgtggtttagatttgcaattctctgacggttagtgatgttgaggattttttcatttgttggtcacttgtatgtcttcttttgagaagtatctgtccatgtcctttactcactttctagtggggttatttgtttttgtttgttgatttaagttagttatagattctggacattaggcctctattagaagcatagtgaatattttctccattctgtgggttgttgatagtttctgttgctgtgcagaagttctttagttatttggtcccactgtcaatttttgtttttgtagcaattgcttttgaggacttagccataaattctttgccaaggccaata

SEQ ID NO: 422192 - DNA, 334 bp, Homo Sapiens
gttcaacctctgcatgtttggagtcaagccagaccatagtcagaaaatacctaagacagagtagcttagcgatccaaggactgaacatcaacctcacactgttccacctgtcacctaggacctaggcttctgccttttctggattgagtgtccatcgagttccctcctgctaatgaccagatggtgacgtgcttccatcagcctgggccccaccctgacaccaagcacctcagcttccttaaagcaagggtgattccccattcctcgctggggaatcctgttcctggctaggacctcactctttgctactcagaattttctgatggcatctgct

SEQ ID NO: 422193 - DNA, 233 bp, Homo Sapiens
cgatcgagccggccccttttcatcatagcagaaaggaggacgaaagggtgggagctgtgccagcagatttccactgttctctacccgtggccacctagtaagggagttttcccctctgtagtagttgcaggcaagggaaaacgctagggcataggggtgcatgtgctcctgcctatgcccatggcaagcattaccaatcgatcactgcactgtttcctgcagggacccactcg

SEQ ID NO: 422194 - DNA, 121 bp, Homo Sapiens
gagtcgatgaggatgaggggtgggatattttggtccctcctgagtgtactgctgcttccattttactctcagagctcagcatgaccatcattattatatctcaccaggcaaccaaaagggc

SEQ ID NO: 422195 - DNA, 382 bp, Homo Sapiens
gagtaacatatatcgggatccatcttatactatggtaattgtcataaaaatatagctctagtttaaattagtaattggtactagcaataaggaaaaatagcaaatcattttatttacttagatcttttcatgaaaactgattagaagaaatcttaaaatatgcttcatatttcaggaaatgataagatactttaagctttgcctattgattttctactggaggatggtagactggggaagggtaactttaatgtgaaacttccatataaaatgtgttaatgtatactctgagatcccacccatagaaaatagactattataatactatgccctttactatttacttctaaacagggaatctggtgtcactaggtaactgcag

SEQ ID NO: 422196 - DNA, 458 bp, Homo Sapiens
  misc_feature (431)..(431): n is a, c, g, or t
  misc_feature (448)..(448): n is a, c, g, or t
agagtgggtccctgcgaagctccttgtttctgttcactggagtcaggctgcggcaatttaggaatcaggcagtcactccggaggtcgtcttagttatgcaaacctaggacgtgtcctcccccattaccctggggagcaatctgcttttgtttaacagagaccatccctttttaatggccaggtggagcagggttagtttgcataagcagtctttccaggaagaaaggaataaggtcccagccaagtacaccagcttttacactgtacatacatctgggtcgcctctaacctaggtcgctgcagacatcagctcttcaaagggggaaatcatagacacacgttgaacccaggcaggacagccagggtgaaacattctgggggcagctttgattcagccttgaatgtggctgacaatctgagccctttatcancctggacggtgaatggnaaaagtgaat

SEQ ID NO: 422197 - DNA, 214 bp, Homo Sapiens
cgtgtgggtcctggagactcacgctgtgctccatctgcactgggtccgcctccacttcagtgtttgacctctgcaacaggcagacacaaaggtcttctcaccctgtcactgctcagtgactggcgatgtcgtacacggtcaatgactgactatgttaatacgaaaatggcttcataaactatcgagctgccgagtagtctccctactgttgact

SEQ ID NO: 422198 - DNA, 263 bp, Homo Sapiens
actctagacgatcccccgagtgggtccctgcataaatttgattttgccatggctgcttagaaatagtctaattataaggaaagaagtgtacagagagagaaaatattactacactaaaacagaactgttttctacctattttaaaaaatttaggtagggatgttagccatcatattctataattagttacgttaaacttctaataatactgttctcccactcgcacatggatttcatgctatttaagcacatgattgatcgta

SEQ ID NO: 422199 - DNA, 106 bp, Homo Sapiens
gatgctgagatgacttggagaatgttctctttggtgctctcgatctgctcccttgcccctctccggatggctatcccattcatccctacctagtggaatctgtgcc

SEQ ID NO: 422200 - DNA, 177 bp, Homo Sapiens
tgtgcacgtgaggctctgttgggagctccctgtttaggatgaaggatcaatgacagaactttgaggacagtgttccacccatattctgctacccttcttggctgaagccacagggccagacccccacccaccggccctgttcttccaagcccgatcccatataagcaggcttccact

SEQ ID NO: 422201 - DNA, 293 bp, Homo Sapiens
atgaacatagctttccctagacctcatgaagtcttgaaccttttgcacgattcgcaacttcattattgacagatattttgcgttggactacatggtattagttagattaacatcctatgactagcagaggcatagcttcaaaagatgtggaagcaataggccagtttgtgcacttgttaaatttacagggatgttcggagaccatttttccaagagattaatggttggtgagggttaaggctttgtcaacttttgtttccttatgcactctcctgactgcaggggaccagggt

SEQ ID NO: 422202 - DNA, 276 bp, Homo Sapiens
  misc_feature (158)..(184): n is a, c, g, or t
cgagttagtccgcatggagttctggaaagataactaatttggtatattagctggcagctacagcacagtcactgatttttcccctctttctttttcccagctgacaccttggtttcaccagttgctcattaaagctggaaagtggtgtctgcagaagnnnnnnnnnnnnnnnnnnnnnnnnnnncttgaatactcagtgttcaccacagtcttcttggccttctctctgccagaccctgaggagagagctaggattttgactgcaggacccactcg

SEQ ID NO: 422203 - DNA, 221 bp, Homo Sapiens
tcttctccctgacaagttaacagcatgaatgagcatgaaaaggtacaccaagatgggtggcggggacattggttagctgggattttgaagataatttaatgatgggactattttcgaagaatgggcagggttaatgcaatcaaagagggctgttgaggcaatgaaggataaatatggtgagtgctgttaccacctctagtctgaaagacatcaggggagaa

SEQ ID NO: 422204 - DNA, 252 bp, Homo Sapiens
  misc_feature (110)..(110): n is a, c, g, or t
tcttcccctgacatctttgaaatttagacagacaaggagggtagaaaaaaagtagtttctgcatcatatgctgcttgaattaccctgaagaggaaatcaaattatttacntgaaaatttgtcaatgttgtattatacttccagagtcttgaaattcctacacagaactccctgattttgaaatctactgagatactgacaccagggcaatagcacatgtctgtacaggttgtccactgcacaactccagggg

SEQ ID NO: 422205 - DNA, 421 bp, Homo Sapiens
ctcttctccctgacaagtctgagccctgaacaaagagttaagttaccttttaaggatttcgtggggcggcaggggggaatctgtgcaggaggaagaatattacagaatgcaagaaataacagcatgcccagcgtgggagggcttgcacagacagaagactcgatcatgttatggaagggggccgattggtagagtggttgtcagtgcagtgaggggttgggatcgagtgcaaagtgaagaggtgggcttcagacaggggcatggacacttcataaactgttgtgggataatttaggaatcagaccgaggggttgaggaggatatattatttaggtgcaccggcccagtcggattaacatccaaaaagtctgagccctgaacaagtctgagccctgaacaaagagttaagttaccttttaag

SEQ ID NO: 422206 - DNA, 325 bp, Homo Sapiens
  misc_feature (94)..(133): n is a, c, g, or t
  misc_feature (141)..(216): n is a, c, g, or t
tcttcccctgacaatatatattataagaaaaatatcagaacaaaagaatgtaccctccatgatttcatttacatatgtcatatacacacctacnnnnnnnnnnnnnnnnnnnnnnnnnnnnnnnnnnnnnnnnaaaaatannnnnnnnnnnnnnnnnnnnnnnnnnnnnnnnnnnnnnnnnnnnnnnnnnnnnnnnnnnnnnnnnnnnnnnnnnnngaaagggacctaatgggaatgtccaacactctcatctggatgtatttacggaggtaaccatcatatataaaactgatagagctctacaatgaaaacgtgtgcatcttac

SEQ ID NO: 422207 - DNA, 248 bp, Homo Sapiens
gagaaaactattttcaataccagtgaaatttctattgctaaaaagccagcactttaactgattatttaaaattctaagagacattggaaactagtctgaaatttggacctaggaacactgatgaaatacaattggaattttaactgtctctgggttgtttacattcaaaaattctttacttttccttctttcctatttcaaggtttcagcaaggtaagtcaagtgtttttgcgtgacaaggtgagttg

SEQ ID NO: 422208 - DNA, 337 bp, Homo Sapiens
  misc_feature (94)..(94): n is a, c, g, or t
cttctccctgacagcattgtaggcgtttgagcaggagagttgacaggatgaaatatgcttagttttagcaaactaactggttgcttacgttgantattggccaggagtgctgggagcagaattgacacatagacaaagctggaagttattgcatcaatccaggtgagagacgaaggttgctcgtaccagatactagtagaggacagaagtgattaggactgtaatatattagacttgactagcatctaacagactttgctaatagattaatgtggaaagtaagaagagagaaaaggaggattaaagagaggagattaggaggactctaaagtttttg

SEQ ID NO: 422209 - DNA, 133 bp, Homo Sapiens
aatacgctttacggtttctacacaaggttagcatttactccctcactacttccaacaaggaatttgagatgacttaaaataaaatgcagattctaaaaacacaagaattagacaagaaggaaaaggaaagtga

SEQ ID NO: 422210 - DNA, 237 bp, Homo Sapiens
tcagtctaaccaattttgatgtcctgccacaagcaaggagagttgacatgtccaggagaagccacttcacacagtccagggctgcacacagaaacacatcactattgtattctgagtgtgtacaagacagtgtctatactctatactgtgctctgggtgaggtaggggttggctgagagcctctgttcagtacccagcaccaatcccaggaaataggataacatggcttaaattgac

SEQ ID NO: 422211 - DNA, 323 bp, Homo Sapiens
tcttctcccctgacaagcaaaaatgacttcagacattcagacattgccaacttgcccacggcggagggagcaaaattagaatcacggaggtaaattttatagagagttggctggttctaagtggaaaactactctcttattgcatgaaggttaaatgcactcacatgtgacacacactcacattcataaacacacacacgatacaatgacaaaatccctaagacagagtggtcctcgtttctgatttttccacactttcatttgcctggtttgttgtaaatgcctctaaagtttgagcagaacatcaagggttccgttttcaa

SEQ ID NO: 422212 - DNA, 168 bp, Homo Sapiens
tcttctccctgacaggattgattgttttgaggttaatgagaaaaatacatatactgagcctggccctgcaaagtgctcaaaaaatagtagctgtaattatgttattaatgttgttattttgctgagtgcagtacatgcatgaaaacgcatgtcttttcccagactgtt

SEQ ID NO: 422213 - DNA, 418 bp, Homo Sapiens
tcttctccctgacaacacattgctatatatatactgttttttaacagttatacacaaatcaaaataagagacttcttcagacaaatgttcaaaattattttctttgtcctgtgtaatcaacccattttttcttaaaacatcccatgtagctgatttccccagaaaaaaagaatattataaatcactattgtcttcgttttcaaagggggaagggcaaggaataataagagggttcagaaagttctaagaaatctgtcttggatttcaaactaagcctaacagaatgaattgtataaatacagaatgtgttgtgtttcacagttttattctctgtttcctacccaatctcaccttccttcagggtacattttaaacttattcctcagttttgtaggtcctttcagtatagggtaaggga

SEQ ID NO: 422214 - DNA, 245 bp, Homo Sapiens
catgctgttcagataatgcaggtctctgcagacgatgctgtgccacaggaatcaatcaagaaatagttacatccccagcattgctccgtgggttgtaaaataaatgtttcttagacaaagaaagtataagtagctccgtggcaactccctgaaagcaaatcaagatcaaccccgctcctctcggcagatgcttctttttccaagttccatgggtttaggttacatctcgagctcactttcacgca

SEQ ID NO: 422215 - DNA, 408 bp, Homo Sapiens
tccttctccctgacaggactatatgctgcttgggtgaaacaaaagcagtctgcaattgtatttactggtgatcaaggttccaatattgtttggctgtcgtggaataaaacaattgaacataaaacccaactgttatattggaacataatattgtcttcaagataggccagtgctctgacttaatatgagcttatctgcaaaaatgccctttggcagagacatttctgaaaagggactgtttctgttgctggggccagaaatggctcacacactcctcactggcatgtactgatgggaaagcagaatagtagatattgccatcatcatgaactttgagttaatcattgtttgtagtgaaactgtataaaaataatgatgatgatgtcaccaagcattctctatatgccc

SEQ ID NO: 422216 - DNA, 132 bp, Homo Sapiens
tctctctgacagactaatgaccattaatgtccatctcaaggacactatgtccttgagaacatgaagactcctgacatcagaaactaaacatcctagagtttacatacccccgaaaaacctgttcacgggggg

SEQ ID NO: 422217 - DNA, 338 bp, Homo Sapiens
agaggatccaccttctcccctgacaatcctggagtgtccctttcaggccatccatctcccatggacagaaggctcttggcttggctgcaaggcctgcttttctgggcctgggtgatacaggagggtaagcttgggaaggactccagtgcctcatataaactgctaatgaagcacaatctatcatttagaaaataggactgacattggcctgcgagaaaggggtctcttgtgtcagaaggttgacggcaattgggtgatggccactactctgagtttaatgtcaagggtcaagtctcacttgtctccagatacacccaggacatatggacactcagtga

SEQ ID NO: 422218 - DNA, 417 bp, Homo Sapiens
tcttctcctgacaggaattggtttatgcagttgtaggggctggctaggcaaatccaaaatccacagggcaggccgtgtggaagggaggtctggaaactctcagacaagacctgacattgcagtccactggtggaatttctccttcttcagggaaacctcagctttcaacggagtggatcagacccaaccatattatccaggataatctcctttacataaagttacctgattgtagatgtaaattacatttacaagataccttcatagcaacacctaggtcagtttttgaataactgggtattatagcatagccaggtcaacacgtaaaattgatcaccacagtccatgtcttgttaacttggcacctgtacacatttccttaaaccatttaatctcccaataaagacaataacaaag

SEQ ID NO: 422219 - DNA, 338 bp, Homo Sapiens
agaggcctcccctctacgtgcttcatgtaaatgtgtttatagttgatatccatcatctacaagtgaccaaggcacaatagtttcacctgatatgttagaaaatcccagtagagtttagaaatcatcatttctaaaggcaaattttaaaagatttctctcataagtaaatcaataaacaaatatttgtgcacactagtctttcaacagcaaaggataattttgggataaagaatgatgcaaacctggcaaaattgatatagccagtttggctggctatgcataaactatcttccttatgtttagcacatctttaataattagaagtgacttcctatagc

SEQ ID NO: 422220 - DNA, 256 bp, Homo Sapiens
cccttcatacatggtggccccaagttgtggtcatgtaggggggctggtcactttcctggtggtgaggacacttaaggcaggcagatcccaatggcgaccaggccctgtgtgggcactctgcatatttataccttgcgagcctcaccttgtctgctgccattggatcacttcactttatggatgcacacctgtccctagagatggccacggacttccttgtatcacacagctagtgagtagcagccctgccactccc

SEQ ID NO: 422221 - DNA, 377 bp, Homo Sapiens
atcaaatttataatatgtaacggactatgtagtgcatctttcatagtttaggatgattaagagttaggaccttataagtaaactgccacattttgaatcataggccccaaatgggtactactagtgaattctcagagtcattaatctagattgtttcatgcctctccttatcttcatctataaaaatggataataggactaactgcttcacaatctctttgccttgaattaggtgagataatgcaagaagaacaacaaataccatacatgtgatagtcattaataaatttgagttgttattatctaattattaaggagaattagaaaattcataaaagcaaatgaagaaataaatcattccttgcctattacccaaa

SEQ ID NO: 422222 - DNA, 330 bp, Homo Sapiens
caatgttcacacgctaacacgccagtaggttgaggaacggatggtggcaacgtttcccagtgactgcaggcttgtgtcctcgctcagggcacactccccagaaatccaagacctaaggtaaggaggccaaattagtgtcatgagaggccctgtgagaaggggttggcaccagagggctgcagccacagaaggacctttctttaccctggtgggcctgatgtgcccacgggagcacaaatcccttgatctgcagcttccaccccagagtgtgctggacacacttctgcacactgaacctgagcctttttgcttcacccgattctgtggaat

SEQ ID NO: 422223 - DNA, 214 bp, Homo Sapiens
tccgattgtgcttcaagccaccctccccaagatgctgctctgaagctccaacagtccatctccctgacagttgtgtcctctccttctctcgtatgtggtagtatcactgtcttccccctaaagcagtgggcaccttgagggcagaaccttgccgcgggcatctctggcccctggggtccgagcaatgagcgggaatcctgatgataagtgttgc

SEQ ID NO: 422224 - DNA, 373 bp, Homo Sapiens
  misc_feature (90)..(251): n is a, c, g, or t
ctgtcccttctgtctcaccccagatgcatgcagaagtaatgtagtttactggcatagattctgaaagcaaagtacctgagttcaagtctnnnnnnnnnnnnnnnnnnnnnnnnnnnnnnnnnnnnnnnnnnnnnnnnnnnnnnnnnnnnnnnnnnnnnnnnnnnnnnnnnnnnnnnnnnnnnnnnnnnnnnnnnnnnnnnnnnnnnnnnnnnnnnnnnnnnnnnnnnnnnnnnnnnnnnnnnnnnnnnnnnatgttcctgcaggaggccccctccccaaatttctatgccctatgagttgccatctgtagttctttgggagatgatgggggcatcataaggtagttcctagtcatggaaaatagggccagaac

SEQ ID NO: 422225 - DNA, 190 bp, Homo Sapiens
gtgtcagtgcttctgctgttatctgagctgtcagaaatagactgttagactttctctggacactttgtgtatgtaagattattaataaagtatgtgtctgtagctcaggacatcttgcagacacagactgtgtccgacttaaagtaacacccttgcccccatttggatcggtgaatgaagcgacgtcgga

SEQ ID NO: 422226 - DNA, 316 bp, Homo Sapiens
cgatcgtgctcatcatttattacctggattactgtagaatctcctaaatagtgcctttatctctagtattacactttctaaccaatctattaaatgagagtggtttttgttccaacagaagtctaattatattgtgtcactgcttaaaatccctccatgactccctattgccaaatccaaagaatagcatagaaggctttttaggctctgaaccttgccgtctctccagtctcctctattgacgcatcaccatttaaatctgtgctcttctgaaccacttcaagcaaacttcttgaccatgtcctgcatcgtcttc

SEQ ID NO: 422227 - DNA, 372 bp, Homo Sapiens
ttgccactctgtacatttgcttatataaagggttggttaaaggaaaatagatgtaattttggcacttgtctgctctaatatcgtgactgacactcataatgtacatccagttctcttaaatcccataaaaagccattgggaagaaaatttttgagataatataaatataatcttacgtaaaacctgtgtagccacttcttatagacagcttaggaaagaaagaagccttcaaataattaccaaagtaggaagaaaactaaaaacctctcgtattaagggtaataattgcaaaatgacacccacatagaaaaagtcccttcctttcattttcttgaaatatattgaaacaaaaagttaactaacatcatttgg

SEQ ID NO: 422228 - DNA, 450 bp, Homo Sapiens
gccggacctccgttgtgctcagtatccccaagtatgccctgttaatttctggtcccttctttccaactctgctatctgtttcctcctgacattcccaggttttacaagcatgtcccacccatctcaaatctctaccaatgaaaattctatcgttatctcaatgcccattcaagtggtattgtctccagagcctttcatcattcatcattcatccagaaatgctctctcccacctctgagctgtataaagcagtcatttatcacattcccttggattgacagtgacttacatatacatgaccatgaatcttagtttaaccaagactgtcgagtttatattcatcctcttggggttattatgaagaccacctctcttcactctcaaacgtacacaaatttgaatactaaattatatggtcaccttttctctatataggattcacccccttcc

SEQ ID NO: 422229 - DNA, 449 bp, Homo Sapiens
aagctcggcctccgtcgtggctcactctaaaacagaatatgcttatatctgtgaagaattgtattcaccactgtctattgataaattagtgtcagagagcagttatataaagttaaatacaatttcatcattatcattaatttttataactaaattctagaaaaccttcttgctctagaaagcaccaggagtccttgcataaattagagaactatcacattttgccacttttattgtctagtaataaatggtttagttagatcaatgatataatattctttcataattcaagagactatcaagtagaagggcagtagacttactgctagacataaaaatagtttgcatccaacactctgctgtaaaaatagtgaatagattgtattaagcttgagactgccaagtagtgcaggcgatcttggtaatgtaaggacttcacgttcaaggca

SEQ ID NO: 422230 - DNA, 239 bp, Homo Sapiens
tccgtattgtacaggctatccaaataatcacaactctaattaggaaggtctgaattactgaaggttcaagattgcctccttgggagctaatgtgtatgcaagctgcgacccactgataacagctttactatttactcttccctgccaggggattagtgaaatctaaattgaacagttaggtatttaaaaccactcatgtggttttaaccactaaaagggttgttcagcaagtcttcttt

SEQ ID NO: 422231 - DNA, 368 bp, Homo Sapiens
catcagaaaaccatctattttccaagccccatctgaaagcgtgcctcttctctgatgaccatccttgttggagctgactttgccgtccctcctgtggacatccatgccagttgtctgtgtcatctgtttagcagtcatctggtcctaacttttagcttatcttttattatatctaagtgtgatctaacttttcacctttatcttgtctccctgtcacctcgaaagaggacacgacagtgctgttaatttttctatctcccatgggacttaatcggtgtcctccacgtagtatgctttaataatggtttattgctgtgatactgcttcacaaatgccagcagatgccatgctgtatcatcagagatgag

SEQ ID NO: 422232 - DNA, 216 bp, Homo Sapiens
cattgtacaagtacgtccttccactagcatctatatcatgtttgtcttctcctagagattatgagttacctaagggcaagaaccttcttatccttttgcttaacacagggtttgatacctggtaggcataacttctcttaaaggtaataattcctttcctattgatccaatctcaaacctcatgtgctccctctgcctcttgtgctgaagccacgt

SEQ ID NO: 422233 - DNA, 437 bp, Homo Sapiens
gccggcctccgtgtgctcaacaaggttacagagtgaggaatgataagaaccagcctcctggcttctaaaagggttcagtttctaccacactgcactgagggtcaaaactctaagtcaggggacagggtagctggcaaggtcagttccagcaggaactggtcacggctttgaccattatctattttggtaaatagaccctggtattcttgctggagttcataggccataaagtccagttgggaacccccaggaacttcttaggcaagacctcaccaaatacactggactcagaacattccctgctcatgaaccttccataactctccactgcctacagaagaaattccaacaccctcacctaccccacccctgactggcatccaggccccactccatctgttctcatctacccttcaaagcttagggggatcctctag

SEQ ID NO: 422234 - DNA, 277 bp, Homo Sapiens
actggatcacgaaaccagacgtcccgttaacagctctaataaaatatgtcctcttcgtccttacaaaaatgatcaggctaagagataagatggttaatagtaacatctgaggtttttacagctcttatattcaacttatgctgtgactactacacaaagcagtctctttcttcatcatttgaattctactgctaagaccgtctagaacttcagagcatgtctgtgaatcccaggactgaagtgtgaatgaaaggtattcttattgatgcctgccatg

SEQ ID NO: 422235 - DNA, 263 bp, Homo Sapiens
tacagtaccacattatctttatccattcatttgctgacggacacttaggttgactccaaatcttggctatagtgaacagagctgcaaaaaatatgggagtgtagttatctcttcaatatattgatttcctttcttttgggtgtatacccagcagtgggattaatagattttatggtagctctctttttagttttctaaggaacatctaagctgttctccatagcgggggactaatttatgttcctaccaacagtgaagccacg

SEQ ID NO: 422236 - DNA, 443 bp, Homo Sapiens
  misc_feature (201)..(241): n is a, c, g, or t
  misc_feature (265)..(315): n is a, c, g, or t
aagccggccctcctagtgctcatttcttctaagtccttagctttctactaattcccctcttagttcttcaagcaggagctgaagttttcctggtatgtttgcttttcatttaataggcacttgagtactttttgcgactttatgtactcatcctgccaccttgtatgcttgtatgttaggcattcagaatctggtaactannnnnnnnnnnnnnnnnnnnnnnnnnnnnnnnnnnnnnnnnaagacagggtctcactctgtcatnnnnnnnnnnnnnnnnnnnnnnnnnnnnnnnnnnnnnnnnnnnnnnnnnnntgagctcaggtcatcctccgatttcagcttcctgagtagctgggacgagtcaggaagtgacatgccactatggcgagtcaatctttagaaacataattttagtagggatgggtctggctatgttgccc

SEQ ID NO: 422237 - DNA, 415 bp, Homo Sapiens
gattgctgtaaaacttagttacctagtagacatgtactctcttggaggtagtattttctgtagtcagtgagggtaataataatacttccagtgggggttccagtccctcagtgatctctggtgagaagaaatgtgtcagcgaagagtggtgctgatggctggtgctttggctctgttattgtttgtaccaaggttgatacagctactcgactagcctatgactgactggtggtggtaattaaactttgtacagattactgtgtgcagatcgttactgtcttaatattaagtttcccagagattttacttttgagatagctgagaattaacgactcttggaatttataaaaatttagttgataccatttagttgctgccagctgcctgtgttcttatacataggagacatcggagt

SEQ ID NO: 422238 - DNA, 419 bp, Homo Sapiens
actcctgagtgctcatggcaagatcccattataatgccagtttcattacttttgttgggcctatccttttatatgggagtgcagaggggagatttacctatgggctgaagtctgtgacttccaacattcaattactaacattattgttgtgttgatttagtcattaacaatttatttatttagatatgacatattaagtcataaatatttactgtaaattatttcattaacaatttctgagagtttttgaattccttgtccaaagaagatgaagaactgaacaaaggaaagggcaattttagaaaaaaatagcactaaagagggtagggggagaaataaagcaagattgggtcctccttctctgctgggctcaataaggacctgatcattgtcccacaagcctcaatgagggctactat

SEQ ID NO: 422239 - DNA, 298 bp, Homo Sapiens
ctcggtaccgatgtgcttcatcagctgcttagattaaggaaggtaaaacaagagaaagagcaagagaaattaagcaactcgtatgctttcttcccctaagaatcctgattaaaatccaaccacagaagacttgccagcaagttccaatatatggcgtgctttccatagcagatctggctagtggttacttggaggaaggtaacgtgacaacctatacaatattaactcatcctaaatgttgcttagtgaaagaaatataaatctctgagataggtgacacggggatatcatttggaac

SEQ ID NO: 422240 - DNA, 179 bp, Homo Sapiens
ctccgacgtgcttcatccgacgtggattcagtataatcatagaaataaaatagaaacattgtaacgtgcagcagggcagtcaacttttcattctcatgagtttctcttgaatgtgtaccatttattagccagttcttcagaattctgccagtttcagatgtcaacccagcattggacag

SEQ ID NO: 422241 - DNA, 433 bp, Homo Sapiens
cttcattctcaagttctgctttcctcactctgacatcaaactggtcatcaataccttttgatttgtggtggaaatgttgtatgaatacatctcattctgggtaatatcatcttctggcttatttcatatctttggcatgtggactactgcactagcctcctaattagcttctatcattctagttttcttctatcaaaccaattttcagggttattgcctggattctctttctacaacaaaaatctaatcatgtgattctcactgccttaaacatttagggatctatattatatgtgggataaatcctaaaattctcaatatatcctctaacatccttcaaattctagactgaagccccacatctggctcccattgttcctccaacaaaccaggggatgagcacaggtttaattctttaagaaacatgtgatgc

SEQ ID NO: 422242 - DNA, 450 bp, Homo Sapiens
  misc_feature (318)..(386): n is a, c, g, or t
gagctcggtacctccgtacgtggctcaggctgcagcatcagtggaagtgaaagctgtttggctttaaaattgtcaacattttgaaaataatattttgggaataagatctggaatttaaacaaccttcaattcacaaaatcataaaaatcagagatcctggttcactttcttagcaactgcaaatctgtagtatcagactactgtaatataagtatcaggggaagacaagagaggtagttagtgaagtgggtgggccttgggccaacagatcaaagtttgaatcctacttttcacttcctagtaggagtaaaacacatnnnnnnnnnnnnnnnnnnnnnnnnnnnnnnnnnnnnnnnnnnnnnnnnnnnnnnnnnnnnnnnnnnnnnaaattacaatgtgacaagtcttgttgaacacttatcctagcatacagtaatgatcatgacctag

SEQ ID NO: 422243 - DNA, 286 bp, Homo Sapiens
tcggctcggcccggatctgatcattgtcccacaagcctcaatgagggctactatcgaacatgaaaatagattgatgtgctttaatcctttctgattgacttgctctgagccaatgaactctttacttttcttactttttattatagagaagttacggttgaagtgagccaaagattccaagaactggtcgacagaagtcttgcctaaccttggtccacaaagagaagttaatacagtttgtctttggaactgttgtacatctttccaattaccatcatctccttgc

SEQ ID NO: 422244 - DNA, 385 bp, Homo Sapiens
gggctcggccctccgttgtggttcacatccgaggaaactgtggagcatcgtcattctacccgagggattggaataactcactgttgcagatacttccattatgtaactcagccgagggtattctgcacttgtcacagcagaggtcagccatgattctgtagagtagtgcaatgattcaagtgacttttaactattgttgcccaagatgcaatgatagagaatcatggagtctttaagatgagtggttgatttcctttttactccattaaatgccatggcttttcaatgttgcatcatcatctagttctgtatcttaacccttcagcaccctggcacacaccttgctaacaaacctgtaactctgaaatgtaatcgcagaagaaag

SEQ ID NO: 422245 - DNA, 397 bp, Homo Sapiens
ggccggacctcctacgtggtcatataggcaatctcagctgcctgtgcttttattttcttatcttaaaatggagcacttgaacttggtccataactaaaatacactaatttctaaatttcttaatttcagaaattccacagcctatcttcccccatgacatcagttaacaaagttcctcccagactattcatccaaagtagaaacttagatctttacgatgatcttcacggttccacatggactgcctgcttcccacttcccccttctacttggcttcctactgctctccaggtcactctgacctcttcacatttcctcatacccactaggtaccctccaaaacagcctttgcaccaactggaatgctttctctctagataactgtatggcttgcttt

SEQ ID NO: 422246 - DNA, 263 bp, Homo Sapiens
atttctatatattttactattataaagtgaagagtaggtagacatgaattcctcttgccctttgctatttcagtctggcatcagtagcaatagttgctatgtccagttatcattcatggataaatctgggattgaagatgagtacaatgttgattatataattgggcagtataagtaaatacattggctctccttccagtttagtgaatactaaatatcatccatgatattttatcattcttacacttctggaatctaacctg

SEQ ID NO: 422247 - DNA, 288 bp, Homo Sapiens
  misc_feature (161)..(169): n is a, c, g, or t
gattcacaggtaaataagagaggttcagcaatgcaggtctttatggtctccctaggcccagtggagaccagctggagagtggaccctggtgtgaggtttcttagcccagtctacaggataccaaagcacctgatgagcagtccttgtccaggcttaggaannnnnnnnnttggtagggagcttcccagcttccccatgagaagccccatcaccagcaagttcctcttcaaagagtgagaggcacaggcagtagttatcacactaacagaagtgtctgaagccacgtcg

SEQ ID NO: 422248 - DNA, 123 bp, Homo Sapiens
tgtagatagtggttgttgtgatagcataacctgttattggtttcttccaaaacaggtgaatacacagaaaaggcaacagaggacagataaaagacccatcagtatcaggagcctggtcccatg

SEQ ID NO: 422249 - DNA, 427 bp, Homo Sapiens
  misc_feature (310)..(322): n is a, c, g, or t
tggatacataaagcacgtcacatctttatttatactcggagcatgcagctttcctaaacattcggtgggatgaaggcataaaaggaagagccagactgattgattcaagtgtggcatcaatggagggcgaggtgacagttatgaccatccttcacttctatgcctattctttcgtaggttcttgggctactgatattcagggtgcacatggatttagcaaataaatacttatggagattgactgtcctctctcttttgagataggaaggggacaagacacattttctcttaggttaagatagcaagctgnnnnnnnnnnnnnctttctaagtggacagatacaatacatattaatatgtaaatttagaacagtgggatggttggtaaatactgcctatacaaaaacttacttttgcactgactccca

SEQ ID NO: 422250 - DNA, 399 bp, Homo Sapiens
cttaatgatacatcaattcaaaaacaaatacttatttgtatatattggtagtagtcacatgcatattactcattctgaccctgacttatgttactttaagagtggcataacaagtcaattaaatattactgatcacctattatgtgtgagctgttgggttaggtctgcagtagacacagttatacaatagcaataaatgtgttgagaacgctatgggaccatcttgactttgctttgttgcacagtgatgtaaagaacttttcagtgttagcaaaatgtgcacaactggacaaaaggaaaccagacggtacatctgtgtcaatctgccaccactattataaatcagttattttattttgctgtttgtaggtcataggtgacttctcatttatatcttgg

SEQ ID NO: 422251 - DNA, 448 bp, Homo Sapiens
cgtacgtgctcataagtcatataaatatggtctctaaactctgaatttacatctgtctccaccggtaaatatttataatagccaaaggatatcctggacattttctcctaatctgtttgaccctttccttttctgcttgatctagatgcttggatccaacttactttcttaaaccctcttgttcgtttaccttcatgtatatgtaagtccacacttggatcactgctatagtttgtttactactaatacagaggcctgagggctactatagaaaatcacatagctgtgtagtttgccaacgccaggagtttaaccctcagctcactgaattattccttttcttgaccttaatcagctacttgtttcattcccctcaaagtttctctgaatctttgtcactctcctcaaagctcccttttctaactcacctctcttactcttagcagat

SEQ ID NO: 422252 - DNA, 405 bp, Homo Sapiens
gctgtacttaattactgtttataaaagccataatgcataataatttactgtagtcgttatacctagttttcccaggtaggcagtggtaacatctgtttcacaagataaggaagcagaaatttaacaacaatggcggaatcaggatgtcaatcttgtccttttttccttttcccactttgccatgctgccctctgggtaataagatggagactaatttttgaaggcttaatttgttgagccagtgtcattagtttttaggtaacattttaatacagaataagtgtgtcttggtcttattaacagtgctatgttatgtaaaggaatttagttgtaggaatattttctttgaaacaataatacctgtttttttatctcttgattgtaaagtgctgtgggaaatacaga

SEQ ID NO: 422253 - DNA, 107 bp, Homo Sapiens
caaaatacctaacacatagactagttacacctgaaaacacatcactctcaacccaaatacctaaccattgcactagttacacctgaaaacacatcgcctcaaccaaa

SEQ ID NO: 422254 - DNA, 420 bp, Homo Sapiens
agaggaacctttctgaactggattatctcttcttccttcgatttacataccccattcaaacctatcttatagaatagtattcagattctatgttgagtaatagatgtacatgttgttactttccccaaccaagctgtaaatatcttaagatcagaaactgtgtctctcaacacagacgtgagcctgtgccttgcaatagctagcccacaacaaatacttgtagaacagcagtgaaatgaactgaatatctattatattaaaagagtgtaagagtttaatgagataaataaaccattgtagtaagcattattattaactctacatgatacccaattctgagtaatactacactaacacctgattagaagacgccttctctgctctgtacaggttagatttaaaaaattacaccagaaaccc

SEQ ID NO: 422255 - DNA, 108 bp, Homo Sapiens
gcgggatcccgattctgcacgattaataaacaatgcctcaccagatagcatttactcttcattcaaacgttaccagggaagaaagaggtcaaactcttgattgtaaca

SEQ ID NO: 422256 - DNA, 100 bp, Homo Sapiens
cgactctagaggactccctcctgaagtagctgaagagtgtaaccaacagaaagccaactggagttctaatccagagaagggacatcatcgaataagtata

SEQ ID NO: 422257 - DNA, 323 bp, Homo Sapiens
atcgtgcttcagagagaactggagttgaatccaagttccaacactcattaggatgtagatcatagaatgtgtatattaactcctcagaacctacactttgctatatctataaaagaggggattcttcatgaggcttccgtaagttaaatgagtaaaaatttgggtggacaaaatgcctgtaatttaaaagatagggttgttcatgaggcttcgataaggtcaagtgtgcaaaaaatctggacacaatgcctataataaagtaagtgttcaatcatatagagaaggcttattaatctatcatttcatttttagagcaagtttat

SEQ ID NO: 422258 - DNA, 248 bp, Homo Sapiens
tccgtactggcttcatcacaatgcttttggatcaaagacctttttctttcatattcttacaatcatcagtaagaaacaagagagaaagcacttcagattcatagtctgatgacctattctctggcctaagaaaaaaaggtactaagtttactgacatcaacgaacaggttctaggtatacaccgccaagtcagcatggcctgttcttcctaaacttggacctgttcctttgaatacccatggtacttt

SEQ ID NO: 422259 - DNA, 112 bp, Homo Sapiens
aagctgactccaacgctgtacttacctgcaggggagtgtgaccctgggtatggagatcctcttagggggcagaggaggagttcatgctgagcataagtcatcggcagagcag

SEQ ID NO: 422260 - DNA, 392 bp, Homo Sapiens
agtggcttcacgtggcttcacaacaatcatttgttatttctagtgagatctgtggagttgattgggatcagactgagtagttcctctgtatattctgtgatgtagctgaggatacacccacattcagctgggagcttaaggctggaacatccacgataatctctcatcctcaaaagtctcatatccacatggacctctcatctttcagtaatccagctgagaatctttgcagcatgatggctagcttccaaaaaggaatcacaggacagctgccagtctcttacagcctaggctaggacatatactaaatttcttctgctgcactatagtaagcaaagccatacataaggccagccaaaaatcaagagaaacagactccacttgtagcacga

SEQ ID NO: 422261 - DNA, 412 bp, Homo Sapiens
agtgttcactgattgtctccaatactcagtcctagaattattgttcttcagtcaagactgggagcaatgaatggtcagtgcttaaataatatcagagacttctagtgcattaattcccataacctctctttggcctctcccaaatcctagatttacatatcagcaaagatagggaggactttggaatcagcatctgatcagaggaaccccttcggatgcctcctttaaaatgagtctgccctcttatttcctggagtcatttggatggctaaggagggccttggggacattttctctggcacgtgcgctccttgctgttgcttgtaacgaggaagctcccaagcgaatcctcacgctctgcaggacaggctgtctttcagcatctggacacgtgggctacatggagttgcaa

SEQ ID NO: 422262 - DNA, 409 bp, Homo Sapiens
tagtggcttccaaaatattgctcctacacacaaggatactcttctccttctttcacttgctaataataatggcaagtcattaatataacggtatttgttagaccaattattaaatatgtcatctctaacacaacagtccaaaaagacaggcctaagttcttctactttatagatattgagactcatagaggcataaagtcctacagtataaatgagaagctgggatggccctggatgtgactgcctgtaaaagccagttcttcactcatactatttgttatttttcagaacattcaaccattctcttccctttgagagtttatcatttttctccctaagtcctggagaatctttcttggcaatgtcctgatattctattcattattctcctaccctagtactttctttt

SEQ ID NO: 422263 - DNA, 268 bp, Homo Sapiens
cctctgagttggctcacaatttgggacattttcagtagctgtacaaagcataaatcttaccacgtaagatgatttcagtcctgccatcaagtcatggctatacatctgcagaatttgggtttaggtcaggaaaactcttctgactaggctttcattttctaccaagcaactgatgagatgaaagcagagtttttacagtgtttcagtgcctcccaacagctgagctcgcaaacggaaagagtgcttcatctgtccctgggctattgac

SEQ ID NO: 422264 - DNA, 279 bp, Homo Sapiens
atttccgttatctcatactagataccaaattgtattccatgattgtggctgcttatactgctctaattccggagctttgctcaatttgtatacagaatgtcctttcttctttccctctaaacacctacatctcccttggcttaccacactaccacctagaactaaaatccatctatcctctaagaagtctccttccctttacccagaaattcttcttcagcagaacttctatagcacttaatctgtatcttttctgacaatgattgctttgtatctttt

SEQ ID NO: 422265 - DNA, 335 bp, Homo Sapiens
  misc_feature (224)..(224): n is a, c, g, or t
cctgacgtgctcatttctttctgttttcattgtacattaatatactcaaaatcgtgttttacttgtattactttataccctactttaaaaaaatttaaatacaagctttgtattatccacatgctttgaaagagccattttataattagctgcttataatttaccaaaccgttcttctattgttggacatttacgttgttcacaaattttgcatattataaatnactaaagctaggaaaacattttacacgtgtggtttttattctggaaattggatcttttctgaagccaagttctgcgtaatattttgactgagtactagaatgccttctaag

SEQ ID NO: 422266 - DNA, 210 bp, Homo Sapiens
cctacatatctgtcttataaatcacctagattaacatccttgagggaaataacaataccatgattatctatgtatacagcctgtactagaaactcacacatagtacatactccataaatgcctgtccttggtagaataagataacggcaacatataaaccacaattaataggattcaagtatgtgcatgtacatggatatagttacaaca

SEQ ID NO: 422267 - DNA, 310 bp, Homo Sapiens
cacaatcaagggacatgcatacatagtgaggtcaaacacaagaagtcacccatactgaaaacaccgcgaaaaacagccggcaatttatcggtacgaaagcactgaagtacctcgccccggtgacaaatacagccaaattgcgccaggactctgcgccagcccctctctatatatagaagagacaaccattcatctccctgacggacccgccctgagaacaaggcgagcaagcaacgcgaaatcatcgagatacataaatacgacgacacgcccagacggggcagcccagcacctgcaaccacccaatctc

SEQ ID NO: 422268 - DNA, 209 bp, Homo Sapiens
attgctcagttctgtattgtaccgtgtatcatcacctgttaacttttgtgcatcctgaaaagatccgtacagatcggatcttctccagagacgcctcgagatcctcctgactttcccctagagccttgcactgtgactatacctctgtcctgcacttactgtgctcggaagtaccgggcagtactaaagctcataggcgtccgtagcgg

SEQ ID NO: 422269 - DNA, 375 bp, Homo Sapiens
  misc_feature (23)..(23): n is a, c, g, or t
ggacgcaggagtggggcgagagnatggagagaggggccggggcaagggaggatccctaggtctgccttcctgtccacagcactgcccgccagccacagctcctgagtcaaaggctctgaagcaaagttgtatgatgaaccttggatttcctgtacaatttggctaactctagggtgatctctaataaagacaaaggccaggggacagcaatatctttcttttgctcctggcaaatcccatcttgattctatctcaatctaactgtccagaaaattggattgaaagcaggacaccgccgggaggtaaatcagattagggcttcctctaccacagcctccagcagacatttcattttgcagtgtgcgtccgtagcgg

SEQ ID NO: 422270 - DNA, 353 bp, Homo Sapiens
ctacggacgcaggctgcctttcttcggttggtctcgggtgtcgaggcggtcggcgaattccagcggatgtttgaccaggtcaagtccggccagcggtctctcgactccctgacagcgtggatcagcagcaacacacaggtatcagctgtttaccgtgacgaactggtcaagcttgctgcgtcgtactcaagcagcagccaaaaggccgctgacttccaggccctgcttggaaaaagcaaggagccgcttgataaggcggcggcgggtgcgcgagctctagctgattctcagtctgcatcctctgccgccgtatcgggcggggctcaggcttgggataagtgcgtccgtagcgg

SEQ ID NO: 422271 - DNA, 261 bp, Homo Sapiens
ctcggccggatgtggtctcttacatttaatgtagaggatagcgctgaatcagagaggatgctccagtctctagataccatgtatctagtctttgaagataagacaataggagttgatgtcagtagcctctgaggttgacttatattggtccctcctgtccttattgaacagccctgggattgtccgtttttatgttgcaccagtgtcaacttgggggtctatctgtgccaaagtaaaatctcagcattgcgtccgtagcgg

SEQ ID NO: 422272 - DNA, 138 bp, Homo Sapiens
cagcagaaacgatgacaagatgagccttctcttctgctcctggtcaaggagatagcagaatttctcattctgccaggtctgtgttgcacatgcaaatacccgggtcaactgagatgggaactctgggctctccgatcc

SEQ ID NO: 422273 - DNA, 183 bp, Homo Sapiens
tctgcgactgggcaacttacatatgggtaaggttagaggattatctgagcccttgggtgaaactcattttctctatggaatctttcagtacctgaatttttttccagtaaaataactctttgagtttcaaatgacttttcatgaataaactgtagatcaccctccataagacacatgtcttat

SEQ ID NO: 422274 - DNA, 139 bp, Homo Sapiens
ccacagagaagtggagtggtggtcaaggtctatagaaattaacaggccaagaaactacaaatgtgagggatcagatcattccatccaacaaatgaggaggagtggagactgtcagagaacagacaatgacagaagcgag

SEQ ID NO: 422275 - DNA, 147 bp, Homo Sapiens
cgtactgaattaattagacacatgcgtataactaccagagaagccccagaaagaagcagtggaacacaatccccacaactcacagaagtagcagagtaattcctccttccactacccaaagtgagaatctcacaaggcatcagatga

SEQ ID NO: 422276 - DNA, 192 bp, Homo Sapiens
cgtacgcataatctgccctttaatttgcaagttaaaggtggatataaatatgactgcatagctacccctgagctgctactctgggcacactgccaatgggatagccctggtccgcaaggaccagtacctctgctgctgctctacactgctgcttcaataaaagctgctgtctgacaatactggttcaccctt

SEQ ID NO: 422277 - DNA, 119 bp, Homo Sapiens
tactctctggcactgggtcctgcaaactctggaccccttggatctcctttatggaccctcaagcaatgtctcctcaactacagggagttgccaggttggtaccatgggttagctgcccc

SEQ ID NO: 422278 - DNA, 151 bp, Homo Sapiens
aggactcactgagtagcgtactgtctgcggaaaaataaggatcggcatggtacgccacatacatgcccggtaccagacggaaaatttctgataaatcccaggctccggaatcgcggatcatctgatggtcaatgacggtgactgcaacggg

SEQ ID NO: 422279 - DNA, 269 bp, Homo Sapiens
agcaaagcaaacgactattgtactcggtcctttcccagcttggtgggcggcatatgcctgatgcagggtgatcgtgacagggaagatgttaccagtattacatcctgggttgtgcagacacgacagtatctggaaagagttgacgccgaaaatcgggaaatcagccagaaaaaccagcgtctgactcggctttacaatgcgctcagcctgtgcaaccagtctatcgtgcgcagcagctctgagcaggagctgtttgagccagtacggcg

SEQ ID NO: 422280 - DNA, 366 bp, Homo Sapiens
cgactgtactggtggttcagacagcaactcggagaagatacagactccgggatggtccgtactgcagcatgcgcatcgaagacaacccgctcgatctcgcgccgaagcggatcctccaggccctcggcgctgcagagctggtcgacgaactgctgagacaggtactgcacatgctgcgcgtccagcagttcctctgcctccagagtcgaaaactggttgtaggtctgctcgccagactcccagtgcagccttgcttccgagttgctcaggtgactcgcagcgcgggcgcaagaaggacttctcgctgagatgggagagggctgcacaacctcccatggcgatcaagtccgccagagcagtacggcg

SEQ ID NO: 422281 - DNA, 224 bp, Homo Sapiens
cacggagcgtactggatccctgaagtggatggtcataggcacgctagaaacatggatctctgtctatttagctgagaattctggattaaattcctagaaagccgctgaaggcttttaagcacaaaaatgtcttcagtaactgactgcacggaatatacatgtacggcgcccaacaggtacggcgccggcgtaccgacgctcgagattcgtacatcagtggtcat

SEQ ID NO: 422282 - DNA, 127 bp, Homo Sapiens
cgttagtctgggaaaaaaagacatgttggataagaaggtcacaatgtgccaaattcaatgccctgtagaatggtcacctaatcttctatcaaatagatgtgacataccatctaaagaacggctgccc

SEQ ID NO: 422283 - DNA, 189 bp, Homo Sapiens
atattaaagacatggcgtctgtccaatccagacacccgtcaagctgaacatctgaacgcagtttacatttcccagtcgtgacgaggcagacgcctaagtggcagaaacaggttcattttaaaaggctctaaaaacttttcattagccaagcattcccagctttcccaaggcaagctttccttgcacttg

SEQ ID NO: 422284 - DNA, 406 bp, Homo Sapiens
  misc_feature (309)..(323): n is a, c, g, or t
cactcacctgagtcgctgggcagaggtcagtcttgtccagacatgggaaaaaaataactcgagtcagacaggtgggtcaccacagaactaatccagcctgcaaatggcctgtgcaatcttcagctctgtccagacctgcctccctctggggatgcctttaaaggtgatgaatgatctggatgaatgggcttagaagataagagggaaaaacaaatatcacaggtcaaatcgttatttgtcttcaagtttaacaccgtctactggactaaaagatgtccaaagaatagttgttcaactatgtaaattccnnnnnnnnnnnnnnnggaaacggggcacggatttgggcccggggcccagggcaaagggattgttctggccccagggaaagcgaccagggataggggtt

SEQ ID NO: 422285 - DNA, 239 bp, Homo Sapiens
tttcatttgtcatatcactctggctacgaggtgagagaacatcttaatgggccagagtggatgtgtgaaaggcagtgagggagagacactaagatgaaacagacttcatgcatgtcactgaaatgccccgtcaggggccaggggataaacaaacaaacattcagttctaataattctacaccactatcatagacaatgcattctactataatattagtacagaatacaaatcacggagt

SEQ ID NO: 422286 - DNA, 397 bp, Homo Sapiens
acaccactgagtcctgttgatttttcttaagaaatcctagatagggtacaatttattagagaaggcttcctggcttccatgtacagtgtggaaactgatggcagattgaactggagaacatggaaaaattacctcctaatagtgcagccaactcaaaagtaccttccccagcatttctgaagacaatgcaaaaatatgatgccttataggcagccatgcctcagaacattattgaaacacttgtttcttaaaaatttacatttgctttaatgttgaagtttttcttctcaaagtctactgttaaaaattaatgagatgcagtcagattgttatccatagaaatgttcatttcattgtaatttataacacaaaaaagtgcaaaataagaaccaaatta

SEQ ID NO: 422287 - DNA, 398 bp, Homo Sapiens
ggctccccacactgagtccacctgctcaaacatctgtatatatttgaagaaattacatactttatgatttcattttattgctgtaaatatttatgtttttatactaatttctgtctcaagtgccataatatataagaaatatacaatggatcaaagagagaacatgccaaataaagggaatgtggagaagaaagctgagggatataactcaaatattttcctcaagtccttggattctgtgaactataaattgctcatgatggattaatgttttaatttcagtaatacaatcaggattaagagaagcttagatagcatctttaaagggattcttctgctacatacataccacaagacagatacataataacgtatcaggtggatgaatacctgtatct

SEQ ID NO: 422288 - DNA, 403 bp, Homo Sapiens
  misc_feature (104)..(187): n is a, c, g, or t
acaccactgagtcctcccagttgagaaccactgatgaaaatgataaatgatatactatgcttttaaaagtatccggccagttcactgccctccccgccaccccnnnnnnnnnnnnnnnnnnnnnnnnnnnnnnnnnnnnnnnnnnnnnnnnnnnnnnnnnnnnnnnnnnnnnnnnnnnnnnnnnnnngcatacccaccagagctatatgttactgaaattaattggtttttctcatctgatgcccccactaagccaggagcacctcggttgatttgggatctgggctttaatttggttctctcgtggattatctgaaggatcttgcacgacacttgaagaacaattcttccaacatttccctacattgtgttaaaagggatttttctgcttgttctgtaggaa

SEQ ID NO: 422289 - DNA, 439 bp, Homo Sapiens
gtacttagtgtcacttatcttattttttccgtaattctttcctactgtttccatacgtcttacatgtggagatgcaatagaaataaaattgcttctgctaaaatcacaaccttttagtctgaaggcaaagctgctttgttctagaatgcctgcggtattaagaaatcaccatgtgttccttttatttttgagttttaccatgatttttactagtgcctacttcaatgagttcttccaggatgcaggctattttgatgacatcttaaacaaagggaataagaattgtctttgccttaccttccttttcccacctttctcttcccacttgtcagagaaattttgcatgacagaggtgaatctctgtggaaccttctaggggtgtgaccatctgcttgccctggagagaatcagtctcttctttccaagaaacgatctgtca

SEQ ID NO: 422290 - DNA, 321 bp, Homo Sapiens
  misc_feature (15)..(15): n is a, c, g, or t
acacacctgagtcangtcagtgtcattactgtcatctctgatatccttgcactgagaccgtgaatgtgctgtggcatccagagacatggtttcttatctccttaagtgttcagctgcttttctttcgtttatgttaaaggcaggcaatccttttcacctttcctaggggagcctatttgcagattctttgacataggaaacatttttgctcaagctccgggccttacttttttaagccagaacatgacttggggcagttctcagaccccgggtttctccgccctccagagaggtcggcaaggaaatggactcaggtggtgt

SEQ ID NO: 422291 - DNA, 286 bp, Homo Sapiens
tgcaccatgcctggcagaaagagtcaaatttctgatgtttccttgctactctgaaaactttcctgacactaaatcctaacagtactaacaatactttccttcatatgtaattctcattactcctcataatcagagtaactttttcccatgtttgtctctcccattgtctgcctcctaatggactatgttttattcatctctgtaacctccaagcgcctggtgtaatgtagacattttcataaatgcctcatgaatgaacaatcacagaaagaggccttccatggtg

SEQ ID NO: 422292 - DNA, 270 bp, Homo Sapiens
agcgagagatggtctggattttcttgctgagttcttgaagactctagggtgcgttgatccacacaccaagcctcggcgatctgcgccaacgcccgattgatgtagctgcgcaacgtatcataggtgaactgcagctgagcgtagagcacatttcgtacagattcgctttcaagcgacagggtggtcgtattgcccgtacttctcttggttctacgcgtggagttcacaccggagctattggccaaacgttccagttccaacaaaccgttg

SEQ ID NO: 422293 - DNA, 332 bp, Homo Sapiens
  misc_feature (68)..(122): n is a, c, g, or t
acactacctgagtcttcaaaacccagtgtgaattttatatttatagatctcaattcagactagccacnnnnnnnnnnnnnnnnnnnnnnnnnnnnnnnnnnnnnnnnnnnnnnnnnnnnnnncatctagagtctaacccccttctatctccagtataatcaccttaaaatgtacaaagctatattacaaggtaacccagaaattaacgtacgtgctctcgttaaaactgccaagtgaacagatttaactgttgaaacgtgtttacgacgttttctaagtgactaaaacggggaaactagttatttacggaactggcattgcagaatctttta

SEQ ID NO: 422294 - DNA, 313 bp, Homo Sapiens
cacatggccgaggatacccagctgataagcgcatcctatgtcacgtagtccaccatggggaccctggataaacagaagtcaatggctgccccacctcctagcgtcgaagaggagagagacaaagaagcaggaagccccgaggaccatcagaggctgcctcccggatgtgccccttccccttcatgaccactgcggtcgggttcattgtatgggttcagagaatcattcaaggcaccaaactcaagggccacacccaccaatgggtggcacaaattgcatctcaaagatgattcaatatccctcaaatgtccaa

SEQ ID NO: 422295 - DNA, 400 bp, Homo Sapiens
acactactgagtcacgcgaataggttgcagttggccatggtgggagaattgacactatggaaattagcaagttctacatattagagcttctctcccctatccccaaccccagaactggttgttaaacattaccagcacacctctgccataagctgagttgaaaaggtttggaagacattatattgtggggatagcccaatgtagatgctattggtacctcaccctgcatccctttacctagggagtgcacttatcccccaggtgctgtgagtgttggcagctaacaactcacaggcacccctttttctaggaattgtcctcagccaacaggagttgccgtggctggaatacctgggaggtaacgccctacacccaatagtggcccgtagcccatgattga

SEQ ID NO: 422296 - DNA, 399 bp, Homo Sapiens
tatgagatagatctggaattaacgtaatgaaggtgagtagcactgagaatgcccatagagtctgtagcttacattggggtgtggtgtcaccatgatcttagtgttgcactttttggaaactaggtttaggtgaggaatgaagtcacaatcccctaagaagggaataatgaataaactagttatatcagcttattactttaggagtagaaaacagacctcatgcaggaatcattctgcatatgtggtgaagccttcttggtgagcagacaaacaaaaaagaaaattcactttttctaatacaatagcacatcagacctttgtagcctggagaactcattcttctctactttagaggtgtatctttatctaataactgggaagggctgtctctaaccggag

SEQ ID NO: 422297 - DNA, 410 bp, Homo Sapiens
gaggacccccacactactgagtcagactctgccggcttcctttatggtacgaattgtgctgcagtcttcttatccactgtgcaacacaccccattggctgttgcagaggtagctttacctttctaggggtgtcaaaatggcaaatgatttagttactgtctaaataagggggaaagaggacttaactctgctcattgtaagggactagtctgaaagagcctcaaacgcatgataatattattgcatgatagactgcctgacaagtgagaggaaaaagaaagcactaataggaaggaggaagacacaaagagctacggggagaaaagtagctcaggaaagggggaacctgaaatgtagatgggtttaaggcccactacgattaaaacttttaggtatccccattgtccata

SEQ ID NO: 422298 - DNA, 407 bp, Homo Sapiens
ttcctgcatcgatggagagggagacggaagactattgtaggttggtagttttgtccttgtctaagattgactgtccctgggcaaagatattgcagctgtctttgtgacaaggacatttcatctaaattggagtcactttttgagtcaagagtgatcaaatgtaagtgctttgaaaagtgcatagtaccttgtatgtgtcaggtttcagcatcctgttaccatggagctcccctctcctgtgattaacgtcactccagtcacaagtggttttaggcctggagtctgaggttcctctagtgctggtttcctgtgtttaattcatatccatcgattaactctttttctgctccgtaaaccactcacaagctcacgagaaagggcggctggtatgctggtgttagcagtga

SEQ ID NO: 422299 - DNA, 405 bp, Homo Sapiens
aaggatccccctaagtctattagtgtccgacaaaagtgtttgttaaaatagatcaaagactagatttctaaccattagggaagggaaagacattctcagagattcacaaatatacgtagttaatggaaccataacttttagaagtcagtgttcacaggacagatgggaatagctggaatgaagtgagctttgaatgctgattgctttattttatactagctaatgagtgaatgtgccacacatcctctaacctttctggaatggtgaacaaatggatagatgtgctgagtaagtgttggaaaacaactacatgaacccttaggcaactaggaggaatttaaagaaataaaccatgtgtttacaattaaactaggaaaagcctgtatatcaatccaattggtaaca

SEQ ID NO: 422300 - DNA, 324 bp, Homo Sapiens
  misc_feature (92)..(162): n is a, c, g, or t
acacactgagtcctaaatgacaagagctagctatgcaaagaactagggggaaggcctgtgtgtctccccaaactagaatgtcaggtcacacnnnnnnnnnnnnnnnnnnnnnnnnnnnnnnnnnnnnnnnnnnnnnnnnnnnnnnnnnnnnnnnnnnnnnnncagtgttagggctcagaaactgataccccacaatatggtgtttggacacactgaattgaagaagcttccaggtctttctgatctctcccaaagtacaagatgaagtcaaagttccttgatttgcctaagatccagatctaccaaggagatcagctgttgttc

SEQ ID NO: 422301 - DNA, 110 bp, Homo Sapiens
acattctgagtccaactctctgatatgaactcgacttttagatgaagatgttcactgggcaccaagaacaaacctcctgttcacttccatggtgccctgaagaaatccta

SEQ ID NO: 422302 - DNA, 399 bp, Homo Sapiens
acacacacttgagtcacaccacctgcacaccacctgagtcccccaccagctgttagggactcctcccctctttacgcagatcaccagttatcttacactgcctggctttagtctcagatgaagacattctaataagcaccaagttgttcagctcagtgctaactctgccaggaatgtgtgcatttcctaagagctgccgaaaatggaaattaaatagtttgaaagaattaaatgataatggtggcatttcatacaccagaagggcagattggcatcagtgtaagcaccttttcagtccttctttgagaacaccaggaaagtggctacctgttttgctcatgcgaaatttggatctctatacaaaagcaaaaagacagtttgtgaagcgttacaatattg

SEQ ID NO: 422303 - DNA, 317 bp, Homo Sapiens
tgagtcacaccacctgagtcaggatccacctttctatgtatggaataaagagcatctatttgaaaattggctttctaatttataagctgtgagatattgaataactcccggattcattttgtcttaattccctaatctataagatgaaaataatactcattcatttgccccagatatattaattaagcaatcataatgtttcagacactgtgctagggttcaaacactgtagtaaagatatgggcttcaggacattaatagtttagggaatgagatgatgagtaaataaacaattagattacagggttaagagcaac

SEQ ID NO: 422304 - DNA, 409 bp, Homo Sapiens
acacctctgagtcgaggttgtaatagatatctagaacagaaggaaagacaggcaaaaggagatagataaggattttagttagcaagtagagtgctagactatagaatctatgttgaataatgaggaaagagggggcatgaaagtggtgatggctagtgagtaagtgttaagatgtggggacatcgtgatgagattggagaattataatgagaagtacccaagttaagtgagttagaaggaaggatgtcactgtcaaaattctgattaaataagtgctgttagtggtgatagcaagatcaactgtatgaccaggtgattatgcggctgtagtggggagaaaaagaggtaactatataaaggccaaggaaatgagagaccaggatgttgaatggatcataggtggatatag

SEQ ID NO: 422305 - DNA, 321 bp, Homo Sapiens
tcttctccctgacagaaatagtttgagtaagattggcaccagctcttcttcatacacctggtaaaattcagctgtgaatctatctggtcctgggcattttttgttgggagatttttctactactgattcaatgttcttcttcattattggtttgttcagggtttctattaatatttccacctggttcaattttgggagtttgtgtgtttccagaaatttatccattttccctaagttttctagtttgtgtgaatagagatgttcatagtagtctctgatgatgtttcatatttctttggtatcagttgtcaggggagaaga

SEQ ID NO: 422306 - DNA, 349 bp, Homo Sapiens
tccccgcatgaatattgacacgtacagcaaacatgatcattacactaatacagggtacctatgcataggtgatacactaaactatgtagtaaactgtcatacgaaaaaaactcagcttattcttttagttcttactaagatcttgtctatttgtttccttttaagcaaaagttcaggagaaatgttcaccttaactttgtctattattggcccttgagcatattaaactttgcttctcagttttcccctctaagaggaaaggatgatgatgcttatcttatagagtggctttgaaaattaaccatgattatgatgtacaatacttatcacagtgcctgttatgtaagtg

SEQ ID NO: 422307 - DNA, 302 bp, Homo Sapiens
tgagtcctataataagcaaacacacccagaaaagaatcaaagttcttatgtcaaatgggagttcagcattgactttctccctggacttcagacattcatcatttattatttcatggtttctgggtagcctatcttgcatctttaattctgaatagctaccactttaaaagatttgatgcttaccactttaaaagatttgattagatgacaaatcaagagagattgttagaagaattattacaagatgtgggacaactgggagaaacttgactagtttggggtgtgctgaaacagatgtttat

SEQ ID NO: 422308 - DNA, 312 bp, Homo Sapiens
  misc_feature (293)..(293): n is a, c, g, or t
tggactaattgtctaatctaaaatattaagtcaatctggtcaagcttattaggaggaaagtatacccttttttaaccttgtgtataatatctttaaaatctttattctttctgtgttataggtatcatggtgagtggcagaattttctagataatacctcagaaccaaaaataaagatgtagtaaggtaatagatgaataaaagatttggggtttgggttagtcagacttatggagggttggacttcatcagagggcaaccagacattttcccaagaagcccatggaattcancgttaatacttttccaggg

SEQ ID NO: 422309 - DNA, 216 bp, Homo Sapiens
gatatactaaaaccatacatgttcatatattattagcattcccctaatcattgaaatcaatacacaattcaatcatactctattgtattcatatttattttatattaccactcatgttttatagtaaataatcattctgtcatattcacctatttcctgcagccatccaatcatgcacttatttccacccacacttcagcctatgtttatacatcc

SEQ ID NO: 422310 - DNA, 358 bp, Homo Sapiens
aaactctgcgcggcatttgggttggatcactttaatcttgaccaattaaaagagtcctccaaatcataaattatcatataaaagtctaaatcccacagcttcaacagctatgtctgcaccagttacgttaaggagcactacagaacctcaaatgaatccaatatgtagaagaactctgcatcttgggcacaaatgtttgataaacctgattcaccacaccatatgatttctgttaccagggacattttgttgctctacttaaagattatctgtcttagtcgagtgtgttccctaaaatgaaaggttttaccctatcatgtaattactgttgtaaaaataaagccagatttgttttatg

SEQ ID NO: 422311 - DNA, 167 bp, Homo Sapiens
ctcccgaaatcttgcgcggcatgaagaaactttgttcactttctagtctctagatctatgtcaaatgttagtaattgatcaacccataccaggcgcacaaggattgtgactttattgttagcaggggtccacccagattcagaaacttaatcctataacaactaccc

SEQ ID NO: 422312 - DNA, 116 bp, Homo Sapiens
cggtgtgcttttgtttgctgaatgatgggattcagagcagccagtgttgtcttctgcaacccgcaaacacccatgggaaggagagcttgtctggttagttagatgactttggatag

SEQ ID NO: 422313 - DNA, 344 bp, Homo Sapiens
caaactctgcgcggctgtatctgaactggcacagataacaccttaatgttaataacgaaagtcctatctttttgcacacaagactagcctccagtcactaggtcaacatgcctaaatgaagtatcacttatccaccagcaaattccagcctgaagcagttcagagtttaatgccaaggtaggctttccagatcaataacttatcccttgaagctgctagtggagacctggccaacggcccttggtagtacattaactgaattctagtcaacctcatttatcacattccctcaaagtgatctattactattttaaggcctttgatttgaacagtgcttcataata

SEQ ID NO: 422314 - DNA, 237 bp, Homo Sapiens
gaaacctgcgcggcacgtgtttttttcctcttctgaagtcaaagaggaagttcttgtgtcttaagaattctgttatatttctaatggtccatgacaggcaagtaaggtgggaaattgttgggttagttctcatgggacctgggacctcccttgacacctttcttacttggtttgctgtagatggtgggagaggatggatgtaggacttgaccttctgcctgtcgtccctcaggtccc

SEQ ID NO: 422315 - DNA, 212 bp, Homo Sapiens
aaacttgcgcggccagtaagatatttaatcagtgttttccctgcaatttcaaactgcctttgaaattgcagaaagcctgtgttttcctaattagcaaggggtgtcatgataggaatcatgaacttttctatcaaataatgtttctgttctcgacagtctgtcaggtcattagagataggctgtacatttatcactccagccgcgcagagttt

SEQ ID NO: 422316 - DNA, 401 bp, Homo Sapiens
actctgcgcggcctcatcacggacacggttatccatcgtggaagatcctgtttcaaagccggtcatggcgcgctcgcatccagacgatcacgcagatgccgcagggtgcggatcatatacttttccaccatgtttttagacagccccaggcgtgtggcgatttcctgctgggtgagcccttcgatcttttgccagatgaaaatcctgcgacagttgagcggcaactcggccagcgcccgctcgatggcgtcggccaactggatcgcgtgcatgtaatgctccgggtcgctacttgtgaggcgtgctgtgatcagccgcctgcagcgtcaacgcctcgcggcggtcttcgcggcggtaggcatccaccgcaatattgcgcgcggtttgatgcaggtaggcgc

SEQ ID NO: 422317 - DNA, 397 bp, Homo Sapiens
aactctgcgcggcacgaaagccacactttagatgcacattcctgtagatgttatcgtttccattcctgagttaagtcttctctgtgtagattgctcacttcctactacagatgatgaattgccagaacaccaggcacataccacacagcttgtacagaactacagactcagaacagacagtttggggactgtgttcttctataattattcttcaacctgctggaggtgcctcgctgcacgttccatacccactagtccacccagggggttgctgcaggcagttcagggcaggagccccctgcacccttctagcattccctggccaccagccaaaaaccaggagttgatgcctcaggagtgacacgaccagtgggggacaggagtccgtggatacacg

SEQ ID NO: 422318 - DNA, 382 bp, Homo Sapiens
  misc_feature (129)..(155): n is a, c, g, or t
aaactctgcgcggcaactctgaggaggccctaggggacacagtgtgactggacaaaagttaccaggatgcccgtggcatttgcctggaggaaagctgctcatccagaacagtagctctggagtctgcannnnnnnnnnnnnnnnnnnnnnnnnnnaaaccactgagtttaggtgggcggggtgggagcaaaggggggtgtgtaatgtgttaccgcagcatagcctagccttcctcaactaatatagctgcataaaggaaggtgtaacgggtgccccttcatcatcttagccagaccaaactgttgctccactccattgttctatattacatagagccaatatcaactttataccagatctgtggctcccaaacctggctcat

SEQ ID NO: 422319 - DNA, 262 bp, Homo Sapiens
taaataaattggacttttccaattaatattctgttctgtttaactgatctctcatgatttttgccttttaactctgtgcaatacattctgagtaatttcctcatatctatcttccagctgattgttttttcatatctgattaatctgctgttcaagccatcagacaattttaattatgacttttaatctagaaatttgattatttaaaaaatctgccctactttcctccttagagtatctgttatattctgtttttggatgg

SEQ ID NO: 422320 - DNA, 380 bp, Homo Sapiens
gaactctgcgcgggtactagaacgtctgagcgtgagagttgagaatccctgctgtgtactagaacgtctgagcgtgagagttgagagtccctgctgtgtactagaacgtctgagcgtgagagttgacagtccctgctgtgtactagaacgtctgagcgtgagagttgagagtccctgctgtgtactagaacgtctgagcgtgagagttgagaggtccctgctgtgtactagaacgactgagcgtgagagttgagagtccctgctgtgtactagaacgtctgagcgtgagaattgagagtccctgctgtgtactaaaacgtctgagcgtgagcgatgagagtccctgcagtgtactagaacgactgcgcgagagagttgag

SEQ ID NO: 422321 - DNA, 367 bp, Homo Sapiens
aaactctgcgcggcccccagccaatggggaaaggacacagaaacaggaactgcgttagggttaaaaaccacttccctcctttgttggcgggtgctcttgggattgcaaccagcgcaagcagcacccttctgcagaagtaaagatgccttgctgggaagtcttctgtctcagtgctggtttttcttgactacactgagcacttgttttcaacaaatttgagggtcttctgggatcccattctcctttgggaggggtagcgattacttttcctcgtgagacacgtcccactgccttgttgcagtggcccaaggagcggaggatcgggtccacccaaagtgaggaataaatccggactttcagcaacgtg

SEQ ID NO: 422322 - DNA, 367 bp, Homo Sapiens
aaatctctgcgcggctggatactaccgatatttctttcatatctgagtctaggttctagatgctatgctctgtctcttcaaactgtggggtttcttgtccttttagtatgctttgtaattttttgtttgaggctgtatatgatgtactgggtgaaaggaactgagttaaataaggctttagtatgagattttgtgtttctctggctaggagttaggctttgtttactctttgctatatagtcatggatgtcagaggctaaaatttcctctagtgtccttgtgttgtctcccctgtcttctctggggagctccctagaggcttctttgtaaagtagctctgagtcttgcagtgtctatccctaatcat

SEQ ID NO: 422323 - DNA, 351 bp, Homo Sapiens
gatcccgaaacgggcgcgggcaattttgaccgtggtccacgacttcattaaaaataaaaattcaaagactacaaccggaggagccatgaaaacaaaaacatcaccatttgccaaaacccgtttgtctggatcgagcaagtttatactaacaaactaaagaatgagaaaaaatttatcttgcagactgtaaaagttcctctacttaaaaatggaagtattttcatttttaattacctttgatttgaattcttctctacaaagaaatctacattattaaattgtagttggccttttaatagatgaaagatatcttgagctgacctgttcctggttagctgattatagaactgg

SEQ ID NO: 422324 - DNA, 118 bp, Homo Sapiens
gctatctcaagagattggactactaaaattttgtttctgtaatgctgaaaaacaactaataaatcactagttcatatctaagtataacggaaataagtagatgaagagtaatttcctt

SEQ ID NO: 422325 - DNA, 648 bp, Homo Sapiens
cctgaccacgttgtatcactgaggaagtggtccgggtccatagctgtgagtcgtccaggctcaggcgcgcatgtcgccttcttggtcagctgccagcgtgggcctgggggaacaggctatagaacaataagccgcgctccagcgccttctccagcgtgcggcaatggatcagcgcgtggcacatcatggcgaaagtgccgcgtttgctcggcccttcggcaaaccccaggtattcgtcatccaaccccagccagagcatttgcagcaagcgggcaaattgctctggagcgatgcgggcgcggggttcggtcagcagttccggggtgatgcccacctgctgcaacacccccgagtagtcgaaaccggctcggcgcgcaccgccgagggccgctcgggcgtaatggctggcgatggtacgttcacgcatgcaagggcctcatccatggagtggcggatggtagccatcacccagtggggcgacaaggcggatatccgccaaattgtaggacgagacaggatgagtgggcggaaatccgccactgtgttgcactctccggagtcgcccgtgaaccccaagccctgatgtctaaaggccttcagcgcgtttaagcaaagtggcacgctgtttgcgaataacattcggtgctc

SEQ ID NO: 422326 - DNA, 702 bp, Homo Sapiens
aggcgcgacacacccgcggtcagattgatcaggatcacgacctgaaacacacctttggcagaagaccacgtgcagcaagcgtgacagaggtagatcgcaaagcgttattggggcataagaacggcagtattacgagccactattccaccccggtgttgcagcatctgattgaggctgcgaacaaagtgttggcaactgactctcgcgagccagtgctgaccgttttgaggaggaaatcgagatgatcccccgcaaagtgcctacgtatgaaaaagccgaacaggttcgagttcggctaagtcattgaaaaatatggtcgggacggagtgattcgaacacccgccccctaacaccccgtgtacgcggacacctctacaggccgctaaacacaaggcttcgcgcctggcgctcgctgcaacgatgcccaagagtgcggaaccgtaactcacgaagtctcttgtaaagtcactgagcctatttaggctccctctggcgtcctgcagacctaacacaaaattcaaacacgagagaaaaagcccgcacgcggcgggcttaacatcagcaacgcaacttggtcgttatctttgcgcctggctctcaggatccgccagtgccctattggtaatcggcatcagatccttcgccataaattcagaacccttcgcagacaggtgatcgtcctcccggtacatcatctggccg

SEQ ID NO: 422327 - DNA, 214 bp, Homo Sapiens
acggaccgttgttgcggccatgcaagacggggcgcagcgtgcttgagtcgtgaagtattggaaaaaatcggtatcgcgatggataaagtcgatactgatgcccatgggcgcgaactctcgaaccctgccgccgccggccagtactgcggcgacctggggcagtggattccgatggcatccagcacgttcgatccgggtgcactcgagttggcgg

SEQ ID NO: 422328 - DNA, 647 bp, Homo Sapiens
  misc_feature (202)..(331): n is a, c, g, or t
  misc_feature (356)..(408): n is a, c, g, or t
ggcatataaagtatgttagtctccctaaagaggattggttcattgtgtttttcctttattctttgtttcgttctgagacaggttctcactctgtcacccaggcggagtgcaggttatgatcacagctcacgcagcctcgatctcctgggctcaggtgatcctttcacctcagcctctcaagtagctaggactacagcatgtnnnnnnnnnnnnnnnnnnnnnnnnnnnnnnnnnnnnnnnnnnnnnnnnnnnnnnnnnnnnnnnnnnnnnnnnnnnnnnnnnnnnnnnnnnnnnnnnnnnnnnnnnnnnnnnnnnnnnnnnnnnnnnnnnngtgtcagcctgtgctctagggctgnnnnnnnnnnnnnnnnnnnnnnnnnnnnnnnnnnnnnnnnnnnnnnnnnnnnnctattaaagttttacacacacgtatttgaaagaggcaagtaattttataagtcgtcacaacagatagctcttctgcttacctcttctacccaattttctcttccccaaagataacctcttttacttccttaactgattctttttggttttaccctcatatctttaagcaacatgcatacatttcttcttaattttcagtacttttgcatcatatatgtggctcccgggggatcctctag

SEQ ID NO: 422329 - DNA, 262 bp, Homo Sapiens
ttgacacgaatgtactccagatcatcatcgtgcgttggcggtactgcgcgacacagctgctggaacgcggggaaaaacgtccccggcgtactctctacccgtggcaaagcaactggctccggcaagtcggcgccgccagggaatcgcgcaccttctgctcgatgccaagcaagaccttgtccgccgcctcatggcgcccagcctgttccagccaacgcggcgactccgggataaagaaacggatggccagcacgaacaccgc

SEQ ID NO: 422330 - DNA, 409 bp, Homo Sapiens
gttcacacgattgtaatgaagtagaggcgctggacgccctgtggggcaagatctcaaggacgcctgcatcatcggcagcgtcgctacccagcatatctacggcttgctgtttcgcgtgttgtggccgcgtgtgtgcctggccgcaccatttgtacgcaacgcaacgtggcgttccccgtaagacatgcagcgacgccagcgcgtgagcaccctgcaatttgcctggtgtggcccagcccggcgctgctcaatgcgcatgggcgacaacctcgacgtggcctgtcgttgtacacaggttgcacgtggtattttcctccgtatggcgacgttgcacggttgaatgcggccggcagccatatacgaccagtattacagcaaatggccgaccgacaatccatcaggcagctcg

SEQ ID NO: 422331 - DNA, 541 bp, Homo Sapiens
agatagcgatcagaaccagcccgacgccatctgggtagccgccgccaaccgttgtgcaggacgcctgcacagaggccacccactgcgtaggcggcgccgtagagaaacaaggtcaatgagtactcatggggtgacagctttaactggtccatgaaaatgagcggtgacacaacgatgaatgagaaatgacaggcgaaggtgatcgcggagatcgtggcgtagctggcgaaatgtctgttggcgaaaaccttggcgtaggccctgaaaataccccgctcgcctggcgcggttggagggaagccgccatgcagtaatcggtgagccataatccacgttgcggcacagagggcgataaacgcgtagaagctggctttccatccccagtgcaattgcagccatgcgcccagcactggggaaatcgagatgacaatgcctccggccgtggccattgctatgcgcaaccgctcctgttccctgccgaaaaaaaggcctgcaccacgcttgggcagttgaaaccccgagcttggctgatgatcggaga

SEQ ID NO: 422332 - DNA, 480 bp, Homo Sapiens
ggcggatcagcgcgtctcctgctcatccaacacctgacgtggatgatcattacccggaatcgaactgtcgatcagcgccagcaattgcgcacccagcgccgtcagaatgaaattctcgccattgccgccctcttcctcaggccgcgactcgataaagccacgcttgaacagcagcgcctcgtaatcggcagcggtcttcttgagtgcgtccaggttgccagtgtcctcgccggctgtcgccttctcggccgcttctggttcggcgtatttgcgcggggcaaagctgccttcgccgttctgcacttcatgcagcagacgttcgatcagatcccaattgtaagtcgtcatcctgattcctcctgcaggccgatggagttagcccgtcttagggagtgacacgttccggcacgggccgttcaaccaaacggacaggcgtcatttctctgaactttccagaggttcgccgcctcaactgcacat

SEQ ID NO: 422333 - DNA, 186 bp, Homo Sapiens
acgggcgcaggaggcatgaggctcagcctaagcaggctcttagtgatccctgatgtcgataatctgagacgtcgtctcctaccgccgatcatccgctaagcgaaagtaatccacgctcagcttgtgaatgagatgagatccgacgcctcatcttagcggacgtccgagaatcgaacgccatggttc

SEQ ID NO: 422334 - DNA, 143 bp, Homo Sapiens
cgagccaggaaacgtggcatgcacgcgcagaacgcctgtcagcgtgaaccgaacgatggcgcgctgcgcggtgatcagtacgtcaaaatctccagtccgagcaaggcgctgggtttgcagcgctcaagcgtacgcggggaggc

SEQ ID NO: 422335 - DNA, 137 bp, Homo Sapiens
cgggcggcatagtatatccatactaacatacagtacatgtagtgtggtaagtagcacaaatgggcaaatatttaggtatttaaattagttattttgaatatttctcaaactgaagtataatcaatctttcttttttt

SEQ ID NO: 422336 - DNA, 611 bp, Homo Sapiens
tgaggacaggctaagaggggagccgggtaccggttacgaacggttcagtcgcaacagtgcgcaagttggagcgcatcccgaaacgggaacgtgccacacgtacaattgcgccacaaaaaacagcagcaccatgaagtagaaattgcccatgaatgcggcaccgccaatggcctcgatcaacgagccctcacggctaacgaaatggtcacattgatctttgcgaacgggtgcaatcggtttgtctgaaagctccgcgtcgacgcaatcagtccaacggtaggtgccagcaacagttcccgcctgcaagctctgaattctttcgtgactggtgaccatgacactttcaatgactttggtcggcgagtagtcatttgccattagcaagccggtgagcagtacccctgcgggaactgcgatcagtcctaaccataaccgattgaatatcaccgtaatggcaacgaaaccgtccagaagccgcccactgaaggactcgtgcttagtggtagttgcagtcatgcttttccccttctaacgattaaacacgacgtgcaacccacgccgtggtgcagcggtgccccgatgatcggtgcggtggtttaaatcacggattc

SEQ ID NO: 422337 - DNA, 372 bp, Homo Sapiens
acggtctatacggacgccagcggtaagaaccgcaagagcgtgaacggcagcgagtcggatcacagcctacttcgtgctgccggcttcatggtgatggcgaacccgtcgaacccagcggttcgcgacctgggtactggcccgtcattttacagtgcctgaactctcgaccataatgcgccgctacctggtgaacaccgacaactgaccagtaaccacccaggtgctggagaaacacgcatacaccgaaaacaggcgaacccaacacggacgtgcactgaaagacccggatcgacgcacaacggattacatcatagtcccgcgacttcccgatagcgggcagctatacacacgcaaacgtgagcaaatacatga

SEQ ID NO: 422338 - DNA, 643 bp, Homo Sapiens
agcttgcacaccaggtatttccccgatactgtgtgcaaatggcatcagatagttgatagcccttgtttgtcgttctggctgagttcgtgcttaccgcagaatgcagccataccgaatccggcttgtgattgcgccatccccatagcagccatcacatcagtaccggaaagagagtcagaagccgtggcccgtggtgagtcgctcatcatcgggctttttggcggatgaaatttagctacgctttcgagtctcatgcgccttctccctgtacctgaatcaatgttaggtttccgcagaacactgcgccggtatcgatatacatttggttggcaaacttgagtggtttcactgctggcgtatgaccaaagatgaacgtgtccgcgcctttgatttctttcacgatcccgtttggtgagttgctgattcgttcgcggttccagattacctgctgatgatcaactggctttccaaactcgtattcgtcaaagggataatcggcgtggcagataacatattttttatctttgctcaccagttcgatgattaacggaagttcatctgctttatgggcaagagtttagccagaatttctttgtcgtactcgagattacgaccagtcacgccattagcagccgtgattacg

SEQ ID NO: 422339 - DNA, 681 bp, Homo Sapiens
ggtgatgcctgagtgtggcagcgagacgcagcgctccagcagcaagcgctcgtagttctgtcctgcatgctcgacatcaggctggaatgttgatgacgtcgatctttgcctcgtagaccaagctgaccacgtggcaaccgtctcgtcgtagtgacgcacggccggcatggccgatagcagcaccgagtcgccccagccgaagccagtgcctacggcaagctcagaatctggatgcggcacgccgacgaagatgacaagacgcgacgggtgaatctctaccgttgaaccaggcaaccgataagccttgggcttgccgaagcgcgggctttgcgggtcctgctcgatctccgtcgcgctgagttggcggcgagtcattaccgtcaggtacttgatgccacccttcccgactcgatccggcttcagctctgaggctgtgtcacgctcaccggtgccaatgaacaccgcagccccaccgaacagccgggccttcaatagggcctccagaatcttgcccttgatgttcaggcgatcctcttcggcttcgatcagctcgatctgagccttgtcggcctgccagttgcgccagttgcggcacgcatcaacggccgggatgctcacgcccttctgcgccgtccacgatccacggaaggcgtcagcagttgctggtcgtccatcacggaa

SEQ ID NO: 422340 - DNA, 653 bp, Homo Sapiens
tagacgaatgtactcacgggtttgtggatcgtgctttaactggtcatctgtttatacagatagtttagaatgtgtcgcaagcccgctgtaggtgctggcgcaacacagaggccgcctcttcgggggctctggcttcagcaagcgacactaatgcctcgtggtcgtcctgtgccatttctcccagccccatagccgagaggtgaagtcgcaagaagcgctcctcttcctgcaattcaatgtcgatcagacgcagcagcttcttgttgggcgtgcgtcgatatagagacatgtgaaatagcctgttgaggcgtccaaggctctccaaatctgtttcactttccatagcaacaatatgtaccctagctagtttgaaatcctccttgcacagatagggaattgattggcgtaacgcctccggctcaagcaacaggcgtatggcatatgtttcgacggcatcgtcaacattcatctgaagtacgatggcgcctttgttgggtacatttcgtaccagtccttgagcctcaagtttcaacagcgcctcgcggacaggcatacggctaacgccgaacatgcgggctagctcctcctgccgtcaggctgaacagccgccaggcgactgttcaaatcccatcccttacgtttctccacaagat

SEQ ID NO: 422341 - DNA, 130 bp, Homo Sapiens
ggggagcggatgatagtccggcaatctcgcgcagtctgatgcgtgccaggtctgtcttcgaacgccgggcgtttcatcgccttgagcactttcgggctggcgtgctggaacgggatatccaggtacggca

SEQ ID NO: 422342 - DNA, 679 bp, Homo Sapiens
ccacgaatgtgcgtgaccgtggcgccatcgaagacatcgagcgaccgcggtagcgccaaggaagccacgatcaagcgttgtgaagacaacaactccaccatcgccgcctacctggccggccaggtcgacctgatcgccagtggcaacgtggtcatggtggccatcagcgaacgcaaccccaagcgcgtaccggcactgaaggtgaaactcaaggattcgccggtgtacgtaggcgtgaacaagaacgagccggcgccgttggaaaaggtcaaccagatcctggtcgcggccaaggctgacggtagcctggagaaaaacgccatgcagtggctcaaagaaccgctgcctgccgacctctgacgcggagctcaacgatggcctatcaattcgactttgtgccggtgctggccaataccgacctgctcctgcgtggcgcgctgttcacccttgagctgacggccattggcgccaccctcggtgtggccctgggcactgtcggcgccgtggtacgggcgtggaagatccagccgtttgcgtggctctttggtgtgtatgtcgagttgatccacaacacgccgttcctggtgcaactgttcttcatcttcttcggactgccgtccctgggattgaaaatcaccgaatggcaagccgcgtgctggcgatggtaatcaactggggg

SEQ ID NO: 422343 - DNA, 526 bp, Homo Sapiens
  misc_feature (138)..(194): n is a, c, g, or t
  misc_feature (226)..(300): n is a, c, g, or t
actgagttggtaggtattagccattatccacacatttgtatttagtatcatctgtctcctagcccttcgctactggaggaattgtggaatggagaggttatggctaagtactattttatgatgttattctctgggaannnnnnnnnnnnnnnnnnnnnnnnnnnnnnnnnnnnnnnnnnnnnnnnnnnnnnnnnaggattcaggttcttcaggttctgttgatctnnnnnnnnnnnnnnnnnnnnnnnnnnnnnnnnnnnnnnnnnnnnnnnnnnnnnnnnnnnnnnnnnnnnnnnnnnntgtaactccttgcttctcaaaatgtcccaggacaaaggccccaggtaaattgtttgtatattcaagcctgagaaacctacaggttcctttctagttaaaagcccattgttctagttggcctagagagctgttgactccgcaatgaaggaaagtgttgtatatttctggaggcagagagaggtctgcaatgcaaaaatagtttacagagaaagcggtattgttacca

SEQ ID NO: 422344 - DNA, 557 bp, Homo Sapiens
  misc_feature (540)..(540): n is a, c, g, or t
ctgagttgggaaatagaaaataagggccaggtgctggaagaactgggtcaggagtgtctggcaggcattcattcagtcttgggactgaagatatggtgagtaaagttacaaattaatgtcgagtaaagaggaagttgtggtggcgataggggaagatacaggagcacagatggctgggtggccttgatctggtccctaaagctgcttggttggagctgctgcaggttaaaacccctagggcaaggatgtggaatcagaggctgcaccagtaagaaatctctttccaagagattttgtaggggctttgttgtattatttgacaacagtcaattctgctacagatgaacaagaaaaagaagatggatgaaactcataaacgtgtgttaagtatagataatgactatgtagtagcttataagacacaggtgaaatgtatgtgttacatttagataatgagtaagtaaacagacatacaatcattcccccttatctatggtttcgcttttcaaggttttagatacctgtagtcgaccatggttngaaactattaaatggaa

SEQ ID NO: 422345 - DNA, 152 bp, Homo Sapiens
tatgcaaataaaaatcggtttatatagataccgctaagaccaatacaacaccacaacacaaaacacccaaatgaacaagcaaacatgtcagctaaacgcactgtgagatctttgattaaaccctggaggcgtgtgtgcgtggggtaggaggt

SEQ ID NO: 422346 - DNA, 342 bp, Homo Sapiens
gacaggacctcacagatgtaggagggacgacaactgctcagcacaagacaggatggcagcatcagtaataaatgccatggctatggcacatcaaagagttaatggccggggtcattcttatgtgaaacagagcactacttgtcaggatttataaatcgcaagatggaattattttaactaggaatactagtgccactagtccaccctacgcttcatgtcatatgataagtcatgtcccatcaaacaatactacacatgttgcttactctgcttatctatacaccatctaaagtacacactctccttcaaccaagtgagtcttaccctcgtggggcacgacga

SEQ ID NO: 422347 - DNA, 268 bp, Homo Sapiens
gaaaacagatagacccaaggaatatctccggtaggcagatcaggatctaacgggatcacgtggacagaatgctatctgacactctggatcatctgcacaaacgaaccaggaatgaatggaggtaaggaagtacaggaaagaacagtagtgatgaatgaaggcagttatggaaggatacaggggtttatagaaataattcctgacttagcatgtggaacctgcctcttaaaatttactcctcttcttttatctacgtggggtaggaggt

SEQ ID NO: 422348 - DNA, 360 bp, Homo Sapiens
gcaacaagatgcgccaagtacactctgaatgtggggcgttcaagatcttccatcgctacagctccttccaagtcacatctccgcgcagacactctgccgtgatatggacacacacggcacctttccagatctatgctttccttaattccgatcaatgtcctagctgtttccggaccccaccttttctgacattgccatcgctccgtgactgcacacacctgttaccagctttccccatctacactcccgttgccttacagtaagaaccattaaattagcacttaaaaattaccttatattcttgttacgaaaacggacgtgcccaggacaaatccttcttctgagcgtggggtaggaggt

SEQ ID NO: 422349 - DNA, 452 bp, Homo Sapiens
agaaatactgattaatatgtttattcattgtggacactaaaatagctcaggaaagtgaaaatgtcttagacatacgcaagtcacatgaccatttaaatgtgcaaatgtaagaagattcaatgtgtttacatcaaatgacatattttattgatttattgcagattcagtgcatatgagccaaattgttgagtgtgtaagagctatattgtgtattttattaaattaatatatagttgtgttgcaaaaatatttgggcttatattgtaaatggcaagtgttgccttggtagctgtcgaactctatgagtatagtttattcctgcttccttttccccatggagtgtgggaagcagtgcctcagagcaaagtctcttgtttaatgtatagtctaccaagtactacagtacataatctgttcaaaatgtgtttgagtgagctgatggagctaactga

SEQ ID NO: 422350 - DNA, 472 bp, Homo Sapiens
tgacttcttatatatattaggtaaattaaagcaaaacaatacaaagcaatactacagccagctacatcgccaatatacaaatgagttagtaagtaccataagtatgtttgaatatcaggtgctatcagagtatactacaaacagttacaaaagagattaggttcccaatcagttcacaaaagctaattaaaagaatgtagcttaactacagtactgaggttgtcacacactaaaatttcggtactcttgctaatttattcatatctgaggttcactgtttctactaggatacattccgcccacacccacaccttggtccccacatcaagcagctcctcacagcaggaagacatccgctatcagacatggttttctgaagttgtgcttaaggatttcagaggaggaaaaattcagaggttctactagccttcggtaactgaggtagaatatggggctcccaagaatatcttcc

SEQ ID NO: 422351 - DNA, 116 bp, Homo Sapiens
actgtgctggccagaagaattttaaccaaatgtgtagacccatggattcattccatcctatgcagagtcctggtcttccatatttaattagcacaaatgccataaaactgccttcc

SEQ ID NO: 422352 - DNA, 257 bp, Homo Sapiens
  misc_feature (138)..(200): n is a, c, g, or t
aagcttaactatgtgtgattctatgtgtatgatattctaaatataggcaacgctcgtttatttagaaagaaatcagaataaggatttgagcactaagtagaagtgactgtggagagggccaaggtaacattgtaagtnnnnnnnnnnnnnnnnnnnnnnnnnnnnnnnnnnnnnnnnnnnnnnnnnnnnnnnnnnnnnnnaaatatacaattcgctgtttaaaaaaagcccaatagactatacactttaaattgtgg

SEQ ID NO: 422353 - DNA, 399 bp, Homo Sapiens
aaagctatagtgcatggggatcttggcctgagtttgtttctttggaggtcattgtcatttatgaggttagattcttctataaagagaccgttccttgatcaccctcagctttttgatgacctgaaccacactttggacagaaatgctaacttctttccctttaattgccagctttcagtgtgctcctttcttaacatctcttaaaaatagaaacggtatttgttgtatgattcttccactcccataggtgcttgagcatccccacagtaagtttaaaaatagagcgtgtcactacctctgtttgttttcttgacatttcaagtgtctgtttttaattggatgatttcagggacagtttctgaaagggacattttacctgacatttgatgaggttcctaa

SEQ ID NO: 422354 - DNA, 269 bp, Homo Sapiens
cgaaagctatagtgctctggataatgccatttatttttgctgattacccaactttcagtatttgctgtgttatcatctgtatttacttattttgaatcgtgcttaaatcaaatgtaccttcagcacctgcaagtttgccttttctttccaggaggaaaatccccacgttgctctccctggggagtctgagaattataccagtgctgtcagaaatgtaatcatgctgtcatttcagagccacagagtatttataaaataaaaacctttcc

SEQ ID NO: 422355 - DNA, 106 bp, Homo Sapiens
cgtcacgcttcttcacgatcggctttcgattcagcgtgtttgttgcctttcttagccggacgcgccgctttcgcattacgtccacggccgtgaccgccattcaact

SEQ ID NO: 422356 - DNA, 310 bp, Homo Sapiens
aagcttaatagtgtggtttctaaatcttcctgctctctgctcccaaactggagcggtgatgatttacgtgtatctgggaaccgttttcctcagcaccctgctcctgccagacctggttcttgccactcagatgagtcaggctcatgttttggcttccacatggaccctcccttctccccaacacagttcccagaatacagacttctccccaggtctaagggttttcacaacaacattctgagatgtgattaaggcaatcctgaagagatggggaaaggacagtggatggacagcaagaagttgacttcta

SEQ ID NO: 422357 - DNA, 367 bp, Homo Sapiens
  misc_feature (204)..(269): n is a, c, g, or t
aagcttaatagtggtttatgagaactttcttaggttatttgccacatgttacacatgtacacactccacagggatttacaatttataaagctctttttaatacatgatcttgtctggatttcagagtacattatatggagaagtagagtggttgtcaatatctgtattttacagatacgttgaaacttagcaagattatgtaannnnnnnnnnnnnnnnnnnnnnnnnnnnnnnnnnnnnnnnnnnnnnnnnnnnnnnnnnnnnnnnnntacttacagttctcatacattcacatgtagacagagtaactgaatccagactccacggctgtggttcctggtgtggtttccttcctctggcaccaacc

SEQ ID NO: 422358 - DNA, 108 bp, Homo Sapiens
ataagctatagtgcaaataatgatattaataacttttctaacttaaaataccctttattgagggaaagtttgcagtgtgaacatgaaagctctgaagaacaaggttcc

SEQ ID NO: 422359 - DNA, 290 bp, Homo Sapiens
  misc_feature (44)..(62): n is a, c, g, or t
ttggaccataaatcatcaaattggataatgactaactgtagtcnnnnnnnnnnnnnnnnnnnattcagctgcgggatacaattttcatggtcaaaatggaactgaagttcactccaaattattgtgatcttaaacttttcattccttggaaccaaccaaaacaacttgtggttaacttcgaaatccccgggtttcaaatcatttatagatttggaaggggatttggcatatctacctttctttgtagcaaatggtcccttattattagctcagttgcactataaagcttc

SEQ ID NO: 422360 - DNA, 141 bp, Homo Sapiens
tcggtccagtgtgttattcaggtcactactacagtcagggttctttaacctatttgagtcacagaattgtttttctctacacagtatttttctcttacaggaagtatttgagcagaagctatgtacataatgttagagata

SEQ ID NO: 422361 - DNA, 182 bp, Homo Sapiens
cggccgtattctaacattacctagagtgtcaaaatgatgagtctgaccacggttccaccgtcttcctacagacagacaatctctataagatgggtagatcaatagtcacataaactgttaaattttactatgctacaagactggctctctatttgcaaaattcatatgaataacataagagc

SEQ ID NO: 422362 - DNA, 114 bp, Homo Sapiens
gatcctgaacagcagcaggccggcggcgctgaccagcacgcgatggggccgtgggcctgttcgatctggtcgaacgccgtttcgacggcgttttcgtcgctgacgtcgaaggca

SEQ ID NO: 422363 - DNA, 275 bp, Homo Sapiens
cattactgaacttcaccaatagaaagaatcaatgtcagatctctctactgttgagtgaataaactatctggtgtatgttttacatgacaatatttgaggtgcttgtgtggcctactgtcatgtgttagaaaggtcgggggaataccctgggagaacattactgatttagaaaaatgttgccacttctgggtcataaaaatacagacatttatatgcgccttattttgaaagaatgtgttataataagcaaaaagagtgagttaatgttagagata

SEQ ID NO: 422364 - DNA, 196 bp, Homo Sapiens
tattctaacattagtctgaaggatgtgctgagggccagacattagaagttgtgagtttaaaagtagcgtggttgtactttcctatttataagacagaccgtatctgacagttgttgtgtatgcttcatgccttgcccagtaaataacccagtgaacacgtacacccctttgatctgacttgttgataatgtttgag

SEQ ID NO: 422365 - DNA, 356 bp, Homo Sapiens
  misc_feature (188)..(215): n is a, c, g, or t
  misc_feature (255)..(311): n is a, c, g, or t
tatctctaacattaatattatttaagaaggtcaaaatggtgatggaagaagccattctcattttttttaagtctgagcattgggtgtggggtgcagctgtgacaggcacacatgttcccaggggtcttgttttactactgagagatacaaggacgttcaagctcttaacctttctcctcacattctcnnnnnnnnnnnnnnnnnnnnnnnnnnnngtaattttaaaatgagtgtggttgtgcttcatggcaggcnnnnnnnnnnnnnnnnnnnnnnnnnnnnnnnnnnnnnnnnnnnnnnnnnnnnnnnnncgcatacacgtgcatgtttaacatctctacctaatgttagagata

SEQ ID NO: 422366 - DNA, 130 bp, Homo Sapiens
ccgcagtagattccttcatggaactaagacaacattattaattcaacccgaacggtctccataggaaatccctcatagatccttcccaactcagacaccagttctataatgttagagatacgggtaccga

SEQ ID NO: 422367 - DNA, 115 bp, Homo Sapiens
accctcccgaccctagcgggtcgtgactgtgcactcccttatcatcttagatttcctctatgctgggaggtcagttttgtgtggggagaatgagattgaagtaatgttagagata

SEQ ID NO: 422368 - DNA, 201 bp, Homo Sapiens
tatctctaacattagctgctgtgcattctgagttactatgatttttttatctcctttcacttcaagttattaagcattcactcactgaacttttatggccattcaccgagcaaggcactgatgttgtaaagatgattattcctaccttcatggagcatgcagtctgctatgaagagtatcagtgatataatgttagagata

SEQ ID NO: 422369 - DNA, 308 bp, Homo Sapiens
tccccgtatctctcacattatgaacactaggtgtaagaacatagaacaattctctattatctttttcttctaatttgaggggaaatttagagttggtccagggccacaattgctaatctgattttttaacctttgataacaacgccaatgatcccctcgagtttcaattatcctaagacttgtctttccagaaagttaaggcaatactattttgttgacacaatatacgtatgtgaccagttctcatataactacgaaaagttggcactgttgactaaaatgaaagtatactgttctttgcctcgtga

SEQ ID NO: 422370 - DNA, 328 bp, Homo Sapiens
caagtttcttcatccccatgaaacattagcagagaaattatacccaaggtttcaaccgtggtcattgccgctccctgctatcactgtgcaaactatcattttcttctgaacgtttttccacacagaaaaaacatcattttttttctgaagttcttttcatgtagactgtggtctctgaaaatctaatgaaacctctgttttccttgttatattctcagtcctccattctttgcacatattttcaaaatttattcttgtcctctgtatctgtgaaaagtgaatagcccaataaactctgaggtttaggcattcttcttttttattgcat

SEQ ID NO: 422371 - DNA, 257 bp, Homo Sapiens
tatctctaacattacattctatttaaaatttcagagcgcatttggtataataaggtcacataaaaacattaaactctgtaatgtcaaatcattttaacatctcattttatcttgtaggaaggcattcagacagtaattacaatttctggttttagttaattcatatgccagagcagaccatgagaaaagtttgtttttaatcccagaatttgctgcgtcaagtaactgaatttaaacactgtataatgttagagata

SEQ ID NO: 422372 - DNA, 357 bp, Homo Sapiens
ggtcgtctagaggatcaccgtattctaacattatttcccactgatagttttttaaaatgccaaatatcaatttctctaacctatatttctattttctcctgctcaaaatgttttaaaattagtttagattaagcatacaataaatattaaaaccaaaacaaattcaattttatgaatagactactcttcccttacatatcacgaccagctaagcaataaggcctacccgttatattttgtaaatataccttgaatctctgctttcctgtatctccacagcattcagtagttcagctcttcaatagctatttactgatatccttccctaatctatcccctatactaatgttagagata

SEQ ID NO: 422373 - DNA, 180 bp, Homo Sapiens
tacagttctacatattgcacatttgagaaccatcgcattaagtgtagaaatgaaatgctgtatgagttgacgcgttgcaaatgtcctgcgtattcggcaggctgcgctggccaggtttgctagaccgtcgtgattggaagtagcctggcgctataatcatgccagtggattctagccagg

SEQ ID NO: 422374 - DNA, 420 bp, Homo Sapiens
gatccccccccaaatgatccctggttagagcacactgcttataagagaaacctgacccaagtatttgactgctcctgcacacagctcttaagtgtagatattaaaattgctagtcacactatgaccgttgtctctgtagaaagggtaggctgtgtcatctcactcctttgttttgataacttcttgacaccattgtgctactaacccttgtctcgttgaaattcagactcctgttttaaaaacactgggtctctgtgatttcagtgctgtcatgaatacatccagtattgaaaggaacattcggaaacttccagtacaataatttcccttaataaaagacaaaaattagatccagggagcaagtaagttgctcaagagaaatggaaaactagaattgctatctaggatgtcatgttaagc

SEQ ID NO: 422375 - DNA, 455 bp, Homo Sapiens
ccccaaatgatccaggagggtgggacattcttacctgcttcgtaatacagtaattcgtctgagagaaatatcccttcatctcagtgtctcagatggacattgttggtattcctgaagtgttttgacattgtggccatttccaaacattactaggtctttgttattgatcctgtcctacattctcaattcttgggtccttccctctgttttgaaatgactcattcttcacaatgagctaaactgaaagctttactgttaagcaaaataagaaatcttgagccaaaggtattataacttgctctgatatgaaatgaacacagtgcattggccatcttttcaccctgtttgttagagtatattaaattaaaataacacagcaagaaacattagtttccatcattcattttagatttatgttggtgtggatttggttggttgtttctttggttagtaga

SEQ ID NO: 422376 - DNA, 135 bp, Homo Sapiens
tcgacacaacagtgaaaccaatacgccggttcacaactgttccctggtgttggcgcaatatccgctcaccccggcttaagtcggggatcattttttctttcaagcgttctctacccaagccccgcactacctggc

SEQ ID NO: 422377 - DNA, 243 bp, Homo Sapiens
ccttttcgtattgcaggtgatttgtctgatgcagcaaatgcgcgtcaggttctttctgacaacggttcgccgacactgatctgcagatgttctcggttcttcggctatcgctacacctccgcggtaaacagtctgttctgttcaaagtaaacgagtccggtactgatgcgcttctgcgtgaaggtatagtggggcgactggaaggtttcaacatccacgaatccgcgcatgttaagaaacgcg

SEQ ID NO: 422378 - DNA, 444 bp, Homo Sapiens
  misc_feature (326)..(334): n is a, c, g, or t
cacatggatccctgagctacatacaagagtcaagtagcagtggtaagtgcaatggagacaagcaaatgtggagcaagaaggggtccaacagggagagctgcaagttaaataaaattgcactgagaagatgacatttgggtaaaatttaaaggtgagagaaaaaccatgaatatatgggatgggtaagggattgagggaatgataagatagagcaagcaattttgtgaatgccccaaggccgctaggatgcttggaactgtgcaaagagctggaacagaatgaatggaggaaagagcaataggaaagaaaataaaacacaagagatnnnnnnnnncagattttgcaaggccttgtaggtttttgcaagatcgtggcttttactctgagactgaaagacatgagaagattggaccagaggagtgatatcatccaatttgcgtttgc

SEQ ID NO: 422379 - DNA, 284 bp, Homo Sapiens
ccccatggaatccataattttaacatgtaaaaatatacacttaacattatccaatgagaaatgtcttctaagcttcaaaaatttgaatattaaattattttacaatgtagtatgcaaaatattaagactggaaagaatcttaaaagacacctaggaaaaattcctttccagagatacctttggtatatatgcaagttatacgggttctacacaagtaaaactctgctaacgagactgtattcatattcatctattaaaatatcaagttcactttgttcattctg

SEQ ID NO: 422380 - DNA, 140 bp, Homo Sapiens
ccccaatggaatcctactccacactggtcaatgatgctatggctgtttgatgagatggggcactggggagtgtatttgtctggtggggctgtcataaacaaatacctaacgctaggtcatttatacaccacagaaattgt

SEQ ID NO: 422381 - DNA, 196 bp, Homo Sapiens
ccccaaatgggaatccttttggttgtttttattatttgttatacgttgtcgtacaacattgagcgcgatatttgcgaggttcttgagggcgtgtcaagtcgagaagttatattatgacttgcggtgaaacgattcaagcgcagcggcacggtcgccccctgtaggagcgagtttgatcgagacaaaatcgtcaagc

SEQ ID NO: 422382 - DNA, 405 bp, Homo Sapiens
aagtcttaagctgctgccaaccccagcaagtcagctataacaatccctgacaaaagaaattgaaccaagacacacaaagttttagtaacttacctaaggtcacacaagagcctatgaaggaatcatgagaccagactcttaactgaaatacagtgctggttttttggctctggggctggagaaggacccagctttcctgaagcatgtggctacctgatgcctgaacaaaatcaggggtctatgacccaagaataggtggggatggcttctagaggggaaactaccatgacttctatagcctgctgcactgggaccaatgtatctttaaatctgagaattgactgagttggtaaaaaccactttatttatagttagaagctctccctgaggtcgtggttaggagac

SEQ ID NO: 422383 - DNA, 448 bp, Homo Sapiens
aaatggaatcctaaaacatttcccatctggcacttcacaggaaaagtttgcaatttttggtgtaatggagtaaaataatgatactaaattggagtgcctactctgcatgagacatgtgcactgtccatgtattatttcatttatacttcccatctggggagaggtaggtatcagtttcttcaaattataggtgaagaaattggagctaaatgactaaactaatatgtctcagaatcagaagcataactgaaaactttcaggctccacagctcatccgtggttttctacaacaaactctttcactatatacttgagaacaaatgaatatattgacgagcatgaaaacacacagtacacattgaatacataagtgatgtggatgtcaaataatgaagtagccctagagaaatccagctaatacaggaagagttaattgcatcaatagaga

SEQ ID NO: 422384 - DNA, 270 bp, Homo Sapiens
  misc_feature (51)..(137): n is a, c, g, or t
ttcgctgtcgagttcgagaaatccgtcttgactgggaaacaccttgggcgnnnnnnnnnnnnnnnnnnnnnnnnnnnnnnnnnnnnnnnnnnnnnnnnnnnnnnnnnnnnnnnnnnnnnnnnnnnnnnnnnnnnnnntgctacatgatgcgaaccataatgatagagcctgcagttgccaagttcaatccttaatcccaaaataaacaatccctgaaagggtcactcgacactcacctgtacttgcaaactagtactacacacggtgaca

SEQ ID NO: 422385 - DNA, 345 bp, Homo Sapiens
tcgagctggccccagataatcccctataaggttttttgtctggcttaagagagcttcttcaggatttttcaggggttatattttcttttattttccacattttcctgttcttcagccaatggatgaaaaaagatgcagagaagacacatttaccttttatccgcttcacttccattcactattattcaatgtggatacagatgagagtagcagttttctagtaggacagccacttctctgcaataaacaaaaaacttatgtgtagtaagggtagaggggcacttaaagccttcgccacattcttcacatttgtagggtttctctccagtatgaattctcttatgt

SEQ ID NO: 422386 - DNA, 415 bp, Homo Sapiens
  misc_feature (65)..(351): n is a, c, g, or t
aatcccattttaaatggcatgagagaacatcaaaagatgaaaacttatggccaataaactgattnnnnnnnnnnnnnnnnnnnnnnnnnnnnnnnnnnnnnnnnnnnnnnnnnnnnnnnnnnnnnnnnnnnnnnnnnnnnnnnnnnnnnnnnnnnnnnnnnnnnnnnnnnnnnnnnnnnnnnnnnnnnnnnnnnnnnnnnnnnnnnnnnnnnnnnnnnnnnnnnnnnnnnnnnnnnnnnnnnnnnnnnnnnnnnnnnnnnnnnnnnnnnnnnnnnnnnnnnnnnnnnnnnnnnnnnnnnnnnnnnnnnnnnnnnnnnnnnnnnnnnnnnnnnnnnnnnnnnnnnnnnnnnntccccaaaaagggggtgggtaggtttggttttaaatccaactctaagtaggatcccattggggg

SEQ ID NO: 422387 - DNA, 287 bp, Homo Sapiens
gtacccccaatggaatcagttacaacaataaatgacaaagagacctgtggtgggtaagacatgtacaagatgacaagctttgaggaagtacaaggtctggtctgggagctgtggacccaataagcaaagactctggaaagacaaatgcatagttgttcatgggccgtggaggccctcgtattgtataaaaagggttccaggagcttgggataaattaaccactttgtttcccccttttcatcatctagctcggtacagtcctctttagcagtgttttgagtcctaag

SEQ ID NO: 422388 - DNA, 446 bp, Homo Sapiens
ggaatccggtcataatacaagtctgtttctgacttcagtaccatgctcagaaagatctagtacaccaagattaaaaaaagaatctacatatgttttcttctaatacttctgtgttgtagttgttcttatttctattaggaattttttggatgtaggaatgagggtaagggttcagtcctttttttactccaagagaccagtttctcctgcattattcttgaataactcatttattatctactaatgtgaaacttgtcctttgtcatatattagttttctacacacactctatgcctgctgatcatatgtacacacactcatgcacagtctcgtctaacatgcttatacgttctgcttgcatgtcttgttctaccctcatgtgtgtgctgctcacatgctatgcattctatgtttaacctttactaccttttgaattccaaaagcct

SEQ ID NO: 422389 - DNA, 312 bp, Homo Sapiens
tgaagtggaatccaactgtctactcatcatatcacgtaaatgtctaataggcacctcaacatagctgagaaaacatacttctcacctccaaacctgcagcaatcttccccatctgggttaatgacaactgcattcttgcagctgctcaaacacaagccccggagccatctttttctctctcacacttcacatcagcagatccaatcaactaccatcaaaatacatccagaattggtcacttctcaccacctcaatcactaccacaatgctccagcaatcaccaagtgaattactgccaatagtgtcctaaca

SEQ ID NO: 422390 - DNA, 245 bp, Homo Sapiens
cccctcaatggaatcctttctaaccttcctaatgctttatttctttgtgcctgatttcactggctgaaaccttctatacaaggttaaatagaagtgagagcggataatgttgccttgtcctgatatttggcagaagcattcagtctttcaccaatacatatgattttagctgtaggtttttatagatactctagttgaaggaggttctctcctatttctagttttttgagtacttttatcatgtg

SEQ ID NO: 422391 - DNA, 295 bp, Homo Sapiens
ctggtggaggcaaataagttcggtaatacagtaaaaaaaggtatatttgcaaaagtctcctatattttccttatgcttctacctgaaatagacatatcatggctctgctaaagagagctgaggtccctttataaatgaattcctttaccaggggtattttatggaagtttacacttagaattcatgaagccaattattcaaatttatgtacatacaaatggttcctctgagaaatgatgtaaatatgaaataatatttttagggctctgatgggaataacagtgaagcacttatt

SEQ ID NO: 422392 - DNA, 473 bp, Homo Sapiens
caatggatccatatcgtcaacccagacttatcctgcagtcagtcaaatctgcctatggttgccctgaatacacagaggccacgcaatatactcaaaatgtgccccaaatccatcccattccccacctggatctgttatggtatctgggctgaccttcccatcacacagagtattaactgaaccatcacagctctacttacgtagaatgaagaggtgtcagcctaagtttctgtctacgttcataccaaattctcacttttctgatgtttctagaatggctcctagtgtagaaggggctcgaggtgaatgttgggaaaggcgatctttcaagggatggcaggtccctcctgccatgctagatgctcactgagctggctcggaggtggaagacagcaggggctgggggataggtatcatctttactcaactctgatgctttttttaaatatatctgtaactgcccctcccatatg

SEQ ID NO: 422393 - DNA, 237 bp, Homo Sapiens
ctgcggtcaaattatttgcatcctttaaagagtctaaaggcttataaatatctggataaggatctcaatgtttattattaacctgagtgtctgtaataatgtggacacattctttaagtaactcaaaattgttcaaacctagcagacaaagaacattgtcattttctggactatatgaatatcaggatccatctggaagttgacaagactcaatagctttgagatttgtaatgaagg

SEQ ID NO: 422394 - DNA, 385 bp, Homo Sapiens
ctagaggatcccctcccaataccaataaaagctatgtattaattcattcagtaatctgttcctcccatgaattatggcagatccaggatttaaccctatatgtcatgtcatcaaagaccaggtgctcttactcaccacatccaccacatgtcttctgtccccatgtgtcctgactctaggcatgcacctcttcatacctctcggacctgtctatggtatccattacattgcaagagagttctgtctacagattaaagttccctcacaggattattaacacctcaatagcaggcctggtgtctatatctctgttcatctctattgtctatcatagctgctgggacacaggatgtgcaaaacacttctttttgtagtttaatttgaa

SEQ ID NO: 422395 - DNA, 106 bp, Homo Sapiens
cgcttcataacgacataagtgctagacccaagatctggcaaaatttaccaacgtaagccaagaaagtgctgaaaacctgatagcactgtcataaccaacaattatt

SEQ ID NO: 422396 - DNA, 388 bp, Homo Sapiens
tcttctctaccctttatttttcacatatgtacaagtaattatactacactgtagagggggatatattgtagcgaatctttcactgggattatatcttcaacgtggatgtaagcaacttgacattctagtccaaggcttccctaatagaattccaaccatccttgctaccaccgccatgatctgtgatgattttcaccccatgcctctgttcacccagccttttttcatatatcaccacttcttttaactgcacaattctgttgacatcttcaagttgcacatcccacgttcatttatgtagaatacacgtttgtggaaatatctaacatgtgactgctatcctattgagctccatggaagctacgtggctgagtcatagcccttgcct

SEQ ID NO: 422397 - DNA, 429 bp, Homo Sapiens
  misc_feature (75)..(257): n is a, c, g, or t
cccagcatgtgtactgggcactaagtgtcaacatcaaatttagagaagacaaaagcactcaaaccacagcgactnnnnnnnnnnnnnnnnnnnnnnnnnnnnnnnnnnnnnnnnnnnnnnnnnnnnnnnnnnnnnnnnnnnnnnnnnnnnnnnnnnnnnnnnnnnnnnnnnnnnnnnnnnnnnnnnnnnnnnnnnnnnnnnnnnnnnnnnnnnnnnnnnnnnnnnnnnnnnnnnnnnnnnnnnnnnnnnnnnnnnnngtaaaaagtttttattacaaaaaagaagaagaatggtaagatggcgagtatggctggggtgcagtgagatgtcataggaccgtgagggcattatgactggcccttagtttgagatgagaaaccaatggggaatttagagcagaagagtggcacgatcttactttgttttaaa

SEQ ID NO: 422398 - DNA, 186 bp, Homo Sapiens
atggaatccaccatcctgtcattaccctcagacattgtgggtctttgagctattacgtgcatactacacctcactgatgctcactctcctccaatcctgcgttaagatgctgtgcaaaatcatcgacatgctgatatgcactgttatagtaacacttgtttctatagtatgagaaccgagagagag

SEQ ID NO: 422399 - DNA, 104 bp, Homo Sapiens
cactcacgttagtgtctgatcgagatctgatgccagttctgttgcctagcttatgtctctagaataattatcatatgtgttcagcaaaatctagtgctttcaaa

SEQ ID NO: 422400 - DNA, 110 bp, Homo Sapiens
gaatgaatccctgcgatcaaatccagatatatccatatgagttatgattcactcttctaaaagattcacagtgaaatctcttaaaaaagtaattaccccattggtgtttt

SEQ ID NO: 422401 - DNA, 350 bp, Homo Sapiens
cagagaagaatatcctgagtcaggatggccagaaaaggattcatggaagaagggggactgaaactaggctataagaaggacaaagggaacaacagcatgcacaaaagcaaagtagtgagtatggcaaaaactaccgtatttgagaggccggcaagaatcccaactaagagtgagaaataaggctgaataggtagaatggaaccttcttaaaagccagactgaagcatacaaattcaatccagttggcaaagagaatccattatgggttctccagcaggggaactgacaagatgaaaccagtactttaaataaattacactgtcagtagttacagaagataaaatgaataa

SEQ ID NO: 422402 - DNA, 389 bp, Homo Sapiens
agaccatgcggaactgttgatgtcggggttaagccctcagcaacagcaactgttgatcgaaccttcattgttcaccacgttttatctatcgaaggctcagctgacgcagacctgggcagggccggggacttctcatctgagtccgcattcggccatcaggattgctttactgatatccccacagtcaagcctgaagtctgttgtgcctcaggcagaaaccttagtcaaccaagggaaattgacgagcacggcaacgattgaattctcggggcctgacgatactaaacgagagggtcttttctggattaattctgggacgccgttatatgcgaacacggctaatatttggacgcctaattatcttcaccccgcgaatacctcaacaatct

SEQ ID NO: 422403 - DNA, 143 bp, Homo Sapiens
tggcaatccctgtgaggagctaatgtaattgctcatgattgtaaaacatacttccggatggtaagggagatgttaagatgatttgtcttgaagaatggtaaactttttctttgtttattgcctgtcataaaaagagggaaagt

SEQ ID NO: 422404 - DNA, 528 bp, Homo Sapiens
gtactctagagtatcccccacgtggaatccaagtgaggtttcatgcttccaaatactgagtattcttaaagaagtcaaaatactagttgaaacaagggattctgatcattgcacaatgggcacagctagaggcaggtactttgggtcaattactgggggaatggaaaagttatatgtatgtattagggaacaggggttatactaggttaggcagagaagccttggagttttctcagaatctgcactgagggttaagggaggtatctatgaaagggtgtgcaacttccccaaaccgcagcaactccagccagtttcccggtactgccttgccctggttttgcaggtgtggctggacccagtttaaatatctggcctcaagctcagccagactctggttccctcggctgttcactcccactgggcttctggtcccagccccatctcagtcactgtggttggtcagaagacagtatatcccaaacttgattagttgcaaagtccatctggcttggttttgggtaccgagct

SEQ ID NO: 422405 - DNA, 229 bp, Homo Sapiens
tagttccacagaatactagcattcacactggaacgggggtaagaaccaaattattttctactaaacagggctcctaatgtatttactgcttgcaataatggttacacttttatgctctgtagcattattttaaaccattatgctatagtactattttgaagatctgagctgttatttccatttgtttttacccctgtgactaatttattacggttttagctttttagac

SEQ ID NO: 422406 - DNA, 363 bp, Homo Sapiens
tgatctcctagaggtcccccccgagatgaatccaggtgtgtagaagatgaattgtcgaaagggcaaaggagtaaaggtagaggggatattgacaagggggtctccatgagtgagtctgtgggatatgggtgagaagagtgagtctggggagagaccctgagaaagcaccaaaatcccataactctggggttgggagaagatgtccagtgacttctgatgtccataccaggaaatcccactctgtggccacccagattctgaaaacaccctattgtcctacaactctctaccatgaccacacctttggtcccaaggaccgcagttcataatcctgatcagagtcttaccttcccatcattaagt

SEQ ID NO: 422407 - DNA, 144 bp, Homo Sapiens
tctgccgtcctaatgtaaacatccagtaaataaaacatacatgatattctaggtatagaaacatcagtaattcacttatgaaacgaggtacattttgacgtatctggtggtaaggtttttgtcttacatataaagcacttcacc

SEQ ID NO: 422408 - DNA, 352 bp, Homo Sapiens
catccccatccctgaggccaagcagagaatcaaggctctgcacagccagggctgagtcatgagctcactgatggaaccaatgagacatcatctccacccaaccttgtggattaaatacagggaggagtggtcccccaagaaaaatggaggtgctgttgccagaagaagagggggtagatgtgggccagaaaaacaacagacaccgtctgctcccacatttcttcaaagctactgccaggtgcttgcctctggcatggaggagcccttcaccctccaagacttcacactggccatttggccactgagggaggcccagaccaagctgacacctttccccagagccagccacatc

SEQ ID NO: 422409 - DNA, 284 bp, Homo Sapiens
tacactatactcacttctttggcatcattttgagcatgtcttctcacttaattactgtgaatatagctccaaaagcctggaagtctagacaatgatgccaagagaaaaaagacctagattttgatcctagttaatcagcgccagtttggtctgttttgtaattgctacttcgtgaaaattaactaagttaaagcaaatgtgcatcaccaattaagcaataagtaggagtctcttttgtttttacttatcttgagaagtaattttaaataattcaaacttctctt

SEQ ID NO: 422410 - DNA, 127 bp, Homo Sapiens
taatcgagatcggtacctattagtccaattagaatttcatgaagcactaatgagagagaatgaaggaagggtattaaacaacataatacggtctttctaagcacagctgataccatgcccttaatat

SEQ ID NO: 422411 - DNA, 351 bp, Homo Sapiens
aatccgcaggatatcaatacagggggggtttcagctattatgcttgagaatcaagtgatgaattcccttaaagttgaggtgtcatctagacagaagagacaaagtatatattcataattactggaggtcttatgttggcacagtgagctgctatgagttttatagtgcccaaataagtattgcaacaaaataaagctcatgctggcttctttccttgttttctatgactttcttcctatgctgctgaccactattagatcactttcattctcactgaatttcaatgcatatagccaccatttctcagggtttacaatgtataaggaatggggctaacagtgtacgtctagt

SEQ ID NO: 422412 - DNA, 369 bp, Homo Sapiens
tatggactaggtgctatactatctcagaggtcaaagtgttgtgccccattcctctgcttgacaaaaaccgtacttacctttcaaagctcacttcaagttaagctaagctattcctgataaccccctcttctgtctcccacaaacttcagttatacctctagtatggcatttattattgtttcctatgacactgattcatgtataggtaacctcttctctttattaggctgaaggctctacggggaccaacactgatttagtactacttgtttactttatggtactaagtgcatggcatgtattagataaatgtacgctaaactgaacctatgaaactactggactcaacagcagtcaacttggtattta

SEQ ID NO: 422413 - DNA, 473 bp, Homo Sapiens
ccccatgtgcatgcccttatcactggatggcgctatattggattgtctgttactcaagccgctcacgtcaaatgcaagtcggtattattccaagacggttcatacttgggcttccaaaatgagtgtttattgccaggtcttgatttctaggtcctgtacatgatgatcttaccgccttttgtggaagttctcctgacagttactattaaagacttctaaggtcagtactagaccagtctgactatgtcccctgaataaaacgtggaaccgaggcaggtgactgacgctcactgtgcatactgaacgtgcaatcagattcggacatgaatccttctgctcttccttgagtaattgtgacagactttgggacagccacttcacttgtccttgttttcctgtctataaactaaaatgtgttctgagattatacagtcaattccgttttaaattagtagtgtgtttaatattgaaca

SEQ ID NO: 422414 - DNA, 384 bp, Homo Sapiens
gataaattcagacaatacaaaagtaaagagttatagtaccaccccctccccctttattccccaatccccatttacttcctcagaagtatttacggggtaacagttgggagtgcatacttccagatttttctgtttttttgcatatggatagataggtagaatgatataattacagactgtttattggctattcatattattcgccatctttttatgctaattgggagggtttctttaaacattagtttatagggatctaagtcttatctcgaaattttcttccctttggtttacgatgtctctccctcctgattctccctttactcctttgacaatttcttcttgtcctatttcactactcctgttgttctgtccctttctttg

SEQ ID NO: 422415 - DNA, 430 bp, Homo Sapiens
atgacttggagtcaattcatactgactagaaattttcccaccccagtaaatgataaaaaattaagaacaatgttcatcattggaaattatgcttggggaatcagatggccctttcttttctttctttggcacttgcaacgttgatatttctttggatattgtgaatgacttttgaatccagtcaacttttctttatcaagttttagaaaataatcgtaagcctctactttgcaaatgtgtataccttggtagaacagtcaccctgaaggtagcgggaatgccacacaagccccttgctggggacataggacgtgcaaatcaatgtcttttcctccagggacagaaaagtggaacgactccaagcaaatcccttgtgtcccttaagccctgcgtcatctttctggaaaacagctgtgcttataaaagttaa

SEQ ID NO: 422416 - DNA, 430 bp, Homo Sapiens
ctgtctgtttcttctccaactcaatgaccaccaattgctggagatgccaccagcaacctattggagaagccgtggccggcaaagtctccgccagggccagaaccccacagaggtgccagggctagcagcacttctccgggtgccgtgcatgtgaaatgcagaccaagagccacccccagttcaaagctgtgaggcgggagagctaagacaaaaactcttggttttacccatacaagtccagccagtttccaagcttagacgttcggtccccagacccttgctggagccctctgggtccttttgtgtcttgcatgtttagtgaagcattagggaagcatgagctgctgtgccttccttatgcagccggctcaccactcaggctccttgctccaggctagtaaacagctattttctagttccacaaaggtcc

SEQ ID NO: 422417 - DNA, 423 bp, Homo Sapiens
tcgtgtgaaatagaatatagaataaggccatttaacatgagctgtcattgtacagccagagatggaattcatgggtgcatcgtatcactgtgcaaattttctgattggcagtctcaggtctcccctgaaagtgttggcctctccttccgcctcggggctcctactgcctccccgacctttgcctagagcgtcctccccctccaaatgtctctgttttgggaaaatatagtctcttttggctgcaaccctcatctggcattggattgtcctttttagctttctgcaagcatcttccctctccagctagattttaatctttcagaggaaaaaagaagaacttctgtgggatccccaaagctcccggcatttgactcacaaggtggagctcagcaaatagaaagtgaccagaggaacaaaagcctt

SEQ ID NO: 422418 - DNA, 272 bp, Homo Sapiens
  misc_feature (18)..(18): n is a, c, g, or t
ccaaatggaatccccaanatggaatccaatgagcatattatgcttaaaaatatcccaagagcgtgtaaggtttcatgtctttaaagggccttctcctttccccaactgtcttcattactgcctaaaatcttttcagattatatctacagactggtctaatacttaattaaacagaaaagcctatgttttaccaggttaaatggctatttaggacatgcttgcacttttaagtgctttcaagagtgtagcagttactgttcatctgaaaataa

SEQ ID NO: 422419 - DNA, 349 bp, Homo Sapiens
aatggaccagatcatacgcacatagatcatggataaaaatatgggatagtatttttacttggtgaactttcaaaaccagagtaaaacaaaattaaactttgacttttaagaaaatgcaaagattatgaaaaaataaatttcacatatgatagaacggacatgaaaggcttattgaaagaaaactagtgaatattttaaagctggcatcgttgtaattagagctcaccccttgaggactctaaaataaagcttcactcaatgacccttggtaaattatgcacatccctttaaatgtaccatctggactacttcgtaagagagtatccacaatgactgcaatttcagaaaa

SEQ ID NO: 422420 - DNA, 341 bp, Homo Sapiens
  misc_feature (191)..(208): n is a, c, g, or t
ggaaaaggccgggacggatttgatcatgttacaaggcccacttgtgcatttaatttaaagcagttgtcccaatttcattaccacagagcatagcgttttcaaatttattctttaaaagacagagatagtggcacaaaatgtgctgtgggtttaagcaatatttgattgatcatgtgattctatcagtatcnnnnnnnnnnnnnnnnnngcctcagtatacacatttctgaatgaaaagatagacgatgtctttattttaaacaatctagtggtggttgaagaggccatctggaaaggtgatgtcaacggagggtagggtggttgctggtggaggggagtag

SEQ ID NO: 422421 - DNA, 336 bp, Homo Sapiens
agtgccaatcagacagcggcgatatggtgagttatatttgttctgacctcgtgagactctgtccagccccactaagaatgaaaagaacattcctacctggttcctgatatgactgctcctcactagagatcagtgtattcagaatgccaaagctctactcccagtgtcatggggaagctccaagtggcccagtcaaacgtggcaggttatcactaaccaataagagcgaccaactatctgtgatcaaggctaaatgccagagaagaaaatctaatggctgcaggggaagagaagtcactatattggaaatgaacacttccaagacaaagaaacact

SEQ ID NO: 422422 - DNA, 202 bp, Homo Sapiens
  misc_feature (150)..(150): n is a, c, g, or t
  misc_feature (162)..(163): n is a, c, g, or t
  misc_feature (174)..(175): n is a, c, g, or t
gatatggtcattatgctgtcagcttctgcttttcttgtaaaacaagagtaatgacacctatccggaaggattgttgtgggccttacacaggataacgcacacacaagatgtatggcaggacactgtatcaggtctatcagtttaataccngtttctgatatnntaaggtgatanngaactttaaatatcatgcatcatttct

SEQ ID NO: 422423 - DNA, 315 bp, Homo Sapiens
catttgcagttgtagatgtgggagggcttaggaaaactttaaagcgccatataaatgattatcaaggatctcaagaatgtaatgtcttcatctcttttgcccagataacactctacatgtgaataggttggacctcaatgcgtttcaaaggtagaattctagaaatatgacagggtcagtgtgaaacacgtttttgacaaaccccaatctgtcccagtaactgattaaagatgcagttgggctttggactaaaatccctatagacatagtatttgatctagcccattcaggctctgccccaaatttactgttaag

SEQ ID NO: 422424 - DNA, 375 bp, Homo Sapiens
cccgaaatggaatccctgttttagctgttgtaacgcagagagatgagatttttatgtattaggttatttctgtattagagttcatttttatagcagctataattaactaatccaaatggtttcagctcaaataaaagaaatatttctaacataacaagaactataggaagattctacaatttaaaggtatcatcaaggtcccaagagattatcatctttccacagttttcagtgtgttggccctgttgtccttgggtttgttgttacatagccacagagtggctgccacggcttcagacactgtcactatttgtgagaaaaggagatggagaggacaggatgtggagaaatggtggctgcggctgcaaaaaggag

SEQ ID NO: 422425 - DNA, 291 bp, Homo Sapiens
  misc_feature (72)..(120): n is a, c, g, or t
  misc_feature (150)..(150): n is a, c, g, or t
cggccggatccccaatggatccgtagtatgttaatatattatgtcaatttaataaaaaactaagtcctaatnnnnnnnnnnnnnnnnnnnnnnnnnnnnnnnnnnnnnnnnnnnnnnnnncgatcctggtccaaatgaaagaattctatngcattcacatcgtaaagaagaggaaaatgttcttgttaacgagccaccgtaaaaatgtcatcaatatccgtacacactagaaagaaagaaatatagcaataatccaagttggttctgcatatgctttaattgtgccatgcc

SEQ ID NO: 422426 - DNA, 447 bp, Homo Sapiens
  misc_feature (378)..(404): n is a, c, g, or t
ccccagctttactttgggcgcttctgtttcctgaagctagtctttaatagggcatttgcttagaatcagcaggatctaaagacagggtatgcagtgaggagctggagtccaaagcttcccacctgtgtaacctttagggtgggaaggtgtcgtcaatatgtcttccaagtgacccccatgtttctaaggactcagcctgcctgttttttgaatgtagtgctcattgatcctgggccctgtctactgcagagcttaatgaacagcttctccccattcttccccctctctgaaattttcagctgtgtggttgttgctgttgttttctaaatactagtagccatggggaaacaggtagatcctaaaagtatcaaactcaannnnnnnnnnnnnnnnnnnnnnnnnnnggcattttatcataggatatggtcaagagaccggttgtaaaaa

SEQ ID NO: 422427 - DNA, 214 bp, Homo Sapiens
tgcatagatggtggtaggatatgaattggcagaatccatcaggaaaagtttttattatcttctagtataagatatacaaaccttttaattcagcaatcccatgccactgtatatactctagaaaaacatacatatgtgcaccaaggtacatatacaagaatgtacagagtagcatttcctagtagttaaaaacaactgaaacatatgtcaacag

SEQ ID NO: 422428 - DNA, 390 bp, Homo Sapiens
ggtacctgctgtagatattgaatacttagtttgtaccagttacctgctaagcacaagagattcagtggcaaacaagaaagacaacgcctctgccttttatttatacaaaatacccaataaatgtttggaaaaagttacatgcatgaagattcatcctacatgcatcccaacatatcaaaccataaaaatgttcacaccctttgatgttactgattcagtagataattgaatacttagtttgtaccagttgccctgctaagcacaagagattcagtggcaaacaagaaagacaacgcctctgccttttatttatacaaaatacccaataaatgtttggaaaaagttacatgcatgaagattcatcctactgtctcgtcttttcttccacta

SEQ ID NO: 422429 - DNA, 261 bp, Homo Sapiens
gttatagcacttggctgtcgaaatggaaagcagaagtacaaattaactgtgggatatttaatgcaccacagatatctacccaacacagaaggtaaccagtcaataactaccttttttcttttaacattaatctggagaataaaggcgaacagaaaaactattggaaaggagtggttaatatgcatatccccatattcccatcttatgaaccagcaggatgatttgcaagtaaaaattaggtcaatctaaaatcatgatcca

SEQ ID NO: 422430 - DNA, 367 bp, Homo Sapiens
tcgaccccgattatgcatgtagattcagaaaagtagcagagcaaacaagttgcattaaataaatcttcatgaaagcaaccttttcccttcgtgggcactacttctacccagtaagagggctgtatgattatatgttatacagtcttacccaatcaggcttcattttccacagagactcaaatgccaatgggacaagcacaggatgtctaaaaagagaggggcactgtgtaaagcagaggagtagtaagatgactgatcaagagggggggtgcctgccctttcctaaagtgagaggtgactttttagttctagccacctttgtcttgaggtaatagtggataggtcttgggatttttcaaaaatgaaa

SEQ ID NO: 422431 - DNA, 385 bp, Homo Sapiens
aatgcatgtagatgatgacaaccaaatgttttaatctggtaaaaagaaatagaagaaattaggccaggtgggaagaaaggaaagtaatctttcatgtctagccaaagacaacacttacaaagcatattttatttctgtttaaatcccagccagagattgcacaataccaaactgccaaatttcaaagacatttattcaaaatcaggagaaaggagattttacttagcaggtatagtctcttggattttgcaaagttaatcagcgggacttggaacttgtagggctctcttctatccaggagcctggctctcttaaatctttcagctgtcagagtaattatagagtcatgcataggtttgtactcagcatgtactagccttgaata

SEQ ID NO: 422432 - DNA, 296 bp, Homo Sapiens
tataaaagttaggttgacaccgtactgtagtctattaggtgtggaatagcattatgtctaaaagacaatgtacataacttcattaaacatagtttattgctattatatgctgcataattttattacaacatattttatggctaaaaatgcttatgatcatctgattatctattatgaccttcagcaagtcataatcttaaactttttgctggtgaagggtcttgcttcaatgttgaggctgctggctgctaagtaagggtagtggttgctaaaggttgaggtggctatggtaattt

SEQ ID NO: 422433 - DNA, 133 bp, Homo Sapiens
gctccccataaacttacagaagtatctccaagtcttctggcatattcccacctccagacactgaatctgcagcagcaggctgttttgtccaccagcctggggttctggaccacctgtttataaactcatctgc

SEQ ID NO: 422434 - DNA, 353 bp, Homo Sapiens
gagtcacgggttgtacaggtgaggccaggttccctgggcagcacctgaggccgcctggggttgctcacccaaccctacctgttcccaccactcggtctatttccccctcctcagacaggacactaataacaaggagcttgccctgcaggctcccaaccctcccgctcttccctaccccacagggttctggttccatcatttcctctgttcacaaactatcactggacagttgtgttgtctcttgtacaatgttccattcttcaacatctatcattgctgctgctcccagcaccaaatgttcaccctctgcctcctgctctgcacacattcccctccctcaagatagcctccat

SEQ ID NO: 422435 - DNA, 299 bp, Homo Sapiens
atgtagaagagagaaacagtaaataggagattacgaacttacccagtgaataggaagataaaaaaatttcagataaattattacagagaataacgtgggaaggcagaggacagaataagggacacggaagatggaatgagggctaacgtacatttgatggatgtcccagaggcagaggaaacaatggctgtcaaggagtaggttggggttttcagaactggtgaaatatactgacctacagacagggagccctgaagccgcctggcagaacaaaggaaaagcaacccccacatgcatca

SEQ ID NO: 422436 - DNA, 127 bp, Homo Sapiens
cctcctccttccatgttacagaaagtcagttcacatatttgggtgtagtctgctcacctgtgaaatggcaatgatgcctgaactgctttgcaaccttattaaaatcaagtaagactatctacatgca

SEQ ID NO: 422437 - DNA, 405 bp, Homo Sapiens
caagggcatctatgggagccaggctggcttctaggacctcttatggatgaagttatttagtggatcttcctggatttgattttatttctttgatctcttaagtacatcaatctttgggtttgctacctgtaatttttgtcttaggaaggcagcatctctattctctccaggaagaaatcttgatgcaggaagaagaaaaagcctggtatcctgccctgtttttgttctcatggagattcaacagatttttacgtaatctctttttactataattcaccctgcgtttcttgaattctttgtgaacatccctttctcctgtagctgacagcttctgttctttctcttggggcttatgagctttctgagtcagatcttttagcaaagccttagttttctgctcatgga

SEQ ID NO: 422438 - DNA, 161 bp, Homo Sapiens
gaatgctgtagaacatgaaacgacaagctctcatacagaaattatgacgaactacacagaaactctcgggataaaaatacagtaactcaaagtggaagaaactcaagtagatggcgttcataatcagaattcattatgtaaattaaaaactagtgaagagg

SEQ ID NO: 422439 - DNA, 397 bp, Homo Sapiens
ggctcggctccgtgtatgctgtagcattaagtttcagtatgtaaaagatacaaatgttgactctacttattcttgtctatggaactggccttttagccagtcacagacatcacatcagacatcctgaagtagatgctatttcattagcatcactttctgccagcaaatgacattgtcttggagcagagccagactacaggcatgagcaatgtgttagagattctggactggatttctccagggaatgggtaaggttatctagtctagtacatggtgaaggctgctataagtgacaagtggaaaagcttcatataccttatgttgttggaaaaactagatctttaaaatctctttatatcaattctttatagcttgttcatgtacatgtacacattat

SEQ ID NO: 422440 - DNA, 321 bp, Homo Sapiens
  misc_feature (30)..(30): n is a, c, g, or t
aatgcatgtgggggatgatgagaatacagntcgagctggtgggaggaggccatcttccaacaccaatgtctcaaaaagcgtttgttccattggctggtttggttggaaagtgcattatttatagatctaacatgaatttatctcacagtcaacagcaattcagaattgtgcattaatattttttaaagcaaagaaaacagtcaagaaagcagaataattcagtggagagagcacctggtctcacagtcagaagcccacaaatctatttctggctttttgagcaatgttgctcatcaccttgcacaactgaatcagtctcag

SEQ ID NO: 422441 - DNA, 366 bp, Homo Sapiens
ggtgggtaggttgtgtgggagacaggggaattcaatgaagggagattctttagcctttccttcaagtacatctttctcctgagtacatttacttccatcacaatggactagaagagatccttggcttagtggtgcagaacccttgagacctaatttagcttttataggaaattcaaaaagagaaagacggcacaagagcaagcgaacagaacaaagatatgagtttgtacagagaatattgatacttgtggactgctcctgtaactcttttaaaataaattttctaagtaaatgctgacgtagacttttctgttagtggaaggctgagctcctcccgccaaacaatgcgctgcccaaatcatcttt

SEQ ID NO: 422442 - DNA, 395 bp, Homo Sapiens
tgctgatgcgtgtagcataccaacactgattacttccctcgtccgctgagaattttaaaagaccacaatgatcattcagaaagaatgcatcgatgctctctctcggttacgtttggttgcttttcttaatatctcaagttgtctaagagtattatcttaatggattgctgaatccatcagccttcttccgagacgcaagcccggttctcattggccatagccttttcccttttttaaaaggcgcatgtttctggtctgtaaatctttacttcagctctccaggaaacacaagttaaggataacgcagatatgtatgtactttaggaagtaaagggaacacttaggaaagtgttatattgcagggttccaaaaaaattattacactttgtttacaa

SEQ ID NO: 422443 - DNA, 297 bp, Homo Sapiens
ggccggaccctccctctctccaattcctcagcatgttttccatgtgccggatccatcggatgatctgaccctcctgttcctcaccaccgtcctctatccctggagcactttgcctctgctccaggttgtagcagtgacatgccctacatggtgtcactgtgggactttctttctcacatctgtctgtgggatggatgactagcattaagcatattaagcatactgtctcgactatagaacaagggttggcatttgagctgggccagggcaacctctttgataaacaactacatgcat

SEQ ID NO: 422444 - DNA, 350 bp, Homo Sapiens
atctgtctcttagagaaatcaaatactttagacagtatgatagtcagaggaatgggctatcaaatgcaaggcatatggttgatcagttagttagttctgtttgatgagaccactgggctgttgaagaccagattcctgggttccaactcttaagtaatctgagagccaacacactgggtcatatggttccccaaagcttagccacatcttgtggggctatggtgtcaccccaagagcaggaggagcatggatggatggcaatccatctccaccactggaaccccaaattctgaatgcatcacctgttagagtttcttgttcataaaatagcagggaatttaggaatttag

SEQ ID NO: 422445 - DNA, 301 bp, Homo Sapiens
ggtacctgatgctgtagtacagatttttcaaatggacatgcagaaacatggagaaaagcacaacatggggaaaagctcaatctcttaagtacaagagaatcacaaaaccattaccgaagcttcagcagaggtgaatctgaggtttgtgaaaaactcttaaagacaggaagtctgccagttcggccgagctccactggaccttctgttctcatctggctctcactctcctcctcccttcccaaacaccacagggctacagggacgtgctggctctgcacgcagacacatctgtgtctaagcc

SEQ ID NO: 422446 - DNA, 382 bp, Homo Sapiens
aagtgatgcatgtagaatcattctttacatgccaataacctaaagaagccttttcaagacctgaagcctgtgaagagtagcattactccagctatggccacagccttggtggtctgggggaatagttggggttattccactcaaagctcatgggaatagaaaagtaccacttttcaccactcttatgttcttgtcatgttaacatctctaaagtagggatgcctcttgtaattaatggcattttataattgctattgctttgggccaagttgtggttgtgacagactgtcattccctgctcatgagctcaaaattggccaaataggtatcagcagcttggaagacaaacctacacactacaatgaagctcctgaggaccaat

SEQ ID NO: 422447 - DNA, 383 bp, Homo Sapiens
  misc_feature (256)..(281): n is a, c, g, or t
ttgaattcaacctttttttcccacacgagacagctagaaacagtaaagggaaataacttttggctctcccttcccccaccctggtggtaaaaagaatgaactgaccactgagatagcccgcagttagtggacagaaacccaggtagttcacaccgtgacctgagaaatggagagacgacagttactcaactacacacatacgacacctaaggaaatattgaagatttggtggtggttgtaggtgacgggcccgtgnnnnnnnnnnnnnnnnnnnnnnnnnnctgtgccttgtagattatcatttttacctcagtcgtttgattttgaaaactccgaagggttcattatacagctgtaagtgacatttacttctacatgcatca

SEQ ID NO: 422448 - DNA, 221 bp, Homo Sapiens
cattaaagtaattgaatcagcagtcaaataaaccttccaatgaagttaactccaagcctattgatttgcaagtaatatcaatcaaaattcaaaagtttttaaaaatgcaaaattatacgaactttccagagaatagaacaactgggacgtactcctcacataattttatgtggcttgatataaaatcttgacaagaggactatgaagaagaaaacacctac

SEQ ID NO: 422449 - DNA, 335 bp, Homo Sapiens
ggacctgatgctgtagggctacacgctaaatatttcttatgtgataaaaaaattataatgacctctagtctttgaaacagagaataactggtgatgagtaaccagcgcagtaagttctttcagtcacaatcatgtagaaacaaagtgccttagattaagtgatagttaaattgataattttagcagaccaaacttcaaaatacaaaattcagtaaggtaaacgaattattaaaactataggaaaagttaattaaaattcaagggctgaaggttaaaacattaaaatatatcctaaaaattataacatgctcactaccgatattttcttcacctag

SEQ ID NO: 422450 - DNA, 385 bp, Homo Sapiens
ggtaccgatgcatgtagaagtgacatgtatcagcaaatgatacatggagaggagggaggaattaggattattttattataataaggtactcacactactgatgtatattgcaaactctcaagcaaccacttaaaagtaacactataccactaacaacttaaaagtaacactataccactaaatgcacattgcaaactctcagcaaccacttaaaaaagcaacaaaggaatataattcacatatcaaaaatggaaagaaaatggaatcatataaaatgctcaattagaaccacaaaaggcataaaaagagtagaagacaaaaataggaacaaagaacaagggcaacaaatagaaaagaataacaaatattgtagatattaaaccaa

SEQ ID NO: 422451 - DNA, 119 bp, Homo Sapiens
ttaatttaaaccataatgatttcaaattatttcaacaatggtaataagaacaataaatttttgaaaatcttttgatgctgaatataatacagacctggtgtaaatatccaacagcctgg

SEQ ID NO: 422452 - DNA, 347 bp, Homo Sapiens
actcggtaccagtgatgcatgtagttatgttttacaaatatgctatatggaactttggtttggggcccctttgtatcttacttggactttggaaattctctcataattggtatccatacctctagatttcttttccctagtacactgtataccgggctagcaccaaaatgatcgttccatagtaaaaatctgctccgatggcctctagaatgaaatctttccagccgaccaataattgtgttcagcttttcaatattgtattttagcatggactagtaagcactaaatgatggaatctttgtcttcctccactgcttattgcttcatttaccatcttttcccttctc

SEQ ID NO: 422453 - DNA, 390 bp, Homo Sapiens
gagccggtaccgagtggtgcatgtagtgtcagtttcatgcacgcttacagacttcatgcaagtaccaattagaaggtgtttgtcccagcctatctttaatacctctcacttctgccttagagctttctggccccacaactggtgcccagaggaatgttctctgcactcatacttgttcatcctgagagtgtcaaagagtgaaggcctgtggaccaccttggaccaggggggtacaaagacctagggacaactgcctttgtcttgccagtcaacagttctgggtcttatttcatgagactcctcaaaagtgcctgggaagactaagcaccagtatgggtggacatctggatagctcatccctctactgcctttcctttcttccctgcttcc

SEQ ID NO: 422454 - DNA, 295 bp, Homo Sapiens
tctcgtccacccaacttttgggtttcaactaatacttatagctccggaaacactcatccttttctctggctcccattacgtgcactcttctaagttttccttcaccctctctcttaacctacatcctcttgtttccttccattctctatctgaatataacccaagacatcccctcatctgcttcctgttcttcctctgtttaatacttcagtaggcagctttagtcaaccatgctgataatcccacatgaacagtttcccaactaagcccttcaggtgctacagaagcaacacca

SEQ ID NO: 422455 - DNA, 290 bp, Homo Sapiens
  misc_feature (26)..(26): n is a, c, g, or t
acctgatgcatgtagaatcatatgtngtggtccagttgtaacatacatttacaccacagtattaactaatgataattacttttacattttaattactccataataactaatgataattacttccaaatggtaaggttgagtgatttgtaattttttcatctatttttgcagtatcttaatttttctacagtaagtgcatgtttcttttgttagattattgacaaatgaggtatacaatattttaaaataaccaaaatcatgtaactattaaatgaccacatgcatcactc

SEQ ID NO: 422456 - DNA, 160 bp, Homo Sapiens
tccgacctgatgctgtatgggatatactgaatggaactgatgagtgagtggctgggacctcgatgaaaaggcagtggggcgagagcagtgaggcgtggacaggcagtctagtctgtggtgcggatgcctgtctgccaatggggacagcacataacttttg

SEQ ID NO: 422457 - DNA, 133 bp, Homo Sapiens
atcttttagtgccccatagaagtagctcttcattattgaaggataatccactaaatatgttaaggcgattcatcttaaaagtatctgtgctctcatttgctgtgtagcaaacctcccacatggaataatttgt

SEQ ID NO: 422458 - DNA, 442 bp, Homo Sapiens
  misc_feature (16)..(16): n is a, c, g, or t
tcactagaaatactgntttctggaaaacattgaacacatagaaggaaaatacaaaactatacatacatatgaggctgattttgttaaaaaatatttatagtcactgcaaaactactgaaagaaaaggccaaatggtgaaaaaaagatgtaaccagttttctgtaataagcaagtgttacatttataatcagaaaaagaagtattgcttttaaaatgagtctagaaatatctagaaaggtatcttacctttttagagaataaactctagggaataagttttggtatacagtaattctgatttgttaatggtgtaactctttattatctttattttgaatattggctcagtcgtagtgaattaaaaatctagaattgtgctattgtcgaattctcatttcttggagtttttccttttcgcaatttgttgctatgttgttttatc

SEQ ID NO: 422459 - DNA, 193 bp, Homo Sapiens
tgcatgtagcatgagaaaatgtacataaagatactccctccctgctctaggtttctgcaggtgagaaggtgtcgtgatagaataatgaacatttcctgtggggctggcactgtgttctacatagaactcatttaatacaacaaccgtataacgaggaagcaagccatgtgcatcaattatcaggaacgcttta

SEQ ID NO: 422460 - DNA, 299 bp, Homo Sapiens
tgcataaaaatcagaaagtcagggcagaggtatgataaaaatccacactgttctaactctcaaatcagtgcagaatggcagaagtgtcgtttcagttatatatgtatgtaggatccattcgccatgcactcaccaatacacttatgcatcagtttacccatcagtttaataatttagccatccacccacctttcctccaaatatccactcttccatccacacactcatttgttcttatattcacgtagccattcttcaattcttccgttcacttaccttgtcatccattccaccactct

SEQ ID NO: 422461 - DNA, 405 bp, Homo Sapiens
ctagaggtatccccgagatgatgcatgtagtctgtaccacagaacttacgctctagatgagggcttcagcaataagtaaatagatttcagaacatgacaagtttaattaaaatgaaataatcgcacagagaggacagagtgtatccagggtgaatgttttcacttgtatggtccttgggcactgtaagaatcaatgccgggggtagctgaacagcgatgaagccaagaacttgagacacaaaaggcattttccctgtttccaggacagctggatgtgtttgggccaaataatttggttctgattcatttgaagattcactggtctataaatacaagcctacagtgtgacaataggatgttcctaactgcatcagtaccaggaagcatgaattagtacagtgatcc

SEQ ID NO: 422462 - DNA, 129 bp, Homo Sapiens
agtgatgcactgtaggacccattcctggacctccagtgtcctattaactgaatgatgggcacgggatagctcttagggggatctagaattcattcatcatcactctgtgattgaggttacagtcattca

SEQ ID NO: 422463 - DNA, 347 bp, Homo Sapiens
tgagtacatgatgccatatttctacatattaaaaataacttggatttatcgcatgtatgcacgatggtctcatttgctagctgtaataactgcgccctgcccttcccggtgagtagacgagtctagggacagtatttatgaaactattgtttagaatattgatcagcctccgcatggttctgttgactgtgtgttctgttagagatgaggtaatgtatctgaaagtgcttctctgtatgggggtatttttattttgttaacaaagaatttatggagccccaggacgtagcacagtgtatggcatgcaggagaccctcaacaaagaactgtggactcactgaatgctc

SEQ ID NO: 422464 - DNA, 441 bp, Homo Sapiens
cctcggtacgtgatgcatgtagtcaaagcatgatgcactctgatttttttctctttaaaaaggtcaagaaattttggccaataaatccatttaaaacaacaaaaacgaaatggagaggaacagctgaaaatagcaccagtaacaactgcaaacagtattctctataaataagctatttacccacacacaaaaaccgaagtcaggtcaacacggttggccttttcgtaattaacatatagtcgagacaagtttctcctgagaaaagattttgcttagcaagcaatagatctgagtgcagaagagtttctaagttttatacgaaaaaagtgcaacaatacgccctttaaagcccaaatacttccaaatgatcaaagagtcaaagatgattaatgctattcaagaaaaaccctcactgattctttgcaagttctacatgcatca

SEQ ID NO: 422465 - DNA, 397 bp, Homo Sapiens
  misc_feature (14)..(14): n is a, c, g, or t
  misc_feature (387)..(387): n is a, c, g, or t
tgattaaatccggngtagtgattaagatgattttagagatttttaggtagaaacaatgtgtccaaaatagtaagtttagccttttaaaaaatcagctgcactttttgtattgtatataaaatatttgctttatagaatcagaaatacagatgtattgagtactatgtgtcactctagaaaggtgaccatttacttattcacatttaagaagcgacttctcaggtatgaaaagcttcagctgaagccaattttctttttgtaaaaatcaacattttgtaaacattaaaatgtcactacatgtgccttaacattaaggaagatttaatagatgtcatttaacttactcaaaaggttcatgagactgaattactattatatgtagggttnggtttgagtc

SEQ ID NO: 422466 - DNA, 433 bp, Homo Sapiens
  misc_feature (193)..(221): n is a, c, g, or t
gccgagtgatgatgtggcaacctctactacaggtcctattatccaaggaatagtaccatcaattatcttttgtttgtcagacataattatttcatctccttccaaaagcacatcacattatctgttgattttagctccttgatatttgcctacagataagaaccatcagtgagtatttctaaaaccttgacannnnnnnnnnnnnnnnnnnnnnnnnnnnnaaggcagtgaaaaacctgaaaatagctagaatcacaaagagaactgctgggctaggaccatgcctgggacaagagcagagaaaattagggtccattgtcagcacatgtgtagagtaagtaagtctgctacccagcctcacagtcattcctctcttatctgcctaatgcctctgatgctcattaacataaagaaaacaaatttcatttggtaa

SEQ ID NO: 422467 - DNA, 436 bp, Homo Sapiens
cctggacgtcacatacttatgcagatcatgtggacatgcagtcaacaaacaatttgttgatgacctaaacttacactgttatgctggtggttaggatgccatctaaacattcttgacttagttgagttattgcaagacacttacacatttaaaagttctgatttaccatgtgcaatgcttgtatttgatttgcttagcaggcatattcatataacatatgatttcattgcatgaaattttacattatttcctcattagaagtactttatatggtaaaaatttcccactcgatatcagataacttcttgagacttggtgtctgattttgtacaagggaaaaagaattatctggtgcagtttctgtttttatcccagctacagcatataaccattttctttctgatactgcaattctagggtgctttgtttgttcctc

SEQ ID NO: 422468 - DNA, 369 bp, Homo Sapiens
tgatgttgactctagagtatcccctgatgcatgtagaagacctaacttatttaagacgaggcccttctgagggctttggggaactgcacaggatttatcctattagggagaaagaggcactacgctgtccgaatctgtggttactgaatactgcctcatgtaacaggctccctttcctgatttcagactcattaggaagtctccccatcagaatttgttttcccaagtggattttcacagggagaaagcctctggtcaaagtccccgaaggtggcctccttggggtgatttttaaattccaaatcagtaggttagcatatgtccttctgcatgtcctggggacagcagtgttccagtcccactaaccct

SEQ ID NO: 422469 - DNA, 340 bp, Homo Sapiens
tcatgtgctatgaacgcttgtcgtgacttgtaaaagcctaccgttgtgagctttcagtcattatctttggaccttagctgtgattccaggtcaggaggaatgttccactcaacttgctatttctcatctagctcggcagtgttgagaggcctggctcttttcctgaagctattttccccaagctggatatcttaggacttctcttcctttcctgcctgcccagatcccatgcagggcagctccctttctcacagacccctgcaaacccctccctccactatctttcctatgtcttctgccaacctcaggccctggagccctctaacatctgtcttctctg

SEQ ID NO: 422470 - DNA, 274 bp, Homo Sapiens
gtaatctcagtagtagcgtcatattatcagaacagccatatcttttggaacgttctttcttgagaaaaaccttgctcgatgttctaaaaaggaattgttataaattaacaatgccctcatggtaacattaaaactgcactgaatttttggaaccttcttaacatttgtttctacatggaatttatataatttacaaatttacattatacaaagctgatggttgatggcacaatatataatcctgtgacaagattatgaaaaggaagttcccaga

SEQ ID NO: 422471 - DNA, 377 bp, Homo Sapiens
aatatggtgtcatagcttgactacttggtgtatcagggaggtaaaggaagataaggggtctaaaaggaaaaacgaggaggattacgtaagttgttttgaaacaattatcctggctacaaagatcagtaacaaaggggatggccagtccaaggttggacaggcagttgctgcgcaaatgtccttgaagcatttttttgtgtagttttgtggcctttgtgcaaggttgtggttttggcagtcttttgtgctaattctttatatcaggcaattattagtgagaactttcccatcacggctttccctgactccattctctgacagctttcacaatctagagacagaatcccggagggagaggagtaccaaatagcttaaga

SEQ ID NO: 422472 - DNA, 469 bp, Homo Sapiens
cagtcacaaaggatcacatatgttatacagataactacaaacagtgtggctgggtgtacgagctgcatggaagatattcttggtatcattgtgcttgatatattgaattgtaaagttcatctagtttcattctccaaatgctgcaggtaacgccgggtaatatacttccccgtccatcttcttcacccctcgtgaatagcttcacggattcttccgtttatttgcttgtgtatggtctgtcattcatttggtgccagaaatggtttgtcaccaccataaatctcttccagttttcgtgttgtatttgtccttggtagatcgccacgggagctaaattgttagcttctgctgtgtcctgtcacatggatttgggatgtggtaattcttcatcttggataatcttttatatgagccttgaagtactcaccagaccccggcaggtgattttattcccattgatctctttaat

SEQ ID NO: 422473 - DNA, 357 bp, Homo Sapiens
tttatatgaattatttctaatgactaatgtaaaatatcagaaatgcccacagagctatgcctgcctttgcctcagacttttttatactgacttataattgtcaggatagggacccatcccactccagcagcctcacaccaatttctcgtggctgaacacagagaaaagaacacagcaaagatatttcttcaaaacacatctaatgagagtcattcattttacactttgaatgaaaaaaataaattcataaggaaatcagtagcttttaaagaaaaacatattaatgattttaaatgtgtttgtaaacatgaaaccaaaatatatagaaaatattgaaactaaaattttattctcaag

SEQ ID NO: 422474 - DNA, 424 bp, Homo Sapiens
ttaaagatcatgtgcattcacaagggaattacaataaatgacagctaacggaagaccaattagagtcttaaattactgttagtcagtcagtaggaaaatatgattcagttcctctgctgttgtaaggggaggtcacgctaccctaaaatgtcacaaaacacaaatagttttatttcttccaaaagtacaagtaatcctggtatccagataaagaagttttaatttgtttttattggtttaccttgcctcagagttctgagtgttggattttcactgtgacaacaaaaataaaatatttcctgcttattgtaaagcggtcaaagagctgaaaagcaataccatcttttagaatgcatttcttacccttctttgatcaacattaagatgcgttgccactctggggtatgattctggtttgatcgag

SEQ ID NO: 422475 - DNA, 414 bp, Homo Sapiens
tatctcgatcaaacgcctcggtacacgcaacttgctcctccagcttagacatcaccgtactgctcaaaccccgccgtcgtgctgccgcccgcgcccaggatatttgcgccgcggcgacaacccccacgtgcaggtccggcacttgcacctgccgattaatgttcagctcaagaatgtctgcaaagggtatcaaccgacgaaacgcggcatcagacgggtaccagcgatccatcaggatgatgctgtcaggtggctgcgcggccagtacgttttgagtaatccagctgcggctgtcggcaaagcgctcacacacctcaagttccagatcccggctgggatctcgggcgaacgtgttaaccagagccatcgtttgcgctcgacagggatcgctcttgcgcgcgcacagtcgcacga

SEQ ID NO: 422476 - DNA, 419 bp, Homo Sapiens
  misc_feature (188)..(201): n is a, c, g, or t
agcatttactaattgttaggaaactatttcctttttaaattgttatggacatagctacttattaaacagaatcattaggtatttcttttggcttaacagttactgtgaaaaaaatcagagacactaaaggcattgaccaagaaaggttgggaacctctgctattgtgacatcttaagttttagctccnnnnnnnnnnnnnnggtaaagtctgaaagtaacgtctctcgtctagaatgtttcaaaaaaccaagttcgccctctagaggcaaaacggtggtcttgctactgaaggtttatacaggtatttttgatttttatggtagtttaaatatgcttgcacatacttttttatatctttatataaactaatgttctatgatattttcttaccataagtctctgaataaattactggttg

SEQ ID NO: 422477 - DNA, 493 bp, Homo Sapiens
tagagtgatccccgtagcgtcgatcaaacattcggcctgtggcttttgcaagaggctgaccgtgtcgtcgaccgatgataagtaccttcacgcacgcacgcgaaaagccatgctggatactcagcaagttgaacgctgtcgtgagcaggagctggctcagatgcgactcgacatggtggaaaaccgccagcagtttgccgagaaatgccgcaacttcgtgtttaaacgcaaagcctgccagaccccgcagcggttgattgcgccatgggcgttgaggtatgaggctggtgtgccggaaagccggatgctgaatgactgactgtcgacgcggggagggcacgtcggccagtccagcctcgcattgggcaatagggttgcccataatggaggccaactcgcccaaccgcacagaccccgaggctccatggaactgcacaacctgaacgatgatgcagcgcccgtatgactcgtgcgctgtttatttcgatggatg

SEQ ID NO: 422478 - DNA, 302 bp, Homo Sapiens
  misc_feature (120)..(130): n is a, c, g, or t
tagctcgctcaaacccgtggaccatgagctgcatgcaatctaggacggctttgaatgtagcccaatgcgaatttgtatcactttcttataacactctgagattagttttgcaatattaannnnnnnnnnnctttaccttcatcacctttctctcttgttatttgtttttaacttttggccccagaactattcttcttctaatgtggcccaggtaaaccacaaaattggatacccctgcttgtgttcctaatcacttgaaacccggccatattcatgctatctccactttctgtctatttcta

SEQ ID NO: 422479 - DNA, 466 bp, Homo Sapiens
tagcgatcaaacccatgccaaaaatcatcacgaagatcatcgctgccctactcccaggcgcttgcacgcaaaccccgcgctcatccccaacactccggacaccaccaccgccgactcccaatgcaggtagctcagccataccgaacacaacaacgacacggcgacgcagacgatggttggcacgtcgcgtacaacgggggtgatcagggcgataaacgtcgcggcaatcgagaattccagacccagccgatccagcccgggaatgcttttaccgagcacgatgccggcgaaggtgaagacgttccagatggtatagaacgtcaggccgacgcccagggcgtaccagcggttgaaggtctggcggtcatattggctgaccagggcgaagaattcatcggtcagcaaaaagcccaggctcatgcgccacctgggtttgagcggcgacagcgtagggcgcatgtgcatg

SEQ ID NO: 422480 - DNA, 387 bp, Homo Sapiens
tcaaccctctagatccactggctctgctcaacgcccatttgcacacaattcgttacgatataacacgaagcgtgaaatttttgttctcaaccccgttcgcacatttaggtcgaggagcactcgcaaaatatccgtcggctgtccggccttcacagagttacctcagggcacgtcgggcactgctaccttgaatgactctatgcatgtttcgccaaacacgatgggcaacccgtgagacagggttgcgcgccgcacggcgcaagtctcgctctactgctcgagtcaaagcctccagggacgggctcctaaccatcggagcgggttcgagaacaggctgaggctcgacatgaacctctatgatgtcaacgtccgcccccagttgataat

SEQ ID NO: 422481 - DNA, 323 bp, Homo Sapiens
caacggatggttacctcaactaggcagatgagtgaaaaccttggagttatagacctacagagtactacatgggaaactaatgctccagaaggcccagtgctgccttcgaacgagaatattagtagcattgcggatctctacttagtcctagctttcccctcattcctgatgtggtgtaattgaagggtgtgtgaatgctttgcctggtcatttgtcacctttatccagttgagggcttatacgcattaatgacacctattgcccattaacatcccatggcaaatattctgtgataaaatgtcgaactatcacgattgaatcca

SEQ ID NO: 422482 - DNA, 345 bp, Homo Sapiens
ggttgctgactgatcagggtggtggttctgaacataggggtggctttggaaatttcttaaaataacaataacaagcatcactgctgcactgattgactctttcttttgtgaaagattcccctgtagcatgcaatgctctttgatagcattgtacccatagtagaacttctttcaaaattggagacagtcttcgcaaaacctgccactgctttatcaactaaaattatgtagtattttaaatcctgttatttcaataatgctcacggcatcttcaccaggagtagatcccacctcaagaaaccacttctttgctcatccgtaagaagcaactcctcatccattcaa

SEQ ID NO: 422483 - DNA, 449 bp, Homo Sapiens
atggcgaatccgcagagaaggtcttactcaagaatattgtgtttttccctggcccctattatagactggtatgtctgcaattcaactgctgaatatttgatttttttctttgtccatgaaatgaaaacacaataccctgacaagaacaatagtacattacattgttttgataaaatatcattgttttctctatattcaagagtggaaaatatatgtaattttttataaagggcattatacagtggcacaagcactaaactaagcaactctgggttctagtctctacttggccacttttaaactagtgttaatttaactctaaagttgtacatgcacacaacccgcatattccaagagcttgttaggtacaaggcttgttacaaagaccagcagtctccccgctgtcactcctgccccatcccttgctctctgagctcaactcttagagc

SEQ ID NO: 422484 - DNA, 169 bp, Homo Sapiens
ttggaaatggtttgttatcatagctgaatttctctccagtgttaatgtgtttcatgatccaccatgtggttaaatattaaggaattcatcttacagcaagaaaacaaaatgcacactgagagttcatgctgaatgttctttgacagaaatgataaggtttttcctagta

SEQ ID NO: 422485 - DNA, 143 bp, Homo Sapiens
aactggcaacatgatcagacttcggtcgctcgcgtaagctgctccagcaactgggtgggaagattccggatcagcagagttttattttctgcatcaaattcaagcttattcccgagcaagtgctgctcaaagctaatagacaa

SEQ ID NO: 422486 - DNA, 120 bp, Homo Sapiens
gatgccgcgctggcgcgcctggcaagcgccagtcgtccggccagatgcgcgcgccgatccgcaccaaggccaactttctttaaggaaaagccatgtccgccgcatccaactacaccgaga

SEQ ID NO: 422487 - DNA, 165 bp, Homo Sapiens
gtcccatgtatggcggcaggatgatccggtcgtaacgcttattcaactgattgagtcgttcacttgtcgcgttgtcatcagagcatgctctggccaccatccgctcatggcgtgacagagcacgtcgcaaacgttgacccttttcgcctcgccaaacagcgggcg

SEQ ID NO: 422488 - DNA, 290 bp, Homo Sapiens
ccctgcagctaaatgcgccctgcgccctgagactgcggggaggctccacgcgaggtggtgctctggagacatccacaggcttcaacacagcaccagatgaggtcagcagtgggaaaggggctgggtttacaagccttggatcacctgggatctcccagcaagccaccaccaaagtcttcagtgcccacctcaacagggataaaacagttatgaaaattttcgcaaagagccctgtcattagaatacatgtatacaaagaaagacagggctctttgcgaaaattttcataa

SEQ ID NO: 422489 - DNA, 300 bp, Homo Sapiens
aaagataaagcacgtgagatacacgctatgagcggtatatgagcgaccgtccccctgttctgatcaccaacgttggtcactctcttagtttgctaactagactgatccctcgctctgtgtgcagtatttgtgtcctgtcttggtcattacttttttctgtgttaaaactccatcacacctcacggctaccaaggttctggcttaagggattagaaatttggggcactttcccaatactaaaggactctccaaaagtccccattttgatgcctgtgcctattccagctgcggcggattcgg

SEQ ID NO: 422490 - DNA, 377 bp, Homo Sapiens
ggatggtcgaatccgcacggatcaatggtgtttcttgcagtcgaagccgcccaggtcacggtggattgggaagcgagccgctttgagctgatagctcaaacggcgcacttggcggtccgcctgttcggcttcgatcaatcgatcgagccaaagctatggccgcgcaggccgacgtgaggcttcagcaagcagctcttgtaaagcactcgccataccatgcaggtgcaggtttttgagttcagaaatacgatcagtaggcatgctgagtacctcgcagttgctcatagcgtctgccttcgtgaaagggctcaatgcgcaattgcagggcctcgggcaaggtcaactctacgggacgtgctactgaggtaagccgacgc

SEQ ID NO: 422491 - DNA, 317 bp, Homo Sapiens
aatggcgaatccgccagcttcaacagttacccacgtttgcccatcttgtttgatgtactgccaccccctggccctgtagcaaatcccagtcttcgtgtctcctctgtaaaagcatcagtgtgtatctttaacacataaggatattagtgctgccatcacatccaacaaaattcacaaaaattccaggatgtcatctgaaacccactgcgtatgcgttcacacttacactcctctgatcacctctcaaatgtcttttttgcaagtggtttgaattcgtcctgtatctaaatacggctgcacattgcagtttgtcgagg

SEQ ID NO: 422492 - DNA, 228 bp, Homo Sapiens
ttggtcgaatcctgccctggcccattggtgagagcgacctgatcattggcgccaataatcgctcagcgtgttgccaccactggtctgagcgtactgagcctgttatgtaattctcgtccaagctcgaagcccccaccgcagagtgcggcgacggaagccattgttagggaaatgttccggattgcgccatccctatttagaaaccatgacgcattgactcaggcagcg

SEQ ID NO: 422493 - DNA, 281 bp, Homo Sapiens
tgtacagacttgctaccttaggcctggtcgatctttgtacaatgttcgtgattggaaaaccccttcggagcccctggattctgcaatttgcaatgatgcgagatgtgtctgaggccaaggccaacctctcttgcttgtttgaattttatattcctgtgaaaaagactttgaaaaagattttgaaatcattttgagatttttaaaaaatgtttacttaatgaagcacatgactctggtctcaattataattctgttaattttttctaacaatggaaattttt

SEQ ID NO: 422494 - DNA, 331 bp, Homo Sapiens
aggcgaatccgccaattcaaatgctaatctcttttggaaacacccacattaggcacacccagaaatactgtttaatcaatatctgggcatcctatggcccagtcaagttaattcataaaattaaccgtcacacatgataagcactttaacgctggcacattcggttctcacagttgcctcataaggtaggaagtacagttaatcctgttgcccagatgggaaaagtgaggctttggaagttaaatattttatctcagatctgtccaccaccagaacccatactgttggtcattacaaaactgcctctagcagggcaaatcaaagaggagat

SEQ ID NO: 422495 - DNA, 110 bp, Homo Sapiens
tagggcgaatccgccttgatggatattccctgggtgccttaaacgtgtttaccactacggttgtgttgtgagtgtcctcgttcttggcagttgcgtcatgttgattaact

SEQ ID NO: 422496 - DNA, 338 bp, Homo Sapiens
tgaggatgagaaaaatgtgactaagaagctttttaggtgcaggaaccagcttgttcaaaggcctcgtggcgctgggaaccctagaagaaggtctgtggctggagtgcacagagtttggggaaagaagtgagatggaactacagacagcatgtgaccaggcatgtagaaccatgtatgaggtatctagatttttaatattcactttgacagtgaggagacaccactgaaggctggttagcaggaaagatacatgatcagatctgtattttgaaaagatcattctatctgactattaatgacatatgggtgataaggaggtataaacaaagcggattcgg

SEQ ID NO: 422497 - DNA, 106 bp, Homo Sapiens
actaacagcaatacctgatcactacttctgcactatgtttctcgtgtactatgcactatggtccacagtatcaagagggaatgatagcattgaaggactcggggat

SEQ ID NO: 422498 - DNA, 223 bp, Homo Sapiens
agcaggctgagagtgcagaccagcatgagtgcaagagaagaaagaaggatcatactaggtctttagggacattattagagaggtcaactcaaacctcagctgacactagtcctaaacctaactctacaattatagaaggtgataattcccttgactctttacgctgcttgaatgaggttattgttacctgcaatctaaagattcctgaataatatatacagac

SEQ ID NO: 422499 - DNA, 383 bp, Homo Sapiens
cggtccgatggcgaatccggctgatacacacacgctaggaaatcaaacattcaattccataaacataatacatctgaagcaaagataatgccaccaggtattttttactttataagttggtccccagaaaaggataattataaaagacaccaggaagcctcttttcaaccttgttaaataaacgacttgcaaatattaaccacaaaactgtgggtgaagccactctgtcctgtcatgattactcgctcataaaggcccaaaatgcgtcttgaagggagtttttgcaatacaaatcctaatcttaattatataaactctattcttaactatcttaaaatacattacaaaagaccattctcaactttctgaaaactttaatatct

SEQ ID NO: 422500 - DNA, 175 bp, Homo Sapiens
tccacttattaatattgaagtgccttagggcttagttcttgccctttatgttgtatcttacttcctcagttggtgatcaggtcctatctcatggttctaaataacatcattacagaagtgactctcacaaggaagaggtaggaaatggtcatttttagttaaatattgaaaatgg

SEQ ID NO: 422501 - DNA, 166 bp, Homo Sapiens
ccaggggctggggacttgttaaacacagattgttgggtctcactcctagagtttcttcttcagtattctggggagcagcctgtgaatttgctgtgtttcctctggtcttcagagtctcctccctgcgtgcgggttccaggcgcagctctgttcaatccccggtcga

SEQ ID NO: 422502 - DNA, 144 bp, Homo Sapiens
gtccggtctacggggattgcaggcagatttcgggggtcaccagccgagctgggagcagtcgtctgaacagagctgagggacagaggtcttggggtgtcgggagtaagcagggactggacacacgtggacactctgctgcccggg

SEQ ID NO: 422503 - DNA, 189 bp, Homo Sapiens
acggggatacaggagtgagccttggctccagctcaggtctactcttgaatgtcttggcatggctggagagtatctcacggcctagcagatgataacactgtgcattcacaatcaccaaacacgattggcttctcctcatggcatggcaagcttagtactactttcttttaggaagcaccatcctgcttt

SEQ ID NO: 422504 - DNA, 165 bp, Homo Sapiens
  misc_feature (103)..(103): n is a, c, g, or t
cataacatctttccatgttaggacttcttccacctcaaagatgttatgatccttgttctgctggccccttaaaccaagtcttacgtgtttacatgaatccccnggtgacgcgggatccctctagtagtacgacctagcagcgcatgcacagcttgagcactaggc

SEQ ID NO: 422505 - DNA, 185 bp, Homo Sapiens
  misc_feature (169)..(169): n is a, c, g, or t
gcccggcttacggggattacggcagtagacgatgacgtcacgaggagatcggcatcgcgacttgaacatctatggagtcgtcgcctcgacgaatctgttccgcaatatcatcaatttcggctacctcatcgagcaaggttctgcttgaacttcagaatgacgatcctcnggcattccgggaaaag

SEQ ID NO: 422506 - DNA, 378 bp, Homo Sapiens
  misc_feature (247)..(247): n is a, c, g, or t
  misc_feature (317)..(317): n is a, c, g, or t
cggtctacggggatcaccatccggcgaaaactggcagcgctggccagcctctttgatcacctcctggaaagcaatgcgctttccggcggcaatcccgtgcacggcgtgaaacgacccaggatagaaagcaacgaaggtaagacgccggcattaggtgaccatcaggccaaagctctgctcgaggagcccgatgaaaccacttttggaagggaatggcgggatcggggcgaatatgggctgtccttcntactatcagcggcctgcggcctgtgaagacagcggcgctgcttgcaggtaacgcgacattccaggaacgnccgtgggatccaaacaccttgaaagattcacgggcaaaagggcggcaagggtgccggtacc

SEQ ID NO: 422507 - DNA, 138 bp, Homo Sapiens
tgtaatctaatatatcatcaaatgttatggattccacctctaaaatacagcttaaatccatcaatttctcttcatcttaactactagcatttcctaattcaagtaccattgcctctcacttgaaatactacagtacaa

SEQ ID NO: 422508 - DNA, 231 bp, Homo Sapiens
cttgaggactcccgtcacgcatcgtcgctcgctgatgcctttctctccgtactagcccgtgaacttccacgccatgtccagcccttccttgaggatctacacagaggctcagcggccattggacatccctcttccacttgcccgggctgtccagcacccgccagacagaattcataccagtaaggccacgatgacccgcgcatgtgtgcctcggagatccggccacaaact

SEQ ID NO: 422509 - DNA, 154 bp, Homo Sapiens
aaccagaaaacagcagatcaccagatcttgaatcaggaccctggaggtggcaccttctagaagttgtgtagtctggaactagtgagtgtacaggtcatgaggttcagaatctaggagaactagagcatcgtctggttctagaagaactggttat

SEQ ID NO: 422510 - DNA, 189 bp, Homo Sapiens
tcgacgggattggtgcaacggcaggtaccgcaccttgccgctttgccgtgaatcttcaggtgttggatcccacggcgttcctgaatgtcgcttacctgcagcagcgccgcttcttcacggtgcaggccgtgatagagaaggacagccaatatcgcccgatcgcgcattcctttcaaagtggtttcatcg

SEQ ID NO: 422511 - DNA, 194 bp, Homo Sapiens
accgggatttcaagatggcagctattcacatatgtgcgttttgcaataaagaaagacagggaaaagggaatacagagagccatttgaaagtgtcaaacaataaatcaataggagcaatatcaggtaaaacaaacagaaatagtgtgtcatcgagcaggtggctcaacaccatgtaattcccctggtctgacggg

SEQ ID NO: 422512 - DNA, 132 bp, Homo Sapiens
gttatcggatgtcaagatttggtgtttcctttcagacaaaacaatatgttatatactgttttcccaagtatctcaaaagtggtatcacaatacgtttttgatataagcctttatgtatcagtgacccctatg

SEQ ID NO: 422513 - DNA, 137 bp, Homo Sapiens
aggatcacataacaggaaatagagaaactaaaacaagcagagatgaaaacgaattacaaaaactaactatgcagggaggaacaaagtctgtatcttattaacatcttcaaaatgaccagaaaaggtaaaaattggga

SEQ ID NO: 422514 - DNA, 120 bp, Homo Sapiens
tatgagatataaataaaggcaacgtaattaaaggctcactccacacttattctaggggatgattaaagagagtagtttagaaggtaatagcagctaggtactgtggctcaatcccggtga

SEQ ID NO: 422515 - DNA, 147 bp, Homo Sapiens
cttgtgtagtctggctatacagaggtgtagagtacaggaagagatgatagttactgaggacccctgaaatatatgtgccttagcgccttcacaagctgccctcatggcttccagtgatggtttgccctacagatctcgtgatcagat

SEQ ID NO: 422516 - DNA, 177 bp, Homo Sapiens
ttatcgtgttgcactattacattgtaatggtgaagagtgaagcaaaagtatgtggaaactagtttagtgaatggaagaagaggtattccctgactttcattttctctaggaagaggttgggattatttacaaataaggtaaagtcgaagactttatcttcttttattcctttctttc

SEQ ID NO: 422517 - DNA, 275 bp, Homo Sapiens
ttactttcccctgaaagtaactatgtccaggaatccaagacaaagcagaaacaacagtggtagcaatcagtgctatagttacatttactgtacagcaggggtcaaggaaagctttccagaggagtgaaggtgcagcagctgagcctgagacacatggtttgaacacagcaaccagttaatgccaggggtggtaggcagtagttataaacagaaacaaaccacggaatttgctcgggaacaagtagatcctaatagtaacctatttaactagcatt

SEQ ID NO: 422518 - DNA, 225 bp, Homo Sapiens
cgaatcatatttacttataagatctttcatgaggcctgaccagctgtttcgagagaaaaccaaacacagtgattcacacttcataaacagaccttcaatctaaatgaacttggatcatatgtgaggtcactttgttgttgtttgttgttcatcttctcagcatctcttcgttattgccagaaaactttggtgtgcagcctgcatataatcagggacggaagatca

SEQ ID NO: 422519 - DNA, 129 bp, Homo Sapiens
ccaaacaaaaacctcaaacctcaaggaaagaaattacaaccaagccttcagacagctgatggtaatttactcacacaatcccctttatcctttcaacacccactatttatctgtgggcacggaagatca

SEQ ID NO: 422520 - DNA, 225 bp, Homo Sapiens
cagactgcgaggaattatgtcggggagaacatgtcttggaagaagcagagtaggggtaactcaattagaaaatattaccattacgttcgccatggaagttgtctcacctttgcagtggaatcacagtaagagaggctgtgaggatttgtttgccttccaagccacagcaaaaagcagagtttacagggcctggggagcaactgagttacctgagggcacggaaga

SEQ ID NO: 422521 - DNA, 228 bp, Homo Sapiens
ccctggcgtacaagtatatgtgtttggttagaaaactcacatagtattggattaataagctaccaacatataaatcttttattaaaggaagaacaatattgacttactattcctatttgttggtctaacgaatacttctgctacgtgtatcatccatccccaatgactgaaagaaagcatgccatttgtctctatttgtctatcttcctataatgggacggaagatca

SEQ ID NO: 422522 - DNA, 198 bp, Homo Sapiens
catcgatccacataaattaccgattttgtcagctactcggaaaaaaagcgtacccgcggggaacgctttctcgacaagatcaagccgcgttctgctgccatgcgtaccacggtactggtggtttttgtggtctgttttagcctgttcatgtccttgtggttcttttggcgtaccctgtttttacctgaaatccagcaa

SEQ ID NO: 422523 - DNA, 148 bp, Homo Sapiens
atctgtagagcctggggtctgtttcctcttttggataggctgtgagcatggtggattagagacagccccttaaagtgagcccagatatctcagcaagttttacgcgtctctatttgggggagagggagaagcagcatgggcacggaag

SEQ ID NO: 422524 - DNA, 133 bp, Homo Sapiens
gttccaggtgagcgtgtccctggggaccaagaattctcacactgcagagcctagagttctagggagggctgtttccactctggaaattttatcttctccttgtttccacaactctctaatgggcggaagatca

SEQ ID NO: 422525 - DNA, 282 bp, Homo Sapiens
agctgtcttccctcagtcacgccttcctccccatgcaggctcatccagtccctctgccctgctccagtaccctctccccacctttcaccgtggatcaggcccacaaggtcacctagggacgttttatatccaaagtaacatgacaacatctcctcctgcactgtctagtcacatgctctgaggtcaacagtggtgcgtccactaataacacatttcatactattcagcacaactcacaaccctgcaaacatagattaaagtaaagatgggcacggaagatca

SEQ ID NO: 422526 - DNA, 152 bp, Homo Sapiens
taacattaatgaaccctggagccagctattgatttgaacttatgtttcttgacagcaagcagtagctgcaaagaaacatagggtccttctcttctttttcttatcaccataatgattgactgatagagtttggttaaaacttttttccaaag

SEQ ID NO: 422527 - DNA, 267 bp, Homo Sapiens
  misc_feature (64)..(151): n is a, c, g, or t
caggaaacgtctcctttgtccattgcaggagcaccagtgtgacagataaaaccatttgaggggnnnnnnnnnnnnnnnnnnnnnnnnnnnnnnnnnnnnnnnnnnnnnnnnnnnnnnnnnnnnnnnnnnnnnnnnnnnnnnnnnnnnnnnntttatcacaacttccttagcctattttcttatctagctataatcagagagattctttaatctttcaccagcactttcatccccttgcttccttcttagtatactttatctgtctac

SEQ ID NO: 422528 - DNA, 206 bp, Homo Sapiens
cggtctgttattccctggcagttctacaaggcctggagctgataggaaaaacctcccttctttcccaaatggtccccagctgccccgttcactgaaggccctgcagtcaggaacggtcaggacttcacacccagttgttgtgggtgtttggccgacacgacacttcctcttgtgtgattcatggacccgcagcattgcgtcacctg

SEQ ID NO: 422529 - DNA, 118 bp, Homo Sapiens
ttaaatatacaaataatgacctttactctccttctttcccccaggcactccctgcactgctcacttatctaattatgtctgcttagaagatttctggtgaattgaatccttggagaca

SEQ ID NO: 422530 - DNA, 380 bp, Homo Sapiens
tgatcttcgtgccctcatttggtccataaaatacatacacataaacagttggagaacagcagaaggcatgtagtatgagtaagtatccaggggtggtagaagcattcagtttaggagttcagaaaaaggagcagtcattatcagaagtatggaaggagaatgggagctagagagctagacctgggacacctgggacatgggtagtaaaggatttaacgacaaatcaagtttgagttctcgccttacgccaatcagtgggagagggggtcgcatgatgacacaatcagatttgctgaacagaattagttggaaggggaagcagtgttagaggcagggtaacaataatccagatgagagagatgatgactttctgaagtact

SEQ ID NO: 422531 - DNA, 414 bp, Homo Sapiens
  misc_feature (202)..(222): n is a, c, g, or t
cacacacacacactctcacctacatatagggtccacataaagacggggtgattaacagagatctgctcaaaccatcctaattcccaattcttcctttgtttaaactcctaaagtgtttatcctctttctcattcattttcaagtttaaccacacactgcctcacattttaatctgacctatatgacatctccctaactagannnnnnnnnnnnnnnnnnnnnaaagaatagaataccttgtacaagtagttctcaatcctaaatcaggataacacataaaacttcaaaaaatacaggttcacaggccctacccttaaagatattgaatatattatgtcttatttacaacccatagatctgtatttaagttcccccaaaagattctcatagggagcccaggggcacggaagatca

SEQ ID NO: 422532 - DNA, 238 bp, Homo Sapiens
tgatcttccgtgccctctaactggtctgaccagtaaaatcaggtggaggtgatggcgtagttgctcaataataccaatcttgttgaataaaatctccaactctctagatatttcatacctgtgattgaattccagatcaaaatacaatcgcttgtaactttatcttacactaaacgaacatttagataatattatatccagtgtattctcataataccatgaaagctctcatagctcc

SEQ ID NO: 422533 - DNA, 124 bp, Homo Sapiens
cttccgtgcccaggtggcacctacttaagacagctgctatagaaggccattgtcatcacagactagggtgtgacatcaatagtttatgaagcgactaaggatatagaagagggccggaagatca

SEQ ID NO: 422534 - DNA, 242 bp, Homo Sapiens
tgatcttccgtgcccggccagcgtctttcttatcctaaaaagaggagaacacccttctccctgtcctttttctcattctgctaccattcaagcttctaagtcaaagatccagttcatcttttcatagaagtatgacttcatttatatcagtatattactaatgaacaactttaatataccgatcctattaatatttttaacataatttgtttacattataaattaagtgggacggaagatca

SEQ ID NO: 422535 - DNA, 151 bp, Homo Sapiens
gacataccattctgtgcttaatttccaacaggatttacagcttatgacagtcttagcaacttcctctaaattatgtagattactattccagtactagatagatcaagtatccgtgtcttacgacaccttttaaatcgggcacggaagatca

SEQ ID NO: 422536 - DNA, 197 bp, Homo Sapiens
atcttccgtgcccattgcagggacagttaaaaatttgttgcaagagcgccttgcctctaacccgaactatgaatttttcctgcagatactgagatgatcatatttttctctgttaaccagggaatatggtgcattacatgaaaagattttctgctgttgaagtgcccttgccttcctgggataatcaattgcattta

SEQ ID NO: 422537 - DNA, 180 bp, Homo Sapiens
taatagacttccctaagcagcagttactaagggagctgtgttaacgaaacagtagaggggtttttgtcttggctcatctaccagtatttcgattccatgtctgcccttaaattgggttgggtaatattccctctgcctctgggagtcacagatcatcaacagtgggggcacggaagatca

SEQ ID NO: 422538 - DNA, 107 bp, Homo Sapiens
cgtcgagccgcagcaactcggcgatttcatccaggctgaagcccggcggctgggccgatttcacgaatcgcacccgtgtcacgtccgccgcgccatagcggcgaatg

SEQ ID NO: 422539 - DNA, 244 bp, Homo Sapiens
cgtgcagtctaatctataggatcccctgatcttccgtgccccccttcacggtcccacggaccgtctttgccctgagccagaatactggaagctattttagcggatgttaacggggttctaggtgtgtataacgcgatatctgccgagcagtaagtgtttgtgagaaacacctcgttttcacatttccatcctcagttccccttctcatgctaacagcaccttgattcttcttcaggggcacgga

SEQ ID NO: 422540 - DNA, 359 bp, Homo Sapiens
tgcaatgcactgggtgagtgcagcaaggacagtatcagaaattgggggcataaaaggaaatgtgactcaggactctgcatttcacaacattggcagacatctcagaggctatttctaaatttcagccttcatcatttccatttatttcacaggtatgtgtcttaaccatgaacagttgtacctgtgtactaggaagaacctctagttagagaagaaagcactgagttaacataaggtgcttcagtaatagttgtacagtagcaaacaattaatcatttgctccactctgcatttttaatcttccagagccaaaacgctatgaatcactttaaattgtgaatggctgctccaagaacaaa

SEQ ID NO: 422541 - DNA, 340 bp, Homo Sapiens
  misc_feature (136)..(191): n is a, c, g, or t
gagctctgaggctatggcgtcaaatcttttataccatgtagtaaatttgagtctcctattccttcataattgagactgactgtggagtattctaccccttacatgaaatgattaatggactattcgtacccctagnnnnnnnnnnnnnnnnnnnnnnnnnnnnnnnnnnnnnnnnnnnnnnnnnnnnnnnnacagttaaagattgggaatgaatctttacagccctctcattctatctttacaccaaaataatgacctatactgtctgttaaattttttaacctatgcttctgtcatctatttaaaaatgtagagtattaaggctagttcttgtgcttta

SEQ ID NO: 422542 - DNA, 241 bp, Homo Sapiens
aaggatcccctgatgagtttttattccattaagtagctttttattgtcttgtatttctgataaatttaaaattgacatagaagcaataaatctttgagatggtgcttaccaaaatatgattttcctcatcccttacagtaatccttatttggaatctaggatgggcctaaggtatctaggtttgaaaatcaccactttagagtactagaatggaatcctaaacaatgggcacggaagatca

SEQ ID NO: 422543 - DNA, 385 bp, Homo Sapiens
  misc_feature (339)..(339): n is a, c, g, or t
tgatcttccgtgcccagctaaacaacttaatcttatgtgaagcagatctctttaagtaaacggaagtgtatgaatttgacaaattctgtgtttattaggagagatttaggcactggtggtgttggggcccacgttcacagctctgcgtgtatatacatgtgtgtattcaagagcatatatattgtggtctggatgaagccgcggctcataaataaggggtggccttgaatgaatgagtcagtctgctactcacaactcttttatggggaataataatggattcgctcaaataagatcttgtgacttctgtcactgattctgtcgtagacctttataatntatcattattatgatgattactactaataattacagtgaacacttc

SEQ ID NO: 422544 - DNA, 297 bp, Homo Sapiens
ctataggatccccgtgatcttccgtgccctcgggaagggaatgtgtggtcaaaaagattgggaaatgtttggttaaacaagtctgaacagattcttttgcaataagacttctcataaccgtaaataggctgatatgcctggtaaatcactaagaagggccacagaggtgatattttcttaaataaacaatttcttatttgcctgtaaaaccctccttttaaaccactagatctctggccaatcatttagggaactttttcccctaaactctgacagcagagaaaaaaggattgaatt

SEQ ID NO: 422545 - DNA, 100 bp, Homo Sapiens
aggcacattaaattgaacctcggaggatgagtaggattcagacacaggaagacaaggaggtacagggagggcatttctgatggcaggaacagcacgggcc

SEQ ID NO: 422546 - DNA, 223 bp, Homo Sapiens
tcttccgtccctattctctgtctttcattgtcttgatggtgttgtttgaagcacagatctttttgattttgataattcacctattttctcttttgtggcttgtgctttactggtgtcaaatctaagaaaccaatgcttaacctaaggtcatgaagatttattcctatgttgtcttttagaggttttatagctttaggtctaatgtttatggtctatggttgat

SEQ ID NO: 422547 - DNA, 349 bp, Homo Sapiens
ggagcaataaacaatattactggattaggaggaagaacgacgtgtaaatcttagttctcactcttgacactcaaggcagtctgagatcagacaacttacttcccctttccaaggttcagttaacagggaagcgcggaaaggcagatattacaaagttggaccagatggtaagacccctttcagctcccacataggactcgtaaatccagaatcctggccaggcaccacagacgtaccagactccaaagaactaatgtgaacatcaagagactcctcaagacctggcccagaaactcccttgcctgatctttagacactccctccaaccggatcacattgaaaaactgga

SEQ ID NO: 422548 - DNA, 497 bp, Homo Sapiens
ctttatgttgccaaggaccaggtactttcctaggggctggcaaagaaacagtgaattaaatagacacagttccttcctcacagagctcacaaacttctatggaaaactgttaattaaacaagtgtgtctatcacaagattataagtactacaatcaagcaagtatgggacaaaaagcacatggctgtggattgtggcttagttcatgaacaagaaacaatttattacccaaggcttctgaagctgctttacatcttaccacataggtatttatatatcagtatacaaatacaaaaatacaacataatcaaactttgtctcacagtatcccaagataactaggtttaaccattttgattcactctaataaacaggctaacctccttcaccaggcatttataaaataaaggagtaaataaaagaggtttaaagaaaaagcatctttttgtatctgcatggggatggcctgagactttcggtaatgtctaatctttctac

SEQ ID NO: 422549 - DNA, 246 bp, Homo Sapiens
  misc_feature (46)..(65): n is a, c, g, or t
tgatcttccgtgccctggttctcctcaaatcttcccatctccttcnnnnnnnnnnnnnnnnnnnnggctacttaaacttactgatgatttttttacattaattacaggtttcattgacagttcagttttgatgccttgaattttccctttatccacccctacccaaggaacatttctactcacatgcttgacacattttccagtagaaatattatgcctaaaatgattcatctctgacttcttctt

SEQ ID NO: 422550 - DNA, 385 bp, Homo Sapiens
gcccgactttagagagatcccctgatcttccgtgcccctcgtttccatcctacaccatttttgcctataggagcaccctttaatggaggaaggtgaccaataagtagctgcataaaaggacacaagtacccagaaaaatgctcaggctggagtcaagacgttggctgcatcatcacatagggagtaattagagtcagggagtatattagattacacagaggaaatataatgtaagaagagaatcggacaaaggacagaaacctgggagagtaccaacatttaaatggctgtaaaaagagcaggaagaattgctctagttttattgcctgagctctcaggacttctcaaagtatttacggaatataacatatgggacggaagatca

SEQ ID NO: 422551 - DNA, 223 bp, Homo Sapiens
gatgcccccgagtctttagaaagcacttaagaaggtgagaaggatttactcagaaggggattaaatagttgcgataaatttctgacgaaagatttgtttcctgaaaatgtaaagaaatttataacccaattgtaaaaggacaactcaataaaaatgacaatatacttcaatagagataattcataaaataagatatgaaatggtcaatggggacggaagatca

SEQ ID NO: 422552 - DNA, 129 bp, Homo Sapiens
aaggacagcatgactcttgatgtgcttatagggactgaactccaggctgctctcttggctattgggctgtcaggtgataaggaggccatttgaatattagcatgaaaaagaaggcttgggacggaagat

SEQ ID NO: 422553 - DNA, 380 bp, Homo Sapiens
aggatcccctcatcttccgtgcccaatcactcattaaacacttaataaagaatgggggttcatccacattaacactaaatctactgaataggggcttgctagtcaaacatgtgcataaactgactatatattgtcttcatagttgacctgttttatcagccttcatagttattccttcctttccatttccactattactctttcaagtccttatctatactcatacccagacaactttctaaatggttttccatctccatcctcagacattctttgagcagactattattttatttccatcaccaatgcctggctgggataatgaaaagagatttccatggcaaatcaacacaatttgggtttgggtttcagccctatca

SEQ ID NO: 422554 - DNA, 476 bp, Homo Sapiens
gaggatcaccttatcttccggcccaattaaaagtcaaaaagggtttatgaaattccggagggagagaaaattccacttaatccatctaaatggaggtcaaataatgcaaagcatgctatgacatctatatcaaaatatcataaagctttttaaaaaaagaacttatatgcatgactttaagtaaatctaacaaagctacagacatataaattagataaaccagtgagtgattattagtatttagagtctccttaaatattaagttaaaatatgataccattacaagggtataaattccatccacatttcagacattttcatgaataaagaaaaggtattgaccttattgtgtttaataagcaagatactctgagagatgagactaaatattaggtgaggtgagcataaaacctagaaccactgatgttctgtctttaaataacttttaacccctcccacatcatagattttcataa

SEQ ID NO: 422555 - DNA, 148 bp, Homo Sapiens
  misc_feature (37)..(37): n is a, c, g, or t
tccgtgcccgaatgcgttgagaagctgctgcttgtantgggtcgggctgggtgaggacggtacaacaagaccttattagggctgtgcaggaggggaggaagaggcaggggtattcaggcaggtgcatgtgttgggggcaggaagatca

SEQ ID NO: 422556 - DNA, 162 bp, Homo Sapiens
agatcccctgattatatttttaatacctgtaaatattttattacgggtattttggatatttgttgatataagggcattttgggcataggtaccattgtgcatgttgctgattttgatagtcacttttttaatgaatgtaaaaagcttggtcacggaagatca

SEQ ID NO: 422557 - DNA, 283 bp, Homo Sapiens
actgatcttccgagcccctctgggagaagagagtcatctttgtggtgcttgctgtttatgctcgaggggtcagtgggctggaaggataatgatgataaaagcaggtttgtttcaggatgcaaataattacagttgagtagttcactgaatgagtaggattatcgaattaggctagagactgcctttggaggtgaggagaggaaggaaacgaaggctaacaaaacagtaaacagccagtaatcattcctgcctgattttgcaaatatgctaagggacggaagga

SEQ ID NO: 422558 - DNA, 159 bp, Homo Sapiens
tagcttggtgtgaagactgtcctcggggtaccttatccaatcctatatatctcacagagattgatctctatcagtatatggcgggggattctcacggagatacatgtataataactggaaacatgtatatagcatgtggtgtgtgccaagtactcttca

SEQ ID NO: 422559 - DNA, 217 bp, Homo Sapiens
tgatcttccgtcccaccttcccctttgtgggaaatgttctctcccatccttcagccggcaactgaggctcagtactgcaagcctcggctcacccatcccattccagaagcctcccgacctttagacgaggccagaccccctggctgtgctcatggtacccttctgggcttcccctttctctgtgctactgtgaccacttgttttaaaattctgtctc

SEQ ID NO: 422560 - DNA, 112 bp, Homo Sapiens
tgtcctgcgtcgctacatgttattaagtttacatgtctcctctgtcctgctctgcccctttgttttaaattactgcgctttgaatattgagttcatatagcgacagcaggca

SEQ ID NO: 422561 - DNA, 140 bp, Homo Sapiens
ccctgcatctgtcgctatatggcactgccactcagtcttcgcaacccagtgagatagtgttactgttgagaaaaccagtgctcaacgaggagcctaggaaaagctgatgtagaattcatactcctacgtgagagttgcca

SEQ ID NO: 422562 - DNA, 157 bp, Homo Sapiens
tctagcaggatccctgacctgctgcgctaccaatcaacattgccagcctagcactaaaagattccactatgacagacaaccacatagtgccgtatctcagcattagaaacaaatggatgggggagagtggttaagagcactgattttcagaattaaa

SEQ ID NO: 422563 - DNA, 293 bp, Homo Sapiens
atgcctgctgcgctatttaaaagagtgttttccactccatttccctgcaaccttgccatctacttacccttcaacccattctaacttggctttagctccctccacactactcacatagctcctgcaaagtgtagactcagttttgctaaatccaatgaaccttttgttggccttatctttccttctcggagcattcagcataaattacttcatctgtttttcttgaaacgttatctttggtatctttgccataatagctataccatcttcctagtaacttcatggtctatgga

SEQ ID NO: 422564 - DNA, 374 bp, Homo Sapiens
agatgaactagcatatcctacaaaggaaacttttcaaaggcttccggctttccatcacttggttcttccatctctcctgatatgcaaaatccatcctgggagggtgtaatagaggaaggcatatacgtactcctgcttgttcctgccaaagcccaggccttaaactccagatctatgtcacagcatcctgtctcaccttaataaaaacagtctctgagctacaccaaggcagaaagaaaaaaagcaacagatggagacccagggtgtctgggttctcgctccaccactgtgtgaccttcaccaggcccccatttccctacctctgacattcctggagtctgtaactccctggaaactgtgtcagtccttcccag

SEQ ID NO: 422565 - DNA, 123 bp, Homo Sapiens
cactttagtgtggggggaaggcaggtagacatgaagaaatggaaatacagttcattctgctagacattttaaactggtttggcttgagaaaaatagaaagtctgtgcctgagaaccttctttt

SEQ ID NO: 422566 - DNA, 153 bp, Homo Sapiens
atcgatcgagctcggccagactgctgaatagaaatgaatatcttggcatgcgcccctcatctccaattattcatcttattcctactcatccctcacaactcagctcaagtgttgcctcctcttctgacttccacctcctagcgacagaaggca

SEQ ID NO: 422567 - DNA, 408 bp, Homo Sapiens
actctctcatcgctgtgcggcccggttcattttccctgcaaaaccaggacagtcattgaattggcctcttgtacaaagtactgatatttatacaactttttatgcatgtgaaaatgaagtttccgaatgaaagtgactatcaaattcatggaaacagtgaatagcagaccccggatttgaaactacatgtactaacatgaaacccaatgttgtttctaccgcagtacagttgactcgcaaatcatcctccctccatcacagatgccaaggacagaaatctgctaccaaaacattttctccgaaatcccttatatgtgtattaatggtttatcgctcccacttgaataccaatatacaaattgacatttttggttagttttttaaagttaacatatgtttctctccttg

SEQ ID NO: 422568 - DNA, 270 bp, Homo Sapiens
aatatcagtgggaggcagcagtgttcatactcctgggacctccagagtgacttgagcaaggacatgctggcggttccccacacgtagaagagggtcccactatttgaaaggtgaggcagcctgcccagctgccccagtttcagcccctcctcgtgttcaaaccacacaggcatggacacatgagaaacagcaattagcagggagcctcaggggcctcgttggctccactcaggcataagatggacgggggtgctctagcgacagcaggca

SEQ ID NO: 422569 - DNA, 419 bp, Homo Sapiens
gtattggaaaaggcaacatcgattggttaaaggcattattcagaaagaattaactgggaaaggatgtgcagacagaaacagaagttctcactccaagttgcaggtttcatccggaccagtaatctggtctttcagccttcaggctgttttttggcttgaaggtggggttcacaaggggacccgcccctatctgcctaggccatttgactaccccctgtcgctatcaaacccactgtgttccacttgttttcacagctgcccaagttgtaaggcaatattggttttcaaaactacagtagagctggagaaagggagatggcaatacataaagttaaaactctaaaattcactggtcttcctgagattcaggcatttttctgaataaacattcctcagattatggcaaatttttagttaat

SEQ ID NO: 422570 - DNA, 333 bp, Homo Sapiens
gctgctgtcgtacatggactaacttgtggcatagatgaatatatattaaatgctgttccaacctagacacaatacatgctgaagggcttcagagaaggaagcaagcactgtaaagtcgaagagtagggaaaagccgcaggaggaggaccaagaccttccaggggaggggagaggaggctcttttaggctgagggcaccacccaaataacagaaagttctagtgagctgagtcatggccaatgaggaactaaagtgtaacatactttaaagacccaccttagcctcccgctgccgcaaatctggcacggcactgaagagcagcccaactgatcc

SEQ ID NO: 422571 - DNA, 430 bp, Homo Sapiens
ggcagccatccacgtgctggctcagtccaccttgggctgcacagctctatacaggcctagctgccaggaagattactaggtatcattgtcaactcaggctctgtgcccagtaaacctggaaatgtctggatattcttccttgccagcatatagtcataaatctatttggggaagaacttgccatttcatcaaagtctgtacatgtatagcagggttcttcctcctagtgacctgtgacctagtaacccagccacctatgggttcttccatctgtggcttccttacctgaaaagtgcttcaggtctaggaactgagaaagggattgtgatgtgtcattggagccagtgcggttccattcgtgccttatttggttataggcgttaagcagcattcttgttagatgcccatctattttgcctataggggtgtt

SEQ ID NO: 422572 - DNA, 364 bp, Homo Sapiens
gttggtgataaccttgtgtcctgaagcatgagactcttacctgtggtagataaggagatagaagttgaagagaaagcttggtttatgcagtagctttgtcacttgaaagatgtggaagcagctgctgttgcaaggattatggaggtggctagcttttctaaatcaccttagcagctttgaagcaagagaatgaaagatgcagttcagcctgctatctactcagagtatgctgtgaaaggcaggaactctcccaagacaacatgtaaagaaaaccttgcttccgtggccaggaggcagagcatgctgaaaatgagaaccaatatttcatcacaagagcagcagagctgcaaaagacacttgtgca

SEQ ID NO: 422573 - DNA, 311 bp, Homo Sapiens
aattgagattataaaaggctgctgagcacatcagtattttgagaaaatgccatatgttttaaaaacacgtttttaaaagtcgatgttgaaaaaggcacaccaccaagctgcgaaaacatcaccaatggcagaagacggcagactactcaatgagaattgaattactcatcaattcaagaaatttgacactgagctgcaggaattttaccatcctaatagttccaacaacttccagaaaatacaagagatagagggaaagaggatagtgagaatgagagaatcagtgaagacatatgtagcgacagcaggca

SEQ ID NO: 422574 - DNA, 436 bp, Homo Sapiens
acgtgaaaatacccgcctaccccgacacgaaacacgaagaccccgctgccgagtaagaggtggccttggcacttacctaagagctatgctgaagatagtgctacggacaccttactgtggcttggctagaataaactaacacagggtgcccatgcgtatgagcccatgaccgcagtgagtgctgcaacggccgtaaagtagttcgacgttacaactgctagaaggacatgacattttggcaacggaaggaatgcacatatgtagggcgcaacggacgcgggtggttgataaagataaaaccataactagagtaatgatacaatatacagcgtgacggggggcaacctgaaggctagtaatggcgggatggagggccacccgagcgactgcagcgggcataagacgagggacgaattaaaactattgagcggggcac

SEQ ID NO: 422575 - DNA, 422 bp, Homo Sapiens
gtaaacaggccccgtgaatgggttgaactgtgtgatgatgaaatatacggcatgggggatttgtatgcgagatatacggggggggcgaaagaaatgcggggtgagttggcaggggagaaagaagaagttgtgtaagacatttgcgggtgacttgccaaggtattaaaactacgagattattagggatacttacgtgcagagggttacgctgataaaataaggggcacagaaattaggaggggtatgaagcggcggggtggcaatatacttagtaaaggggaaggcatgactaccggctccacctatgtcttacatgatttgctagtatcccgcctacgccacccgccgatctaacgctttgccgcaataccctacagcactctagacttcgatcccacattctgtaggcaatcctgatggag

SEQ ID NO: 422576 - DNA, 215 bp, Homo Sapiens
gtggatggagtatgatgaaggaggatgaggacctagagctggaggggtagccggagctttttaaatgtaatacgcatttgcgccaagtttggcctgttttatacgtgattccttactaataatatgtgacgtgggggtagctttttgatatggatgagagttgggatatatttatgtagggtcaggcttaatattatgtatatatggataagatt

SEQ ID NO: 422577 - DNA, 464 bp, Homo Sapiens
  misc_feature (218)..(230): n is a, c, g, or t
cattgcatacaatagttgagttgattagcttggtgaccacgggtttacatattgtagggggaatggggaagctaccctgaccacctgtgacatacagcatttgctactatgccgcctacgccttccgcggatctaacggttccccgcctgcgcgaactgcacgcttggcgatgtgttgtactgtattgcttacccacgtgcgctcgcgtattgatatnnnnnnnnnnnnnacattacttttaaattacgggtgaccgcagccgcgagaataaggtagtggttgtgccagctgccctactaggccccgcagaggcccacctgccgcaaaatggaaccgacggcgtgctatgcagggccgggcgtggcggcgaatatccgggattgacttgatacgtggtatgcgaagcttacttggtttcgaatttcacccgcgcgcatacctgggcgaccacctgccgttgcat

SEQ ID NO: 422578 - DNA, 185 bp, Homo Sapiens
agtagtgatgccatgacgggtgccgtagccgtgatagagttgatgcgacgaagagccgacggctggaaggcggttcgcaggagcggtactaacccgtgtctttgctgagaaataccgtgtggtgcgaaggtgaaacatttaatgaggatatgcacggagttgagagtcgagggaattggccggaa

SEQ ID NO: 422579 - DNA, 254 bp, Homo Sapiens
gcgacgggtaggtatagagggaagtgaaacgaaagctacagtgggggtgaaggcgacggtgtgggtggcggagcagagactggcccatagtaaaaagtaatgtggagcgttgtggccggcaggagtaagagtattaggggtgcgcctgcaagtgggaaactgcgggtgcatccaatagttgataccggatacagaccgccggcggggccagaaacaaggaaagatgcaagtcaagatagagggtgacgaccggc

SEQ ID NO: 422580 - DNA, 447 bp, Homo Sapiens
acgggggtctagactattaacttggcttgtggggcaccgacacagaaacacggcccccgcccccaccgcgaaacgcccagaaattagcagaaaacggagaatgacacaggggccgtaaagacaagacactaacacgatactactagcgagcattgagggctgcgaattcaggttaggaactgaacgtggttattgttgggccgggacgactgtaagtgatgcgatgttgtactcagaaggcggtgggcttagagggggaactgaagcgggtgctgagctatatacaaaatagggaagaaaatgatagtcttcaatgtgaataatcgcttaactggccggggatattaaggaaaattagcatgaaagtgacgtagaagggagagtacgactcgtggggggggatgtctattaaagtatgtacaacttaaatgtgtgataaagttaaca

SEQ ID NO: 422581 - DNA, 447 bp, Homo Sapiens
aagaaatgcagggccggagggcttgcagactgtgcgcagaggcagtccgggccatttggtagacccgggcaatttgtttagctataatgaccttgattaagaatgagtggacttagaagagaccatgagacggttggaggtaaaaattttagtgcctagtaatggctacagaaatacaagtaacggtgttgggggcattaggtaggaggggagcgcgggttgggaacgagggggaagcgtgatgggccgaaaaaatgaatgcctagaggggcccttaccagacttaatatacctaagcggggtaaatgatagatgggagaggacatttaaattatatacagaagcgagggttttggggaagtagaaatgaatataaatggagtgtatagactgggatgtgatgaaaaaaggcgtgcattgaaagttctagacaccacgcgacgtggg

SEQ ID NO: 422582 - DNA, 320 bp, Homo Sapiens
atgaccagcagattacgggttggctgatctgtgcactgttaagtagatagggttaaactatgagccctacttataatattgctattggttgtaccgggaattgatttatgggctttgcgatggtactaggtactaatgaggttgttagcattggggacggagacgatgaagacaattgcggtattatagactaatgggaagcgcagtatttacgatagttgtagttactaccgtagcatgtaaggtaatataatcttatgcaaattagaccagcggttcgtagcatccaatagttgagttgatggagataatgttgatgt

SEQ ID NO: 422583 - DNA, 249 bp, Homo Sapiens
aaaaaattaaaggcaagtaggttggcggctagccaggcgaggcgcgacgttgggtgggggaggacgaggcggccgtgctagaagagacgagggtaaagcgtaacggggaagccaggagggcaaggaaataatgcggagattaggggacaggcaaacagggaacgagggcaatgcgggggtaagattgataatagtatgatggcgagctgggcaggcaaaaatgtggggaaggcgtacgcgcaagtcaag

SEQ ID NO: 422584 - DNA, 464 bp, Homo Sapiens
gtcctttgcaaccaatagttgacgtgatcatgatgagcctgcgcttggaggtataattaagctgtggataagagtataacgtattcggcctaccacgtgcgtgtgaggcctgctatgggtataactgggtaattcagtggggcggggcctattgattataaaaatatcggtaggcggagcgtagggcagattggatggcatgataccggcgattgctaaactgctagtgcttattgccgtgattatgcatacgatacggcaagctgtcaacgttgcggtaaatactttcaactacgctgctgtaattggccgtctaattatacaccccgttactacacatattacaacactttcgtctgccgggtacaacgggcatatctactatttggctggacccataacttcggtgctaactgacagtaatataggtactatatattatacaatagttatgctgccgcatg

SEQ ID NO: 422585 - DNA, 418 bp, Homo Sapiens
aaaagagctagtacagaaagtgggactctgagagaaagggaaactattatgaacgcggtggttgggagagagtaaggatgggatgtggagtgggactaaagagcacaacggcgtgtgataagacccccgggccacagacccggcgccaaagaaagcggaagtccacaaatacggccgaagtagccttggaggaatacgaggggtatggcctgcatgtgggggtgccctaaacaacgacggcgcaaaggaaagaaatacaaaaggtaccgtgtgtaccgtaataatgcatggttaatgttgtgtacagagaaaaccaggtgggttggggctgactgggcggcttggaacaattacagggggcgggcggcgatggggttgaagatgaccagcggttcgtaccccgattatagcgcatcgt

SEQ ID NO: 422586 - DNA, 448 bp, Homo Sapiens
ggcaacgcccctagaggctaatgcgacaaagcacgacacgatcgctactacgctaggtgtatgcaccgcaaacggtttgcctgcagacgaaatgcgcgttgtctacggcagatacagtactatgaccgtacaactttacgggactgcaaagaaacatacggcacaggacataccgcaaaaaactgataatgatgaagagggttataagtgggagaaggaacgcaattaagccttgaattaaggccaaaagagctgcgaggcgcggcgaggacaccaattggtacggcgttgttgggagcactatgtaccagctacgggaatgccgggacgaaagtgagattgctgccgcacgaaaataaagagagagcgggggagagaaagggaacgcaagggatgaagatacagcaggaagagctacggaccagcggttcgtaccccgattatagcg

SEQ ID NO: 422587 - DNA, 454 bp, Homo Sapiens
tgacttggtaaagttaatatctatttatgcacccgactagccctaacccaaggaatgatatatattaatggcctcgtgacggcttttacgcggtgcacctgagaaaaactttgcttgaagttagtggacgagtgccgcattacaggagaatcaagcgcgggacacattgtacggtgacggaaattagattacaattaatagggggccgactgacgcaagattagagaatttggcctgtggtgacgtaaacaatacgagacacttgttcacgattacagcggaaacaaaacaaattgcatttaggcggagggacatataagggcagaacagcatgaatgtatagtgaaaaagacgcaagaagtacctttgttagtggttgagaaattattcgggaatgattgattattaccggaagttacgaatacggaagaaggcaccaatataaccttgaaac

SEQ ID NO: 422588 - DNA, 464 bp, Homo Sapiens
caatagtagagagcgcgcacataaatgcgataatgaacccgagaaggggagaagcttgggaaatatatacaaaagagagacatacaaagaaatgcaaacaccaaatactgggaaacaggtacttatacaaaagccgcagaggcagaagtaattaacaccatagaacacggcagggggcagcgtttaactgagagtagaataacaaacacaatgataaggacaaaaacagtgctagggatgggacaggaaagagcgcaagcaaatgatggttaggacggactagcaagggaaacggaattaaccggaaagatcagagaacagaatgtacgcgaagacggcccgtgggacaaggataaaacaaattgcgggggcaaccctaaatttggctgcaatagaagtttccaatgcggaactaatgattgggggatgatacgaccagagcgaccgattagcattaaaatgaa

SEQ ID NO: 422589 - DNA, 470 bp, Homo Sapiens
tgttgatgatcatatgctgctggaaatataacgcgtgaatataaattacctgaaaaaggtgtgggtatattacccaaatattggtatcaaccatgtaattgcctataaaatgggctattattataacagacgggtagatgtgaaaagcacatactgccgtatagatgccttatacaaaatatgtatacgctaaatatttagtgactatgcgactgtattggagaacatggatgttgtttgagaatagggcgtaattgggaaacagaaaatgctttgcgatataagaaccggtgttgcgaaactgagaaaggtacgttatatgatgtactgacggaactatgtgggtattaagggaatggtgacaatgggggagggaaacaaaaaattttgtacggtaactattattaatgcccatattaggcttgcaagtacgacaacggggttacccggaacttctccccacctttggc

SEQ ID NO: 422590 - DNA, 424 bp, Homo Sapiens
atacggattttatgtaccgtaccggctgggttaacagatacttacagatggctattagcggtgcactatgccgtgagccgcctgcacgggcgttgaaagtagggacggacgcacggggggtagaacggagaactaaaattgggctagcgaggaaaaagtcggcaatggaaaaggggggatgcttagagccaagcaaatgccgggagagagcctttgaaacggccacaacgggacatgggtttagcgctggacgcggaagaccatgtatggaagggcaagtggggccgaaaaggaagctatactataggtgaggctgtgcaggtgggcacgcgtggagcattggtgttatatgcgggtgcgggacacccgtaaccgaggaaagtgcgaacggtggaagcggaaaaatagggagtgaatggaggtt

SEQ ID NO: 422591 - DNA, 476 bp, Homo Sapiens
gatataaacaataatatgggcgacatggctaattacttatttaaaatatattagtacttgtggatattgtaaagtcacagacgttgtgggtaagggaccctttatgctgtagatggggcgtatgaatcaggatatgggatggtttgtatattggggaggtaggaatgtactaataatagaggagttattgggtatgactatgctgtgaatttaacaaataagtaatgcacgctgggagtggctagatgcggaggggtaatgataatttgtattggggatagtttgagagtaaactaaatggagaacaaggggacggactgtgtatttactattacaagggccatgtatatattgtaacaccgtactgaattgacgaaatttgtaagaaacgggaaaactattagcggaagaattaattgctattactgaacatcgaataatttaatttgcagcgatgaatatgctgtgtgcgtgaa

SEQ ID NO: 422592 - DNA, 453 bp, Homo Sapiens
cctattaacgctcggtcctctgaaatcaaccatgccgacaatgaataaatgtgaataacgggcctcgtagttgtcagcccccataaaattctacttaaacttgacgatatgcttgacaacgggcatattccggataatattgccgacatcattgctgtccttaatgtttcggcttactgctacttgtcatacgccgttactacgttgcttactcccttgagttttgcacaaatacgagtttggctttcgcctacccctgcgcacagtcatgttgctggcaattttacagtacttcttgcatttacacgtttttattatgcaatagcgattatttttaattatatctaacccgctgcaaatgggcgattacttaatattatctcccgtgtatttcacttactttttcgcattcatataaaacctactgaaattgccgtgcactccggtgctaat

SEQ ID NO: 422593 - DNA, 459 bp, Homo Sapiens
  misc_feature (212)..(228): n is a, c, g, or t
tgcggtggtatgagtggagggagcaaacaagaggttcggatggacctttgtaagaaccgtgtcactatggtgtgggcggaaatgaacgggatgggaaaatacgctacctatagaggcaggcactggaggtagtgaaacaatgaggcgagacgtgaggacctggggtagtagttggggcacggggaatattaggtggggtagcatggcgggannnnnnnnnnnnnnnnncagccgttgctaaaaaccgcaggggtgaaagggggggtagtagccgtggatacaccagaggatactgactagaaattgataggactgtgcggggacgccgtagacgatacgtggcgggttacactggcgtgcgcatagttggcccctggggcaataccgcgtgcgctaagctgaccagcggttcgtgcatccaatagttgagaataagattagttgcctaatccggaggat

SEQ ID NO: 422594 - DNA, 148 bp, Homo Sapiens
agcaacgctcacgacccgcccgggcgactacgataaagggaaaaacattaagcaaggcatacagaaagcacggaaggaactgattagggggcatgggtaacggggctgtgaaaagggacctgggatagaaaaaagtgacaaacacggc

SEQ ID NO: 422595 - DNA, 427 bp, Homo Sapiens
aaatagtgacgtaaagggggcgtgctgcgggctggggacatttgaaccggtcgcggcttgtaggagggggacgttggggaggtacattacacgggtttacaagttatggagataaccggcgacgctggttaaagggagcactactttgaggccgcatgttattagtacaacgaatggtatggtgcttaggtttaaacttcaagtcaaagttacgggaccggtttaagcacttagcgcatgggcggcaagggatactatgccgggtattacgggctatatacctaccggcattacgagtacggatattgcacaagcacggacgtagacggctgcggataccaggagaggcatggggcatacgacggcggcgaaaacaggggcaacggcgaaagttgtacgggtacgtggagagaatgcgcctgcgata

SEQ ID NO: 422596 - DNA, 444 bp, Homo Sapiens
  misc_feature (272)..(288): n is a, c, g, or t
aaaaaaagttattgcgccggcaatttaacggattataagcttgggggtggggagacgtagatgggtggggcgtgagggtgtaaaagcgagacgaaggaacttggtcaggagattggtgtgctgagatgtgttgtaaaaagggggttgcaatacttgcctgtgcacctatgtgtaacaggatatgctgtaaacccgcctacgccacccgccgatttaacgcttagccgcaatcgcgttggttacccaggagaccgcgggttaactaatagtannnnnnnnnnnnnnnnnaagctaccctcaccacgtgttacattcaggatttgctagtgacgcgcgtacgcctgacgaggttgaaatggttgcccgcctgcggcaactccacgcttggcgattacttgtacagtattggttagcctggtgggcacgcgtaaaagatagcaacaa

SEQ ID NO: 422597 - DNA, 184 bp, Homo Sapiens
atattgataaacgagaatacaacagaagatacaaccccagctaaaggataatcacgggtaaaaataaattgagaagccgggagaaaattaggagatatagggcttaggtaacattgatacgtaagtacatacggataatttggtaagactgactttgtaaaagaacaaagggaaacaaaaaagg

SEQ ID NO: 422598 - DNA, 480 bp, Homo Sapiens
ccgttgcataccaatagttgattgaccgcggcgaccccaggccgccccaaggccggaggtgtgctacaaagataggtagactcacgctttgtaataaaaataggtcagcggtattaaacgcgatgatatgaaagaaatatactacattgatacataacaagagctgttgagtactaaaggaagtattggactagtggtgcgaacattagatacccactgtgccagtttatgaaagattggttcatcagacccgatatttgcccttaacctttgttactgcgtacaccgttgccgccttttgtggcgtccacttgcatttgctacaccgtgtaagtaatgcgctctacgccaacggtatcagtctcaacatttgcggcgctgttaactagtcgaggattaagatgctgtactgccctgtggccactggtctgcttgaccagcggttcgtaccccgattatagcgcatcgttactgcctgac

SEQ ID NO: 422599 - DNA, 438 bp, Homo Sapiens
agtggggggcgggatatagtttggcgagctaatgtaccacggaatagttgcgtgatagatggtgagggagggaggaggttgtcgaatagtgtcggcacattggggggcaaacgggtgttaagatatgaatagacgccttgctgatgattacgcgctggggttgggcgacaggtggggtagagcgatgcagctttatgcctgcgattgggggagacaggtggggagaacttggcatggtggtgagaaggggtggaggcgagatgacgtggcagacctaagaagaatagcgggtgaggcaacgaatggtgaaacggggcgggggatggacgggtatgttgagacggcgcgaacggggggggttgagatgatatggggcgactgcgggggctgaaaggtggcgaaacatgatgaaagaccggtattggctgaattccggga

SEQ ID NO: 422600 - DNA, 474 bp, Homo Sapiens
  misc_feature (137)..(148): n is a, c, g, or t
  misc_feature (333)..(345): n is a, c, g, or t
acacatagtgaggataggggagtgggtggggacctggggctgggggtacatagttgcggtggggcatggtgataacagcgcggggtgggaggtttccgtatttagtggatagatgctttggagaatagtgagtggannnnnnnnnnnnaagtagtctgacggggcggctgccgggggcacgtttgagaaaggccggggggcagcatggcgataagggggcgtttgggacaaccgggagctgccgggaggtatggggatctagatgagggagacaatggtggtaaggggcggggcgaccctgaggacggacggtgggacgccggagcaccagcnnnnnnnnnnnnntgcgcctaccctgtgcacctatgactaacaggatttgctgttaacccgccttggccaccggccgtactaacgctctgccgcaatgcattgcttaccctggtgacctggggattgcatatagtttggggg

SEQ ID NO: 422601 - DNA, 472 bp, Homo Sapiens
tagttgatgacctaataatacgagattagccacgggccgtaccgcggctcacttatgccttgcctaaaacgctacgaatatgctttatccatggggcggatacaattgcggaatttttaaattttattcggcggcggccgataaatttaccgccgggaatgcggcgggaagcggctactgcggcgggcgtctggcatttgacggctacgccataacggctgctacctacgcgggtcgcgctgtcgcgggcggcactaatgcggcctggagcggcgccgtggtggtaatgcaggggacctgcggcgcgggtacgtttgtggggaccggctaggagggcgcggttcgcgcctgtgggacctacttgggtaccggtcaaactcgcgcggccgaggctgtgaacggcggcactccggcggtgggcggattgggcgtttactacgtcgcgtacggctacgtaggaaacaatacgcgg

SEQ ID NO: 422602 - DNA, 466 bp, Homo Sapiens
  misc_feature (369)..(379): n is a, c, g, or t
acagatattgaagggaccaatgggaagtgacacaagatgccgcgtcaattgacaattttagatttacccaggtaacggcaacgtacagactaggggggcggtggattaggaagaaggggcattacggatgaggggacgagagagagggtatgaagggaccaggcggggggggcggacaatacgaagaaaactgagagagcggaaggaaaacgagataggggggggtattgtatggaagaaaaattaacgggcagcagagaaaaaagtaataggtttggagtgctgcacggggattgcatgaaatgctagggtggagtacaccgtatcagggagacgcaatcgatgagggattataggcatacggccaannnnnnnnnnnattgcaggtgcgtgtgagggggggagtgtgggcaccgaaaaggcgggattgacaaatactacgtagtgtgtgtgcgggagagagata

SEQ ID NO: 422603 - DNA, 191 bp, Homo Sapiens
cggaccagcggtctaccatctttgatattctgttgtattaattctgttggggtagtctttaatcttcgtgaaactttttctttccatattaggaaatattttcctaatatctctaaagcctaacttgtccatctgacttactgtctgaatcttcccaacttatgcatgcccacttttattgtttaaatttg

SEQ ID NO: 422604 - DNA, 326 bp, Homo Sapiens
tcggacagtcggtctccatttgaactctaaactaaatacacattttattagcttccagcaaaagactatttagccaacaactgcaaaatatgagggagacaaaaaatgggaatcaaactcatgtttctatcttttatatctgccaaatacaattaaggtttgtcctgtggcttactgaggggaacaataaaatatcccttttgttgtatgtttagggacgtagtttaaaatagactaatatgagcaacagaaaaattcctatgtgttttcctccttttttcaaaacactgggctgccagaaaaataatccgtgttttgggcccaag

SEQ ID NO: 422605 - DNA, 324 bp, Homo Sapiens
tatccaagaaaaacagcatagagcagcataagatgtaagtaaaaagtattaaacggggagagatgcacactggccatgtagttcgtcagcaagaaagcaggaccttaacaaagcagatcctcagctagatgaccttttcatattttaacaaaatcatctccttttacttaaatgttgttataaagaagctttatagcaccaatgggaaaccagtaccttttgccatgaattgaagacaaatggaaacccaataaaaacataaccttattaaattctagctactgttacctgccaatgcttctagacttgaagcttgttctgttt

SEQ ID NO: 422606 - DNA, 204 bp, Homo Sapiens
ggcagtctgtctaccatggtattcttagcacataaataggttagtccaatctaacttaatttccattctgtgtttaaaaataatgctagtaacaaatttcagaagtactccttcagaaaagctacaaaaactgcatgcatgttgcaacagataggaagagcttctttcgtattttcaaatatttcacatttcatgttttcaaat

SEQ ID NO: 422607 - DNA, 263 bp, Homo Sapiens
taccagtcggtctacatagtgatattgacatactcataattctccagcgttaaaatcttggtttttatggtggggtttctcctttttgtttcctcattatgtaattgatttttcgttaattctgcctttataatataaaattcttactaatttaaacatagcttacattcttcccttaatgattccttatttattattatattaggtctaagtacttcagaccagagttaaggccttctctcaagaggataatcccctctact

SEQ ID NO: 422608 - DNA, 438 bp, Homo Sapiens
ccggacagtcggttctacatgttattcatcttgtgttctttctcaaagatgtcaagcttcctgcctcccttttctctcctactgccacaatctccactttacgtgtatgaccacaaacttaaatgggccctcagcactatcaaaagactcattcgtaatctcaaatcaacccactctccaaaataactaattcactgcttcttctataatacctccaaactcatgctcagcacattcccttgtttcttacttcagtgagcaaatacaagctatcagaataaaacttcatcttcccactccaaaatctacccatatactttgctttcaatattgttaaaatgaatgcacactccctgctcctgttaaaggtcactctctccacttgtggactgcattccatgatttcccacttatttgaaattttgctcctagaattat

SEQ ID NO: 422609 - DNA, 262 bp, Homo Sapiens
cgttcgacataaattgaacaactcattcaagaataatagtggttagtaccgaactcaatggcccacttattggaaaagtgctataacacaaatgaatttcgattgaaatctaaattttctgagctggctctataagtgagtgcaataactacatttgttcataagtaatgacataatggcaaaattactaccaaaagtgaaaattctcctaacaaaactagtccagaaactaaacatgaacaaaaagagtaggaccagcttt

SEQ ID NO: 422610 - DNA, 168 bp, Homo Sapiens
cagtcggtctaccattaatggtttcaattacatggtgttattcagggacgtttccatgttcccctatccctgggtacttgaagttgactgtatgctaaaaaagaacaatcctaattattaaaagtcctgaatcataaaatgatatatataaactcattaaatggtaag

SEQ ID NO: 422611 - DNA, 145 bp, Homo Sapiens
acctccagaggaagttcccttgaatcctcttagccaaaaacaaaatatgactatcaaacaaaagacataaacacttttagatatgattaattgccaacgtaatatccaacacagcatatcacaccactttttaaaaaccagttct

SEQ ID NO: 422612 - DNA, 137 bp, Homo Sapiens
tacagtcggtctacataatctaaataaaaacaaaattggcaaagcaaaactgtctaccagaacaaagtcaacatctgtagagaaaacaaataacccggactccctacaatctatcagcccaatattctacatacaat

SEQ ID NO: 422613 - DNA, 407 bp, Homo Sapiens
gtcgacatatagtctatcctcgacaaggtgatgtacctgcggaggagaagaatgcgtattctgtagctgttggatgaaatgttctgtaaatatctattaggtccatttggtctatagtgcaaacgaagtctgatgtttcttttttgattttctgtctggatgatctgtccaatgttgcaaatgtggtgtagaaggctccagctattattgcattggggtctctctctctctttagctctaataatatgtgctttatatgtctgggtgctcctgtgttgagtgcatatatttttataactgttattatcttcttgctaaattgacccctttatcattttacaataatattatttgtctttttaaaataggttttgtcctgaaatgtattttgtcttaaaaaaatatag

SEQ ID NO: 422614 - DNA, 411 bp, Homo Sapiens
tcggcagtctgtctaccatgtcattccatttccatccttctctacctggctctatgcttaaataggctgacctttacagcctccaccaagactcccctgccctctagattctggtgagttcagttcatagggagcatgagcagaaaaccaggagatggaagtaaagcatccttggggtgtttatttccaaatgcctccctaggaggatggttacagttacagttttctctcactaccatagtactcttcaacaacagcagctactcttttctagttcctgtacccactccctccctctgcttccttggggtttagaaatgataaagtcttccccaactgctgataggtatgaggcactcaacctttccttgttaagttttccttaaccctgatcagactgctgtctgctgt

SEQ ID NO: 422615 - DNA, 175 bp, Homo Sapiens
cgagctcggcccttcgtcggtatcataattgatttttttctgactttttccctgtaaagaaaagtgtatcaacttcaaaacctttgggtatttcttgacatgacttcttcactctgtcacaaactgctttgaaatatccatcattcctctcagatgataaacaactatattgctc

SEQ ID NO: 422616 - DNA, 320 bp, Homo Sapiens
  misc_feature (222)..(235): n is a, c, g, or t
acctcctgttcctcctcaactgtgctcccactagatgggcttgcacaccacacttaccatactctttccctctaccatctctgacctttgtaaatttcagtccctctgaacaacttcagcaaattaattgaacccgaagagggagtcacgggaaccccaacttgaagccagttggtcagaagttctggaggtctggacttacaactggtgttggggaaacgnnnnnnnnnnnnnngacatttggtcataactcttctgcgttgattgttgtgatgtgagagtaaaggaaaaacgctgttacagagttatgataccgcgaa

SEQ ID NO: 422617 - DNA, 150 bp, Homo Sapiens
taaatcaatcaaaatttttatggatccataatattgtacatatttatggagtacatgcataataatattttgacacaagcatacaatgtgtagtaatcaactcaaagtaatggagatatgtatgaccacaaacatttatcatttctttgt

SEQ ID NO: 422618 - DNA, 135 bp, Homo Sapiens
aatctctcgctatctctcaaataaagttgttggcattgggccaaaagggattcataaaagcaactcacagagggccaaggaacaccagtatggtttcaggcatgtggttctttgagcgatctggctgagtatagg

SEQ ID NO: 422619 - DNA, 123 bp, Homo Sapiens
actctagacgatccccttcgcggtatcataacagaatacaaatagctaaaaacaaaaatgatgatatggaagataagactgaatacatgtcctgaacatataataaaatgacaaggagggtaa

SEQ ID NO: 422620 - DNA, 464 bp, Homo Sapiens
  misc_feature (286)..(303): n is a, c, g, or t
  misc_feature (362)..(408): n is a, c, g, or t
tctatacgatccccttcgcggtatcataaattatcaattatttcaaatatatttattttggcacagttttagtgcaatcaaaatgtggacagtcacaagaagattttgattgtaagtgagtaaggaatcaattaaaacagtgttctagaagaactgtagtcttgaattttagactcttagaccacaaacgaacctggaaaagtcacacataaactgtacaaaattagataatatgggcttcaaacaaaaacaacagcaagctctcttttggtatgaaaactctacnnnnnnnnnnnnnnnnnnaaagagccagtccttgttttcttgtctctaaaatgtggatggttatactgtatctgctnnnnnnnnnnnnnnnnnnnnnnnnnnnnnnnnnnnnnnnnnnnnnnnctagagaaatctataaattataaatctctgtacaataatttttcaaaatatggtat

SEQ ID NO: 422621 - DNA, 340 bp, Homo Sapiens
atcataatttctccattatgataaaagatcaagaattggccaaactcacttaatatattaacattactgaagatcatcatagtaaaggcctacaaaatagagacaagcattgcttagtggtgatggaacaagcttttgattttatttgtttttaataaacagtaggcaaagggatattttggttgtctggaaaaaacatgtattctcacttcctttctattaaccagctaacttttgcctctcaaacttcagctacaaaagggaatcatccatgagtttaattgtactgccaggtgacagacaagagggtttatatgatgagaagagaggctggaagagg

SEQ ID NO: 422622 - DNA, 119 bp, Homo Sapiens
taggagatttcagaccatttttagctatagtcttcccaaaccaaagccttcttcttctgagggaaacgaggatgaaataaagctaatctgaacggctgaatagttttttgtgggaatgc

SEQ ID NO: 422623 - DNA, 337 bp, Homo Sapiens
catgcagcaagccttgcaggatggaaggcaccctggggacggcgacccacgggccttctctgtgcttcctgctctccggaaatgggtgcatccgggtcacatcagaagttcactgttctttgcttgtcccgaggttccttcctgggacagtccttagttgagactattcatggagccttccctgcacccttcacttggggacggctccctctcttctctcctcttcccagaaagaaactgccatcaggaggtggcattaattaacaatgaacaccagaggaggcatcgggccaggcaggtgacgccagcttaggaagcacctgatgcactggtcccc

SEQ ID NO: 422624 - DNA, 233 bp, Homo Sapiens
  misc_feature (99)..(126): n is a, c, g, or t
tgtgacttcccggggttgtatgggcatacggcagggatgcaggcttgtctgtgactaaatagtctgatccatgatccagaagtcttatgtccctgattnnnnnnnnnnnnnnnnnnnnnnnnnnnntgtgtgtgtagatcgatagacaaatatatagttctcatcacagagccttcacagttatcagacttcaagttatctggctacagaaatcaaggctaggacacacacat

SEQ ID NO: 422625 - DNA, 456 bp, Homo Sapiens
acacagcaggatccccataaggatactcactttaagcaaggggcagatagtagaagatgaaacctgcagatagcagactatccacatcaatttgtgaggatcttgtcatgctctaattgaagaggaccaacaattaacagtagaaacaatagccaacaccacagatatctcaattggttaggcttatacaattctggttgaaaaattaaagttgagtaaactttctacttgatgggtgccaaaactgttgtgcccgtatcagctgcagacaaaagtatagctttcaatggaaattataaacaagtgggatcaagaacctgaagcatttgtttgagaaattgtaacaggagatgtaacaacttcatagtacaatcctgaagacaaagcacaatcaaagcaatggctatgaagaggtggaagtggtgcaatcaaagcaaaagcagacgggtcaaaagc

SEQ ID NO: 422626 - DNA, 229 bp, Homo Sapiens
acataaaaaagccatttcttaccttgctatatcatgatagtaatttaatggcagcataatagtacctacaaattgtgccatcctttatattacttctagttgtaagttttctattttgtagctgttaaacctacaaagacacttattatgagcataagcatcctctctataatattcttcagatacatcactctgtagtagaatagatcacaagcgtgcatttatgttt

SEQ ID NO: 422627 - DNA, 134 bp, Homo Sapiens
acagaaactagaaaggggcaggagggcgagcattaccaaagaaataatataacagaatttcccggaggtaaaggacatagagtcttagacatttacaacggtctacaaagatacttcagcacaacaggcactgg

SEQ ID NO: 422628 - DNA, 100 bp, Homo Sapiens
tttatagtccataactcacattgaaatggaacagaagttcatttattgctaccggaacagaaagactagaatgttgtttatctgccaggcccatggggga

SEQ ID NO: 422629 - DNA, 300 bp, Homo Sapiens
gctagactctccattcgttgcagataagaactacgaagcacacacgttcattgagtcacaggagaagcacccaccatcatgagtaaagccctgtgcggacacagtgggttaaaaacagatatgacatggcctcttcccatggaggccacatctgggagttggaggagagacatacacttataaccacaggtagcatttacaaaagcgacatgaactagatgctgtgagaacagaaggcctgagatggtcaaatttggccaagggagctgagaactgcttctatgttgaaatgacacttgg

SEQ ID NO: 422630 - DNA, 236 bp, Homo Sapiens
  misc_feature (52)..(60): n is a, c, g, or t
tgtgaagcacacccacccctttccaggtccactcagaaccttacgctcagannnnnnnnncactgcaataagtgaacacgacaaaaaattacagttactacagggacacactggtcccaggttgcctcatgagaaaagcaggtgagtaggcctgctggagctttgcactaactctatggaccctgtggaaactgcatgcaatgcaggctacatggagggtcaccgggttgctcaca

SEQ ID NO: 422631 - DNA, 141 bp, Homo Sapiens
aaatgtcacaccgcacacacacgtacggggaatcatccttgactactctacttttactcacacccctacccatcaactcatcaatacgccatgtacatattattatactttaatagtatcttaaacaccttacttatccat

SEQ ID NO: 422632 - DNA, 237 bp, Homo Sapiens
tgcagcccccttccattgatcaagcagtgggcaagtgtatattaagcatcaaatgctgtaatatctaggctcaggggctgaacaaaaggagtatttggcacaggagtttgaccttaagaaggaggtagcttggctgatgggggcaggttaagatgcttgaaacaatttgaaaacccttcagcactaagctgtgtggttctggttatcagtacagtgggggttcagagcagggagcct

SEQ ID NO: 422633 - DNA, 376 bp, Homo Sapiens
tcccctggttaaagcacacccattcaaagtacatgataggccatagattttaatgttaacggagtatgaaaagttcactgcatatggtattcagattctacacgcaactagtcttataagaaaccaccacacctggctagcctgtggctttatcttgattcctttcaactttaggtgaatgacattgatcctaatttcctggattctccctgaaagcgcagggttggaggctactctctacaagcagtgtcaatgttaaggcaggtgtcctgggtcatggcaatcaacaccgcacaggaaggggtatcattgtcaaggttaactaccagtgcatagaggaaaggaggaaagagggtagtgaaggttacagggaaat

SEQ ID NO: 422634 - DNA, 221 bp, Homo Sapiens
tgcaccaggcctgtttgactccagaagggtggcagttttgaataatttagtttagcatgttggacacaatgatttaaatgatgtctccaagcacgtatcagtccctgaaggggtaataatctctgaggctgatggcagaggcagtcaggggatctctctgtgttactgagcttgtggtggtgtgtttttgtatcttcggggctgaaggagtgattctggca

SEQ ID NO: 422635 - DNA, 103 bp, Homo Sapiens
cactgtgtctttttatggcttgaaagcttttttctttgtatcgtcgaataatatttcattatctgaacgtgccacagtttatttgtctatttatctatcagtg

SEQ ID NO: 422636 - DNA, 136 bp, Homo Sapiens
ggcctatgggggtgacactgccaggccccactcgaagctccaggtactgccagcaccacactcctccctctgccattcccacaagcccacaacctcacaacctcacaacccacaagcccacaagcccactcctccc

SEQ ID NO: 422637 - DNA, 324 bp, Homo Sapiens
  misc_feature (204)..(204): n is a, c, g, or t
ttgaaagcacacccatgacagagtagactggcagtaaaatagaacacgtgggctggagggagagcattaccaaagaaatactatacagaattttccggaggtaaaggacatgagtctttggatttacaaggtctacaaagtacttagcacaaaggactggaagacacaactagatgtgtgtgaagtttcaaaacaccaaggatnaggggaatttcttgaaaatttcaagaaaaattaaaaatgtcactacagaggaacaagtatcagaatggtggcagattttctctcctagcaactctgacttatggaaaaccatggagcaaa

SEQ ID NO: 422638 - DNA, 192 bp, Homo Sapiens
ctgaggatcccgagtactgtccgatatcgtaatctgcgttgtagcctatacctgtgtaacagtttctcgaagtcctcgtgggctgtcagtcctgcccaggtgtgttgttctctcaggattctctgggaacattgctctgtactaggatgctcttaggtctgtagaccctgcttagaagggtacctcctgaat

SEQ ID NO: 422639 - DNA, 414 bp, Homo Sapiens
  misc_feature (96)..(104): n is a, c, g, or t
  misc_feature (332)..(345): n is a, c, g, or t
gacagcacacccatgaataggaaaagacacaatttcaaaactagagatcaaccattgaaattggactaatttagccttatgaaatactcaaacaannnnnnnnnccccgtttctctgaggacctacagatgcaggtattgttttgcaaaccagctttgggaatcactgatttgtggtattatgcatgtatcctttgatgttgatactattaacaaatgagcatcatatccttaatcttgcaataagattgcaattagagtctaaacatgataaacgaaaaattaaagtaggccgtgtgtcatttctggcctagagatacttcatttgtttcnnnnnnnnnnnnnnggaaatggattcccccttttttgccccacgtggatttcaggggccctttgggttaaaggaaatttttga

SEQ ID NO: 422640 - DNA, 130 bp, Homo Sapiens
agttactcaggctagaaacttcatcagccatgaaacaggttcaagacagagagtactacaattagacttatgctttagaaaagtcagtcttttacctgagcagtattatcatagtacaatgcttgttatg

SEQ ID NO: 422641 - DNA, 422 bp, Homo Sapiens
tgcttagaggatccccgtgaaagcacaccctagaagcagcaggcccagttctgcagcccttactaagataaaatccccactgaagggaaatcccatccaaatcctctttgccagagaggagaagaaggtcaaacagactaatcctcaaaaagacctgaaattctggctcacctgggccacaccaaaagacattcccctgggagcaagagacaggcacgaaaggtggcatgccccaccctcccacctatgcactggtgactcctcctcacccgacacatatacctcggcacccctctgagcttggatacaactccagccatgtgaccttggaaaggtctcaggcccgtgagataataccagaaccaccctcacacaggtaactgtggcccaacaggtaatacacaaagccagcgtctggcata

SEQ ID NO: 422642 - DNA, 485 bp, Homo Sapiens
  misc_feature (464)..(464): n is a, c, g, or t
gtgagacccccacacacaagatgaagtgtgggcacatttgcaattctgttatctaagagaagaaagactaagaagcacagaggattgtgagtaaaaagaggaagcaatcatcaaggcttccttttatattatattgaaggaaatgctgagtaactttagacacagtgcaaaatattctagcaatttaaaaagatcaatatgaagatagagtcatgcatgtaaaatttgctgagatatattggctatatgaccaaatttcattcccatgtgaaagaatatatttggaaagcaatgaaagtctatacacagaaatagccatttccattcactggaggaccaaggaaaaattaattacaaggtctgagaaagtgttaatctgccatagtgcttttgctgtctataaaaatggcaacataggtttgttactaacttgtacatttggctgacatattattgaataattntgcaagtaaatctcaccattc

SEQ ID NO: 422643 - DNA, 255 bp, Homo Sapiens
tgaggatcccccaccctaattcttcttagaaactcccctacttccagtttcttccagacacacagcctcaggaggctttctctttcttgcctcttgtcctaaggctgattcctggttggtatctctctcgtatctctcattttatacttttttggttgggggaaggctagggtctaatggaagaccatacggtgaggaggggtcatggaacagagcccctgaatctctcccatttcaacttgctactttgagagt

SEQ ID NO: 422644 - DNA, 218 bp, Homo Sapiens
tgccctatgacggtgagagtgccactggttcctgagcccccgcacggagtacatgtgtggcctgtgtccagacgtggagtgaagcaagagcgatggggagtacctggtgtccggacttgggagcgagacgggtggagttctgcaactgggggatttattgccaaggagcacctggcttcagcttccaggagaacagctgagcagaatcggcaggccgc

SEQ ID NO: 422645 - DNA, 357 bp, Homo Sapiens
tccttctgcacgcgaagaagcagtggtaccctcaccccattggcgtgagtgctgtagttgtgaccaaagcagcctgtgcctggggccaagtgttattgggtgttttacatcagatatctcatgcaatctaatctactgtcatctctacactgatgatggccactgtgtgactgccacaacgcattaacctggtatttcccagtgtcaaagggccaggaaaagtgacaagtctggtttatgcttcctcatcctttatctgtccagacaacctcaacagagtaggttttcctgggtaagcagatactgcgggctggcagcccctcaatactaagattcttttcagtgagatctctcctt

SEQ ID NO: 422646 - DNA, 105 bp, Homo Sapiens
ctggttcgacgtccaggcgaggcgccctcacagcgtacctttacggtcacacgaccgatgggctgggcgagagctttccagaagtggctgtcaacttcctatgtc

SEQ ID NO: 422647 - DNA, 168 bp, Homo Sapiens
tccttcgcacgctgcaaaaagcctcctgatcacaagtgtttcctacatgttctagtactcacacctcagcactgaactgcagaccacacccatattgagggacaatctagcaaaatatacttggccaaaatctgttaaagaactgtccccgttatgggtgacagccaa

SEQ ID NO: 422648 - DNA, 414 bp, Homo Sapiens
cacgccatctctcgcctcacttattataactgcttctcagttcctgtggtcttacgcttctctgaatacattcatccagttgtgtcatttacgcaagctattacatctgggaagtaacagaaatataacaaaattggcataaatatttgggtatctgttaaccaatagtgtgaagataaggtagttccagagtagcttagttcagtggccacaatatcattagtgatgcagcttcattcatctttcctttctgctttaccccatgggtcagtggctccctcaggccagaatatgactgcagtggcttaggcatcaccccgcactgagccacctgtagaggaaaaagcctgaaaggttcctatggtgtgtcccatttgtaagagtgaggagaacactctcagaagccttcctgta

SEQ ID NO: 422649 - DNA, 173 bp, Homo Sapiens
  misc_feature (114)..(122): n is a, c, g, or t
gactctagagcatcccctccttctggccacgctccttctggcccgcctacccttttctctccaaagctatgatggcctatgccctttattcccacgttcaagcatttgggccannnnnnnnnatattaacaagctcagatgaatgttaagtcctggtggtcaaagcgggcctg

SEQ ID NO: 422650 - DNA, 158 bp, Homo Sapiens
tagcttaagtatttcgttctgtgcttgatccacaagtatttagcctgggcacctgatgtgtaccaggcgctatgctgctcactgcagaagagaggctaccaaaacggccatggtctgccccaagctggagggcctgattattcttctctctcttccca

SEQ ID NO: 422651 - DNA, 401 bp, Homo Sapiens
  misc_feature (197)..(305): n is a, c, g, or t
cctatctggcacgcaaaggcgtggatgagtaaaagatggggcctgtttggggactgtgactgggctgagtttaggggataagaaactggcaactgcagcatagtggcaagaacagggattaggaatcgagaggcctgagaggagtattcttctggatatgttgtttagcttttctgaactttagtgtccttagcttnnnnnnnnnnnnnnnnnnnnnnnnnnnnnnnnnnnnnnnnnnnnnnnnnnnnnnnnnnnnnnnnnnnnnnnnnnnnnnnnnnnnnnnnnnnnnnnnnnnnnnnnnnnnntcttgaattgcatttttattgagagatgtggtcgcaggtgaggctggaaaggatacacttgttcacgcgtggccagaaggccttctggccacgctg

SEQ ID NO: 422652 - DNA, 334 bp, Homo Sapiens
ctctgtacatcttactacaatttaccaaactgtgactcacagatcaatgtgatacactgctgttacaaaaatggtgtcacagatgtgccttagtgctgccagaaacctttgatttgtctaaaaacataccatttggtacgccgaaataacagggtcctgcctgtctattactctaggagctgatcaagagatgcctgggctacaaatgtaactctatgaatcatcatctctatcagatcataggacactaaaaataaactaatctgatttttggtgacattataccacttgatgcatttcaaaccttttgatgtggcctggggttccgagctcg

SEQ ID NO: 422653 - DNA, 380 bp, Homo Sapiens
ccttctggcacgcctgcagaggtttaccatgaggctctgtctgttggaaaagcttcgcctggaaacccaggattttccatacattctctggagtctagaagatgaagactccaaagtttctagtcttgtgctctgtgcacctgctgacttaacactatgtggaagccaccaaggcttggagcttgcacccctgaagcagtgacccaagctgtacctgtgcatctttcatccatggctgcagcaggagctacagggatgtaggcagcggtgtcctgaggctacacacagcaggggaccatggggctgggccaggaaaccattctgtcctagaaaaccattcttctgtcctaggcttcagggcctgtacagcaagggctgct

SEQ ID NO: 422654 - DNA, 314 bp, Homo Sapiens
atgtcatttcatgtgcacacgtttacacataatggagaattctcctcacttgaaatatttgtttaacatttccaacaaatggcaaattaagactagtcgtgattggattaaccctgacgactcctgtgtaaatattaccaacctacgctgtctgttgctctcatgctgttactgtcctatttcatttggcaatacaaattgtaagtgtgacactttttaacctattcttacataaaattcaaagaaacttcaggtgacaatgatatttgatgagaaatgcttagaggaaagaatcttttaatgtagttactgtg

SEQ ID NO: 422655 - DNA, 208 bp, Homo Sapiens
acattgactgtatactgctgcatttctgagtatctgtcactgtcctgctgccaaacctgcaggcgtgagtgtgtggaccgaagtgaccaggtgcgcgcgggtgggtggacagaagtgaccgggcgcgcgtgcatcagtggacagaggtgaccgggtccacgtgcgtgggtagaggtgactgggcccgtgtgtgtgcgtggccagaagg

SEQ ID NO: 422656 - DNA, 264 bp, Homo Sapiens
aacgcagctggattggttcgatggcatggtataggattgatcgatggatgagaaatggtcaaggtagcgtcggtcagtacattccccactctgaggccaaggaaagaggatggaggaaagggcaaccagaacatcaaataccacattagctagaagccactaagtttctttcccaactagcagtatagagaacagacctcaccacttctactcagggactacttcttatttgtttctgtctccactagtgcgtggccagaagga

SEQ ID NO: 422657 - DNA, 293 bp, Homo Sapiens
cacctctagccggtgctttgccacttcccagagatttattttcctgagaatgtctccagcgttcctccggtcgttccactgcccagtaataagacagctcttgtagctcttggctcccttttgtcactagtcaacagtcaccctcacctacacgcggagtacatatttggcactcagcaaatcttgattgaatgaaaacctacctcactcatattggcacccaaccccggagttatggccccccaaattacctccaaaacgcctgacgacctaacccaaggagctgaaaaagt

SEQ ID NO: 422658 - DNA, 144 bp, Homo Sapiens
  misc_feature (130)..(130): n is a, c, g, or t
atatactaacgacgtcacgtacgtgtagagatatatttaagtaatatagctctatttaatgttggccataatttcctttatatcttactgttaaccagtagctgtaatgctaatactatcaacctattanttcagtaataacct

SEQ ID NO: 422659 - DNA, 292 bp, Homo Sapiens
agcccaaagtgaaaaatgctgactttgttctagttaacttccctgttgctgtgagagaagtgacctgcaaccgttatctgagatgtatggcctttgccgtaagcacattctctgtcttacacttgaacttgcctagtgagacaaccatgcgtatcctgactttttctggattgattggttttcctatattccatttgatatttccctatgaaatattaatagaaattttaatgttttaacatccataacagagagccctttattatatctctcttgattttcactttgggct

SEQ ID NO: 422660 - DNA, 126 bp, Homo Sapiens
cccccatactagctggtttaaaaaaatctgtccctctctccatcagcctgggcaagagtggcttctcactgcatggaggtctgcaggcagcctgtggcttttctttgattcaacatgcttttcttt

SEQ ID NO: 422661 - DNA, 199 bp, Homo Sapiens
accataagaacattgttacattccagaaattcacaataaatctggtagactgtggacttcctcagtctgtggaaaattgagatgaggcaattgaatagaggtctcagtggactagaagccctcagtggataccaggttccactgtgtgggttattttgtaatagaattggtttagtaacaaaatattcttttttagaaa

SEQ ID NO: 422662 - DNA, 313 bp, Homo Sapiens
gctcactgagatcgtaacttaggaaaaatgtgtctggcgtgggtcggtagtcagagaggatttcttacaagacacacactccttctatcccaatcggacagtgatatgaccctggggatgttccatgaatcatttgttcctctttggccccatctgattgtgtacttatctccttacacagtccttctgaccttgaaatgatccagaaaagatgtaaaagagtaaattctatagtcagtttaaaaggcagcaggaaaggattgggaagcattatggacaaggggtctaggagacaggcccagctctgcactat

SEQ ID NO: 422663 - DNA, 199 bp, Homo Sapiens
cgtctccgtgagactccacccaatgacctgaggcaattctcaggcctctactagtcaagcaagcctggcttgtgctgatggctttcctgagcagtcataaacttacagtgatctcccggggttccccttcgttgccctcgctttctgtgctcctttactgggacttctacaactacctgtgcccatgtctcacggagag

SEQ ID NO: 422664 - DNA, 165 bp, Homo Sapiens
atcggagatacgccgctgagtcgacgtgaacggcacggctagcgtcacactgattaatgttctttattaagtcaggagtctaagaatgtatagcgagataatttctaaactgcctaccgcaatggtgtttgttgcgaccgggcaggacgtaataagctatgcaaa

SEQ ID NO: 422665 - DNA, 115 bp, Homo Sapiens
agtgccccaagtgtcctgacccctggtaaagatcactacccaccatcagactgacaaatgacatgacaccagaacgatcagagggagatcttttttgacttctaatcacacttga

SEQ ID NO: 422666 - DNA, 122 bp, Homo Sapiens
ttagataaaatgtgacaaggggcattctacccatgttctttgaacaattccgtcactaaagtctggggcagcactccaacttctttatcatcagaacagcctcatcctgaggccggagggaa

SEQ ID NO: 422667 - DNA, 350 bp, Homo Sapiens
  misc_feature (173)..(199): n is a, c, g, or t
tcgactttgaggatccccgaattcctgcaacacacattatgtgattttaaaatacttaatttgtagttttttccagtgtcctccagaaggaaattccattaaacaagccaatgtgtataatattaccctagaaattcgagagttggtgtaatgcaaatgggagatatgagcannnnnnnnnnnnnnnnnnnnnnnnnnnataccttcacatcttatctataaacacatgctaagaagtcatctttaggttcagccttattcctataataaaaatgtcaagtcttatgaggtggatagattcataggattattataacccccattcagtcaacaaagaagctaatgtcagt

SEQ ID NO: 422668 - DNA, 437 bp, Homo Sapiens
tttttaatgttctgaacttgtagaaatgtctaattaattttcagtggctcaatgagatttaggtatatatgagcatcttccaaaatatgtagagtcacttggcttcaggtctatgatgtgtgggatcatgtgatgctaaaaagcaccagggccccacgtttcctgacccctggtaaagttcactacccaccatcaaactggcaactgacatgacaccagaacgatcaaagggagatttttttgacttctaagcacacttgatgattcttttgtcattgtggttggttttcattgtgtcaataacttttggcagttggtctactccttaacctgaataatcaggattaatctctctgcattctgtctccaatgtctccactgatgtcttacataagctggttccaaatatgcatctcctggtggggaacccgagactg

SEQ ID NO: 422669 - DNA, 200 bp, Homo Sapiens
tttgaggatcccccgcaggcagggggagctacttgcaaatagcattaggaagtttgttccaaacagtaggtctaatggtggtcttcaggtaactctcagcacgcaggagatttggagttggtttggcaactggatcaagatagactgggcaacctagtttatattacttcagcaaacacaggttgtataatgttttaaaa

SEQ ID NO: 422670 - DNA, 376 bp, Homo Sapiens
  misc_feature (21)..(21): n is a, c, g, or t
  misc_feature (223)..(223): n is a, c, g, or t
tctccaggactcccgttcgancggaagcacaatcaaactttttaacaatgaatcacagaaagtgttatgatttgggaatggcagaatatcatggcatacaaagctggaatgcttgactcaagatagcatgatagggaagacttcctgaagaaacagcatcaaacctgagactggaaagatacataggcattagtcaggagaagttaaagtatccaccgtgggnctaattcccccaactagacatagtttctgggaacccagcactttaacaatgcgttcaattctaatttggattcaggtgttaaacaagtttggtttgcgttccggggtacccgaagctccgaagttcggtaatcaatgggtcataggctgtttt

SEQ ID NO: 422671 - DNA, 339 bp, Homo Sapiens
actctccaggattcgttcgacggaagcagagttttcctagtctggctcgatgggcccccgagtatgtagcacatgatctagctaaaagttttacattaaaatagaactccttgttaaaataccatacatcattgactcaccaacttaagccctattgcataatacatttgagtcaggatataacatagagtaagattttaaaagaaatctaaccacctaggggaaagcaagaagattctctcagcaggccaacctgtcttaattactgctgaactctacctaagcctttaagtgggagcattttgagggctccttacagggttgctttccaggaccacc

SEQ ID NO: 422672 - DNA, 337 bp, Homo Sapiens
gaccggaagcaacaacagagatgtggcacacgtgcccaagagaggtttagtaagacaagatttaaataagtcatagtgtcctttggattcctaacagatgtgaccaagctccatcttgaagatagcgtacagtacttctaaaaagctcaacagccttccaggattggagaagtcccataacctgaactacagaccaaacagctaagccgcaacacgatatgtgatggtgcagagctgttctggcctgaaaagaactttccacttgctgagcacagtgggaaaccagaattctcgagactagaactggatacaccagatgatgcccacggtgttttca

SEQ ID NO: 422673 - DNA, 120 bp, Homo Sapiens
atcttggatcctcaacccgctatctttgtttcttatctggtctaccacatagccttctaactagtattctagcatatccttcttatcctctttcacttcttatcttaactctatatctca

SEQ ID NO: 422674 - DNA, 101 bp, Homo Sapiens
gaccacaaatcattgaacaatacccaaaccctacagcatccatatgccatcatgcaattataacccaggtaacaatacctgcgcatgttctacctttatct

SEQ ID NO: 422675 - DNA, 300 bp, Homo Sapiens
gtaacacaaaaaagaggctacgctagcctcctcgaattaactcatatattttaaacctttctatgacttcagttatcgtattcattaagtattcagggtccacgccaacaccaccaagctagccctgatacctctatttatatttgccacggcatgtcccaagaaagaacagattttgaacacggactaaccccgtctctggtagctttggcttttccagttcttagtctaacaatgttttgggatatagaatccaactagtaatcccgagtaataagacctgtatgccccaaattgatg

SEQ ID NO: 422676 - DNA, 157 bp, Homo Sapiens
tcagcttcacagttcaccggctgccatctgcacccaggtcgtgtttagaaactcttgactttatgctttattgactccactgggacaaaaactaaagtcgtatcaaacaccagtgggagcatttttcagaggtaaacagtggtaacattttacacat

SEQ ID NO: 422677 - DNA, 132 bp, Homo Sapiens
  misc_feature (87)..(87): n is a, c, g, or t
aattaaaatagtaaaaaacaaatatcataaacaactggcatgagatagtaactcgtaacctttttgtatggttaattatcgttatancaggaaaattgtaaaaacttggaaatagggcaaatgaatagctgc

SEQ ID NO: 422678 - DNA, 185 bp, Homo Sapiens
ttatttctatatttgacgggggaagaagttcttagcgaactagatgaggctggtggtctcagtgagtctctcacgaaacagacacagttttattggtcccattctggccctaattctgggatctgtgcctgcatgttgggtgatgctggcacaggttatccttcccggagttgctatagaaacag

SEQ ID NO: 422679 - DNA, 427 bp, Homo Sapiens
gacacgctacgactgaccgactctgtgtcttatatttcttgttctgtctgtggaggggataaggaagttcagtttgagacttctctgtctgaattggtttcctatgctggatcttgccataagaggtcccttatatactcattgaatgtctaagaattcagcttccctgcttgaacgacaagccataaaacaggaatagtatcggggtgggtttgctgaacagcacaaagttggaaatttaagacccttttctaatataatcatttgggctttcaacaaggaatatatttccatattttgttgacgggcggagagggaaaggttcttagcagaactgagatgaaggcatggctgggcctcagtgagtcctctcaagaaacagaaacaggtttattggtccaattctggccctaattctgggatccgg

SEQ ID NO: 422680 - DNA, 235 bp, Homo Sapiens
gacgaacactgccagaaggtattttagacagtataagtgagctacaggcaggacctgaactaagtcagtagcgggggctagagataaggggacatatataagggacgataaggaatccacaggatttcgtgactaacgagacatgggggatgtgaggccaagagagaagacagtgaggatgcctaggattctggcttaagggcctgggacaatagcggtactgttcgttccattt

SEQ ID NO: 422681 - DNA, 177 bp, Homo Sapiens
gcttgagttaagcgagtttgcaaatgcgcgatgaggcgatattacacgttattcgttactatacgcgcgaagcagggtgcgcgaattagagcggcaattggcgtccatttgccgcaaagcggctcgtttgatcgtgtcagaagagaaaaaacgcgtcgtcgtgacggaaaaaaattt

SEQ ID NO: 422682 - DNA, 184 bp, Homo Sapiens
gaggatcccccggagagtacaagagacagctgtaaatacatagaagctatcatggtgtgtctcaggttattaaggataaacgtttaatcaattaacatctcttaacagctctgagaagtctttactgaaacgtatgagaaaaatattcaagtaaccacgtttaaaaccagttaccccaaaatct

SEQ ID NO: 422683 - DNA, 165 bp, Homo Sapiens
tatggcagagctatagaacaatttctgaagataaggtgtctccaagggatctgttcctgctccgttgctcttttccacagcacgctacctgcagctttctgctggtatcacttggcacccaggactcctgggaggcacggctggctttctactgggagggaggga

SEQ ID NO: 422684 - DNA, 178 bp, Homo Sapiens
taataactagtaggtaataattaaacagaaaagacgaatacttgaattcaacaagtttatactagggatgcagttaattaggcagagggaaatcatacaattataattgtctccaaaggatctgctagtaactgagaaaagttaacaagtggtcttaaatttcacgtcctccggccta

SEQ ID NO: 422685 - DNA, 196 bp, Homo Sapiens
ctgtggcgtatgacagctcccactgttggcaaccgttaccctcctgtcagcggtttcacagtgggagccgtctgtcacgcccaccctgtgaaggcaacttctggcattcaggcagcttgggagaaactaagtgaacggaatgcagtactgacggttcaatgaacagcgtgtacgccagtttctttccaacttaaag

SEQ ID NO: 422686 - DNA, 178 bp, Homo Sapiens
gaattttttccagcaggtctctggttggccatgtttgtgctgttggagtgccaccacgcatggctctgcagctgtagcgaaggtcgtgcggactcacggcatcgtcgcaggattcgtgatgattcgtacatcgaggaaacctccgagcacctgtgcaccataccagctgacccacacc

SEQ ID NO: 422687 - DNA, 118 bp, Homo Sapiens
atctaagcatggcaggtcacggagatttctgatatacaaagtgccataccggaagataaaatggcaattggaataaggttaaagaccagccttactagtaggaacgactgagaaacat

SEQ ID NO: 422688 - DNA, 307 bp, Homo Sapiens
atgtgttgaccggctggtcttccttactttcaaggtctgcttaatgtcgtttcctcagagaaattcatcttgcccagatttattatactctagtgtataacccttcacttttcttatatagtacttattacaatttctaattttataatttttttctgggataattataagatggttctgccacctactctgtaaagcctccttgaggcattttctcatttactgtggtatccccagcatctgccacataagtaggtaccaaatgaattaattagtgaatgaacggatagctccatgcagactatcg

SEQ ID NO: 422689 - DNA, 120 bp, Homo Sapiens
gctgactagaggatccggatatggtgagcactgcacccgggtatctgcgttaaaagaaggcttagcaaggaatcagaataactcaatttcttacaaacctaagtatatggacaaacaatg

SEQ ID NO: 422690 - DNA, 307 bp, Homo Sapiens
gggtgtctagaggatccgtatatggtgagcgtttttctaagatggttttaatgtgctttaaacagacttaaaacaaaacaaagttatttgagaaaaaacactctactaaatggttataaaaagtagtacctgaaaattgtagagtaagcagttaaacaattttacccaacctgtactatctactgggttaacaattctaaacttttggtaatgttttaactagaaggtaaataaaaaccagctctttcaaaagaaagttactttttcaataattctaatctttatagactggttacaacattttttt

SEQ ID NO: 422691 - DNA, 291 bp, Homo Sapiens
atggtgagcattgcacgttgatgaactttaaaaatgatgtctagaaagattacttaattaaccaagaactatgttctttatcaatgaatggcttttcaaaggatgatcatacttaggagtaacattaaggttttatttattgcttcagaaatttatattcttgacagaattttggtgggagtttcttctaacacatctcttatctggatctggctacgttaattcataaaacttcatctttagcaatcttacttttctaggcaaagatgacagttaaaacataattgggtg

SEQ ID NO: 422692 - DNA, 245 bp, Homo Sapiens
cgaggtgacaggagctcgacggtaccatggtactctagcctaggcaaagagggagaacccaaaaacaaacaaagcaaaaagtcggttggggcgggatggagaagaaagtatttctgaatttctgggtaggttactggtagtgtcaggccaaactagctctacagtcatatgcattataaataaaggcaactagaagatctccatctagctattaaaatgggttaaaatctacagagataaaggac

SEQ ID NO: 422693 - DNA, 179 bp, Homo Sapiens
gtcttttgcattctcgtatgtctctattccacatgctgtctttcatattatgtgcacataaccctttaacatccaggctactttcttcagaattaaacgataatgtacagctattaatatatatctggaaggctggtccaactgagaaacagccaccacttcctcattctaaatgccag

SEQ ID NO: 422694 - DNA, 279 bp, Homo Sapiens
  misc_feature (34)..(34): n is a, c, g, or t
atattggtgagcctattcgtgtctttatacaggntataaagaatgtttgaataacatacgtttcgtccagaacgtatttagttgaaagacaatttcccagttcttgatcttctatccacaacacatgcatactgtgaagagttctctttttttgccttatgtctaccctttcactacctatttcctagaatgacatgtccaggtttatctgctagattgttttcccttttttctttctggattatgaagttgagaataaatgggttggctcatcatata

SEQ ID NO: 422695 - DNA, 385 bp, Homo Sapiens
tcgtggtacacgcaggaagaggctagaacaagggagacagccttcactgggggatcctgttctaacctgagagccggactccacggagctgctctttctccagacagtacttccactccagagatgtcctgcccaagactgacgcacagttgctctcccactgagccaggttcctcaggtcccaccgtcctccggtcctcaaaagcacttaggatgtagcaaatggtcttattgttttactcccgactagcaaattctcctttctaatgagtaagcctatatatgctaccttatacttatgtcaattattttgcaacacattgcattttctacatacttcctctggattgggtctgatatggtcatctttgtgttctctcctttg

SEQ ID NO: 422696 - DNA, 178 bp, Homo Sapiens
gagcaaacagctgtgacgacgttctgtctcaaggtgccacttgaaatacacacagggcttttgaataggcttcggataaaggcctgctctgtagtctcacttaaaatgcctctttgcaagggtcaccttcctgctcagcaaccttcaatggctcagcaatataggctcaccaaggctc

SEQ ID NO: 422697 - DNA, 240 bp, Homo Sapiens
cataggctgtggctgagggagccgccctcctcaccccccagtggagctgagccagggagctttccagttacgggagtttcgggagtcccaggccctctggtgggggaagtgagtaagtcaccaccagcaaagggatcttgtgtccttgtcctccctgctccttgcttgtttctccctcccccaaaactctgctgcctcgggtcagagacaggtcacccaccaaaggcccaccttagctgg

SEQ ID NO: 422698 - DNA, 184 bp, Homo Sapiens
ggctcggacagtaaacgcgcatgtcgcacgcccgctcaggtgactggctgcaacatgaacacaagtcattgattcgtaataagcacaggctatatttaacgagtatttcactcaatgacagtggcacctcccgatactctggtttcgctgatcccagcctatcgagccgccatgttcaatcgcg

SEQ ID NO: 422699 - DNA, 348 bp, Homo Sapiens
  misc_feature (23)..(23): n is a, c, g, or t
  misc_feature (54)..(68): n is a, c, g, or t
  misc_feature (89)..(130): n is a, c, g, or t
cgatctagaggatcccgtatatnggtgagcatcctcaccgaccgtcccccagcnnnnnnnnnnnnnnncgtgagaagggattctcactnnnnnnnnnnnnnnnnnnnnnnnnnnnnnnnnnnnnnnnnnnacgaaacagaagtcggacgccttcagaagcctcaatctaaactcagctccacggcttgttggccagggggccttaggaaaggggctgacctcccgttaccacaggtgctctctcatcgtgggacgaggcggaggctctagggcctccttccagggtctccccagggttaagggcggggcggccggtaaaaggctcaccaatataggggtaccgagctc

SEQ ID NO: 422700 - DNA, 442 bp, Homo Sapiens
  misc_feature (196)..(196): n is a, c, g, or t
  misc_feature (361)..(371): n is a, c, g, or t
ggcggtcgagaggatcccggatatcggtgagcctcacggaacagttcagcaaactttcaagctatgaagtgtattttccaatggaaatgtacttctgatagcggccactggggaaaaaagttgttctttatggccaattttctgtcaactgtacagtctagaggaagggactcgcattgtaaaacagaccctttantatgtcttacagagaggtgctcaccccattcctcctttagtgagtctgataaacccattccagacctgtctgcagaagtacaacgaataaaattctcccgacttgctctaaagtgtatgtttccaatggctgtgaaaagaatgtcaccttccaccatgctgaacnnnnnnnnnnngggtaacatactattagtaaacaggcattttttcggtcctcggcaaggctaagataggacagagctaaggg

SEQ ID NO: 422701 - DNA, 120 bp, Homo Sapiens
agcaagttccaggccacgccagcagcgtggccactgggtggatagtaagggccgactatgtggataaatcccagggttctacgaccatcgcccaccatcacagtagcggctcaccaaata

SEQ ID NO: 422702 - DNA, 159 bp, Homo Sapiens
cctggacacatatctgacctacattttcgtatatcttcaggaaacaatcccatctgccctagttggggaactgttgaaggggttgactagttatactgtaagtggagttcatgtttgtgttttgttcaaaagctgacagtcaaatatgatagattccaa

SEQ ID NO: 422703 - DNA, 202 bp, Homo Sapiens
gtgagtcgtcgttcaatgagtgtttctgaaattaatgaagtcaggccttagttacacttgggcatccttgttgagctaaggataaacttacctttccacactggtaggctgagctggagggagtggagaaacctgtattaccaatgtgctggctgtggtgaaataatagcttttaagtagtcttttgctaggccattgcatt

SEQ ID NO: 422704 - DNA, 197 bp, Homo Sapiens
tggaatccatttgtaactattgttgaactttataggttaataggttcaagggaacacagaccaagagatgtaacccataagtagttgaactgaaacccttctactgttccattgcatcgtctttgacaaaggcaagccagaaataacagtctgtggccccgcctctctgttcagggtcagctggggattcatttggg

SEQ ID NO: 422705 - DNA, 138 bp, Homo Sapiens
taggtgagtcaatgaagaatgtgagccctgaagtcacaaagcctgcatttgaatcagtagtttacccgtgtaacagctctgtttcctcatctgaacagtgaaggttcttggcctcagttgaagatgtggctcaccaat

SEQ ID NO: 422706 - DNA, 103 bp, Homo Sapiens
cggggtgatagcatatgatcgaagtataaaggaactggaagcgatagaaggactcggggatatcataaggagcgaagagctgatcagtgacttcggagtagaa

SEQ ID NO: 422707 - DNA, 117 bp, Homo Sapiens
ggttctgagctaggagcccgaggaagagaacccgatgctgggcttccgcggcgcttcgcgctacatcgccgacgacttcgccgagtgcttccgcatggaatgcgaagcgctcaagaa

SEQ ID NO: 422708 - DNA, 132 bp, Homo Sapiens
gcgtcgttatgactacacccggctcaagcccaagctgacccaggaattcctcaacaccgtcaacccgaccggcgcctataccgtcgatggcaaagacaagacctggaaccgcgtaacacccggctcaccaat

SEQ ID NO: 422709 - DNA, 310 bp, Homo Sapiens
accggatatggtgagctgggatcctaaccaggtatgatcccagaaagaagccacgtgaaatggggcttaggtgctggatcactcaccatccttccttcatggaggaccccaggtggtaatagataaagcacaaatatcacctgggacaaggaattggtctaattgctcaaattttcattggtgatcaactggcatggtatagcggtagaaaggaaggcattagctgatgtgatgtgtcagatgtttgagatttgggcgaaatagggactgaaaggataataaaatcaggtggctactgctaagcttgatt

SEQ ID NO: 422710 - DNA, 187 bp, Homo Sapiens
gggcatccatgaggcagtcgtattattctcatttgaagagatcatgaaaataaggctcagatacatagtatgagttgcccaagattttacacatagtaagtggcaatcctgcaatttgaacccaggtctgtatgatgccacagccagggtttgaactagagctcagtaggaagaaactaatgttttt

SEQ ID NO: 422711 - DNA, 200 bp, Homo Sapiens
cacgaagaacagaggtgatgggtccccaagttttcaggctaccggccaggcctggagaaactacagatcatactgccctgtgctctattccagaaaacggcagcttctagccctctggcccaagagcgcagaggaagctgaaaacgtggcttgaataggagtgagcaaagaaggggcaggggttcttggaactaggtggg

SEQ ID NO: 422712 - DNA, 575 bp, Homo Sapiens
tggtgttctagaggagttccggatggggtgagcacccagaccctcgacgtgaagtgagggattaagatgacctaatggatggactgtagcatggtcattatgccaagacttatattatattgtagctaataccttccttatttcagtcattctttttttgaaaaacagttttcatttcagtgaaacttaagcacaactgcagatgtcagctgaaagattttaattggcttcaaagtttatatgtaaatccaaagtaagagaaggtgctcagggctagaaataattacttgggattcataacatatagatgtatttatatctaaaccacaacatacatttatttcagggagagaataaaaatagagtacttctatggtactatattcacttataactcatctttctgcagttttctgcagtttatacaaatttttttatgtattcatcaatgtgtgtttgatggctttaattagagtgtcaattaccaaaggttcataagtcgtgctctgctttctaaggatttttaaataaaagataactgacattttcccatacttgatctacaaattagctgt

SEQ ID NO: 422713 - DNA, 280 bp, Homo Sapiens
cagaggatcccgtatatggtgagctttgttctagctactctgtctatataggctacacttgcaaatcaaattcctctgtcaatgaccttcaatgctatctctaagaaattcctccaggagtctgtctgtcccatgctagaagcctcagaactgtgcctctgtgtttttatcctggacacaatctgcctagaaggtcttccccaaactcgtgtcagctgaattcatacctggtatctctctcccccagcttagtgtaaacttagtgcagggactttatctg

SEQ ID NO: 422714 - DNA, 143 bp, Homo Sapiens
aatatgggcatttacctcagctggacacaggtacccagtttctgaccccacaagccaagtaccatgccaaggaaagatattgatgcttagtattaattgaaataaacttgaaattaatatagttagttaacttagtttgtctc

SEQ ID NO: 422715 - DNA, 458 bp, Homo Sapiens
tacgagatcctcgtatatggtgagcaacacaccaggaagttctacaggcggatcctttaactcttatttagagtctgatggtgtgctgggatccattgcgaggtgggctggtcagctacaggaccttccttccagggatgattgtgtttttgtgaacccccatggccgtaatccagtacgattaccagccacaaatcatcagacttcttctttgctatgtgaatatttttattacaaaagtcagataaccaagtaaaaatgctttaaaagattaacagttgggaaaatgggtcagaatcacccacaatctcaaaaatttagtgtaaccactattggaacaatggcttagttccttttggatgttttgcttgtgcatcacctttgtggttttattgttataaattagatgccctcctttattttcccctcttaaaaatatcagaagcagttttctgtaa

SEQ ID NO: 422716 - DNA, 350 bp, Homo Sapiens
gatctagcaggatcctcgatatatcggtgagccctaacctggaactgatcataggcaacaatgaccaaaaatggggatcttttgatatacctaaagtaatttatttgtgcacaccattggaaagagctggttttagaaccagacatgtaaataagagactgacttccactggcacctaaaaactactaaaagaaatcctgaaagaaaaagtcaccttcattcaagaggtaaacaaagggatatttgaaactatgttaaaagacttcagaggcttcctccctttcacctccagaccctccttttccttccagccctgtgatctgaactcatccctttctgccgcttctctt

SEQ ID NO: 422717 - DNA, 439 bp, Homo Sapiens
caggaggagctagtcgctgggataacaatactttggttttggacatgctcagtttcaggtatagaggagacatcatggtggaaatgacaggaaggcagttgaatatgaaagtctgtatcaggtgagagatccagatcggtagagacttgacaaacaatggcatatagactttgaagtcttgtgattagatgaggtgtaagagatacgcagaaggaggacagaagactgcaaggactaagcttgggacatgtccatgctaagactttggaaagctgaggaggatgcagcaaaggaggatgcagagtcctcaagggaaaagggggaaagccaggagaatgagatgccttgagaccctggggaagagaggtgtcttctctaaatggtaggtattcagcatcagtgtagagacacctgctttgtaatatttatttggtcatgg

SEQ ID NO: 422718 - DNA, 267 bp, Homo Sapiens
ctcatttcagtttggtacaaaggtcagtgtggattttcttttcatccccaacccatatttagtattcaaaatttttccttcttccccatttttccctgactcaccctgatgttttcactcttgtataaagctattaccaaccaaattttaatttctccactttgattttcaaatatgcctctacctctaaggactatgttacctaaacctccatgattgaacatctcccctcatttgctaagaagattcctgttggaactgaaatga

SEQ ID NO: 422719 - DNA, 413 bp, Homo Sapiens
  misc_feature (286)..(342): n is a, c, g, or t
tccccatacaaaaacctttcccacagacacctggccttccaacctacttctaccagtgtagaagcttttgtgcatacttgtaacccagacagttcatgtctaggaattctcccaagaaaataaccacgatcactttttttgactgaaaagaataaaatggatctcggggtttaaactgttgatcagaaaggttatcacaagttcagtattattttcctgttcaaccaacagtgcgtaagtggctcaaggtgagttctattttcatgctaccaataaaatccagtgnnnnnnnnnnnnnnnnnnnnnnnnnnnnnnnnnnnnnnnnnnnnnnnnnnnnnnnnnttaaatattacttcatgtttacgtgcattttataaaatttatatataaagttacattttatacataatgag

SEQ ID NO: 422720 - DNA, 464 bp, Homo Sapiens
agggatatttagccaactctctcacatatttgagaagcccttttgacatgctatggtattaatttgtcaaataattgatttattcaatagtcactaatttagtgttcacttcttgccaggcactgtctgggtacagagggtataaagataaacaatactcagtttggaccctggtgtagtaaagatgcagactattttaaataattgtaaacagtatgatgggtgtgacttaagagggggaatactcaattctccagatttggagggaggttggtaagtgatgaggattgatcacaagagaatgcttgatatgggtcttgaaggataagacttgcccaagtggataaggggcgaaaggcatcccaagaggagacagtaacgtgtgtataaatgaacgaaggcgtgaaataggatggagtgttttgaggaaccacaagtagccttctctgagtaggagcataggt

SEQ ID NO: 422721 - DNA, 406 bp, Homo Sapiens
agtactcagtaggtcttctacatttgcagaatcatgtttccctttagttctgaaatttttttcttattaagcaagtttcatctcttaccactcttctacaagcactcttttttccagtcatgtcaaataactgcagtttcacgaacatgtcacgtttcaaatgcctctatgctattgaaaactacgttctgtcccccgaaacatccttctccttgggcctgaattttttgtcccaaaacattccttcctcaaccctccaaatttttcttgtgtatcattttccttaggaaggcttcctgcatctgatgcccttctgctgtctcttatagcaccccttggaaacttctgttatagatcgtatcatactaaagtgtagctggttgcttacttgtttgtattcccaggt

SEQ ID NO: 422722 - DNA, 305 bp, Homo Sapiens
ctcatttcagtttgctttgtataaacttgaagaacctgtacatcatccaaactctcatctctccattaatactgagtcaaatagcactgccttgatacataacaataattcagagataactgataaggtacttacagaaaatgaccaagcatttaattgactccttaattcttaagggtcatgctatgtaaggtagaacatatatgttccaaatatgttcaaactttataattcaattaacagtaaatatgattcacatcaaaatggtgtcataggtgagtggaattttgatgctctaatttatg

SEQ ID NO: 422723 - DNA, 307 bp, Homo Sapiens
agtcttcaccttggaagatactgtctctgatttaataaacaagtcttcaaatctgacattaccaaacacaatctgccacataagaaagaaagtgagggattcatgccacataaagtgagggattcatgccacataagaaagtgtgggattcaggccacataagaaagtgtgggattcaggccacataagaaagtaagtgtgggattcatgccacgtaagaaagaaagtgtgggattcatgccacgtaagaaagaaagtgtgggattcaggccacgtaagaaagaaagtgtggaattaccactgggta

SEQ ID NO: 422724 - DNA, 383 bp, Homo Sapiens
gttcatttgagttcgctgctgatcaagacatagccaagactgcgtattttacaaagaaaaaattggtttaatggactcacagttgcatgtggctggggaggcctcacaatcatgatggaaggcgaaaggcatgtcttacatggtggcaggcaaagagcaaatgagatccaagcaaaaggggtttctccttataaaaccatcagctctcatgagacttcactaccacaagaccagtatggggaaaaccgcccccgtgattcatttagcccccaccaggtccctcccacaacacgtgggaattatgacagctacaattcaaaatgagatttgggtggggatatagccaaaccatatcagcaaataaacgtacaaactgaaatgag

SEQ ID NO: 422725 - DNA, 337 bp, Homo Sapiens
  misc_feature (244)..(284): n is a, c, g, or t
catgtacattttagaataggtttttttaattcatgaaaaatgagattgctattttgataggagtggtggtgaatctatagattgctttgggaagtatggccatttttatgatattgcttcatccaatccatgagcaggagtgtttttccatttgttgtgttatctgtgatttctttcagcaatgttttgtagttatcctcctagagatctttcaactccttggttagatgtattcctaggtacnnnnnnnnnnnnnnnnnnnnnnnnnnnnnnnnnnnnnnnnntttgtttcagagacagggtctcactatgttgcccaggctggcgtcaaactcct

SEQ ID NO: 422726 - DNA, 463 bp, Homo Sapiens
caaatattccaatgatacttttacctttcattcagtttttaaaattcattttccttttcttctctccaacttgtttctgggtgaaaaggattattgatgttgatatagtttactgcataatctatacatcaataataaaaatagctatgtctaatatatttttgccagatcctcctctaacaattgtgtgtgtactaactcttttcatcctcgcagcagtcttttgaggtaggctctagttaatgcccactttacaaatgactaatgtggagcacagggaggtaaattatactgcccacattcacaaagctgattgatggcaaagctgagatttgaaaccaatcagttttgtttcagaatggcctgcctaaccattttgcgtactgcttccctagttttgacacgtaacattggctgggacttagataggaggacaatatgtctgcaacatctgtcacttcag

SEQ ID NO: 422727 - DNA, 183 bp, Homo Sapiens
catctatcagatgcatggatatgcatcatgtctgacactccaataggtcacgtaaaggagaaacaatatgtaggggacaaagtgagttatgctgggtaatgaatatctacagtgtaaaatgaatacattgttcgaggaaaactcaatacataattcgcatagagataaatcatagttattatc

SEQ ID NO: 422728 - DNA, 122 bp, Homo Sapiens
cggtagtgtacataggtattatagtatacaatatacatgacgttacgccagctagatagaatagtacttatctcaacaaatgtatctagctggcgaaacgtcatgtacatagtatactataa

SEQ ID NO: 422729 - DNA, 178 bp, Homo Sapiens
aggatcccctaagaagatcgaattacaagagtagagagagcatgagtttgtggaggtgtctttggtgaaagtggtgcttgtatctcaagtcctccagagaaggaagagtggtaggggccaaacctcctttacctcaagcaaatgggttcagctctagccctggaagagcctgatataa

SEQ ID NO: 422730 - DNA, 416 bp, Homo Sapiens
atgctcatccctccttagggaattggaagtagatccatcttgcgggcatgtgcagccctcgtggggagtggtcagccatgaggctgggtgtgtgggcactagatcgtggcaggcctgaggaactgtgacaaggaattttgactttataggagggtcattgggctccgttgaagtactttaagggcaatgtcaggtgttttaaagaaagacctcccagtctaggtgtgaagagtcgattggggtcttggaaggcagcggggagcaggagggcagtaaagcggaccaggagacaggcaagaaggaatgatgaacgccaacagagggcagtgatagtgaccgagagaccctcgtgaggtggagccttgcaggcagttccatggatttgatgaggtgacgaatgaaggagggatgagcat

SEQ ID NO: 422731 - DNA, 164 bp, Homo Sapiens
cgaggatccctatgctcatccctccttacagtagttagatagtatttctggagtttaagaatgagttaattatcaaatctataatcaaacttttggttccatactaaatctgcggcctcttgcaattaatcccatttatcctccttaaaattagaaaaggctcc

SEQ ID NO: 422732 - DNA, 190 bp, Homo Sapiens
cagttgcggatccccatgctcatccctccttgcagaggaggacacaactcaggtcgtctgttccagggcctggactctttagcacagagccctcctatggctctttgtggtgaggttagattgcagagagccctgaaagccaggcagacaaatttataaataaacagagttgataaacaatgggagctct

SEQ ID NO: 422733 - DNA, 343 bp, Homo Sapiens
  misc_feature (64)..(280): n is a, c, g, or t
tcagctatgttgtgggacaaacaacctggagtgtagcatggtgctgcatatttgcaggacagtnnnnnnnnnnnnnnnnnnnnnnnnnnnnnnnnnnnnnnnnnnnnnnnnnnnnnnnnnnnnnnnnnnnnnnnnnnnnnnnnnnnnnnnnnnnnnnnnnnnnnnnnnnnnnnnnnnnnnnnnnnnnnnnnnnnnnnnnnnnnnnnnnnnnnnnnnnnnnnnnnnnnnnnnnnnnnnnnnnnnnnnnnnnnnnnnnnnnnnnnnnnnnnnnnnnnnnnnnatgaggaaagtttgagctgcagtcatagatacatagaagttagctagctaggcagaaggaggg

SEQ ID NO: 422734 - DNA, 162 bp, Homo Sapiens
gactctagactatccccctggattactttcaaattcagaaatactttctatctttagagacaaaagaatgcacagaagtttgtttcctttagtagagtgctagaatattattcatacttgggttctcggataggattccaaactttaattttgcacactcta

SEQ ID NO: 422735 - DNA, 226 bp, Homo Sapiens
ggctgttatgtaagaactaccgctagaactggtgtaagactatttgttttgtcattgttgtctgtgagatcatctttggtggagcttatattctgtggggtcctgcatgtgtcttgacttatggaggtatttcttgggacaattttatggttgtctctgctaagttcttaccaggttcactggttcccagggcagggcttccatgctgcatgagtcttgttgggag

SEQ ID NO: 422736 - DNA, 325 bp, Homo Sapiens
ttttatgtaactaaatcttgtgagcagagctgggcagcagttgctccagggtttctctagtctcatcttagaacaagtcttggtccctgcctttccaaggctcctcctcatagtgataaaatgcctgccaaccctccagcttctcttccctttaggttcaggtctggtagcaaagccttgctttcttggtcctgggggtcttttacattttacttctttaagtcgaatcatggactgatcctgaaactacccatcacactacaagaactgaatgtgggaaagcaatagaactccaagtaaaaattgatgactgtttcttgttggg

SEQ ID NO: 422737 - DNA, 208 bp, Homo Sapiens
gccggtcccactgaaagaaatgaagcatttattccaaaatatatctcttgacatattttgaaacagccctgcaaagctgtctcttgtggggaaaatctacattctatacaggatccccttcctttcccaggtcttttgctgatccaggagagatttaactaagagtctagcaccttttacagtctgatgagacatctgccacctattc

SEQ ID NO: 422738 - DNA, 156 bp, Homo Sapiens
ggttattatctatctctccccatttgcaatatcatgctccttaagggcagggcgtgttgcttatttactgctaaaactccagcaaggagaatgcctagcatatagttagctattaaaaatatcttgttgggaaaagaagttgccctctatttctgg

SEQ ID NO: 422739 - DNA, 139 bp, Homo Sapiens
tggctcagagagagcacatgtactctctcctctccaaaagaacctggatgcccgtcccacatgttactttctccattctaagcagtgtggttccaagtccaatttagcatgaatatttcaaatgtaatatgtcccagtg

SEQ ID NO: 422740 - DNA, 139 bp, Homo Sapiens
tcagctcggaccatctctccacactggacccaaatacgttttcaaggctatgtagtcagtgtgaatgagagaagtaaatctgttgggtcctgtgccacactggagtttccaaggctggtctaaatgagttcaacttcag

SEQ ID NO: 422741 - DNA, 141 bp, Homo Sapiens
cggtaccctctctccacactggtatagagtaagcaacgacagtaatgccttaggacagcaataactgcccagaactccactggtgaaacggggctgtgaactaagcagttattgcaggaacttgcagtctgataatagata

SEQ ID NO: 422742 - DNA, 309 bp, Homo Sapiens
atcatcagccggtacctctcacactgactctctccacactgggggggtggaggtgtgtgtactaaaaatgaactcagatttaatgataattaatgatgaattaatgatacttaactcatagattaaacatctttttatgtccttgaatcaatagaaatttttatatttaatattcatcttgtgtcatcccaaacttcgctagtagatgcttcaagttattatcttgattcttcagatgcattttagtaatctttggactccttgctttctggtgttctaagtttatcttatctatttccagtgtggaga

SEQ ID NO: 422743 - DNA, 273 bp, Homo Sapiens
  misc_feature (231)..(231): n is a, c, g, or t
ctctctccacactggaagattggaacagctgttggctgactcgcaccctacatccaccaggttccatactatcctgtagataaggcagtcatgcaccaaaacagggcagctgacgacctgcactcagcgtcgtcaaatttcctagaatctgtactcacaaggagggtctgcttgtcctgccacatatttctcagaattgcttcaacacaatttggggctcaactccacgtnggttgatttgctttactatgagcacattagaagttaagtcct

SEQ ID NO: 422744 - DNA, 115 bp, Homo Sapiens
gggtgatctagaggatccctccatttaaaaataaggtacttagcatatctggtacttacagcccagtgattgttaggttatattttcatcaccatggtaaccagtgtggagagag

SEQ ID NO: 422745 - DNA, 154 bp, Homo Sapiens
gaggatcccgtccttcactcaccccgtcactctccttctcattacgtgtcaggctcaaagcagcagctctctgggaaggcccccgttctccagtttctcccactttgcatccattccacatgcaccatcgttcatgttcccagtgtggagagag

SEQ ID NO: 422746 - DNA, 290 bp, Homo Sapiens
tgaggatccctctctccacactggcagttgctgcatctgttggtttctaaaaaatatgtccccagcccagtagaaatgcccaaggcttcaggcacagagaataactttcatataaagatctgagagtctaggaagagcatatgaaactgtgatacgttaaaccagtgtgccgccgatgcatgtcttctttgtagaaaccagagataattcaaatgctctatgactctgcactgtgtctcaatggcaggacgttacagataggccagttgctgctcccagtgtggagagag

SEQ ID NO: 422747 - DNA, 315 bp, Homo Sapiens
ttattacggactatagatcatggaccaaggaacactactgagagggccacatttttggcctggagcaattagggtaataagaaatcatgggttcttaagctctgttttcttttaacagtcaccagcctagcagatgtcatcactgactctgcttatttacatggtagggaaaaaatgacaaatatttaactgctttacactctggtatttaagtttgtacccagtcttgaggcctttaggcatttccttagcaccacctttttagcatataatcaatcaagtacatacccaccaatcacaccagtgtggagagag

SEQ ID NO: 422748 - DNA, 181 bp, Homo Sapiens
tctctccacactggaggagcacaactaaaaagagctgaacaaactgacaatctctttaagcagaacataagagacacgcagatgagaaggcaataatttaacaacattattaagtcatattctggacatgtcacaagatgcacgcatttgtcaatttatcttttacccagtgtggagagag

SEQ ID NO: 422749 - DNA, 399 bp, Homo Sapiens
ttcacgactgggaaatcagtaatctcttacatgagcttgaagttcatcatgaccacaaacttcaagtgcactggctcagagctaccctctagatctgtattttgataccagaactccatctggttccacaggcagaagatatggatttatcttggattataatgctagccagtggtacctgtcattgggtgcatatcagatgcatcatctgagaaaaccttaataccccagacactcagttcctgcctctgggacatttgaaggcacagccaggattgtaagccatggggcatggcaatataataaatacagaaaatggtaacaaaataattagttccttaagaggattacagttggtactgctaatgactttggaaatgaaggccagtgtggagagag

SEQ ID NO: 422750 - DNA, 178 bp, Homo Sapiens
cagaggatcacgtctctcatactgggcacagttatgtggagcacgttatttcaccgcagactgtcagttatttcccaaagcatccacgggcatgagaagagagcgtacagggtgggaagcgatgagctaaaccataagtgtcagatactggatttagtcctatccagtgtggagagag

SEQ ID NO: 422751 - DNA, 216 bp, Homo Sapiens
cggtggagaagaaagccagaactttaaattccactgaacagcagtgaatttcctgtcatttttcccctgtggtatctcctcgctaattgctcctgggcttgccagaaacccagaactgaaaagtaggggcaggcaaaaatagttccaagaaaggctctctagttctcctctgcaaagaaagaatgagaggcccctttgaaaccagtgtggagagag

SEQ ID NO: 422752 - DNA, 122 bp, Homo Sapiens
tgacctggccaacatgcatcagtagcagaagcaatctagattagtagttactagcattggctgtagcaccagccatagttggcaattttgtctgccatctaattattccagtgtggagagag

SEQ ID NO: 422753 - DNA, 226 bp, Homo Sapiens
ctagaggtcccgatgcttaaccttacttttggttctagctaggagtacttataattaagtcttagattttcctaaggacaaacggtctttcagtgtgttttctcagtttcagtaatgatgtgtctgtcttgtgatgaagcacattataatactttagacttgtcacagttgtaaagaatttgattagattttgcagaaaatagaatttatcccagtgtggagagag

SEQ ID NO: 422754 - DNA, 115 bp, Homo Sapiens
tctagaggatccgccgtatgtggagggacaatttcagcaaagtaaagagaaaggagctttgacccgtagacaaataatgataaggagggtgtatgaaagaccagtgtggagagag

SEQ ID NO: 422755 - DNA, 124 bp, Homo Sapiens
cctgttggcacccagtttaagttgctacttcactacagcctttctcaccatcttttctgctgtatttccccccttagtccttggcatgtggcccctcccagtgtggagaccagtgtggagagag

SEQ ID NO: 422756 - DNA, 157 bp, Homo Sapiens
acccgacagtaaattctggattgcatctgaatcttttcatattaccccaagatgtaggtatcattttaaagcacctaatgagtactcacatgacagcatgaatacttagcagccaggacgttttcgaggcccctaatggcagaatgacgtcctgaag

SEQ ID NO: 422757 - DNA, 105 bp, Homo Sapiens
agctgtctcaaaataataactacagttcaccgtcattttgtccacgaagacctctgttgacttcttaacctagaatttctaaattcccagtttgtctttgtgtat

SEQ ID NO: 422758 - DNA, 483 bp, Homo Sapiens
  misc_feature (103)..(111): n is a, c, g, or t
  misc_feature (195)..(208): n is a, c, g, or t
  misc_feature (393)..(443): n is a, c, g, or t
ttcagaggatcccgtctctcacactggatgacagtatcatctacattaaaactctttaagtgggaataagtcctgcacaggtagaaatatgggaacatctgcnnnnnnnnnggagtgaatgtaaaaggggcggataaagggcagaaaaatagagttaggatgatagccacggaagctcagaaaaagtatgtgggnnnnnnnnnnnnnnatgtcagtatggttcaacagagctaaggcggcataggctcaaaagaagataagaccggagataaaagcttggtaatcggtcattaaaatcaatgaattttggaaataaactaaatgattgtgattgatgatcctcaatatgatgtggcagcgtcataaagagggctgtggttcccaggatggtannnnnnnnnnnnnnnnnnnnnnnnnnnnnnnnnnnnnnnnnnnnnnnnnnnacagagataacatgatctatataggaagtccagtgtggag

SEQ ID NO: 422759 - DNA, 301 bp, Homo Sapiens
tgctctacgaggatctccacacgggaaactaggaggaagcgacttgtgaaaggttcacaaagaattaggaagatggcaactcttgttaaaagaggaagaaatggtctttctctgctagagatatcttgcagtttgaagctagaaatgtagggacaccattcctcacaccatactgtgactagtggatttcccatggcttggcagctaaccccagcctttggcttcatctattaactgtggaagaactgccctgtgtgtgtaactttgttataaaccagtgtggagagagccagtgtggaga

SEQ ID NO: 422760 - DNA, 160 bp, Homo Sapiens
agaggatcacctctccacacgggcactttcaaatacttcagcttttcagtttcaggtatctcaaacatggtgtaaagaaagggctgaagagagagggtaaagtgaaggagagtagagaagtgggggagtgggcatcctttaccagtgataccagtgtgga

SEQ ID NO: 422761 - DNA, 417 bp, Homo Sapiens
tcggaccatctctcacactggcagtcgttacatacaagccatgcccattccagcagatgcagtccagttccagtacctccccctcactgtaatgcataaaggctctgacttttctaacaacagcccaaaggggctgtgtacataatccagaagtgtatgcggttaagcctcatagaatatgggctcctaaccataccctgcctttcactttcattggaaagagaacaggcaatatggagcctaataaactctcagtggagattcccagccagtacacttaccatatcaattaacaatgaataattactgttcactttcactggaaaggcaggatatggtcaggagatcataaataaattccttgcccttcctcttccaaacaaacttttctgagacacagagatcccagtgtggaga

SEQ ID NO: 422762 - DNA, 154 bp, Homo Sapiens
cagccacattcagtatcttagggtccagttaaataactttggaagctcttattaaaattctgttctgcagacagcatagtgctcttaggcaaaaccttggttcctttccctgactatgtaaaacctagagggtgaaggaccagtgtggagagag

SEQ ID NO: 422763 - DNA, 218 bp, Homo Sapiens
cccagctgcacaagaggtatctgcaggaatgactgtggtttttcttaactaacctgagtatgatgattacaacaagcaaatttccaaacactcttaaattcaaactgttaaaattcttaagaattcttacattcctgagataattatttgcttgttatgactaacagcttatctgaggactcttctaaaaaaatcattccaacccagtgtggagagag

SEQ ID NO: 422764 - DNA, 228 bp, Homo Sapiens
attctagaggatcacccctctctccacactgggcagagggcagctgtgggcacgtgttctttttgctgacagtccaagagtgttgggttcaaccaactgctaactcctgagacaattttaaggcaggcaataaggagaaccttacagatctataaggccagctggagctatccccagggccatgttgtagcagacccaaactcttcaaatcttccagtgtggagagag

SEQ ID NO: 422765 - DNA, 318 bp, Homo Sapiens
gctggctagaggatccccgtctctccacactggggaagtcatcggcaataaggctctcacagagaaaacatacatgcccacattagctcctgagaaggccaatcatcagattactgatggattcagaaacagactcttatgaagattgataaaatctgaaaagaacccacagtgatgctcctgccaatgtcaaatgtaaagtacaggatgctgtcaaaagaatttttttcagaccatttactccaaggaaaccaagtcgacacttgattacctctctgttcatcctgagttactgccagtgtgccagtgtggagagag

SEQ ID NO: 422766 - DNA, 163 bp, Homo Sapiens
ggcggtaccatctccacactgggacacaggcgttagccagtagctcagccctagcacattttaaaatgaccaaaatccattaaaaacattctcttaacagccaagatttttacatctttcatttcttgaactgttttcattttatgtgctccaattttatcct

SEQ ID NO: 422767 - DNA, 333 bp, Homo Sapiens
tatccacactggagtacaagatccagatctttttcataggtttactactttggaatagaagttgtcaaaacacatgcacttggaataatgaactccgtaaagacaaagagtcctcaattttctttaaacggcaaaactctttttctccacaaaatcttgtagacctcaatatatagcataaaaatagagctgctctgattgaaattggtggtggtgtggtaaggattagcacccagctcacgtggccacctaaggtgctagagaggccagtctgaaaactcaggaagtgagcgagtaatcaggccaggactagtgtttccagtgtggagagag

SEQ ID NO: 422768 - DNA, 123 bp, Homo Sapiens
ccggtacccttattgttgaatcttgaactattcttaatgaatggtgagccaaggagccccagtgtggagagagaactactgcactaaatagtgagttttgttctacttccagtgtggagagag

SEQ ID NO: 422769 - DNA, 223 bp, Homo Sapiens
tggcacggctccataagaaagctaatattgccagatacttccgttgaactacccactgtgtcagatagtgttatgaaactcatctgaaatccacatgcctagatttctagctctgcaactggaagggcctactaacacaaaccacagaaacattattaagtaaacagcagcaaacaagctatgttcaagttctcttactaataaaagcaatacagttagccag

SEQ ID NO: 422770 - DNA, 223 bp, Homo Sapiens
tacctataagctaggcagtacatatttgaagagaaaaacacgaacactgaagtttacaagagtgctgataaggtgatctccagattatatggtcttagactcgatttttcttaatttaaaattgaatttacacctcactctatttgaaaagttatgtgtcatgcacgaatgaaataatgtgcagacagggttcactttacatcattagtggtaccacgacaca

SEQ ID NO: 422771 - DNA, 241 bp, Homo Sapiens
atgtcctgaggtaaccatgccagagtcactacaataggctatgactaatccagcgcaccaggaaactatccttccaaggacccaagatgccagcataaggcccagtttataaggaggtaccacctagagagggcactgaatgcaagacttctgtgaatggtatcaatagtaagctgggaaaactggaaagagaagattctggaagagaacacattcaagacccaaatatcaacttctgtca

SEQ ID NO: 422772 - DNA, 229 bp, Homo Sapiens
aacgagcgatggagggagatgaggaggacttccaggcgtggcgaattgtgcttttcttgaaggatgaacagttcatcaaggggtggggaaaggcatcctggcaaagtcccaggtgccccccaaaagtctccgttactgcccagcagccagcaaccttcaatgcggcctcttccccggcgtctcttcctggtgaagctcacgtaggaatgaaaccacctctggaggagtg

SEQ ID NO: 422773 - DNA, 318 bp, Homo Sapiens
atcttgatggcttctcattgcccagtctaccaagttctctctttttctgcctcactttcaagttcttttataatcttgccccacttattaaactgctcagagaatgccccaggatctagtcagtgtctcttcacccctgaactcgctgtggtccttctagcttcccagcctttgtacatcttgttccctggccacaaccttcttcctccatgttgtacagtcaccactttcattcactggaaaactccaatgtacagagaaaatgcagtttgttcattttgtctacagtgagccttccttcccaccacgacacagtga

SEQ ID NO: 422774 - DNA, 296 bp, Homo Sapiens
gtcagtggtctgtctggagcaggtcgcagtcgtctctgctcgatctctgcacaccaagggtgagcagagtgcaaggcgctcagggagagggtgcgaaggcactgccgactccatctcgagtgccaaggaatgcccctttcagaagccctcgtctgagaagtgctgccccttatgtagccccaggcattttaaaatctttgaatctgcaccaagtctcagaacagctctggccccggagtgctccgtccaggccgctgtgaaccggctgtccccgcgtctcctccaccacgacacag

SEQ ID NO: 422775 - DNA, 196 bp, Homo Sapiens
gttcgctctagagtatccccggctcattttgttcaacaatgtttcagaaacatttaaatttgttgctagcatttaaaagctgggagatacctacaaaaacccagattcctggcatctgttgaaaaatctgatggtcaagcaatattgtttttccatggcagtagtcgggagtttattagaaaacagcaccccaaga

SEQ ID NO: 422776 - DNA, 294 bp, Homo Sapiens
aggaacatgctacgttgacttcagtctggcccttaacttgcttccataaaatgccatgggataggataaaacagctcatttagtttgataactaaaggataaaatttgaactctcgtttgatgtgctcagtatggcctttttaattctgtaaagagttggtggtgtcagtagattgaatgtaagtggaaaatgggctatttcagtagattataaaaattgccattgggcgaatggtagcagtgcccacagaatgttgaatggggactgcgaaggtcctggtgaactgaaatgac

SEQ ID NO: 422777 - DNA, 291 bp, Homo Sapiens
aacaggtccacgaagaacccaataattctgaaagaaacatcgaaggctggaaatagttctagcagatgggttgcatctccttgttgctgctctttgcttagtttgcagtgtttcaaaagataatatatattgtcatataaaataattcctaaaataatgtatatactaagggtcacaattcaatttggttagagatgggagtttaaggagtgattattcatttttaaaatttcctctcggttattgtattgctatggctgacaaaaggaagggaacacagtggaaggaagg

SEQ ID NO: 422778 - DNA, 222 bp, Homo Sapiens
ctgtatatgtaggctaaaaatcgagtttcatatttcagatcagtgcacattactcactttaccgtatatatgttatacctcaacaggaaaggaaagagcaaacaaatgttgtagaggaaaaaaattgtaggaaacaaaatatataacacaatgctatttatgtaaataaaccccatgcctacgaaataactacccatcctgaaagaactcagcaaacagatt

SEQ ID NO: 422779 - DNA, 409 bp, Homo Sapiens
  misc_feature (186)..(186): n is a, c, g, or t
  misc_feature (259)..(272): n is a, c, g, or t
ggtcactagctgactctagagtatacaaggctgattcgagattgattattaataacacctcttttcaccctcaagtaaaccagtgttcatgatgcattattatgtgggggtcggtggattgtctatggaagcctgagcaatattgagaatgagataagatagatttcaagacgtgtttgttgaagntaaaatttacatttctgacagtgttgaaagattccagttaactttttatttgcttctaatttgaaaagccaannnnnnnnnnnnnncttcttatttctagcctatgaggcccaagggtaaggatgaatgtgttgggtgggagagcatggacagagacaagaagtgtgttaggctgaatggagtgctgtgtaggagttcttcttcttactattcttattcttct

SEQ ID NO: 422780 - DNA, 202 bp, Homo Sapiens
gatctgtaattcttaatctctgagtagatgtaaaaattagaaaaatgtctgcttatgaaagtatgcttcttgcagtgcaatattaatcgttaataattatacagtaaatattctatgctaagcactaactaaaggccttgcatagattaatcacatgtagtactcataacaacacaaatgtacctcacttttgccagcattt

SEQ ID NO: 422781 - DNA, 131 bp, Homo Sapiens
acacggctcattatagagtatgtttattaggcattactcctgatagaggtcctgaggccttgtcaggccctttcaaagaaggcgctaaacgtgcctgaggtgagtttaaattagtctctccagttaacttt

SEQ ID NO: 422782 - DNA, 242 bp, Homo Sapiens
  misc_feature (145)..(162): n is a, c, g, or t
ttgatctcataggaagttcttctccttcaggataacatggtcttaacttcttcagttagtcttactctaatatgtaatatttttaatctctcctactgacactttactcacattagcttaaaacctgtttaaccctttcccatcnnnnnnnnnnnnnnnnnnggaaaaaaagacaaaaaggggtctttcttttgttgttaagcctgaaagccgggggggaaataatgcctcattgcggttaa

SEQ ID NO: 422783 - DNA, 508 bp, Homo Sapiens
  misc_feature (434)..(434): n is a, c, g, or t
atagctgactctagagggtaaaaggatgattagagaatcccactctactcctatggctgttcacaggctcccatgcaggctgacaccgtatgacggccttaatggagtccaccgagtatttcagaatctctcctgggccacttgaaagtggatgtacccatgggatttgctttgacccaggagatgtgcgtggaagtgaagcgtgtcaccacgaggcaaaagagttgggagccattgagatgggccactctctccttcatctcttagagcagctgacagctcccatatggaggttgctcctttattctcgtggcagggtgagggcatgtggggcacagggcacaggagagccatggaggatgtgcagcatgggcaggaaaagagccttcagtggtgtacatttccatagtttggggctgtttcttacctacagngatacctagcccatcctagcaggcatgcaccatctactccacactctgtgatgcagactagcctgccgtcagaa

SEQ ID NO: 422784 - DNA, 179 bp, Homo Sapiens
agggtggcattggaggtctaacctcattaacagcagatgcttttggaggactagactgtcaccaatcattaaccctcactctctgggaagatcacattctgtcaatattgctgctagtgggtatacttcttccatatgtgtcagaattaaagttggaagccttgaaccaaaccattgag

SEQ ID NO: 422785 - DNA, 145 bp, Homo Sapiens
tgatccccgcctcactttagttcttttgtgtaaattttagtgtcagttggccccattccccagtgggataacaataataagtatcatcaattttattattacttcttgttatgctagcattccaagtctaaccttcaattcctta

SEQ ID NO: 422786 - DNA, 119 bp, Homo Sapiens
  misc_feature (109)..(109): n is a, c, g, or t
atttggaaagcacagaaaaatttgctagtagttaacaaaaaagatgttagcattgtgctttataatgcactgaagagagactgtcttaatttatccatcccctggacgngaggcaagat

SEQ ID NO: 422787 - DNA, 376 bp, Homo Sapiens
ctcatttgagatcacagaaaccctggattccacttttctttcaaataagagagacttccaatagtaaagataaaggaagagaacacctgggaatattaatataatttgaagtggagcttttctgggcaagagatcttgtgctggtgctttaggcaatttgatgagtcctcttctagggtctctggaagctttcttgtaggtggccatggtctgatatgcacaccaggagcagagctttgagcttctgacgttggagcaattgctgaccatcctgacaagggaactgcagagctggttttgagaactacttccagagaacagggagaaggtggttggtccattggtggaatgagagagaatttgatgagctgagaca

SEQ ID NO: 422788 - DNA, 149 bp, Homo Sapiens
ctcatttcaactttccatggcaatgtcttacaattctctttaggctagggccaggggaagaatccatggaattgaccacttggcaggacattaccaaggtaggggtggctatagagatttcagccgaaccaccctaggggatgaagcaa

SEQ ID NO: 422789 - DNA, 271 bp, Homo Sapiens
caggatgttgtatttcattatttttatatatagacaaattgttctttacaattttaaacatttcttttcatgctgtcattatcaattgaattttgttttactaaaatgactaaataattttattcgagtaagtagaacctatggaaaaattatatcttttgatccttttcagcttttcttttacaggggcagttttaattatttgatttttccattggtcagaagtattagataatagacatttgataatttcagcatgaactgaaatgag

SEQ ID NO: 422790 - DNA, 410 bp, Homo Sapiens
tctagaggatacacctcatttcagttccaaagcgcagtaagtaagcagtaagtgaattagcttagtccctaagcaggacagcaggacatctcacgttttactcagccctcccttaagaacttccctttggcaggtggaattgggatcaccctgagggtttaggattgacatgacaatgggaaatgatgagggctgaagggcaattgagtgccacaaagccaccttgaagccactgagcagtgtctgaggaactgatttcattctgcctctgcctctgaagattttgtgttattgattctaacaaagcacttctcaggtgactcccagactgctggagtagttcgaaagaatagaacccttgagtaaattgtaggccccaggcttcctgcaagaaccaagcgctgaaagat

SEQ ID NO: 422791 - DNA, 287 bp, Homo Sapiens
tggacaactctttttggcctgacctttaaagcacattatttcttactgcattgagataacattagttaatatctcatgaaaccaactgttattaacctaaaaggtcattttgtggactattcagcccctttcttgctgtccatcttcaaggcggggtttttcttgggatcgtcaccagaagtgctagtaaaattacctgacttctcacacaatcaaaacaggaattggtggggagggtgcaaaggggagaagaaacaaaagtataattcagcaaactgaaatgagcc

SEQ ID NO: 422792 - DNA, 254 bp, Homo Sapiens
tgctgctaaagtctcaagtttactgatgtacttttattctgtggcccctgctctcaggatcttgatacttgggctaaccaatgagtaggaattaatttagtatctatgcttttctggtaataccctttagttatgacttcaggttacaagcccggaggaagctaagaaagttttcattctaggactttacaccaatgtaatgttcttaagatgtaaaaaattgctaaaactgttcctttttcttttgagacaag

SEQ ID NO: 422793 - DNA, 262 bp, Homo Sapiens
cagatggatgaaacaccaaggggattctagaactagatagctaaatatttgtgtatgtcaacaactgtgtacatggaacagacattttgaaattcattattttcagaagtatgggtcatatgaaaaacactgatccctggccgtaggggaggtggaataattacactggaggctttgcaacagtcagccgtcaacactccttttctgtcaatactataagatcatttctcatgttcttctcataggaaacaactgtaacaaa

SEQ ID NO: 422794 - DNA, 404 bp, Homo Sapiens
  misc_feature (109)..(187): n is a, c, g, or t
tagctgatctagaggatcacggctatttgagacccacaatctcttccagaatatggtcgagggagtcaatacttcccaactcactgtattaccctagcactagaaccannnnnnnnnnnnnnnnnnnnnnnnnnnnnnnnnnnnnnnnnnnnnnnnnnnnnnnnnnnnnnnnnnnnnnnnnnnnnnngaataaatgcacatgtgagtgaggaatgaagggagcgaaagaactggattagaagctgtttggggcagagatgtgccttacaggcttcatgaagagtgggtgatgaaaaaggtaaatggagcatctaagaggaagctttgatagaagggagaatgcaagagaggttggaaattggaatccattggaattgggagcctggggagatgccaggacaggc

SEQ ID NO: 422795 - DNA, 357 bp, Homo Sapiens
  misc_feature (85)..(95): n is a, c, g, or t
aaagtattatctcttcagagaggtcttcaatctaaagtacagtcctttagtctaaagtaatgcctatcacgttaactaggcttcnnnnnnnnnnnggaaaaagcctcgctctttaccttagggcggaaaacaagggggcccatttttgttaattgaacctggcaaatctgggaaccaaggaattctgggctttaagcccccaagggggcgggtataccaggggggcccccccagcccgcccggctaaattttggttttttaggaaaaaccgggttttaacctggtgggaataataccggccaatttttacaatttaatttcccaaaacgaaaatgagacgggacccggccccaaatc

SEQ ID NO: 422796 - DNA, 368 bp, Homo Sapiens
tgctctagaggtacacggctcatttagatccacagctttgaagtggctgaatacgaacccagaatagacctttcacttcaaaatccatataaagtgtaagagcagcgtgaaggaagcaatcaacactgcagccaatttctgctgtttagtgctcaacacctctctcccttcttttgtgtatatggtggcactgtggagccctaatacctggagccactcctggcacagggatgtgcaagtgagttaggcctgtccacccaagtactctacccttttggctgctccaaatgccgtcatgtagcccaaatgggattacacaaccctcccctatgatatattcataaccaactgactggaagaacaaaatt

SEQ ID NO: 422797 - DNA, 293 bp, Homo Sapiens
ttgcctgacctaaaacctaagcgtcttattttcttctgcaacaccgcttggccccaatacaaactcaataattgttctaaatagccagaaaacaacacttttgatttctccattttatctggatgatttttgtcgaaaaaaatgggcaaatgggtctgaggtgcctgacgtccaggcattctttactacacatcagtccctccctagtctctactcctagtgcggacttgtcccaaatccttcttctttctctcctgtctgttccttcagtctccaccccaaactgaaatgag

SEQ ID NO: 422798 - DNA, 145 bp, Homo Sapiens
atttggatcatttgagcttggcttcaagtttttagttaatgtcagggttcaggatcttcaattatttgagagcttcatagtcctgattgagtcaaattggacaaatttagcagttcaatggcgcaggatttgattggttaaatat

SEQ ID NO: 422799 - DNA, 371 bp, Homo Sapiens
ccgttaccattcacagagactctcaactggcctgggagggttttttccacagcattgacatctttggctgagggcattgtcatttataagaatgctggctagaaccaactgggggaagcaagtatagcatccgcttttaatatctcctgaacaagagctttgtgagtgaaaactgctttacagtgctttattggtttcatctattcaggcaaaacaacatgctcaataagataccaaattatcagatttttaggcctacactactacctttgtttgggagagaatcacacactattaggcttttagtgttgttcagacttcttttgtatagaatcatcagatgatgaactgaaatggccgggaccgagctc

SEQ ID NO: 422800 - DNA, 428 bp, Homo Sapiens
  misc_feature (238)..(248): n is a, c, g, or t
tgctagatgaaaaaagtctgtcatgattgggtaatgaatttgactctaagttcactgatacatacagaagataatggactgacacaatgaatatgaaattttggctaaattattgaaggcatatttgtctgaatagagagtagcgtgggaatctcagaactatagggataaaaatgtcttgttccaactcctcttgccattttagtaaagaatacacactgaaaatgcaggaatgacnnnnnnnnnnnatactagagaactgatagggacatggtcaaacacaattgttactgtgggctaatttatgtagaatcaattttgtttccaatcagttttcatttttaaaaagactaaagtgaagagcaaacataacgccccttcccattttgctgggtaagcaatagtaggctgtttggctttattttcca

SEQ ID NO: 422801 - DNA, 339 bp, Homo Sapiens
  misc_feature (133)..(281): n is a, c, g, or t
taccatcaagccatgtagccttgtgcagatcacttcagcatactgaaactttagtacgttatgctataaaatggggacgaagactcgcccaagctgcctcaggggtatactgcaattaaggaaggttacttannnnnnnnnnnnnnnnnnnnnnnnnnnnnnnnnnnnnnnnnnnnnnnnnnnnnnnnnnnnnnnnnnnnnnnnnnnnnnnnnnnnnnnnnnnnnnnnnnnnnnnnnnnnnnnnnnnnnnnnnnnnnnnnnnnnnnnnnnnnnnnnnnnnnaatggtgccaaggtcacgtgaaaccccctgtacaactacaaagaggtactgacatgag

SEQ ID NO: 422802 - DNA, 270 bp, Homo Sapiens
ccgttgtcagtgagagaggaagggggtggcaggacaccagggaggcaatgcaattgaacagaatggtcagtcttctttttactgtcttgatgcagttagtgtttagatcattagggccactcagtgaaggtgcttgaaattgatggccctggacacccctatgtaagaagtccttgggccacaaacagactgtagatctcatgaaggcaccaggagacagaagcctggttatcacaggcaggtccgacagctagggttgtggcccaagga

SEQ ID NO: 422803 - DNA, 301 bp, Homo Sapiens
cttctgcctgcttgagtggcagcgttttttccctgtgcaggcccccaggtgtgtgtgattggctgccccggggccccgtgacaggggatgctttttgagctctctccggcatcttcctccttaaatccagattgggcggagacatgaattcagcattacctctcccatgtccacacgtgaagaagcactttccaggcgcacacacctaagtcgttggccgcgggttcttggagggcgtggcctgagctcccagacgcctcctctctcacctagcactgcacagtgccttccactgacaacg

SEQ ID NO: 422804 - DNA, 487 bp, Homo Sapiens
ccgttgtcagtgataaagagttaaaattcttcatactatagaggtaggccttagtttatagtagatgaactaaacaataatctaagagtctttgaaagttattgctaccaaatatcccaataaatggacacagagtacttttgattttctgcgactattgaattcttatgtgtatctatcatatctgtcatgtccatagactgaaaataacatatcctatatgcatacatgtgcactggctttaaaacatttataatgattttcatgtaacaaaaactgttctctgaattcttcaaggcattatccttgttgaaggctgttgattgataatgaaccagataccgttaaaatccatgtttataagatagagattctgtaagttccacaaagtctcctgactaatgtgcagtaagccaggattaaacacgggcattctccctccggaacccaagtctctaaccactgacaacggagggtaccgagctcg

SEQ ID NO: 422805 - DNA, 399 bp, Homo Sapiens
ttctaagtattttacttagaagtaagtggtattgtaaatgggattgttttcttaatttctttttcagaaagttcactgttagtgtatagaaatgtactgacttttgtaagttgattttgtatcctgcaactttcctggatttgtctaattcaaatggtgttttggtacagtctttgagattttcaatatgtaagatcatgttgtcagcaaacagagacaatttcatttcactctttcctatttggatgtcttttatttctttttcttgcctaattgctcgggctaggacttctggtactatgttgaacagaagtggtaagagcgggcatccttgtcttgttctaggtcttataggaaaagccttcaacttcttaccactgacaacggggtaccgagctc

SEQ ID NO: 422806 - DNA, 265 bp, Homo Sapiens
aaattatatattttacctgagtaaggtgctcagaccttatggtgtaaagtccagtgagtttttataaacagatgcatacatctctgtaaccaacactccatccaatctatagaacgtgttcatcaccagagaaagttcccttttgctcttttccagtcaatcctccacttccttgtcttgagaaaaacacttgtgttttctaccaccatagcttaattttgcccattttagttttcatatagatggaaccacacagtttagattc

SEQ ID NO: 422807 - DNA, 332 bp, Homo Sapiens
ttgtcagcggttgtcagtggtcagtgactcgagttgtcctgtccaaagactaacgcatgttccacgggcaggccaagtaaggtgggggtggaatgaggaaccaccaagcacctttaattccttccaagatcttttatgaatgggacaaagtcaagtgctgttagtgacgacaagagtggagattctccttctggtgaatctgctgcactctggtgacgatggcaggtccggcactgctccagcacccaatccttgcagtgacttctatggcacttgcacattctttttacaatagaggcttcgcattctcagtttttgcagtcactcactga

SEQ ID NO: 422808 - DNA, 541 bp, Homo Sapiens
ccgttgtccgtggcagctgtatgtccttttatgcttcttcagccttcgtgactatgtagactagtatttctaggtgccatcagtagactaacccagcgaatttgaatcttgtcttgaagtggacaaaagataagcagctcccactcacatggtatttgaatggcttgctctgagcaaaactttccactgcctttgacaggtggcatttatcacctagtttaaaaatagtcagttttcaggcatttgataatttcctttgatgttagattaaccaggaaaattatgtaaaatcactgtttttcttactactgaaaagcatttgttaattagcaggtgacccaagcactgtttaaggaggtatatccagacagtaaactcctggcagttaggagtgacatctgagccagctctgctgcagacctgtgaatagaagctctgcctctgaagccaccagatttgcacctgtgtcactcccagaaaagcacacggaattgaactgagtcactcctaagaatcccctcccccactgacaacgaggtac

SEQ ID NO: 422809 - DNA, 331 bp, Homo Sapiens
ccccccgttgcgacctttatttttatgagctgtgagaattaagaacctaccagtttttgtttaattaagcagtaagacacagcggggggtgcatttgtgggggatgaatgcattccactggtttcctcaagcagcactctaaccctatggaatgctttgcctggagtatcacgccactgttgcaaaagtaccaggaagacaaacacatggtaataatgtagtcagaaaatcttggaggacagtttagaaaaggacctgaactccacaggagttttagtagttagcagctactgggactaggatattaaggagaggaatccactgacaacgg

SEQ ID NO: 422810 - DNA, 419 bp, Homo Sapiens
gattcctgaggatccccggcgcgtgtgctacccaatgcttggccatactctactgctaatgcagcagttcagcacagtcaattcacgtttctccctgctcacggccctcacagaataaaagccaacgtcttataaagccctctaaaaagtgtcctccccttacctctctggccttctctcttactctcctcttcactaactcaattgcgtagacactgtcttcctcactgtttctaccacaagctaggcatgttcccaccttggggcatttttgctgtctgttccctcttccagatggcctcatagcttgttcccttacctcctttagccttttcaccctttccagcacacgcgactgtgtgctaccaccggcgagttcaccttcacctccaagctggtcgacggcaagttcccggact

SEQ ID NO: 422811 - DNA, 331 bp, Homo Sapiens
cgctctagagtatccccgtcgcgtgtgctaccgacaggaaggctcagcatgactcacctacagcaacccgcccaaccgataaacctcgcgcacaaagcctcgctcatcgatcagcaatggagcccaagagtggttgccgaaatgaacgactaccagttcaaggtggtgcgtatcgagggtgaattcatttggcattcgcaccccgaaaccgatgaagcgttcctggtgcttgaaggcacgctgcgtatcgacctgccggagggcccggtgtatgtgaagccgggtgagttgtatgtggtgccgcgtggcattgagcacaggacagcacacg

SEQ ID NO: 422812 - DNA, 415 bp, Homo Sapiens
  misc_feature (232)..(284): n is a, c, g, or t
ctctagagtatccccgtgtgctctggacacctttgctcaaatattacctttccgttagctacctccctgtcctccctggctagagtcttcttatccttttctagctcattgcactgtctctttccttgttattttcttgttcattcataggtgggtgtgtctgtggtctgcctccccagtgtcaaagacaagctccacgaaaacagggagctttttcgacttcaccatttcnnnnnnnnnnnnnnnnnnnnnnnnnnnnnnnnnnnnnnnnnnnnnnnnnnnnntaggaaataagcacataaggaatgagtgaattggtgagttatgttgtcccagagaggttgcctgcaccatatataactagtcatgcatgtgacctttgaaaccatagctagtaatggctattttttgcact

SEQ ID NO: 422813 - DNA, 168 bp, Homo Sapiens
atttagagatggggtcttgccctgtcacctaggctgtagtgcactggcacgatcataacttattgcagcctcaaactcctgggctcaagagatcttcctgcctcagcctctcaagtgactgggaatatacaggactgtagtcccaccacgatggctaattttaaaaat

SEQ ID NO: 422814 - DNA, 462 bp, Homo Sapiens
cccaatggcagtcgagagtttgctttaaagttttcccatcttgcgtgcattatcccttgatattaaaattattctctcagtttaatccaactcctgctgagaagctgtgtgagatttaggctgtggggtttttttcttgtactcttttggatggtgttgcatttttcactcttaacccgagggtgtgtttcagcttatgttcgttctgtttcatgcaggtttatagcacggtagagtagaaggcggcttctgatttttagggtatttttagaattcattcctgagtgaggggttcagacacccagtctcctcggaacaggggtgaggggtcgactgagctttgttgagaagcctccagttaggcttcggagcgggctccatgttatattgtgtgtttactgagcttcccactggtagaagatgacacatttgtccatcgtcctgtgtatctgctttccagag

SEQ ID NO: 422815 - DNA, 410 bp, Homo Sapiens
ctttggctcggccccgcccaatggcgccgacaaccatcccatagtcctaaaataattactgcttctaatatagactgcacatgatttaattacttcacattgattttaaaacaaaacctacatgcaatagttgctgacagaagtttagacccgatgccttttcagccaggataggtacaagcactggcgcgtgtgacagcaggcttcaaacctcattcagtagacgggatagtaggctagataataaacagcaattagaactcactgtgataaaggccatggtaatattgttagagagtgctacagaaatgcacagtagtagttctctactcagaccaagagatcaggcagggcttcataaacatctccatgtaatttgccttaccccggctgccattggggatcctcta

SEQ ID NO: 422816 - DNA, 155 bp, Homo Sapiens
gagttatgtcaagcaaagagtgcaacaatgcaaacgaggaaagaccatttcaagaagctacagtctaacattgggggcagacaagtaaggtgataatcacagaacagtggtttaacagagtgctctaataattgatttatacaagtgttatgagg

SEQ ID NO: 422817 - DNA, 154 bp, Homo Sapiens
catcctttacgaaccagagcaagctctcgtgtggaaagatgggcagcttgttcaggaacttatcaaagtacagagcgcccactgctccagccttgcaatcaaggagtacaatatgctcaaatctgctggcctattcgcggatatgaagatgccg

SEQ ID NO: 422818 - DNA, 313 bp, Homo Sapiens
  misc_feature (68)..(151): n is a, c, g, or t
atgtaatctccacatacatcacacgcccccacacacgcagacgtagccctcacaccccacacgtatannnnnnnnnnnnnnnnnnnnnnnnnnnnnnnnnnnnnnnnnnnnnnnnnnnnnnnnnnnnnnnnnnnnnnnnnnnnnnnnnnnntgcccctacatcctcccctgcgtacacacacctgcagattgtctcggcaggcccagtttgctgcacataaagcccttaccactcttgggcatctgagctggatcaagcagcccagctcctaggcctgtggtagatgtgggtatgcttctgttcctgtgggga

SEQ ID NO: 422819 - DNA, 342 bp, Homo Sapiens
  misc_feature (192)..(213): n is a, c, g, or t
cggcacgtggagtccagagtgataagtaacttccccaaagtcatgtagctagtaaatgaaagtgatgagactcacactaggttcttctaagtttttagagtacttcgtccacggcgccaaggtgtctagggcagagacaccacaacctcctaaggtaggttatgccattaatgttccacttgggtgggaatnnnnnnnnnnnnnnnnnnnnnntataattcacacttccttatagttatattcctcattctttgaacttaatccatggtaaagaattatttattatggtggggtagaaggagaccctttgagatttgaagacactgattaaccatgttagtg

SEQ ID NO: 422820 - DNA, 342 bp, Homo Sapiens
cgggagtcgtctgagtttggtggcaaggggctggggcagaaagtgatggggaccatagtcagtggtgtgcgtgtgctcagctgtggcggctggctgaaggcatgtgtgtggcagcaaaggtcagttgctggctgaaggcatgtgtgtggcagccaaggtcagttgctggctgaaggcatgtgtgtggcagccaaggtcagtggcaagcttgtgcatcgtggcaagggctggcagcaaaggaaggggctaggactgactgcatgtgcacatgttgtggcagaggttggcagtgtacacatgcatgatggcaggtgtcagctgcgggttgggacaggggtcagg

SEQ ID NO: 422821 - DNA, 383 bp, Homo Sapiens
gggacgacggcagtgaatccgtactctggcactggctgtggccgtgtgcgtgaaacccgcctgggtcttacccgtgctgcgcctgctgcctgcattccccttccctgggtctccgcacgtgggccctgcctcattttcccggtcccagtttctgcgtcacctcctgagaggggcctcctgtcagcttccacgcagctctgtcacgggtagattctctcacgagtggaagtggctctcagctgcactggaatgtccggtccacacggacgggacctcggctgtgctgtccaccctgtatttccagtgcccagtaataggtgcttagaaaatacttaccgaatgagtaagtatacagttgtaccaggcaggtgatgtcattatcc

SEQ ID NO: 422822 - DNA, 268 bp, Homo Sapiens
tttatccatttttcttttcctcactaaataatgtatcttctttcaaatttccattaattaaaacctagcttgattttcattttggcatgatggcttgtgctcctaatctgaattactattcactttttctgggctccttccttttgttgttaattaagaaattcaatccacaagaatttattgagcatcgactatttgtaaaggctttttcttgttagcttctttatgtgattactctctgttctctatcattttacatgcagatgca

SEQ ID NO: 422823 - DNA, 338 bp, Homo Sapiens
  misc_feature (184)..(195): n is a, c, g, or t
cggcacgtggagtctcagatgaacatgatggcaggataaagaaaagatgggactctcagctctgttctgctggtctcctcagaaaccactgtgcccatgtatgactaaaaatgcctctcagttattttccaacagtgcggcaaatgcgaggaaattaactatggtttgacattatggttagtcnnnnnnnnnnnncaaatttgtcaatggaaattttcacaggtacacaaagatagagttagcgtaatacacctcaatgttcccatcccccagtttttcgacttgtaatcaacacatggcttttctcatttcttttataccttcacccacctttttct

SEQ ID NO: 422824 - DNA, 316 bp, Homo Sapiens
catggatttatggggaggagtgtctgtagctaatgttgctcagttacgacttttattatggagaaaccccaacaaaaccttactattagctgcattttatgctgagccctttttctggaaaatgaatgcaacactgaaactctggctttagagttatatgtcaactgcataccatttgaaaatcccagccttactgataccactggattttgagaaatatcaaatcttcctcaaagtgataacaggagactgcttcttttttatttttgaaaggctgtttctagtctaatctcattccattttgaccttatctttg

SEQ ID NO: 422825 - DNA, 296 bp, Homo Sapiens
cggcacgtggagtctccacttcaaatcctgaggggacaatatttttactcaaatatatgcaacttatggggccaggtctatgttcaacactccagccgcgtttatctctgggtaagtttccctctctgtgtgccatgttcttggttggctgagtgagcagcaggttatactagaggcatcagacattcagggtttaagaattgagtttgaaacctgcccatgctgtatacaaccggtgtggctgtggggaaggcccaagacatctctggacctctgcacaggtcctgcaaaagagg

SEQ ID NO: 422826 - DNA, 325 bp, Homo Sapiens
gtccacgatcctgagcgccccaacaaaaggccttggcacttcacatgaaagctgccgcttaccctacacacactgccaccgggaggcagctgttgactcgttcgttcccccttgggccctgctctgggaacagtcccttctaggcagttaacctgtgagtcatccagcttatagttcctcataaagaaagaaactagccctaacttccacaacagtctaagccgctcctccactggctctcctcggctgaaaccactcagtctattttactgaaatattccttgtttgtagagcttcaggctcctccctagttcggagaaagcaa

SEQ ID NO: 422827 - DNA, 369 bp, Homo Sapiens
tactgtttgcggctgtgttttttattaaagaaattcagtgagaagagttttaacgtcgcactatagttgagaatcttaaggtgtataacattggcaattccaaattagagctcccctggcaactgtcactctatgacatcacattttatctaatgaggcataaaaatgtacattgtgcactccgcagctccttaatgtgcatggggaatgagagtcaaggggagattgggagccatctctttgaattcttagctgtaatgtttcacctatgcaattttctttatttgcagctatattttccacttctcataattcagtaattccaaggcattgcagaccctataaatgccatgcagatattggttaatt

SEQ ID NO: 422828 - DNA, 353 bp, Homo Sapiens
ccgaatctcataaatagtaatcatttctaaggtcaatggtattttctggttattcaaaactaaagagtttaagacaatatatggtactctcattcatgtatgctaactgactttagagttgtaagatgtgcacagtgtggataaagtagcagaaagattcccaatgtgggaaaaagggaaagtgttttacgggcttttagtacattgatatacccttcttgacagcaacatcagaatggagcaaaaaacataaggatgttcaacttttaactgagtgatctcactcttgagaaaaatgtaatagatgagaagctgaatgcatgagggtattcccagcagtgctctataatata

SEQ ID NO: 422829 - DNA, 335 bp, Homo Sapiens
tatactgtgtgcggcaggttatccatgttgttgtgtcaattttcttcctttgtaaggcaggataatatcccattgtgtgtatataccgcatcttgtttatccagtcatctgtcagggacactgggttgcttccaccttttggctcctgtgaatagtgctgccatgaacatggctatctcactgtctcttttagcatcatatcccatcagtcaccaaattctggtatatcctcctctctcccttgcactgctaaggctcgggccctcatcctttctcacctggactgtggcagaagcttcctaacaaccaccttactttcccttccagtctgtcac

SEQ ID NO: 422830 - DNA, 360 bp, Homo Sapiens
tatactgtgtgcggcagaaaccacttatttgctcatttataagaagcgactcctcatccattcaagtgtgatcatgagattgcagcagttcagttacatcttcaggctccacttctcattctcttgctgtacatctgcatgacttcctttactcaagtctcgaattcctcagagtcatccaagagggttggaattcacattttccaaactcctgttaatgttgatattttgatctcctcccacggatcctgaatgttcttaatggcatctggaatgctgaatcctttccagaggttttctgtttactttgcccagctccatcagaggaatcactatctatggcagctatagccttatgaa

SEQ ID NO: 422831 - DNA, 226 bp, Homo Sapiens
ggatccccctgtttgcggcgagatgtgtagaaagtatatatactcctccttcccaccctgatatatgcagttttccctactattaacctctcgcattaatgtggtaaattttgaaaattcgtgtacgactatggatatatgattaacttaagtccattgtttacattaggattaactgtgttgcacatgctacgggttttgacaaatgcataatgtcatgtagcta

SEQ ID NO: 422832 - DNA, 389 bp, Homo Sapiens
  misc_feature (63)..(63): n is a, c, g, or t
cgttgctgcgggtgggtatgtgcactcacataaaactcaccacctatatctaaatttcattanaatagtatacagtcgcgaacgtccaaaagataatgagacgatacctgttactccctctgattaccaagactatatgcagaagttttagaaccccagttatcgcattctctgatcagctgatgaatcgaacgagagtagttcagctcgtacgaaattcacataggtccctcttatgacaattagtgccgaattaaatctgactgtcggatggtgacagtataaactagacgaggggaattccaggatgccagttaagacactgcacccagaggctaggcaactgaaggtggcagaaaaagaagtggtctacaaacacaagcaaatga

SEQ ID NO: 422833 - DNA, 380 bp, Homo Sapiens
tgtgggtagcacaaagaatcattcaaggagagctgaacctgtggtctagagcagtgatccccaaactttttgacaccaggttttgtgaaagacaatttttccatataccagggtgtgaggggggatggttttgggatgaaattgttcatcagacattagattctcataaggagcaggtaacctagatccctcacatgcatatttcacaatagggttcatgctcctgtgagaatttaatgctgtcattcatctgacaggaggcagagtgcaggcagtaattcttgcttgcctgctactcatctcctgctgtgcagcgcagttccctcacaggacacacattggagcagtccatggcctgggggttggggatccctggtcta

SEQ ID NO: 422834 - DNA, 311 bp, Homo Sapiens
gggtagcagcaatcgtcacagggtagggagtgaaaaatagtaccactgtattggaaagacatttggtattatctagaaatattgaatgtgtacctacctacgtatgatgtagaacttgtattcctaaggtccatatcctagaaaatccttgtgcatgctcactgggtatcactgacaagaatgttcataagtgaaatttgtagtagcaagaactggacatgccacatatccttcaggagtagaacagaatatggcaaggaaaaatgaattgcagaacaatacatatatttcaggaaacttctatcgaatta

SEQ ID NO: 422835 - DNA, 111 bp, Homo Sapiens
gggtagcagcaagcccatagttagattgccattagatacatgtaatagaataatatttaatttagtaaaaaacaaattcatgttatttagacacatgatcattgctcttta

SEQ ID NO: 422836 - DNA, 326 bp, Homo Sapiens
aatgatatatctaacattcagtataaacctgatctataacgatactcaaatattgatgaattgataaggaaactgccatattacagttgtaaattactaaggcacacagaaagacagaactagcttcaatttggacagtttataagggaaaaattcaactgtgatacctaggtagtacatatattagataacaaagacaattaacttccctatttgggtcatttaagtttctaattaaaggtgtacgacattctaaaccacttgtctttcttcttcaatccccttcttacattttcctgcttccatttccaagcttgcttctgtgg

SEQ ID NO: 422837 - DNA, 269 bp, Homo Sapiens
caggaccggagtaagggtgtgccacagattctggtcttgatggcgaatgcaggagcgatgacataccgagtcactaactcgtccatcatgacgagtttatcccgatgtccgagttgcacgcgtcgggatcgaatctcgcttcgggggcacacctgggcgggtcgccctggctgttcggcttcgccgaccgggtgttctggccgcacctgctcgtcggcgccatggagatcggcgccgggctgatgacccgcaccgtgcccgaggacggg

SEQ ID NO: 422838 - DNA, 102 bp, Homo Sapiens
tgtgtgtagcaacaataaggaagggtccccaggttggggagagcccctagtgttgagaacaataatgaacgattattgattatgaacaagtgttaaagacag

SEQ ID NO: 422839 - DNA, 115 bp, Homo Sapiens
cttcctttatagcttacttatcaggtctccacataacggtgttggaaactttcattcattcatagtcttcaagatacaattgtggctacccacagaggtaccgatgcgtcgaatt

SEQ ID NO: 422840 - DNA, 327 bp, Homo Sapiens
gggtatgcacaaggattataaattatctttttctaggatttttcatatttatactttataaactcataatcacaatttacatataatctagtcctttcatatgcatcttttcatactactatatacctcgcctatttatttttattgagatatataaccatccaatgaatggactaatcctaatttactcagctatttctcttcacataatattgttcacttccacattttcattgttacaggtaacagtccatattttttatcattttccataagctagagccccttatatgaaattactgaattaaagattatgaactaacattt

SEQ ID NO: 422841 - DNA, 477 bp, Homo Sapiens
gcacaaagggtatagagtacggggttagtacattacacgtcaacaaggatatgggtttgaacccagacctcagtttgaatctgagttccagcactgccccgttgcttggccgtgagttacttcacctcctttagcctctgtctcccctccactacaataacacctgcctggtggggagtgaggatattgcgcgaatcagaagtaataacaggtcgttggcacctaagagactctcagtaaccagcagtcatcaccaccgtcgtcgtcttttttttgggccattacagttgggattagactaaccctccctaagcagctattgagcctcacactccctggacaaagacatgaaaaactctggatgatttggaagggagatctagaaatggtgaaaggactggcaagtgcctctgtgctgatattgtacctgggctcagtggtctggctaaaggagaggtgctggggccaggtgacagg

SEQ ID NO: 422842 - DNA, 157 bp, Homo Sapiens
tgcacacatcaagacgtctacatcataagcatcctacaaagccaatatgacattccataagacatggtttcggcccactctccattcagtcgtaactaataaaatatatgttgggtcgaaaccatctcaaatggatttcatatagggaaagaaggct

SEQ ID NO: 422843 - DNA, 144 bp, Homo Sapiens
ccgaggagaggaaccagatcatactaaggaactagagcctaacaaacagtgcacttccggattgttcttgagctgaagtacagcacaatacagacctaggtcctctgtacaccagagctcaatggttggtatcaacttgatccc

SEQ ID NO: 422844 - DNA, 315 bp, Homo Sapiens
tacacatgaggtccaccaagttcaccaagtttatggctcaattactaaagtacacagaaacaaggaaacagatcaagccgatgaaggacttgacaagggcttgtgtttaaaatgtattgctgccaccacgtgattttcttccattccacaaccttatataacttaagtcctcagtcatatctacagtatcaactgctatgatttgttgaagttaattcctgcctccatcacaaaaatcaagcaattatttatcatgctagtgttatttttgcccagtggtttcaggtacaactttattatgagatagtgaaactc

SEQ ID NO: 422845 - DNA, 135 bp, Homo Sapiens
ctgcttctcaagaaccagacgtgcaagcctgggttatgccatgagtgggtttatgcatgaggaatgatggagggaagagataaactatggtaatgcagtaccaatggtggcctctgcctaccccagtgggagcct

SEQ ID NO: 422846 - DNA, 141 bp, Homo Sapiens
ctctaggtgaatagaggtgatagttttcgctgactatcatatgtttcacagtatacagcagaaagcacagaataaggctttctgaagtatatgaatgattgtaaaccgactaatcttcctgatattggcaccggaagtcat

SEQ ID NO: 422847 - DNA, 184 bp, Homo Sapiens
tacacattgaggctccaaacgcaggtgtcctataggcgagctcaggtaagatagaaatcgtctccgtgtgagcagaagggcaaaagctcgcatgatcttgattttcagtacgaatataggaccgtgaatagcgggggcctcacgagtccttctgagccttgttgggcttctgtatccgggtatg

SEQ ID NO: 422848 - DNA, 200 bp, Homo Sapiens
ttgcaacctggccctgaggagtattctcagatctgtatagagtactcttgggaagaaatatcttagtccagatctcccatggcaataacctgcctataagatgtgcaggactggcaacatataatggggctgaaattgcatataacctacaactcagtgtttccactcctagactcacacatgtccatagggagacatgt

SEQ ID NO: 422849 - DNA, 300 bp, Homo Sapiens
tgtcggttttctggtccactctatgaatagtcatctttatcattcagattaaaatgttttctcctgtatttaagtacccacagttactcaccaccctaagtcctgacaggcaggcaccctgtcctctcattcttgggatgttggagcattagacggggggacgatacaatttaatgtaatctttctggcataatcgccccacctaggctggaaggacagaagtgggactttatccaggtgcacagcagctacagcaaccagcacgtctgcttcatcactaactcagaagagagtgtggga

SEQ ID NO: 422850 - DNA, 341 bp, Homo Sapiens
attcattttcgctcaatagttgtaatggggagtgagctcactgggagctagaggggagagtgcaggataagtaggaacacatgatgctacaggagtgggataagtctctcactgcctaaacagctgctgatttagtgacctctactagcaaaattttcttcctccattccacctaagattggaatcatctgatagtatgtggttgcaaaaactgaattcagcattctccaagaaagacacaaaaagtttatgctctgctttagacttctatgcgaaacttagcatagatggtgatcagtgcttccacctttctttcaaacacaagcaaacaactcctcaat

SEQ ID NO: 422851 - DNA, 337 bp, Homo Sapiens
atcgaccccggacaattcttaaattattggtacacaccgcggaaggagtcttcattctgggtatctagtctgtaaggggccacttcccctggtagtcctttttagttcgtgactgccatttcgaagcagtgatggttgcatcccagcaaggttctggagctactcagggcagttcatcaatccagctaatgacagtgaagattactgattgctctcagctattcctgtgacatggtttatccctcatccaattctccacgtttgccatttgaaatgttatatggtatgaactgtgtgctaggaggaaacttacaagtatcagagttaaaattcgtgt

SEQ ID NO: 422852 - DNA, 352 bp, Homo Sapiens
aacaaccccggacaatcaaccatatatgagtgctcaacacacactaggttagaacgtgtaaatctggctacagctcactgtgtggctattggaatacagagtgcaatccataaacttttctactttaatgtcttccaaaaacatcaatgaacggtgatttaacagtgatttagaatgctgcttctttcaacttatcttaatttgtcaagaatactctgtgtattttaaggccatacaatttataaacgtagtatgtctctctgtgtagaggagaattatactggcgattgtcagaaactgacgcttcttcgatgcatcgaggaattctttgtagcccaatagtctgggattt

SEQ ID NO: 422853 - DNA, 201 bp, Homo Sapiens
aacaaccccggacaaggtggcaagggaatggcacgcacaaagctgagcagtagtcaggcaactctgggtaactttatggtgagagcaaagggcggggaccacagctggaataaagctaaagaagaatggcaagaggccaggtcacacacagccttataggccctgtcaaggattgcactgggggttggcaagacaagtgag

SEQ ID NO: 422854 - DNA, 172 bp, Homo Sapiens
  misc_feature (79)..(127): n is a, c, g, or t
aacaaccccggacaaaatgagagcccgcctccctttgatatgtccaagctgaggaagacttcctgatgactgtcatgtnnnnnnnnnnnnnnnnnnnnnnnnnnnnnnnnnnnnnnnnnnnnnnnnngagtaatacaaccccagggatcaccacccaggattaataaaatag

SEQ ID NO: 422855 - DNA, 233 bp, Homo Sapiens
tagcctggtcgaaccgcaaagtcagctcagttcaagtattcgatgctctcatctattcacatatacagtctgaaatacctctttccaacagatgctcagatcaatacatatttaaatgcactctttcttacacatcatgcatacatgcaaaacctatacaccaaccccactacactctcaaacccctgcagaatcaaaccaaagttaacttgtaatggtaccactgggcgagg

SEQ ID NO: 422856 - DNA, 244 bp, Homo Sapiens
  misc_feature (159)..(180): n is a, c, g, or t
aacaaccgacaagagaacaacagagacagagtcagaggcaagggcagggatgttgtgtggagtcagcttattggggtgaaatgacaagaaatggctggataggaatggtagtatcagatccatgtagggtatatagtacattatatagaagagttgtannnnnnnnnnnnnnnnnnnnnnactataagagataggaagctaatagtgttggcccggggatgtgtgggtaccgagcctcgaatcg

SEQ ID NO: 422857 - DNA, 270 bp, Homo Sapiens
agttaggtcaggaaatctaaatagttttgtggctgtggatgccagttacagagtcatcatgtaaaaagatgaagagtacagtgggagggtactgataaagtccaggggaatgagagtacccactaaagcagatgtgagctctgtgtcagagtgcaaatatgggccctgagccttctgggcactaagagctcaagggtatgcatgagggagtggcttggagtggaagttgagctaggaccaaggaaaagagggactacactaaagtcttat

SEQ ID NO: 422858 - DNA, 310 bp, Homo Sapiens
ggactgcgtgctcacggtgctctactcgtgctgggtgcacatgtcggttatggttgcattggtgcccagacgttgtgcggtcatcattcatgactcctatgtaccttctgttcggctaaccatcatacggtaggcttgcgactgacccgagtacgggcgttggttccggctgtcacaccttgtagctgcttcttcgctcatgaccagtgttgccttttatctgtccagcacagaagagtcgttgacccacatgagtctccgtggaatgtgtgatctgacggtggatctcagttatcatactgaacgccgt

SEQ ID NO: 422859 - DNA, 202 bp, Homo Sapiens
ataccaacccaggatagcgcttagacttagggactgggcagtctagggtcccttaccaacctcacagactcattgtgctactagcaaagcttctcatccctcagagactcaattttaccatctgggcagggtgggcttgttcctgtaccatacttggtgcaaagactctgctagcaaatgactttcttgggtatcttggcat

SEQ ID NO: 422860 - DNA, 351 bp, Homo Sapiens
tgtgggtctagatgcattcaaaattataaagcagcagaactcattttttggagcggaaaatcaatgctatctattgtatgtcacaattacatatttgaaaatttgccaagaattttactatttatcctttctccccagggttgaacaaaaatattatggaaaacatgggctaattagtagattaaaatagagtaataaaaattctattaatgatttatagggtttgggggcaggtattactggcatacaatgcatattaattacaattttgaaaaatgtaaacatgtgcataaaacaaggtctagactagaactctctagtagaacttctgagataacagaagtctgtatt

SEQ ID NO: 422861 - DNA, 122 bp, Homo Sapiens
cctgagttacaatcccaggacaagaagtccagaggtaagggagagaaggaagacaggttcggggttggttaatttagtggctcactgatctaatcaaggaccccgacactttgcatctttat

SEQ ID NO: 422862 - DNA, 240 bp, Homo Sapiens
cgtacacactcagactgctgggaaaacttcccagaatggaggaggaagccaaaaaaatggcccagtcccacacaggtgcttcacgtgagctatgggctcccagacagcagccgctgagctcttaggaggttgcgccgggtcccaccccatctccaggcatggcagaggtgtgatcctgagcctgcctaggcacctgctcctttcagaatggtgaagagacaacagattttagacatccct

SEQ ID NO: 422863 - DNA, 239 bp, Homo Sapiens
gctaccatcgtcttttacaataactataaaacttcaaaactcaagaaacttaatttagcaattggctgaaatttacatttatcattcatcccataaagcaaacatttcactcaagcaacatgaacggtgcaaattcacagagtatcacatttaaaccagcttcagcaaaattatttcaaaccatcaaaatttgcatatgctcaaaagtggtcaggcatgaagcattcgtggagggtacc

SEQ ID NO: 422864 - DNA, 139 bp, Homo Sapiens
aggagtttcctttggacaggtaatcttgggatgtcaaagggatacagttatttgtctggcagtgtcagggcaatctgagtttctcgagtaactaggaggaggtaatctccagggaagcgttttggtgctcttgatgggg

SEQ ID NO: 422865 - DNA, 122 bp, Homo Sapiens
actcgaggatccctatacactcttcgaggaacctaccggactctagggctacgactttgaaattactgcctctgtaaattcccacgtctggtcttcccccagccagagtggttcctgagcac

SEQ ID NO: 422866 - DNA, 201 bp, Homo Sapiens
tgtctgtaaacgagagggtcatatcctgggaagcagaagttagaaatgacgtcagagaatagatatcttgcgtgcctctcccatttagaattagcctctatataactacatttaggacataaagttaatctatatagcattggagatatacaaggataaggcatcatatgaaatgaaatttattgtggtaataaaacatga

SEQ ID NO: 422867 - DNA, 267 bp, Homo Sapiens
ctgagaatcgtcatactacacgggtggtatacgagttggagctcacggccggtagtgaaatggattatagtatcctataaccattccacttagtatatgtgaacatctttttatgctggtaaatatttgtctaaacataatgaaatgagtgaaaatggtgtataaatgtgtgggcttacctacatgtaattgatcttggaagaagtaaatggggattattattcagggtactcaaaagatagcatgagcaatctaatactaaatgag

SEQ ID NO: 422868 - DNA, 313 bp, Homo Sapiens
ttctcgtggtcctagcatggatccgtggagtgtatgcaggtcggcagtgtcacggtctcatgtacaaaactgagtgtggtttcgtacccataacacgttattaacagaaacatgttactctagactacattatttttcatccaaagaggctactacaccaaacaaggtatgtgaaaaggaagcccctatgactggtctaggacatctttgtgctgacttcctagttcacctgatcccagtaatgtatgaaaatgcttttctcctcatggacccagtcggtgtatactgccaaacttttcaactattgctaata

SEQ ID NO: 422869 - DNA, 278 bp, Homo Sapiens
tatagtgggagctagtttctaggtggatgcaggaatacgggaatgagggactgggaaggagagctgaaacgaaggattagttagagcatgtaggggaggtggataggattaatagaaataagtgagatgaataaatgattacgtgataactagttgtaatatattagctcttccaagcaattagattatgctaagaaacatttaaaaaatatatagcccaaaggactgaatctaattgtgggatttcaaacaatacatggtatggtggtaggcatgaa

SEQ ID NO: 422870 - DNA, 321 bp, Homo Sapiens
  misc_feature (183)..(210): n is a, c, g, or t
agaactggatgcgtacacatgtggagaggatcataagtatattccaggaatgatagcctcgtgtcaatactttagaatgccacagctgacagcaaagaccacttaggggctaaagaatattagtcagcatgacaggcttcatccgggtcaagaaaggtttcacctctactttaatccacctannnnnnnnnnnnnnnnnnnnnnnnnnnnctccttcttagcactgctagtgcaactagcactaagagaacttatgcatgaaagaggctttggtgaggcttagatgaacttctattcctgcagaaagatgcaaggaattac

SEQ ID NO: 422871 - DNA, 318 bp, Homo Sapiens
gggtaatatgtttataaagtcacgcagaacactgagtaattgtgtgacagagtcaccctatctctaaagaaaaagaaaattcctggcaaagagaacagtcagtatgaaagtacaaatgtgtcttagtgcccaaacaatattatctactcgaaagttaagatgataagttggaataatcaacattagtgctaaaataggttcatcataaacacctcccaggctgtagaagcagtaacttcaacttgttcagtacttcccggagctgtccaaagaggatttctttcttaaaaccctaaaaacaacttagataaatagaga

SEQ ID NO: 422872 - DNA, 180 bp, Homo Sapiens
gcgtacatctgtgagatagctgcaagagataagcagaaattcagcagagaacatttacttacttaagatctatagccactccagtctagacgataaagatggatgcatttttataatagctgggagccttttttttgtttgtggggcttcccaaagaagttggcgcggggtcaagggtgt

SEQ ID NO: 422873 - DNA, 123 bp, Homo Sapiens
cgagaggatcacctcgcagaatctgtcatgactaccatcatgaggatatcatagatttgtctatcacgggtaaaaagtcaccagataatatctagagtttatgatttaagagattccagttaa

SEQ ID NO: 422874 - DNA, 180 bp, Homo Sapiens
tattgatatagcagactactctttgatggggaatggtaaaattgacagtgacactgtgatggttgctgcgaggatacaagttcttgactatgagaaggtgcagatggagcatgagtgcaggagacagagtgtgggacaggcatctggcccagcccaggaccttcctggaggggcttggac

SEQ ID NO: 422875 - DNA, 161 bp, Homo Sapiens
cagcggtcctatgtcatcctctttcctcgaaaaatttcagcaaggcagtctattgcatcagcacagaggttgtggcttgccagttacggggatcacgcgggtctttcaatgactatgtgctttggcagaactaaaaaatgcccgagggctccaacctcagg

SEQ ID NO: 422876 - DNA, 280 bp, Homo Sapiens
aaatctatttgctttatatgtccgtgaaacatatgcttcatgcaaaccacctatgtgccagatactggcatataaaaataaatgaaatgaagcctgcccttgaaaaactcagtattaattggagcacacactagatgatgcttagtgcttggagggagacatacagagagtgacccggcacataagatcagatattttcttcatgatattcaggcttcccttcttcttgaaagtgttggatatctcctcctgtctgacgatttctccaacactttcaaga

SEQ ID NO: 422877 - DNA, 315 bp, Homo Sapiens
gagtattggtcatcactcttggtcgatgtactactgtgtacccttcctgcagaggaagtttcaaatgactcctacagccaattttattgtactcaagttatggattgctactggaggaaaagatcacatggcttcagggatacagtcaaagatttatggtcttcaaccttaaccaggtggacaaaattgctgggttggcagttacgtatgcctagtctctctctctattcttatggtcgctgttgcctgtctggactacttagaatcccctacttctcttctcgatgttattgggattttcaagttgttttatat

SEQ ID NO: 422878 - DNA, 126 bp, Homo Sapiens
ctcagacgactcccacttcctacgtctctctctctacttcttatggtggcgtttcacattctttacttcttaaaatcccctacttctcttctcttttgggtggggattagcaaggttgttttatat

SEQ ID NO: 422879 - DNA, 129 bp, Homo Sapiens
tccagagttcttcagtgaccagatagctaactgaggcttgagagaataatcttaccccatgtcatagtggtacttccacttagtcgactacttcagaaattctaaatcaccttgtactttgctgtacca

SEQ ID NO: 422880 - DNA, 108 bp, Homo Sapiens
aatctagttacgggtgtggtccactatgaccatcagagtgcgccatggggagttctcacagggcacatgctccctgtaccatggctcacattgtcacccaagggtggg

SEQ ID NO: 422881 - DNA, 112 bp, Homo Sapiens
tgcagtcatatcacaaagacggagacacatatgcctacacatgcacagacacgcatgctaacgccttccaatatggcagccaaggggctcttgctgtggtcagtggaatggg

SEQ ID NO: 422882 - DNA, 219 bp, Homo Sapiens
cgtggctcgtgtgttcctctagtcggaaagggcctcttctctttcttcgacctgaataattcctaagtagtctgcctttgactattcttattagcaccaaccttgcactcttctctaaatgtacctttgggtgtacagtaacgatgcagcaattatgtaccatcttttgatttggtgttgtcgggttaataacatttcccaacaagcatttaggcttga

SEQ ID NO: 422883 - DNA, 214 bp, Homo Sapiens
tggagttcactctctgtatctacttctacactcctgtgctggttggaatgtgcaggatacttcatagatcaattgtgtcattaatgaggttttcagagtgtgttggttgctgtatcatttaaatagctctattcattctgtagtccaaatgatgcttctggcatcgtttttctgcattgtgagaattcgccattatgcctacaaaatttacttc

SEQ ID NO: 422884 - DNA, 317 bp, Homo Sapiens
tatagtaaggagataaagaaggcaactttatttgacataggataagatatttaaaagcaaatttatagaattacactagactatactgtcaaatccattaatccagtatccttgaggtataacctaccccatcttttgaatgcatttctaagtcggttacaaacatcagcatttaaggatgcatgttatcaactaatgttcagttatatagctttcaagataaaattaacatacaatgtcatacactttttctgactttttctttttatttgtccaattgaagatctttattttcatggcaggcttgaaaattttgg

SEQ ID NO: 422885 - DNA, 112 bp, Homo Sapiens
ggtattcatcactgatcttaaccttcaccaaactgtccaaaagattttgttgccttcaccttgtagtttcttactgtatactgtgtctataatgtgggtgatgggatttagc

SEQ ID NO: 422886 - DNA, 272 bp, Homo Sapiens
ctaccatcgtgctggtgtgactggcgtgagcctctgcccggctgatcttcgtcatttcatttagcatacaatatgtgatattcctaattactttatgaagtcatcactgacagtctgactttagagacaggaaaacagagaaattaaagaacttctccagagccaatattggacttgagccgcatgtcagaaatatttcctgcttctgcatctcggagtcaggtgccattacttgtcttcagaaccttaaactttcgtagcttagctctgcc

SEQ ID NO: 422887 - DNA, 272 bp, Homo Sapiens
tgacgtaagatatgacgaacagagcacagaagaaaaagggacgtgccgaggtattggaaatgagcaaaggtataaaagggataatttcttatagtagtgattctcatctttttgtttccctagatttgcctctaaccaagtgatgacacagagaatgccctcaatttctaaagtcccttgcctacccataattttgaatgttaccaaaacccacagatctaatgtgctgatcagttaggaaataggagactcctatctgaaatactacttct

SEQ ID NO: 422888 - DNA, 171 bp, Homo Sapiens
gtcttctaaagtggaatcttaccaagactgagttagataaaaataaagctctttgattctttatgtctttagatgtgcaggacacacagaagtttttttggcttcttttgcttattatctactttgtgcttattatctactttgtctccctggtgattaagtaaacccatg

SEQ ID NO: 422889 - DNA, 193 bp, Homo Sapiens
taagagaggactctgggaagagcagaacatccctatacgagtgatggcatgaatgaaaatctcagtagacaaaggaaaagaccacgaatactcaccaggcagaccctccaacatggggacaaatcaggaaactggcacagatggcagaggacaatctgagagcacagaacaaatcacaaacaactagtaacct

SEQ ID NO: 422890 - DNA, 113 bp, Homo Sapiens
ttatgttctcatttcaggacgtatctgagtaattgcatccattgtgatgtgccaccaaagagaaaaatacttagtttacatagtcgagtataaccaaagtacttttctctttg

SEQ ID NO: 422891 - DNA, 269 bp, Homo Sapiens
ccctactccttcccatttgtgtcataaatacagtgtcatcagctatatcctcatatccaggagcaaggtggaactagttctttgggcttccatagcagaatgaaaactcaggcaactcacattcttggtcatagaaggtgagttcttccctgatctcagaatccaaatggtagtagaatataaaatcaatgagtttgtgctggtccttagggtagatttcaggaaaacttagaaaggaaatgaagaaaataaattgttgggcgtacggg

SEQ ID NO: 422892 - DNA, 168 bp, Homo Sapiens
agagtacttgaatccctaggaatcggcgaggagaaccaaaatggtaataagagggtaaatataaaaactccataaatgtatacttgctcttcattccttttctcagtttctctaacataaaattatttaaagtaacaattagaacaagtattgttgggcgtacgggga

SEQ ID NO: 422893 - DNA, 266 bp, Homo Sapiens
ctgaccccgtacgccaaaaggcggaaggagtaggactggaagtaagaatagaaagtttcttagtcactgtgatgtaacaactctgaactttagaacaaaaggtacatcttttatacttgtgttaaagtgaaaaaaataattctttaattgtgtaatgtttcatatgctttttaaaatacccatatggaactgttaaaaaggcagttgtatatatgagcctagagctccaggtctggattaaagatacacacttgggcgtacgggga

SEQ ID NO: 422894 - DNA, 170 bp, Homo Sapiens
tatccccgtacgccaaaaagagagaggagtttgactatttgagcttgtctgtgacacctgttttgtttggaaaatgctaatgaaactagttggcagagctgcatttttgaagttgtttcatttagtcacagtgatagtcatctgtcttcttttaggaggtgattgtctag

SEQ ID NO: 422895 - DNA, 344 bp, Homo Sapiens
cgcgcaaaaggcaaggtcagtaaaacagaagatgtcatttccaagtggctctaaactaataagatctgttaaagggacaaaccagcccaaggaacacatcacgtgcccctccatctgtcagggacaggagccaacgggcatccgatgtgcactggtgcagcacccactgaggcacaggcagtgcccccgcggctcatccacatattcctgggagggacacatcaccaaagggcaaataaaaaacgccgctggaaacgccaggatacccggcacaggtgcttcttattaaaagaaaaatgggacggggcgcctacatgcctgtggagtctgcttactgagaaaac

SEQ ID NO: 422896 - DNA, 283 bp, Homo Sapiens
ccgtacgccccagcgcgtagaatacccctcttgtggtacaggtactttaattactacaggagatcctagtagctacctcactggtcactaaagggttagataagataatgtataagacagttagcaccaggaatgagggaattgtccgggaataagtacctggtaattagtagcttttactattatctaataatagttcttgatatttacttagtgctttgtactgtgaacccatacactcctgtgtgcttatctccttgcgacaatgggacgtaccggggag

SEQ ID NO: 422897 - DNA, 156 bp, Homo Sapiens
tatggtatttcccataaacagtgcagctaagaaacagtttagcagcaaaatttaaccaggattcagattatatcccattcttgtctctcgggcctgagaggtaataaattccccatatgggtcctagatcctcccccaaatggttttcccccatct

SEQ ID NO: 422898 - DNA, 163 bp, Homo Sapiens
gcttatacctgagccataagctcctcgagaaaagggtgtgatagaattcctttgcccctcagagctggaagatcatcattgataggatcctgatgttaggtatgcccatcaattacgatgaaagttctttcctggtttgaacttgcggataaaagactattac

SEQ ID NO: 422899 - DNA, 112 bp, Homo Sapiens
cgatccttacgtacgcccaaatctgtgccctcgactctagactctacctacttatttgcctactcaacatctgtttggtgtctaaaccagaatctcaggcataagacgacac

SEQ ID NO: 422900 - DNA, 143 bp, Homo Sapiens
agtaaaaaaataacaatagatgtgggctgatggaccaccctgttgaccctgacatgttcgaaagactgttgtgagggacaacatggcctatatcgctagtgcctaggcactcccatacgcgacaccgctaaggcaacttactt

SEQ ID NO: 422901 - DNA, 269 bp, Homo Sapiens
accacctcttctcctttctgttatcctggagtacccacagtatgttacttgtggcacactcgaatcttctctttccttacaagactcaatgagtcactggccctctttactcagggacattgtgaatatgcaggacccaaagaatcctgcagataggcactgtgggaccaattacttctgaaatcattgcaccaactcataggctactaataggcagttcactgagcaacaggatgcaagaaacagcagcatctgaagcattcatttac

SEQ ID NO: 422902 - DNA, 189 bp, Homo Sapiens
tgcagtaattggagtgggtttgatttaaagtatttcaagtctctttactattaaatataaagctaatttttaagattcagattttgaaggattgtaagagacccaaaagattgccttattgagttgaggaagttccctttattcctaagtttgctgactagtttttatttgtgattgggcgtacgggga

SEQ ID NO: 422903 - DNA, 350 bp, Homo Sapiens
aacgtacgccaatgtcattgcggattagtacactgacaagtcctgtgatagagggactgtttacttttgtttcagccagcatcatgcaaaatgtttttgaccataaaattctttttttcactgctaaatatctctttaacatcttgcagaacacacatactggtcaagtgccgtgcaaatacagaacctaaccaatgccaggagggaaaaggatgttaacaccagccacacgtctgaaatcttaaagctacatgcacataaagggaccctagggttatgcttagtgcttctgaaactgtttagacattttagaccatgtgggtgccatggttaagatactttatctgctc

SEQ ID NO: 422904 - DNA, 261 bp, Homo Sapiens
cacatttcaaaactacaaccattaatctcttatggtggttgtctaaagctttatctccctactttaaataatgactttgaaatccatctcacccccaggcacagatccaagcctaaggaaatcagaaatatacatacctgcatatttggaaaagaaagttcccctaccaggtaaggattctgcattttcattccttgtctttataagcaggaaaagccccactcgaggtcccaggccctaccccttttgggcgtacgggga

SEQ ID NO: 422905 - DNA, 266 bp, Homo Sapiens
gaggatcctcccgtacgccaatgattatcagtgttaccattattccagagcacaagtaaaatcagaattgactacattgtcctcctatggataatgccaatgcagatggagtagctgtctggtggcatgtgagctcctaaaggcaggttcagttaaaagaagcaaagaaaagtaacctcggttagggcattctcctcaaagcaaccaaagttagcagaaacactaccaaattgatgggccaggtaagggctagcagggtgcccagg

SEQ ID NO: 422906 - DNA, 301 bp, Homo Sapiens
acgccatatagatgccaacctatgatatagcagtctcacgaagtctggagttttgcctatccaatggccaatctcaaagtgatcagaaacttagatgagagactcagagtctattaagcctggattcataaaactgctccgtgaaagataaagtaaacacattgtgaattgacacaaagtcctttagaaaccaggcccccaggttttaacagaccataattgaggcagcacgggctctggtgcaaaatcccccaagccacttttggggaagaacccaaggccaggggcgggaataaccttt

SEQ ID NO: 422907 - DNA, 128 bp, Homo Sapiens
ggcgatctacgatccttcccgtacgccaatgctgagcgacaaagtaaaggtgaaaagaacacttcccaatcattcagctacaaccagactagaagctccccaaggactggctattctaaccaacacag

SEQ ID NO: 422908 - DNA, 120 bp, Homo Sapiens
gatccttaccgtacgccaactcttagacacaacttcctagagaaatcttccaggcataaattactatgtaaacagtagctgtgtctggaaaagtgggtacataatttactattccaatac

SEQ ID NO: 422909 - DNA, 254 bp, Homo Sapiens
cgccaaaacatacctttgtgtatgtgagggcattcagagattttttaagcgataatttttactgtactttgatttttgccctatatgctcactttagaatcctaaggtgggacttcactgtcatcaccacttgtgcccctccatcaaatgactacgtgaggtagtatacaaactataatgcccccacttctacagacgacggaaacaccaagagaggttatgcaacttgcttggcaagagcacagggaaatttt

SEQ ID NO: 422910 - DNA, 156 bp, Homo Sapiens
  misc_feature (128)..(128): n is a, c, g, or t
caataattttactagaatgtcttggtattggatatttggactccattttccaaggtgtttagcataatctttcaatatgtcgtttcaagtatatgcttatttcaggaaacctttcctagaattatacnatcttgtattgttttgggcgtacgggga

SEQ ID NO: 422911 - DNA, 223 bp, Homo Sapiens
acgcccaaggagggagtatagcggaaactcatcttcaagcaggtgagctcacgaagttccagaggtctggggcttgtgactggtgtctgaagaaggggggcagtcttggggacctgaagccttcaaacctgtgggattctgatgttatctcccggtagatagtattgggattgaattacagaacaccccagctagtgtccactggcagaaatttgattgcttt

SEQ ID NO: 422912 - DNA, 171 bp, Homo Sapiens
gctctaagatctctccccgtacgccaaaaataaatatagggcttgtattgactaattaagtctgtgccgtcgctacagaagccctttcctttttcttaacgacaatttctcatctgtggtgctattgacatcttgggcgtacggggggacgagctcgaatcgatcatggtc

SEQ ID NO: 422913 - DNA, 318 bp, Homo Sapiens
  misc_feature (197)..(265): n is a, c, g, or t
tctacagattctcccgtacgtcaaaaaaagaaactgactaagaattggggatccgaatattataagaactagcacagagctattagaaggaaacgcaacccagtgaaagtgggcaagacttcgtagcttcacggagagaatgtgacgtagggagcacaacggcaaattacccacaattttccaccagtggaaatttnnnnnnnnnnnnnnnnnnnnnnnnnnnnnnnnnnnnnnnnnnnnnnnnnnnnnnnnnnnnnnnnnnnnngcattgtctcatactattgaatcatttggaatagattgggcgtacgggggggg

SEQ ID NO: 422914 - DNA, 456 bp, Homo Sapiens
agctagccagttcacgatgttgtataatacgagtttgaccctacgacagcatcccgtcgtgagtcaagtgttagaacctccacagggcttagaagggtgtagaaggggcatatatgaacgtgattgatgattagagacaagaagtgagactgcttgagtccatcccaaagaaccctgaggttttgggcactcagacctaccagagaggaaaaacttttctttttcattatgtaattcctccctaatctttcattgaccacagaaagttttttatgacaggtaccagcccaggaaactggaggggattcctgattaaaattcttctccatccctactcccctcaactcccagaacacagtatagatactaatatgagaccctggcatgtgtacttactgtgtgccagccgctgctctcactgctttcatatgtatattttatattaattcatgggat

SEQ ID NO: 422915 - DNA, 105 bp, Homo Sapiens
ccgacgccacgataataccttgtctgaaaactcacttatacaatttgagtatactttatattatctctgcaactaacatacatttaccacctgtttacactacca

SEQ ID NO: 422916 - DNA, 148 bp, Homo Sapiens
gctaacggcccaaaaaattaagggaatcacaagcaacattatttgtggaggaaatacgttgtagatgttgaaggaacaataaaatataacatgagctgggttgagggtactataaaggatttattatgggaggtaagagggtccactg

SEQ ID NO: 422917 - DNA, 225 bp, Homo Sapiens
tgtggcttcaaaagtcagatgctcaggatgtacctagggagatctgcgaaattcagaatagtgttagcgcgaggatgggtcaggactggacgctgtgtagcgtgtttaagctctgctgtgattatgctgaacagcctggtttcgagatctatggggtagaatgggcatagcagacaggccgggatgctgcaatcagcggtgccgcttgggcgtacggaggaatga

SEQ ID NO: 422918 - DNA, 119 bp, Homo Sapiens
cgtacgccaaaaataatgcacttatattttttctgctacagatcactgtttcagaccacacgacaccattacacttacgatacccatttcagtatgtaacctaaaccacatttgggtgt

SEQ ID NO: 422919 - DNA, 325 bp, Homo Sapiens
cttctcaagagctgctatggtaactggctaccatatgtgacgggccaggtctattccataatcagtgagcagagacaaatgtttagaaggatggctccaaaatggtccaagttgtgatcctgggggtgaatttatggtaatgttggctttcgtatttatgtgtcccttacggttggttggtaatgataagagtaatcctgtataggtaaagaaaaattaaactgcatgcatttctgagggaacaaagagagaaaacagctggttaggtgtcatgaagatatacgaagcagccctttctaattccttgttacaaaggacagatcct

SEQ ID NO: 422920 - DNA, 160 bp, Homo Sapiens
atgatgaactactcgaaaactgactacatactatgagctacgttataacaaatgtcctagaagacagaatgttatgcagctattacaacagattaagatggattactactggccgggccaaggtggctcacttaatttaatcttaataacatttccattt

SEQ ID NO: 422921 - DNA, 135 bp, Homo Sapiens
taacataaggtggttagggacacgctatccctggcaatgatacactttcatttagctgaggcctaaagctaagatgaacccagccttactaaagagctaggtgcagagtgtttatgtctgaacactctaagctgg

SEQ ID NO: 422922 - DNA, 563 bp, Homo Sapiens
  misc_feature (303)..(439): n is a, c, g, or t
aaaatttatgcttcagctgtagacacagtttcaaaactaatcaaaatggggccaatacaataggacatcagagcactaagtagattcctctattttcagcagtatagaacagacaaaatactaacatgtggtttcacgtgtgcctacttgtggtaatattcttctattttcttgttcatatgaagtacttaaaatgcaaattccttggctaactatatttatattttgctggtctggggtgggaaccctggatgccactatgaggttcacctagtaaatgtcaataaacatcacctacaaaannnnnnnnnnnnnnnnnnnnnnnnnnnnnnnnnnnnnnnnnnnnnnnnnnnnnnnnnnnnnnnnnnnnnnnnnnnnnnnnnnnnnnnnnnnnnnnnnnnnnnnnnnnnnnnnnnnnnnnnnnnnnnnnnnnnnnnnntctttctatcaccatattacagctttaattatctttctttggtgttcgacaccctagctaggaactggttatgtgctatgcaacattatggaccaattccaggttagtgatatatatcagaact

SEQ ID NO: 422923 - DNA, 496 bp, Homo Sapiens
cggacaatacgcctgatccatgagagacactggtagatcgagagtacagaaataaatgataaattctgtattaagacaaataactgtcaaatttaattgcagaatctaatttctcattttactagcatagcattttcccaaaatgtaaaatcaactttgaatattttatctaatcaagggacagagataccatgaaatatattccaagtacttatactggtgttaacttaaaatttatttcttactgaactaatttgataactgatttttaaatgccttcatccctgcaatttattccattttctattatacagggactgaaaatgtcactgatttttagcataatggctaaaaaaggtggccgagacaaagaaagaaaatgattgatcttatgtatatagtaattaggtttgaataagagaattgctctgggatggtaatcaatcttaatgaatgaacaactatgatacatatacagatgggcgtaggggaggga

SEQ ID NO: 422924 - DNA, 196 bp, Homo Sapiens
  misc_feature (144)..(144): n is a, c, g, or t
  misc_feature (160)..(161): n is a, c, g, or t
acctagaggatctctccccgtacgccaatacttgcaggcacactaagggttccaggatttcttctaagagcaacaatatgtccttgaagtattgggggtacatgagcatgacattattagagttgcattttcaaaaggtcttcntgtgtggaaaatcttnnttgatgaggagagagaaaacgatgtggacgagaca

SEQ ID NO: 422925 - DNA, 117 bp, Homo Sapiens
agtgatccccgtacgccacctatgtaaaacttggtggtaaaaggctggaaagaaaaaggcaaaggtcaacgtagttgtaatcagagtggtggaattatgccttaaaaatcctctttt

SEQ ID NO: 422926 - DNA, 180 bp, Homo Sapiens
ccctggttagtctgtggcactctatatacttctgtcaaagacttaaaaccacagtgtaattgttttccgtctgtctttaactcttcaaaaagaggaaaatggctctaaaaccattgagaattagcactatcttttatcttcctttatcaagagaaggcaacccgggcacgggtaccgagc

SEQ ID NO: 422927 - DNA, 134 bp, Homo Sapiens
aatcagacccaggatggcatgtgcaggacagcttaaagagcaacttccaaagcaagcagacagaagaatctaggagaggtattccccaaaaagatgatattgtgggcaatacttattttatttatattgacaag

SEQ ID NO: 422928 - DNA, 596 bp, Homo Sapiens
ataggatagcctgtgtataaatctgtgacaaaggcaaagacactgtcttaaaattttaaaaagtcattcatgatttatttgacttcctctctggtttggagaaactttcatttttaagttgaacatgtagaacaagcagtggtatgagttttccttccatagttctttgcttgtttttcttcaaggagaccaagagaagtactagaaaatgaacatcctgttaaaaaaacaacttctccatttgtcggttctctgagctctgatttctaatgttacccctatatcatagctatttttaaaattatcttaaagttaggaaattattatttgcataaatattctcatctcccctaagtaagctgcatgaggacagcatgcagtgttctttagtgaaaatgcttttcggttcagctagtgaatgaatctagattctgccatcagcctccctatctaccttttttcttactagtatctgacactcttctattacaatcatatgggtttcctcactctttcttggcaagctcattcctgtctctgcatttgtagcgagtattttccctgtcaggactgctttttctcctatcacaagacga

SEQ ID NO: 422929 - DNA, 189 bp, Homo Sapiens
gacagcgaaaacgcatggggcaaaacaatgtgccgctacactataatctcaactgatgtaaaatcgacaaaggcacgtctagtggtgcttacaccatacagcgaactatgatacagaacattctaactcaggatgaatgctgaaatccctaatctataagaacagtataccaaccctagcaaaagagga

SEQ ID NO: 422930 - DNA, 137 bp, Homo Sapiens
gttttgataggacagatgaagcagtaaatttcttcttggctaggggttggataaagggtggatagacttatgtagtgtttgctaaaatgacaaatggtgagatgctaaaagcactttgagctttagggagttcaaag

SEQ ID NO: 422931 - DNA, 211 bp, Homo Sapiens
  misc_feature (88)..(96): n is a, c, g, or t
tacaggaacgtgacattatcactagtgttacacatatacacgtcaccaatctagtcagtatcaacagattgatttgagttcagatgannnnnnnnnctatgcacggatgtaaaatcacaatgtgtttacttggatattttatgcagatagcacaagatagagtatacctatgcaaacagcacaagttacagtgatacctatcaaaagacga

SEQ ID NO: 422932 - DNA, 346 bp, Homo Sapiens
  misc_feature (65)..(128): n is a, c, g, or t
  misc_feature (168)..(168): n is a, c, g, or t
  misc_feature (173)..(173): n is a, c, g, or t
  misc_feature (216)..(248): n is a, c, g, or t
gcgactctagcaggatcttcacgtaacgcttctcgtaacatcacagtcttttccttcatagtgcnnnnnnnnnnnnnnnnnnnnnnnnnnnnnnnnnnnnnnnnnnnnnnnnnnnnnnnnnnnnnnnnttcctctgttccactaggcaagaactgtgtctattctgtntcacnccatatacttcagagcctaacacaggtccgacatatcttatannnnnnnnnnnnnnnnnnnnnnnnnnnnnnnnntaagaccaaagccaatataagattagtgagtcttcacaaaataaaaatcatagctacatatgcttttaatccccttcacattctacttcctcttctag

SEQ ID NO: 422933 - DNA, 161 bp, Homo Sapiens
  misc_feature (43)..(43): n is a, c, g, or t
  misc_feature (70)..(70): n is a, c, g, or t
ctctaggatccacacgtacgctcagtcggatgatcagtctagngttttctacacgatcagttgatcatcntctgcgcgagacctgcttaagctgcacgctcctgcgagcgctgaggcacagtcggcattctacagtcacgcggaggacacgtcgttcacga

SEQ ID NO: 422934 - DNA, 251 bp, Homo Sapiens
cgactctacaggatcctaaacgtaacgccttcatcactgctatggatttccatggtgggcattacatggaaatactccctgttaccctagaatcccctatccttgtaaaccccttctgaccctgggcaacttccatttcctttcttgttcccaagctgttgaagagagtaaggaattagaaacttggtatcaaatgggtcaactacaaatcactattgtcaaactttggctgagtggtcagaaggggtacc

SEQ ID NO: 422935 - DNA, 190 bp, Homo Sapiens
taacgccttcgtgcttgacgatacagtaaagactccataaataattgtttgataactactgaatgagtaaccagccatcttcactcattgatctgctgggagcaacagaagcaggcaagagtagcaccacatgacacaggaataagaggcacggtttccaagagcaggccggacgcagggactcaccgcc

SEQ ID NO: 422936 - DNA, 333 bp, Homo Sapiens
cccacacgtaacgcttcatttcagaaaatgtcttcatgaggtctggtggtctttttccctgacaatttgtatctggtgttttgtaaagcattaccattttatatgaaggttaaagcagttactttgaaaaagttacatggggtaagtataaaattggaaaggatatttttgtagttttaagaagagtaagacttctccgcgtgaaaaagtgttttcttgtgaattagctgaagctaccctgtattttaatagttaggctcagaggtgacacatgctgtgctttttcttcttggaagggcaggttgggagaaggcgttacgtggggtaccgagc

SEQ ID NO: 422937 - DNA, 367 bp, Homo Sapiens
gtcggcgactctaaggatcccacacgtaacgcttccccaacggtaactattcaccacacaaacgccagggaggaataaacctcctgaatcaatgtggagaatgacaatggatcctatttcaacggccgcgggtgcagtgccaatgttatcctggtcttcttgagaagggaatggacctggcgaaaagcgcactggacttgacgaacaaactcgtagacatagcgggtgaacagtcaaaggtcggaggggaagagcaacagccagagggtaagatcaatttttgagagcgtcgccaaacagaaggcggatctgttccgccttcttcttctctgcccggcgtccagcccgaagacgttacgtgtgggta

SEQ ID NO: 422938 - DNA, 203 bp, Homo Sapiens
catctagaggatctacacgtacgccttcacgtacgctctatgataacattcttcttcatttacaagaatactatttttcatttatcattgatatacacagctatgctttaaaaaagataatcgccatttccctacattacttttaccacataatgaggtctagtaatctgtcactctataaaaagccagtgtcgggcgggcac

SEQ ID NO: 422939 - DNA, 365 bp, Homo Sapiens
gactgttcaaatgtactgaaggacggttgcttccatttcacccgaagttggagacatagaaacaaactcatatttatgtggttgcccacgatggcgcagaaagcacactggaacattgctatccccgttggcttttaagcagcagtgcagtcttggataagtcacttctagttccttcttgaccatgaggtcgccctgtgatacctgaaggtacagccatccttaaagcagtgactcagtatgaaagccacacttcctatttttaaggagtgtaactttttcttttgatagaaatgaaacttgtacttaaagtagataaaatgaccttcagcatttgaaacagtataaaaccaagttcaaaggaa

SEQ ID NO: 422940 - DNA, 116 bp, Homo Sapiens
gcgtacttaagggtagcttactatatagttgggaaaatagaaatgtaaaaggtagaatagcagtatcagagatgacacttcaaagcagtaagtgattaattggaaaattgaatggg

SEQ ID NO: 422941 - DNA, 199 bp, Homo Sapiens
acctagagactacacgtacgcttcagtctatgaccgatattgacaatgctgtactcaaaattaggtccacagattagaagctgaatagatggtagaagaaaataggatgagtgttattatcattaaaattgcgctatggttttaaaattaaaagttcttttatactttaagggaatagctaatatctatgttttaaaaa

SEQ ID NO: 422942 - DNA, 390 bp, Homo Sapiens
  misc_feature (50)..(58): n is a, c, g, or t
ttacacgtaacgcttctacagtaaagtcacactcttgagcaaagggaggnnnnnnnnnttatcacagtccctcaatcagcaaaaatctaggcatggaagacaaaaagaagttagggtccagtaagcttaaaaaagaaaacagtgactcagaaatttcctatctgcaatatatagcaggtttagaggacgaaaatgaaaacagaagattatttctagacagctggatggagaaagataatatttacctcagtaaagttacaaccataggaacaaatccagattctattggttttggtacaactctgcaaaaaatcatagggtgtaattcacttctcagttcagaaataagacgtccttaaaaaaataagtaggaggtacttcttgaaaact

SEQ ID NO: 422943 - DNA, 226 bp, Homo Sapiens
gtgccaagcaatactctggagcacacgtagttaataagtgagacaaaaatttaggtacttgtatttgagagagagagagcaggaattatagacaataaacaagaggaataagtaaattctatgttattagttatgaattcaaagccaaaaaatgagaaacagaagccagactgtgtaggagaggctacgtagcggtatcacatagtttagacaagcaagactgata

SEQ ID NO: 422944 - DNA, 129 bp, Homo Sapiens
ggatactcaaaggagataggagatagattctcaaatatgtaaaagcgaatcagaaaacagaagaaaagaggaatgaggataaagagaaatgaggttacaggacctcagaagtggtaggaaggcgttacg

SEQ ID NO: 422945 - DNA, 121 bp, Homo Sapiens
ggagtcacttcatttgtcttttctcttagctgacttctatctgtactgtttttacttgtaatatactgtaacaatgagtactacagcttctgattcccttaagagagaaggcgttacgggg

SEQ ID NO: 422946 - DNA, 138 bp, Homo Sapiens
  misc_feature (72)..(72): n is a, c, g, or t
acttagaggacccacacgtaacgcttccgatggaaaacactacaaatcagtgcttgcgtggtcagcagtgtnagccaacgctgcattcagaggacagtattctttaccgcttacataaaaagggccagagggtagatg

SEQ ID NO: 422947 - DNA, 130 bp, Homo Sapiens
tagaggatcccacacgtacgcctcatttaaaaatactatgcttaaggtttaattgtgggtgtactgtcgtagtattatatagatatatcaaaatgaagcgtaccccagaaaggccaatgatgagattatt

SEQ ID NO: 422948 - DNA, 343 bp, Homo Sapiens
atagaggatctccacgtaacgccttctctcctttcctgtttgatctctctcaggacatggaaaacagtgtcttggaacctaataagtcttagaagaacttttaactcagagttttcacatcatctggggttgctgtgggcattggcattgggagaggatgtggagaccagctgacttttaatatctatagctatacattctggtttggaactcacgattaaaaatctattggttcctcccagggctctgcggatttcaatgttggtcataggagccgcaaaatgttcattgaaggaacctaaccaaggctactgtatggccactttgtgaactcagaactatg

SEQ ID NO: 422949 - DNA, 490 bp, Homo Sapiens
aagagtaattgtctacattttgatcttacttgtgtatatttatggcataacttcacctttgacttttgcccacccctggtctagctgtatacactcctactagggcatataaagttaaagaagagaatgaaatgcaaacattgcttgatattaaaatgataagcaaaatttatttccttctgaattgtgtacacaaatgacccctttctgagccaccctcacccctgggtcaatatgtgcattttgtgaggataacttttcagaacactacatgaaaattgaaacaagaaaatacctgggagctgcctgataaaagtgtatttgtgagaaggtttatgaggtggtgatgtcaaataagaacttggatgcggaagcctctggtgagtcctggctccaccctttatttagctgtaacctcgatcaagtcctgtaaatttgccttgtctttccaatggttgggttgctgtgagggtgatgtgatatgaaatgt

SEQ ID NO: 422950 - DNA, 110 bp, Homo Sapiens
tattatcccttcttagggcgtccagggccgtttgggcagctatcccagaacccagggtgggactgggtttaggcccacttcacggtttccaggtcttttaccttcccctt

SEQ ID NO: 422951 - DNA, 361 bp, Homo Sapiens
  misc_feature (195)..(195): n is a, c, g, or t
ctctacaggagcttatacgtatcgccttcaagaggagactgacgtttacctggaggacctacttacatggtcatgaaaaatgaaggattactgaaggagaaggaagtgggattgggggaacctctacaggaatgcagtgggcctagttttttaatatggaccaggtcttgtttaccttttgtgttcccgcaaggncctagcccttcttaagtattcagtaaatatttggatattagcttacctgaaggttttatattgtttatatttcctatgatttatcagtctaggatataagcatattaagcagtgatgaagtctgaaggtagagaaaacttcagattgtttcaaaataggtgattgg

SEQ ID NO: 422952 - DNA, 310 bp, Homo Sapiens
taggtgaccgtagaggacccacgtacgccttcacactgtataaaatgtgtgcactggttgaaattgtgatatttaagccattgtggcactctgcttttttcatttgtattataacagctttccatgtttctacagagtcttaataattatcattttaatggctgcctaacagagtagcataaatatttaaagagcagaacagatgagtcgaagactatattcctaactttattacatagctagagttttaaaactcttaatagagtcccatcgataaaagaaaaggcataataatgtggtctacaaggaa

SEQ ID NO: 422953 - DNA, 106 bp, Homo Sapiens
acacgagagagcatgtgtacttactgtctactgaacttcacccgtgcggactcatcttcaccgtgacttcggaatttgtaacaaggaagatcctcgcagcttctac

SEQ ID NO: 422954 - DNA, 284 bp, Homo Sapiens
ccgcttcgtgcaccttgctatgtgcgatgtggacaagtctaggaataataaaaactaagacatactagccaaaatacttgaattctgaaattccattgtaatgttattaattttggtggttagctctccataaagatgtttatttaaataaaaacagttaagataaacattactgttatgggaacatattaatgttagccatacctacgcattttgttttaagattctagggattatggcttttaaaataatggatttttaccagattaagtcataagaaggcg

SEQ ID NO: 422955 - DNA, 263 bp, Homo Sapiens
tgcatatcttacatgacatcgaagtttctagtagaaagtctgcgtatagctatctttctatggatcagccacactgaaacttatacaaagctgcaccctcatggatagcacgagtgctacagtcatatgatttcgcagatgcctggactgaaggcctggcatccgaggttagggcaaaacttcgggagccatgtagttactgtccttggtacgtatgctaagctcaacacctattttctgtcctgaaggcgtaacgtgtgagg

SEQ ID NO: 422956 - DNA, 258 bp, Homo Sapiens
ggtacgcttcacgactagggtagctcagcctcaggaggcatcttcaactgcatagttatcgagaatatggctttctagttaaagtctggctctgcccttaagtcggcagggtgaagacgcgaggcaaaggaggtgtgtgtgaaggcccagaagtaaggggagacacaccctttcaccctttcaagcaaggccttgattccttgctccccccacagaaaggcgttacgtgtggggtacccgagctcttaattcggtaat

SEQ ID NO: 422957 - DNA, 204 bp, Homo Sapiens
  misc_feature (53)..(53): n is a, c, g, or t
  misc_feature (75)..(75): n is a, c, g, or t
tcccgttgaaggaggaaaacttggcattgatagactatgaatgtgctcagggngtgggtggtgaggatatacagncaaggtgaatttgcctttggtttcagaagttactcatattccaattcttgttccataatttcttctagtagacagaaagttcttttcaacagccctaacctattgctgttccaaaggttagtcaatgcg

SEQ ID NO: 422958 - DNA, 107 bp, Homo Sapiens
accacagcaccgttatctcctccctaaagcactaactgttttctatcttctttgcatccaggtggatggggctccacttgtaacacacattcatgttgaaggcagca

SEQ ID NO: 422959 - DNA, 282 bp, Homo Sapiens
aggttagtcgatccagccccattgcggtatacaatccaaccacttcgcgggtgtgtctgcgcctcgccctaaggcccacccacacccgcttcctagacctaagcgccatttgatggtggggcgggatcactcttccaggaccctccagactaatgtccatgctcttcagagacaacacttaagtcccgctggccaatcgtaaccaaaccacggccttagccacgctttattgcacagctcgcccagttgcggacgatctcggacggtaagacctgcactcca

SEQ ID NO: 422960 - DNA, 176 bp, Homo Sapiens
attcatttattgtcaccaaacgtcctgggagagcggctacagcgggcgctgaacccagaagggactttctctaggctttcttggcaccctcccaattatcttccttctcttgcgcgagggcagaccaacacagctacgaacatgggtgactgagggtcagagaaggcgtaacgtgt

SEQ ID NO: 422961 - DNA, 197 bp, Homo Sapiens
gtaacgccttcattagggcaggtaaggtttgtagggcaggagatagttttgagaggcttggaagaacatcttgaataggacttgggtcctgaaggataagatgataatgtgaagataatatgaaggtcttcagcagagaaaatgtggaactagtatgcccaaacaagacgggaaaattgggaagaaagtagactggg

SEQ ID NO: 422962 - DNA, 125 bp, Homo Sapiens
tgatatttcagaacacacagagttatgctatgtgctatttctgtgggcttgggggacaaccattagatcattaagttgaaggtatatttctagtcagacttaatccacattgcagtggtcactac

SEQ ID NO: 422963 - DNA, 142 bp, Homo Sapiens
ttaggtgcttagaggatccacacgtacgcttctgctctggtctagacgtggtggctgcacataggaactgactctgctgtcagggggaagataatccaaaccccgacaagtagctggagaatcataactgacctccaaccaa

SEQ ID NO: 422964 - DNA, 135 bp, Homo Sapiens
gttagggggagtatgagatcagttggtccaggctgctttatcgccctgccgggattacagcaacgcgcacttcagtgcccgcgaggatgcacgtctttactatgtgcacgatgagccgttgctgcgttacctggg

SEQ ID NO: 422965 - DNA, 102 bp, Homo Sapiens
tgtcgttggctctgagcaaggaggcgttcgtccggtattagttattcagaatgaccattggaaagtcggttcagtcccgactggtcatttgttggcggcgga

SEQ ID NO: 422966 - DNA, 111 bp, Homo Sapiens
cgaccttgtactgtcgttggctcagagcaaggaggcgtcgtccggtattagttattcagaatgacactggaaatcggttcagtccgactgtcattgtggcggcgattacgg

SEQ ID NO: 422967 - DNA, 220 bp, Homo Sapiens
tgcagttagtacgcgtgccgcgctcagggcaaccagatcgtcgaacgttgccgaattcttctcgtgcggcaggaacgaccgtgacgcatatgaccctcggtatgcgtcgtcgcgaagatatcggcaaattcctccccgtccacctcgagaagggcattctgaagaacgacccgttccagatcctcgaccgcacggtgtgggacactctgatccgcgaggc

SEQ ID NO: 422968 - DNA, 344 bp, Homo Sapiens
taagagcatcagtgaagtattcaagaacacgtaacagattactgaaacagctgtaacttgagcaaggtctaggtgactttagaatcataactgttaaaccactttacatcaccttttctgtattatggtctgtctgtgaagcaagaccaaaacacatgggcagtgaatgtgtcaatacctcattcctcttgctgcttcattgcttagagttatctttgctctctcaccaattctagcttccaactagttttaaaattttactcactctaccaatccttccaaaccattccattctgttcccactgttgctgacccaattaagtactcaccacatttacctagac

SEQ ID NO: 422969 - DNA, 266 bp, Homo Sapiens
ctctcagctccaggcaggtactgtatatctgtagcacggcagagatctctttccttgacccatctttcacctagtaaataacattttgcttattcacttttgccaggcttatgggggtggcgataggaattctccccatctagctttacttttaggtgagttctctgtgtctagatcttaaagggacagtctttttcagtgttcatgcacctctacctctttgtctgtccaacactctgcacttgtgtctctggcatcagcttgga

SEQ ID NO: 422970 - DNA, 153 bp, Homo Sapiens
gaaaatgagggtacagaggaatcccattgtatgtttgatgcactgagggcatcttcggaatgtgctaagttgtcttgatacccagtgggggtgttacctgtgtatgtgtgattatccgagggtctctcatgcttgagtgtgatagcttggaag

SEQ ID NO: 422971 - DNA, 276 bp, Homo Sapiens
acactccatggttcatatacaaggcataggtgtcaacaagtcagcacaatttgtatacaatttttgcatgaatatggttctaatgaaaacagagatggctttctatggttacttttagcctttagattttgcactaaatttattttacttgtgattacaagagttcttgaattgtgtgctcagataatatccatattgtcatcattcagcctaataaaagtcaacacttagtgtaccctatacaataaaatgaaaattatctgtgatagcttggag

SEQ ID NO: 422972 - DNA, 135 bp, Homo Sapiens
gatctacaggatcctctccaagctatcacatggcagtgacataagaaatttgggaagaccctggctttcttgaaagcaggaaccaagtcttttattccagagttaactttatgcctggacaaataatgagatgct

SEQ ID NO: 422973 - DNA, 179 bp, Homo Sapiens
ctgtagaaaggtgacactgttaactaagaacgctggagtggaaacaggtttatggagcaaatgacaaaattttggtctttggatttattaactccaagatgcctttttggaacagttaagaaccaggttgtttttacgagaaagggagtgggactgagggtagacagttgccttactcc

SEQ ID NO: 422974 - DNA, 165 bp, Homo Sapiens
cctctcctacgagcgcacaccaaggaattagataattcttccttgacagcctataagaagaaaaaatggtttatgaacaaataactacggaataacaagaaaagtatcaaacagaacctagatggtaccttgttagctttacatcatacatttatcttgaataca

SEQ ID NO: 422975 - DNA, 138 bp, Homo Sapiens
  misc_feature (65)..(65): n is a, c, g, or t
  misc_feature (126)..(126): n is a, c, g, or t
ccagttttcatgtatactccggctgcattcccacgtattatttcgtttaaaaatgttggctgacncgttgaaacccgtcttcatcgcacacatacatacgaaaacaagcattccccttaattcggntaggcgctacgg

SEQ ID NO: 422976 - DNA, 328 bp, Homo Sapiens
tcgactctaccggatccctctcctacgagcgcaaatacagcgcaaaaatatacgatagtgttgtccttacccccagtctttcccacaaactttttatgactactacaaaaaaccttcttcctaaaatacagatctgggtacatcattccctctgcttcaaagttttctatatttttcttctactgagaaaatctacaattcttaagatagtattccaggctctacgaatgacccaaatctaccaatattccagaattatcttctactatatatcctcccacaataccctgagttctacaagtagctctgtttcattaacattcaacat

SEQ ID NO: 422977 - DNA, 257 bp, Homo Sapiens
gatggtgatctagctgatcgcttactacgagcgcactgatggctctattgattacttggacggactttcaaatacatagagatcttcttcactaaaaactccttgcagagtttcataccaccttcctctattagcagataatcttacccatgaaaacctataatcatatatctatatattactggccaggaacagtagaaatggcgctcgtagagggggaccggaagctcgaaattcgtaaatcaatgggtcatacg

SEQ ID NO: 422978 - DNA, 369 bp, Homo Sapiens
cggagctgtatctacgagcgccaattaagacgttgtcctgtgcagtgatgcataaatagcatctgaaaattctatctatttgtacctttttaaagcatgagagttcgtatgcaaagacacaatttggagtaggtttctgaaggctaaatctcttttagttgcattttaattgctatggcacagaggatgaattagatttctgatgctaggcttgaccctgtaaggctccagcattgaacactcgtaactggggaaagaatattatgtaaagtaatctgagactgatagtgtagttaggagtagagtataggatccatacatgcactcagactaggcgctcgtaaggacgggtaccgacgctcgaaattc

SEQ ID NO: 422979 - DNA, 183 bp, Homo Sapiens
  misc_feature (141)..(141): n is a, c, g, or t
ttgtattgaatatttttagtgtcagtttcttgttatgtgagtgtgaggaattgtgggagatggaggagtttatattctctgcaacttctgacttggttggctcgctgcatccatgctcctgaatcaccccatcactcaggnattggaaatagtttgtcccaaataactatttacctttcactg

SEQ ID NO: 422980 - DNA, 123 bp, Homo Sapiens
tctccacgagcgcaatggtagtgggtcaggctgtcactacaggtgagggtttaggacggtgccattcctggaatagataaggtgaggacccgaacccactgtgattctgaacttctctctgat

SEQ ID NO: 422981 - DNA, 447 bp, Homo Sapiens
ttatacgagcgccatgtgagctccttagctgttcccttgaatacccagaaagcgtggcaggcctgcctagttctgggtgctcatccctgaccccgcctgagggttttcagtgtgtgaattactgcagtaggaaatatggagaagtgactctcctccctttactacggtattggtgaactctttagttttccctgatgatgttaagtgaacgtgcccagtggggtacctgtcacatatacagtgggtgtatgtgagtgcttctctttccccggctgctctccctaataccgcatcagtggttatctccaggcagagatgtaggccaggttaggtcaagttataggcagattgagtctggagtttttccttgatggatggaaaatgtgtagtgtatagcaagatcaagatgctagttggctgtggaattactgtgacagggctaactgc

SEQ ID NO: 422982 - DNA, 362 bp, Homo Sapiens
  misc_feature (88)..(88): n is a, c, g, or t
cgccagacgaagggagtgttgagatgatgagtaagaagaggactgatattggcattatatttgacaagacaaaggtcatgactatgtntgacaatagcacttcctgttagaggttaataaaagttctgaagcgatgcatgtaaaccgatctttgaagtgttcctgtagaggactggaggttaatcagagataatttgcagggtgggtttttatcccagttttgcttttaaggtggcagttacagcataattctatgctgttgagaatgatatgggggaaaatcgagatgcaaagaaagagagcagggatactttcaagagcaaagtccttgagtaaatgagagaagatggaactcagggcac

SEQ ID NO: 422983 - DNA, 419 bp, Homo Sapiens
tctagagcatcccctcctacgagcgcagcactctattcaggtcaacagaaacacttttaaaatggcattttcaatgcattatctcttaacatttacaaaccagctatactttccttaattcagttcattacataataatataaatgaagcaaaaattataaaatgtagtagcaatcactgaggctgctatgaaaggtagttttataggttgcaaagtttatggtttgcaaagtaaaataaagccaaaaacggtaagtaataactaaactctataaaacagtctctctctagatgtgatttttcctttgacactgcacaaccaaatggtttcatttggcaaatactgatactggagttgactattacatagttggttctttagtttttgttttgctcatatacattttcaagttgtatga

SEQ ID NO: 422984 - DNA, 227 bp, Homo Sapiens
tgacctagaggacccctcctacgagcgcatccctgacttggcttccagtttctattataatctcaagaatagttcctgacgtatacgtcttctagtgtcagctgtatatttagtaacacatttttaagtgttttggaaatggtattatttaagtttgggctttcaaaaatagtggtgagtttataaatgttgaattttagtttatgttttcctttctctacagttaa

SEQ ID NO: 422985 - DNA, 236 bp, Homo Sapiens
tactacgagcgcatcctggggtaaggatcacccgtcatggctcttctcctcccaaaagtattccgtattcctggaggctgctgggaaaaaaagtgctttccgtctaggctggatttggggaactgtctagtggagaggtgatagccaccttgattcctgttttcttggcatacccacccaacgcagatgtgctgggtgaggcagaaatctcgtccttccttttagatgaatttaac

SEQ ID NO: 422986 - DNA, 297 bp, Homo Sapiens
tcctacgagcgcaattatggcattaaaatgtcaagaaattagaggtcagaataacagataatcttcttctctatgtcagattgaaaattgacattctttgacagtttaggaactctggctgagaaaattatgacagcttaacttattttatacttgtaaagcagtaattgataataaactttatcatgacagcctctgggcagaaacatgacagtacagttctggtacaaagctcttcttaatatgtaaacactagatctgttggatagtagatattatttaaattgtctaaagtct

SEQ ID NO: 422987 - DNA, 252 bp, Homo Sapiens
aggtactctaaggatcccctcctacgagcgcacatgggacattatacatgcgcatttcaagtagtgagtgggagtgagtggaaggaaagtgtgggggtggagattatgtgtgtgtttgccgggagaggaaggtcctggctcctgctaggaaccagaggctgggtggccccgtcccccaccttgtccagccttctcttgcagctcctctccccaacacattaataataatccagctgtgggataagagcgatt

SEQ ID NO: 422988 - DNA, 418 bp, Homo Sapiens
tctcctacgagcgcaggtagggggatcctgagcctaccgggaagtccctccaggcggggtgaaggggtgtcctgacaggcagactcccggagggggctgggaagtaagcgagtggaggcagagtcggctgtgcccctgacaggttagtttgtgtttgtaggcatgatcggagcctcccccatagtccagtttgtgtgtgtttaattaagggataagagtggtcgaggacacgatcttgagaggggattttacctgtgtgacaaggtctgtggtgtccctgccgcgttgaacggtatgtgggaacgacaggatgatctcagtgttgtacgtttaataaatgtcactggttagtttgtacatggaaagagatgtttttggtctagcagacagatggtctgttggtgtgtagcggctgtgt

SEQ ID NO: 422989 - DNA, 180 bp, Homo Sapiens
tcctacgagcgcacatggtgtcagagaaggacacatagagagaaggaacaagggaattcctatacttcccagacaggatgttatcagcagagacctagtggagagcctaaacttccaatcccacccagcagtaatgaggccaagtaagaagaaacctggactttcacccacctctggcaa

SEQ ID NO: 422990 - DNA, 406 bp, Homo Sapiens
tagaggatcccctcctacgagcgcattctaggagaagggaaatgtcagttattcagtccatgtcctcacctgtgcctttgtatcaaattaccattcacagaggaaaaaaattagtgtcccaggtgattaaagtagggaggttcacctgttctcatagaatttattacatcagtatgtgttacaggcaagttccaagtgttacgaacaaatattgtgacataattcactgggagttgtgtatcatgagtccagaaaagaaagttgtgcctatgttgtggaggcttgaattaaggataaataattaaagttgatggttagttaggagcgcctaaagtttgggtctgtgtcaggactgaaggtttaggaaagaaattttggaatctagaagtgaagaactttggaatgg

SEQ ID NO: 422991 - DNA, 145 bp, Homo Sapiens
caattcttcattgaagaattggcggaaaagtaggaatatgataatttgttgaattactgaaatctttggttcctggttccatttcgtaatattaaattgagaattaccaggatgctagtaagagaaccagaattgtatctactgt

SEQ ID NO: 422992 - DNA, 289 bp, Homo Sapiens
ttgggtactctagagcatcccctcctacagcgcattgtcagaggaaataatctaaaggttttgtgaattcctgtactcattctgggctgttctcctcaaggtcattcctgcattaacaggaggaagatgatagggagaagggagatctcagttcagtgatgtggcctttgtgaccagccagccacttaatcaggtggaaatggccttagtgccacatcaatatttgctaccgtggaggctagttttcccacttagggcatgagaagaattggtgtagtcagtatagagt

SEQ ID NO: 422993 - DNA, 189 bp, Homo Sapiens
tcctacgagcgcaccatgaattatatatttatcatccttattttaatagtggtatccttcccaatgttaaagaaacagatttacttattattttaggaggacccatgagtcctaataatgaggataaatggatttttgaagaacgagaattaattcgcaatttaatacagcaaaataagccaatatttg

SEQ ID NO: 422994 - DNA, 362 bp, Homo Sapiens
tcctacgagcgcacgctgcggggcgcactttctggtgccatgcagagcttggagtgatcactgcctaggccgatgggtaggcgctatctgactggtgttcaagcgtcaattgttgagttggattgatttctcgaaagccttacctttgcgggttagggacaaattgatgacttgacctttcttcgcattaatcaagctcgatagatgagccgcactgctgatgcgctggccatcaagcttctctatagtatctccgatcagtaagtcggctttgaaagcgggtgagtcatcggaaaccatcgtgattttcacgccatagttcgtctgacgagactgacgttctgcttcatccagttcaatag

SEQ ID NO: 422995 - DNA, 133 bp, Homo Sapiens
atctagagatccctccagagcgcatcatagctcactgcagctcgaatcctgcgctcggggatcctcatgctcagtctcctgagtggctgaaactataggtacacaccatcatgcctggctaatttttattgta

SEQ ID NO: 422996 - DNA, 162 bp, Homo Sapiens
acacattaaaaagatcattcatcatgaccaagtgagatttattccaatcacgcaaagatggtttaacatatgcaagtcagtcaatgtgctacatcatatcaacagaatgaaaaacacaatcatatgatcacttcaactgatactgcccagagatttcataaa

SEQ ID NO: 422997 - DNA, 275 bp, Homo Sapiens
ctcctacgagcgcatttattactagattcaatttcagagctcattactggtctgttcagggaatcagtttctttctggttcagtcttgggaaattgtatgtgtccaggaattcattcacctcctctaggttttctagtttgtgtgcatagatgtgttcctagcagtttctgatacttatttttatttctgtgggatccatggtaacatttcctttgtcatttctaattgtgtttatttggatcttttctcttttctttcttattagtctagccag

SEQ ID NO: 422998 - DNA, 112 bp, Homo Sapiens
cgtgcattatattgttctattgtttgttggatccgggtattctgaatctgggtattcacatttctaaatcacttgattactataggtttgatatatctcttgttagctttca

SEQ ID NO: 422999 - DNA, 191 bp, Homo Sapiens
gtgactctaccgatcctatcctacgagcgccacattatttctcatgtactacttttgtgaaggaagacaatacagaaactatcttaaggagtagttcgggacttttaaagctcttacaacactcaacagtagtgctcaagaaatgttagggaacgcagtggtgatcaaacataaatgtctttacctagctg

SEQ ID NO: 423000 - DNA, 373 bp, Homo Sapiens
ctacgagcgccaatgatcagatgcgtatatgaaaaaagaaagcaatgagaagagaaaggctgtatagaacaggtttagggggaaggatgaaaagttaagtttcagtttcatgaagtatgagactatcaactctgggcatataaaaaataaccaaggttcaaaccaagactggctttgaaacaagagagaggaactaaaatcattggaaagggggagtataactattgatgtaaggtaataactgcaggcagtgagcattatacgtatataagatctagatgacatagaaatattggaggccactatcctattgtaggtgggcaggaagtagacggagaataggcgctacgtaaggagggggtaaccgcagcta

SEQ ID NO: 423001 - DNA, 202 bp, Homo Sapiens
ctacaggatctttcctacgagcgccaagatcaactacacgggttatggccggcagcgagagccgcaaaggtcaggataaacagtggagtttctatgaaagccccctcggcacctgggcaggatcagccacattcaatgataggggagccacagggctgcagcagagctgctgtttccactcgtatcctgtgcctctgggggc

SEQ ID NO: 423002 - DNA, 499 bp, Homo Sapiens
gctaggcgaaatgtcataaagatcatttgcccattttaaaaattgaattatttgtttttttcttattgagtagtttgagttccttatatatatctgtttagtaatcacttttcagatagatgctttgcaaatattttctatccattctgtaggttgtctcttaactttatagattgttttctttgctacgtaaaacatattttagcttgatgtaatccaacttgtctatataccaggttttattgtgtgtgcttatgaggtctataccccatacatctttgcccacaccaatgtcctgaagtgatacctcgctgtattctttcagtaatttcatagtttcaggtcttatttttaaatcttttatccctattatatattggtattggaatattgtgaaggatagaaatctaattttatttttctagcatatggatatctagctatcccatgtaatagaagagatagttctttccccaaagtatagttggcgctcgtaaga

SEQ ID NO: 423003 - DNA, 391 bp, Homo Sapiens
agcctttccggcgggaaggggaggacaccaaaagcatccatatattggactatgtttgcttcctactcagtcagcacaggccgcagtgtttgaggacatgcagtcaggtctgtgggcgtgatctctctctacaccgaaggaatgagcttcatcagcaccattccatcgaagggaattttgtgctgtatgttcccagggtcactcacaaacatccctacttacaagtgacttgatgctttccaaaataacagtttattgggattttggtttaagtttgcactaattcaaagcctgcagactgcagtatacttacacacctttattgtacttatgagcgtagaaactgtgatacggctgattcacttattcatttactaacatatagtgaggg

SEQ ID NO: 423004 - DNA, 162 bp, Homo Sapiens
cgccagaggatccccagcctttccggcggtcgtgtcacctgaggctcctcatggcagccgctgagccagcaggcctaactccttcccttgataaatcagaccagctccttcccttgacaaagcccctgggcacagctgtgtgctcaacactcctccccgccg

SEQ ID NO: 423005 - DNA, 134 bp, Homo Sapiens
tggggagccttatatactagcttgagaatgtgtaaggcagaggggccgggaaacatagtggctaaatacaaacagttattctagctgtgtgtgtaaacataagtgcagacagaggtgtttaggccacaactaca

SEQ ID NO: 423006 - DNA, 326 bp, Homo Sapiens
agcctttccggcgggggtgaggaatgaatatagtcaactataaaatagcatatctgaacagcattagtataaaaatgtagtccttcatatacctttttaatgtaacttgtttattggtaaaattaagaaggaggtgtatatagaggcttagttattatgcaacacataatcttcaagaagctgaacaagggaaatgatacaccaggtttattacaggaaagtgtatacgctacacttcatccaccattagggtgagtgtcaggctaaccagcagaatcagtggaaagacaagaacaagcccgccggaaaggctgggtaccgagctc

SEQ ID NO: 423007 - DNA, 209 bp, Homo Sapiens
ccatttatcactgtgagttcagttgttttaatgtttagcttccacaaatgagaacacacaaagtctgtctttttgtccctcgcttatttcacttaatttcttccatttccatccatgttgtagcaaatagcaagatctcattcttttttatggctgagtcgttctccattgtgcatacataccacattttcttgattcatttgtctgtt

SEQ ID NO: 423008 - DNA, 327 bp, Homo Sapiens
  misc_feature (113)..(126): n is a, c, g, or t
agcctttccggcggggacttaaatttcataaaatcatctgctggaaattattcacatgagcatctttttagcttctcaagctcaaagtgtttaaagccatgttctgcctttgnnnnnnnnnnnnnnctgtttatggcatcatcaccctcactgtgacctgaatttgaaacttgagaggcttcttggacttctcctctcccacattcagtcagatgccagttatgtagctcgaatctctgtgctgtctctggattttggccctgcctctatattctgctgcctccagcctactttaggccttattacccgccgcccgccggaaaggct

SEQ ID NO: 423009 - DNA, 245 bp, Homo Sapiens
ttctagagtatccccagcctttcagagctgtcttaatgcaagaaataggaagctctgtttggtgcttagggagcggccttggcttgggttcctggatgcccagctgtcaccaggtgacctcaagggcttggctgcagcccacagaaggcttcactcctctctattggtctccgctgccctgattagaccaggttctgccaagacaaatgactttcactctctcatttctgcccgccggaaaggct

SEQ ID NO: 423010 - DNA, 149 bp, Homo Sapiens
atacacagtatatttattgtatacaagcatatacaatggtcatggagttccactttgagtttataaggctggtttagaaaatcttccttagagttcaggagaagtctggatagtgtgaacaaggtagtttgccccccgccggaaaggct

SEQ ID NO: 423011 - DNA, 387 bp, Homo Sapiens
agcctttccggcgggatcacacggttttataaagcaagaaaaatgaaatgatctccctattcccccacggtgtaggcctccagatccttttctggcttttaggcaggacaattaacaatgtggattctgcagtcagactgatggggtttccatgcatggcctcaccattaactcctcactggggagaccttgggcctcggttttttattcatagaatgcatgttgaataaaccatgtgggaaaaagcagagccagcaccagcccctgctgactcactgatccctcggaaaggtctgggatgagtcaagtcttcagggaataagcagcaaggacttggaattcctgagcaagccttgggttccccacgccctaggaagtccctctggt

SEQ ID NO: 423012 - DNA, 203 bp, Homo Sapiens
tgggcggctctagaggagacccggcggagaaatcacatccgaataattagaaactgacactgcctttaagataggtatgaaaacaaaattacttttaacattgacttcaattttgtgagcaacctcacacacaagcacaggacacactgactcttagcttgaacaatcgctgtttatggggtgatgtccccgccggaaaggct

SEQ ID NO: 423013 - DNA, 203 bp, Homo Sapiens
gtcagcagccccgcccaggaagccttccagtgtttctgcgaggcagaagtgatcggttcggtttttccgggtgccgttctagcactccgtcgttctttcacagtgacttatcacctccttcccggtatcgcagttatttgtgttctcgtcttatctctcacaccagagcctaagctcctcggcggggggcggtggctgggggg

SEQ ID NO: 423014 - DNA, 292 bp, Homo Sapiens
aacaacagaaacctgcacatctcccctgcactcagcttgctgcttcccttcctataccctctcccggggatacacctcggtacttccagtctgctccatgccagccgttcccctagctctcgggtcaaacctgaccccatccttgagtcctcccacttcccatcccctggcaccccagggctgagctccccaacctgtctgtattctgctccttgctccacaaatgccccaatcccaatccactcagctgccagagtcagaaacccactggcggcggctgctggctcggggg

SEQ ID NO: 423015 - DNA, 234 bp, Homo Sapiens
  misc_feature (65)..(100): n is a, c, g, or t
tctgctggtccaatcccttggcagcacaaaattaatgccattgctcacagccaatgttttaaacnnnnnnnnnnnnnnnnnnnnnnnnnnnnnnnnnnnnaatacctgagtacattgcatgtaacaagggtattatttcatgaaactttcgtttcataggtacccttggtagggggactccagggtcctaatgtaaaatgtagtctttactgggatgaaagccctcgacatgaa

SEQ ID NO: 423016 - DNA, 267 bp, Homo Sapiens
gacttgagaactttagtgttcttctggctttggtattcttagcaggcttcaaggcctgggcccattctgaaccaaaggaatttctctttgacgcctgtaatgtgtccttacagataactgtcacagtgagcccttgtgtcagagaactctggcagtgatggagctttcgagacaacagcagactgcacggaactgtggtgacaacactcagaaaacactgcactggaactgcatgcagaacagtggcatgaaaggactggacatgaa

SEQ ID NO: 423017 - DNA, 112 bp, Homo Sapiens
accaaaatgtatatggtgtctgcacggatcgacatgcatttcatctgcagagctctgtaacctgtcacagccggccgtgatcataagtcctgactggtaaaacgccttgcag

SEQ ID NO: 423018 - DNA, 221 bp, Homo Sapiens
aggtcgagcactgagcgcgcgtgtagtgacccgacaagatggtgaactatgcctgggctgggggaagtcctgagcgaaatcatctggtgtgaggtccgctcagcggtcctgatgtgctcatcgtgcgcccgacctgagtattagggctgacagactaatcgagaccatctagtagctggtgcccaccaaagtatccctcaggatagctggcgctctcgcag

SEQ ID NO: 423019 - DNA, 169 bp, Homo Sapiens
caaaagaatattaatggttaaacagtgaccatgcaaaagcccatgaacaattaaacaagtagcagatgtggtattttatcaacggcagctatgaagacactaaagggactgtatctgcaatcagaggattattgggaaacaaaatgctttttaaaagacatacgtcaat

SEQ ID NO: 423020 - DNA, 125 bp, Homo Sapiens
tcgagctcggccacctgttatatttgtatggacttaccaacatacgtatatagttgtaaaaagccgatggtagaaaagatttctaagttaggtgaccatatgctttatcatccaaatgaggccac

SEQ ID NO: 423021 - DNA, 423 bp, Homo Sapiens
ctacaggcccgctggactgcagtgcgggcttagaggccaagctggtgggccaagaggagcccaccctggctgaactctctggctgcctcttccacttattttcctcaagtgaaaagaagactacgggcctaaatcccacgggaaggtaggcctggtagcaagaactctgggcaagagaaccaatgggcgtaaagtcccacggagcaggtgtgcatagaagtttgggctttcaggtggccagacaccaaggagctgtcctcatggcaatcaatgagagggcttccggagcgaagcccagccaacgtggggtgagagggtgggaagtgggcagcttatcaaccaggggaggggagccagcaggcagactgtctgaggcaggcccctacaagtgccggaagagttagtgaaacacaagtgcaccaa

SEQ ID NO: 423022 - DNA, 105 bp, Homo Sapiens
cgtacaaggtccgcagcattctttctgagaaacgctgtcatgtcctctcctatcttcaattatcttgcaaaaaaccacctctgtgtagtgtcccaacctgaccca

SEQ ID NO: 423023 - DNA, 352 bp, Homo Sapiens
  misc_feature (133)..(142): n is a, c, g, or t
caaggccttgcccagacgtgatgacactcaggaagagcttgcacactggttgttctcaaatccagctttctcttcgaatcttagtggagttctttaaaagggaaacaattttatccataggatcttttctacnnnnnnnnnnaagttcctgaggtaagtctgatgtgtattcacagttaagtactgggcagaggtaggagggtgggttaccaaggccagtggaagagcttccataaaggcagggaataccagtcaccatgaatggtattaggaagagcaagtcaagggaggtaagtgtggaggacagagatgatgtggacagctggatcatcgcggggccttgtaccggggt

SEQ ID NO: 423024 - DNA, 178 bp, Homo Sapiens
gagactggtcttcactctcaatgcagctgccacatagatctcgtgcagtgtctgccacatgagactggcatccccatcacactctgccagtgttcagtggcactcagtgccaggttggtggcagtgaggtgccctgctgtgtgcttccccatggtgttcagctggttgagcttatggt

SEQ ID NO: 423025 - DNA, 295 bp, Homo Sapiens
ctacgagtagccccggaacgcgcccttggaagccccgcctccttaggactcagaaaatccgctaacccttcaactcttacgatttggtcctctaggagactctcccagatggataggccctggtctctcataatatatccactgggaggctgcgccgcccaacttttcgttactgtatctgagagtcccttgtcccttccccacccctctagttctacatcacttgttctcttagtaggcatctccttgaatttctacccagttagaattgcatcctgcagcggggccttgtacg

SEQ ID NO: 423026 - DNA, 435 bp, Homo Sapiens
cgtacaaggcccgcaacagaagaaagtgaatgtgactatagctcaattttcttgatcaaaaacacaagcgtacaccaagaattatatacaaggcaggctggcacttaattgaactacacctacaaacaaataggataacagaattaacaaattgtttgagcaaaataattgtaatgaacaatgtaatacttctgacccttcatggtactctaggctttatttggcagaagaattcatcaccagatggaagcagcaagtcctctgagtcctcctgtgaccctaccttctttagatccacctatgggtagagctggggtcacagtaacagcagtgtctcatgtgtgaggtcctcagcacttctcggagtcccagggcatgtctactgtatgctgatgaacaagctccctcctgcggggccttgtacggggtaccgag

SEQ ID NO: 423027 - DNA, 224 bp, Homo Sapiens
  misc_feature (54)..(85): n is a, c, g, or t
gaggtccgctcattttcttaccacagctttccagaaataaagttaggatggaannnnnnnnnnnnnnnnnnnnnnnnnnnnnnnncaccacattcagatagagacaggagagttctcagcaagaagagaactcagctcagagttgagaatgtctcaactcagctgtctccctgctgagacgtcctgggctgaagtgtcccctcacccctgcgtggccttgtacg

SEQ ID NO: 423028 - DNA, 216 bp, Homo Sapiens
cgtacaaggccgcttcccagaacacgtgcaggctgtccggcccccagacctttgtgcaggccatgccctctgccagaagctctgggcctcatctctgccctcccaaatcctccctgcttatcttcagagcccatcctggtaagaaccccatctccagcagcggcccttcctgggagcccccagatttccacacccctctttctgcagggccttgta

SEQ ID NO: 423029 - DNA, 572 bp, Homo Sapiens
  misc_feature (108)..(178): n is a, c, g, or t
cgtacaggcccgcacactcacgtcccgcagtcagccttgcagaaatccgcttataggaagagcctgccctccttatacgcggggcggcacatcccgtaaatactggtnnnnnnnnnnnnnnnnnnnnnnnnnnnnnnnnnnnnnnnnnnnnnnnnnnnnnnnnnnnnnnnnnnnnnnncttggcttgtttcctagaattacctccaggagtcctggacacaggcagaaggtgctgcagggaagagtaaggacagaactgcagagagaaaaccgctctggagaaggctgtaggccagtgtggctgcctctctgcatgctgctttcactacaatacggtgaccgctattttgagaccgtacgaggtgctctagccgcattaactcatctaatcctcattgctactccgcaaggtagagaccaggatcccaattttgcaggtgagtgtgagccaggctaggagacttgtccaaagtttcggtaagcggcagcccagcagtgctggactcgagtcagtgctcttgcacgttattacgaggtcacccggcctcccgtcaggggtcaactaaacacct

SEQ ID NO: 423030 - DNA, 193 bp, Homo Sapiens
cacataaatatttaactctccttttagttacattccagaagcctgttctcaaacaagcgtaagttaagactctaaatttccgtaaccacaaactggtattaatctgccctaatgtcactgtgttcctcctcttcaagtttgtttaaagcatggctgtgcagaaggtcttgcccattcacagttgcctttatcc

SEQ ID NO: 423031 - DNA, 282 bp, Homo Sapiens
caagcgtaatgcgggcagtgtggctccagagtccatgcttctaaccactctgccccacttactctcaagcactgatgaaggtataacgaagtaataatgatggcagtttcttaaagctacagaaaaaatgtatggagtttccaaaatcagattacattccatcaagtagaaatttaaatatggtcccagaagggcaggtgagtttcaggggaacagttgagtaggaattctgggaaagagagatgcctaagaaaaagcaagacattgtgtgaaagcagtcta

SEQ ID NO: 423032 - DNA, 512 bp, Homo Sapiens
cgggtattagtgctgatgtataatgctttgctaaagctgagcatcaactgcaaaaacaaaaatattatggacatataaagggctctgctacccctattttatgactgttgctgtaatttagagaaaaatgaacttcttattatgacatagaacctatgcaacttagttccttattacacaacttcttctgaggctccggtgtatacattatacaatgaatgttatactaaaattcttatcactcagtaagcatcgaaccatgatgccacactgcatgggatcactgtgtatagaagatatgttaggtgtatatttaagaggtgacatggatgggacttggtatataattaactgaagtgggatgcagtaggcaagggagaatcttggattaccccccaattaattttgttgtgagaaacactaaaataaagtcataggcagagtctgtgtgtgtatggggaagtggggagtaagaacctggaaatgttactgtaatcaggttttggcacaaa

SEQ ID NO: 423033 - DNA, 156 bp, Homo Sapiens
ctagaggatccccaagcgatacatcgggcccaaccgagggcctagctccaaaacggcaaaaaaccctctgctaggagctgcattctgcaaagggaaaccgtgctcggggattaaacctcagccccgatgcagcttggctcaggatcgcagcgcttg

SEQ ID NO: 423034 - DNA, 299 bp, Homo Sapiens
aaccatgaggttgcaggttcgagatccccgacctcgctctgtgggttgaggatccagtgttgccgtgagctgtggtgttggtcacagacgaggctcagatcccgagttgctgtggctctggcgtagactggcagctcgaacatgcggtccatactcagtttatctgtcgcctctcttatgattataatgacaaggaggctacagcctgcatagactcacaaagccatttactttgtttttcataaagtcttaccgaagtatagttgatttatgaggttgtgacaccgcatgtgcgcttg

SEQ ID NO: 423035 - DNA, 180 bp, Homo Sapiens
aatgcgatatcggtgaagcaaatggactcgttgacgtggcagataggccttgaccacaaacataggtggtgctgtgcatcttggactcctcgaacactgtgtgcccgcttcctgttcaaatacccctgtacgatgccacctgaccaccgtgctcgtggacactttgatctcgcacacagg

SEQ ID NO: 423036 - DNA, 527 bp, Homo Sapiens
caagcggtatgcggcactgtcttacgcatggaccgagagctgcatttaaaactcaactcaaactattgcaagaaaaataaggcttggtggaaactgaatgtgatggtgcctgacagacagccccagtttgcactagcccccacctgcaaaagaactgggctgggctctgggttgggaaagaggagtaaagcagaagagagccaggaggaggtggcaggaggcacacgcttcccccacgtcgcacttgggagaggagtgctctggcgcctctgggaagaaactcctcggtgctccccaggtaagcctcccctgggtcgagagtgccctggggaggaggatgggcctccccagggtgttctctgcctgttccccgctctcccagcacattcccaagatccacacacccacctctcttctctgcaccctgaggatgcactgatagccacagtgagcctgtttctagtgggaacagagagctgaaggtggaaaagaaagagaagcataacccagccttccccgcatgttcg

SEQ ID NO: 423037 - DNA, 110 bp, Homo Sapiens
caagctaacatgcggcctccccagcaggccaccctggggacagcactcccccaaggacctgaccagggaacccttgtttttgcagcgcacatctcagcagctctatttcc

SEQ ID NO: 423038 - DNA, 285 bp, Homo Sapiens
  misc_feature (229)..(229): n is a, c, g, or t
  misc_feature (254)..(254): n is a, c, g, or t
  misc_feature (270)..(270): n is a, c, g, or t
atggatgtgtagagagttcatgatggcttcagttggtgtgtggacctcctgaagcagtctgaagatggttgtgttagtgttcatatgtgtattcttctggatagggaagggtggaggggctagttcatcacttagatcagtctcaaaagcatttgtggtccctaaaggtctcttcagagtaattttgaaaaggactcagtttttgtcattgtctagcgtctgccctcanatcctgtttaataacttcatttgtngttgagaccttgtgtnctaaaaaccataatc

SEQ ID NO: 423039 - DNA, 663 bp, Homo Sapiens
ggatccccccagcgaagatagcggtgacttgagttgacaaaagaacatactggtgaaaacgtggcaccagagttctgaagagattgggactccgagctgtgcattaggaaatcatgttgccatagaggtggtaactgaagtcttgggatttttaagaacacgcttactgcctatatagaaactgaaaaggtaggtggtggataaatgtgtgtctggagtagtataagaatgagttaacaaaaagacaacatgcttttgttcaagagtcaatatttcacagttttccagctcatggaaaagactgaaataaatagaaaaaggaatctagaaagaagtactccttattctcttgaatactctttgaagatgcagaaaatattctatctaagaacactcttacaccttaatgtatactttaaaattttaatctatgctgattagaaacacattcacactggaatcattgatttgcctttttttccctccacactatagtacatgctatattttgaagtttctttgagggccaagggcttttatttttagaccagaagacatgaaaactctcaagaaggaaatgcatagaagtgtagccacacatttggccatatacaacagtgtacacagttttcctgttaagaactgctgtcaggaaaacaaatc

SEQ ID NO: 423040 - DNA, 107 bp, Homo Sapiens
aattcctaccctccatttgtctgtcttccctgagctggccaaagtaggcaagatgtagtccacacaggagtcagaaggcaggagggtatcttgggcatgggaggcag

SEQ ID NO: 423041 - DNA, 112 bp, Homo Sapiens
ggatcccccagacctagcccctactcactgctgtcagcctggctggcttgtgcaatgtggccactttcccaaggggttttcccagcctctgtccatggtccaggagcattgg

SEQ ID NO: 423042 - DNA, 624 bp, Homo Sapiens
  misc_feature (192)..(408): n is a, c, g, or t
acgtaaacatacatatcccaaaaccctgaattctgagtcccgcccttgggtctttgcccagtaattggcaccacagattctagcagcatttactgagcatctaatctgggccagccctcctctgggtgccatgacacacacatgaacaagacccagccccagaccaggccctagcagttcatagtctgatannnnnnnnnnnnnnnnnnnnnnnnnnnnnnnnnnnnnnnnnnnnnnnnnnnnnnnnnnnnnnnnnnnnnnnnnnnnnnnnnnnnnnnnnnnnnnnnnnnnnnnnnnnnnnnnnnnnnnnnnnnnnnnnnnnnnnnnnnnnnnnnnnnnnnnnnnnnnnnnnnnnnnnnnnnnnnnnnnnnnnnnnnnnnnnnnnnnnnnnnnnnnnnnnnnnnnnnntgtggtctaatgaaagtgtcagaaacatatacagacaccaacagcacagcaggtcagcatgcgggcttcagcgtccagaggaggtacatagaccagcaggcggtgaggtgtcagataaggcttctgagggaagaaactcccctgcagggggtttggaaagaacatgtatggaagggagcaggacacatggaacccaggaaccactgccgtccttca

SEQ ID NO: 423043 - DNA, 337 bp, Homo Sapiens
  misc_feature (53)..(53): n is a, c, g, or t
cagacctaagccgacctttctacaaaacttgtctgacccttaggagctttcanagttcccttggccactttgcacatgcttctaatacagtgattacaggctgcaatgcaattaccggtttacatcgttttccaagcatgtctgaggccatttcagggcagaaactattttccgttcacttttagccttgggactgatgacagtgcttagaaaactgtcgactaattaatcaaagttagctaaatgcatttgccattgcacgttacacattccttcattcctaaactattatagcaaaacgatgctcattcgcaaaggtattaaatacaggctgggt

SEQ ID NO: 423044 - DNA, 654 bp, Homo Sapiens
gtgtatagaggatccccagacctacccccacctgagaacccgggtcccagtaggcaaacgtttcatctcatccaggccgtcttgcctcaaccactttgctcacgctccatcctccagctgaaccgctcagataagctgatggaatgttgattctttcagtccagactcaaataccatcttgtccttgagccttttgggattatcccacgtgcctctgaaatcctgcggttctgtgtctctcttagacctttggttacagcctctttttcatttttgcttctgagttttccaggcacatttcttattttttagaaagacaaaattcttagtgtgtgtgtctctacctggcaaggtgcctccaaatgggaaatggaggttattctgccctgaccctcagccagaatgttgagatatgatggagattgcctcagtctttagcccaaggttcttttgtagcgagacaaataagcaaacactgagaagactggtcctggtggtacaaccatgaatgtgaacctgggcacttcaggctagcctggggctgcatggcacaagagtcagagaaccttctggaaagactgttcagtctttaaccattatagtcagtagttaactaagtatgtctgtcttcgccatggggttaggtctggggta

SEQ ID NO: 423045 - DNA, 664 bp, Homo Sapiens
  misc_feature (273)..(311): n is a, c, g, or t
cagactaaccccagtacctcttaatatataccattcttactagctaactgtaccagcctgttcaacggaaatcacttctgtctttcttgcttacactgtcctccccacctgaaatgtcttctgtccatattccccacttaaaatatcatctaggcctagcacaaatgtcatttgctcagcaatcttctccgtccttcttagtttgggaagtaatctcttcttatgagctccttcctacaggaccacagtaagaaaaatctgttactgagtatnnnnnnnnnnnnnnnnnnnnnnnnnnnnnnnnnnnnnnnatcaatattaaaattatcttagtttttgtcactgcagcatgttatacataatatctagttgacaagtacttaaaaaatgaattgtggggcttagcaaatcaaacacacaatggacctcattataatgaataaggtataagaacagtactggttacatggatatgagtccgaagcgtcacagtgtgacagcctcttaaggcctgtttcttcctttgattcataagatcaatgtcaacaaagccacaggactcatttttttgtggcttctaaggcaatttatgaaagctctttcagtcatgcttgctttaccttcaacaactaactgtcgtacactcatatgcagaatattgtgg

SEQ ID NO: 423046 - DNA, 506 bp, Homo Sapiens
cagacctagcccacgtgcttacacactccacaggatgtcttgaagcttccacactgctgcaagcctagcaggtcaaaatgcactgactttatctctctcatttccaaagtaatacttgttcatggttttaagaaagaaaatacagatgaaaaagtggaaaaggaaaaattcactctgatttgatcacccaagacaagtactaccaacattctgaaacatattcttaaagtcttttctctttgtactaaagtaaaaacactttaaaaaatctataggctcataaaaagcagatcacaaagcttccaaaatatatatttggccccacagtggaaccaatttaaatctgttttaaaataagtgtgtagaagctgttaaagcttttctgctctagtcatggcagaactccttccacattctctgcacagagctctgagttttcagtgcagaaggaacataatggtacttgtatgtgcacctgtgtgtatttaggggtggggttaggtctg

SEQ ID NO: 423047 - DNA, 269 bp, Homo Sapiens
tagcccgaacctaaccccacgtgcgattttaacttctcttttactaaatttatggctttctcaataccctcctctatttaaatccctcttcaagttattctttatttagtagattgtaatgtcctcgattggagaagtccaggtctataaagcgtttcatgactgttaatgctctaatcatatgattttgtggcacagaagtagatactgggtctaattaggcaaattaacagtgcataaattgtaaactaggtcattggtggggttag

SEQ ID NO: 423048 - DNA, 462 bp, Homo Sapiens
ccacctccacagctagcagctccaccacacctggtggcagctcgccttgggaaacacccatgccatcatcgtgcatatgatctaatggctttagagaactaggaacagagttattccccaacaaactgactgggaacctgttctgatgagtattttaatttgtgtgataaacaatcattttgagaggctggggtttgccatttccccttccaagaggaagtgcctttacgcatttgaaacttgacatgccatgaaggtatttttggagggcaggggacatttgggaagtcatgcagattacctaaggcaagtgatacttgcgtatatggtgcgtggggaatctgtaggcacagaaatgagactcagcagcagaggacagacagcacctgccttgccttctggtggaaactcagtggtgacgggagctttgctcattgcctttttcttgtggggttaggtctg

SEQ ID NO: 423049 - DNA, 428 bp, Homo Sapiens
aacacagaagcgggaatggtaggcgagatgctgggagtcaagcaggttgcccttgaggaggacagtagctccgtgcattctgtcactttgtttaaatttaccaagaactttagttccatcattctgtgaatacaatcttatttgagacataatttgttctcagttggacatcttaaatggaattcacaaaacagggttggcagcagtgataactggtcatcccagtttgtcctgagatttagtgtacttttttgaagaagaggagtggtttctcggggactccatgcaagtagaattcatgccatcagtcatctccaagagaactagctgtagaaaccaaaaggtcaaaaacttatattaactgagggacctagaatgtgcacaattcagactgaaattattttctcaaagagtgccgcttttgtgtt

SEQ ID NO: 423050 - DNA, 133 bp, Homo Sapiens
ggaacacaaaagcgggagactgagatggaggagaacacaaaagcgggaggaagaaatggtactatgggcagggtgctaaattaaagtgacttaaaaagacacctgaaggcctgagctggcatcaagatgccaa

SEQ ID NO: 423051 - DNA, 213 bp, Homo Sapiens
ggaacacaaaagcggactgagtttgggacatggataatcagaacaatctgtggcccgtctgtggctaatgggatgtttctcccagctttgtcaccatggcaaatactttataatacacaaacatttgtagcgctaaaaatccacccactcttgttgaaagatggccaggttttgtaaaattacattccagctagcgctacccgctttggtgtt

SEQ ID NO: 423052 - DNA, 185 bp, Homo Sapiens
aacacacaagcggcaagtctgtgctctgtatcaccgccttctaagggaggtggagtcttcagcaggacacgtacaccactggcagagaagtccctgtggacccaagctgcatgttgccccttgagagcattaagaagacaccgcctcccatgtgaagggcagcctggcacagggcctggttgcag

SEQ ID NO: 423053 - DNA, 125 bp, Homo Sapiens
tctaaatcatgttcttagattccctgatggcaggtactcgtgcctgttagctagctggggtttcaaagaaaatctcaaatctcaggcaggccacactctggtaggcaggtagcacaaaatcgccg

SEQ ID NO: 423054 - DNA, 118 bp, Homo Sapiens
ctcttcatctcagttgactctgaggatccctctgcgaatacatacagtagagtgacccagaactgaggacacagcacagcacacaggcccgactcacaatggcctgactcacaacggg

SEQ ID NO: 423055 - DNA, 353 bp, Homo Sapiens
acggggattttgagacatcatggtcaggcaagttccttcccaggaggtggtatatgtgcaaaacctaaaaaatgagaaggatccaactaagcaaatccttctaccaccttatccatcaaattctatgttgatgattacacatcctctcagagctgtgaagtgtagttgaatcaacgctgataagaagtgtccactctcaggcatgtacaagttgctgccacagtgtgtatgcaactgtttctaaacagcaaagtttcaatagatacttgttaaggaaaagatctatgataccactgtgggacccaggaaaacgttgctgtttatgagtatctggcacttctaattaaattagt

SEQ ID NO: 423056 - DNA, 390 bp, Homo Sapiens
cggggattttgtgcaaattcatacaggaattggcaaactatcaaagccctgctttgaaggggagtgatggtggtcaatttgcatttcaaaggatcactctgctgcaatgtgggaatggaggcaagcttgtgtaagggattatcagttgggaagctgttgcagagctcctggggagagatggcggtggtctggactaggatggcaccacgaagatggacatgtggaaatgcattctggctatattaaacagggagaattgacatgaattagtgatagattaaaaacaagtagaaacgaaggatcccatgttttgccgtggcaatcttttcgcattgaatgggtacagaacgtcaaggtgcttagcatggactagcccatgaatggcacaaa

SEQ ID NO: 423057 - DNA, 328 bp, Homo Sapiens
  misc_feature (36)..(36): n is a, c, g, or t
tgatataactgatgagaatgcagccagcatatgtgntggggaaggagccggaaatggggttggaaagctaaagtgtgaacatctatcagaaaaccttgaaaatcaggatgagccaatgatgttcttaaatcaagtaatgatttgataaatgtaaagttctctttagattaatataagtcagtgtagcagatggcctgggtggagcaaaggaatggaagtatataaaagacttattaattcaagtatactgaatgcttctgggaattacatgacaatcagaaataattctgagttcttcctcttgacaaaagacatcatcagagtatct

SEQ ID NO: 423058 - DNA, 641 bp, Homo Sapiens
acggtggattttgtgccataggtgctagcacagatcacagcgagataggcaggtatacgatagatgttgacgtgagaaccatcatagatccgtaactagcttgcgtcgcatacgaatgatgtctgaacaagctaggtgaaaagcggagagtgatatgctacgggactgctgaccgatgactcgtggagtggataatgaaatcctagacttgtactcataacaccccgtggatataccgagcgtcgaatacgaacatcgtggtctgtaggcgttgccaagggcaccatccagtcagtccaactggttacacagagggtactggtggacaatggagtgctggttaaatgtaaaatgtttcacatacgtagcaaagacaggggctggacagaggcatggctggaactcccaccatgacctctccagcccatcatatctgtcattaggaaatctctggcctatcaagacccacttagtaaacagtttacagcacatagcaggtattcaataaaatgttaactagaccattatttccccataaatagctaggtgatttcttatgatgtcttttactatctttatgaaatgccgggagtggtatgctctggatgataccgaacaatcgtgacaggattatcaacata

SEQ ID NO: 423059 - DNA, 358 bp, Homo Sapiens
taccgaattacgatcaggagcacccagattaagcccggagtaaatatggccacggaatgaccctattacctgttactataaatgtaaaaccaagatttcagatttaagcttctaaattgaaacccctctttggatggacgttaggcatctagccgagaccctgtcaaaatcgaatattcactaattctcaacgtcaactgtatgggtcctctgccaaaaaaagcaaactgctaggctaggtctcttttatccttacctcctctctttgtagatttcctgctgaagtattgattgccaagatctctgcaagatttgcaaacttttacagtcatttatggagcaggcaataaaaaagagg

SEQ ID NO: 423060 - DNA, 299 bp, Homo Sapiens
tgacgaattactccctcaacatacacttagaatggtataaacttcttataactgaaggtatgagaaaaactaaatttgtcatctgctcttcaggtacgaactcaaaagaaaccccctttttctccatgaaacttacagttctggagagatttctgaggcgatcctgatgtagttgttttcggagatgctgaatttatggaagagcacccactccggcatcttcttggtgacagagtaacaagacagggggtgcagctgtgctacctgcttgtgtgtcagcatcaggtagttccccgagc

SEQ ID NO: 423061 - DNA, 214 bp, Homo Sapiens
ccgaattactcctataccacagccacagccatgccagatctgagccacgtctgtgacctacaccacagctcacggcaacgccagatccttaacccactgagggaggccacggatggaacccgcaacctcatggttcctagtcagatttgtttctgctgcgccacaatgggaactcccctccttccttattttttaacactgccttcaatcctgc

SEQ ID NO: 423062 - DNA, 122 bp, Homo Sapiens
atgtgatggagtggtctggggtagcaggacatgtgacaggcctcgaagttcaccactacaagcgtggagcccatatccacaacatcttaaagcgcagaagctgggcggtgagtaattcggta

SEQ ID NO: 423063 - DNA, 149 bp, Homo Sapiens
accgattagaattcagccttatgcaatcttcccaccactccaatcattcctccattcccctgtttggcccagtgagacaaacacagacggtgtctccttgtgaataatatttattctgctgctgactgttctcctctaattcaacacca

SEQ ID NO: 423064 - DNA, 406 bp, Homo Sapiens
tacgtacgaattactcagccatactgtgctccaacatattttccacttctgctctgcaaattcccaaaacatgttcatagggcccttataaatcccttcttttaatctcaacaacttatttgcccctaagaatgaattagctatcagttatttacaccttacttggtatttacgcattttattatctctctccaatatttgaagtttaggtggtgctcattgagacgtaaagcctttccagttatattgaagcaaggtcttaagagggacagaaattcttcacggaatgtacaaaaatggtaccatctggatggctccctaatttgccaacaaataggcacaatgttatactagagggccagagttcctaagatatgatggcaagtatccttccttaagaagggta

SEQ ID NO: 423065 - DNA, 237 bp, Homo Sapiens
gaggttacagagtagctgagatgactgacattaaccagaattacaaagtgcccggctctaaaatgtgctccgggacctggaaggaattacactcactagggggaaaattctagcatggacagccagttccatcagaatcctgggatcctctgtctcctaggatctgcatgtttctcagtagatctgaagctgtttgatcacctgcaggagctggggagtctgctgggggtaccgagc

SEQ ID NO: 423066 - DNA, 141 bp, Homo Sapiens
ggtcgcctctagacggctccccggaacggtctgcgcttcctacggacctctctccttgatgcttctcattaattcttctccccgctggctctcagccctacttagggctcctgctcagttaaacaagacccatgagacctt

SEQ ID NO: 423067 - DNA, 122 bp, Homo Sapiens
acctagcgtggatcagaatacatcaggtgccagataaagctttatcaagggtggcccccagttcttgagctgggaagagtctttgaggttgaggcaagaggaggatgaaaacccagaactgg

SEQ ID NO: 423068 - DNA, 184 bp, Homo Sapiens
cagtatacgagctacatctccgtgacccctcctctgagttaatgcacagccggcttggagcgcccacacggctgaaacagtcaccccatgcccctggcattaaaattggctgttgtaaagagtcaattataaatataaattagaacatttatctatctctcccacatttaacataaacaaagat

SEQ ID NO: 423069 - DNA, 235 bp, Homo Sapiens
aaggtctgagctgatacaatagtacttctgcaggtcacaggtacaaggtcagaaatgctggttctgctggtgtggaatgtagcacttaatggcccattatttgaggacatggagcagaggcttcaagcaaatatccagactctatttcatgtggaaacttcagaagccaatagaccagccatatttagaaataatgatagaccagactcagcatgctcatgtatggctcagacct

SEQ ID NO: 423070 - DNA, 425 bp, Homo Sapiens
ctaagtcccaacagtggcaatgatgttcattttcaacaaaagggaggactgacaatgttggacttaatctaagtcttgtactctaaaaagtagagatgttaagaaatcttctgcccttttgggttgtaggaactggctaattgccaaggaccacacaggctttgcatactctgaagtaagacccacctccgtccttcgtcatgctcccataagactctctttgtctccataaaagccaggctcattcttttctttgagatatttcttactaatgaatgtcctcctatggcaacagcctgaataaaaatcatatcctaattaacctggtgtattttgtctttcacactttcataaggaggggatttgtgtcgggagggtttatttatagtactttttgaggattttaaccagtgtgttttaagtat

SEQ ID NO: 423071 - DNA, 106 bp, Homo Sapiens
tctgagctggtatatctaactctggtcaagtaatgagatgacccatagaacaaatgatctacatcccaggaattttaatgttagtgtgaatgctcatgaccttcct

SEQ ID NO: 423072 - DNA, 214 bp, Homo Sapiens
agaggtcgagcttctattcctgacccaccagtataaaataaaggaatgcttttaagtcatacgagggcaccgcattgctgatgtaaaaatacgttagtctgataggaaagttaattaagcaataagacacgacatgacatgaattattatgtaataactcacgccttcggagtagctaggtgcaaacctgaaggccaactacctcttcagcatc

SEQ ID NO: 423073 - DNA, 204 bp, Homo Sapiens
aaggtcgagcttgaacagctcgcttactaaagcatcagcattatcaattaccctggacagtctaggaagcaaaagggatttaagtgttggcaggattatgaaacgcggtccaccgtgtcagagggagaggggtagggaggcagtgctatttcagaagcacagacaggttgtacttagaaactccctagtggaagctcagacctt

SEQ ID NO: 423074 - DNA, 167 bp, Homo Sapiens
aaggtcgagcttggttcgtttgccttctgtctttcagcaccttttggttcttctttgaagcaatgtcctcggcttagtaggtttcctaatacaattaattcattgactgccttcatgcacatggatgtgttgagggaaataaaatcatttggtctggtgagttctgg

SEQ ID NO: 423075 - DNA, 507 bp, Homo Sapiens
caaggtctgagcttcccattaaaatgaactgtacatgcatctatcttgagccaactccgtctacttgtgtattggatccaattctttttcctctccttcctcttctgcatcataaatgtttccttctcttattgtatcatataaagaaactattttttctccaaaatgttaagcaagccccataatgtacattaggcagttaagaagcagtcgaaaggcacatttttataagaacatgcctcaagtggacatcaggtttatgtgatcctcagcaatttgaatagtagttaatttcagttgtacaaaaacggaacagggtcctccacaaagctgttttgcttctacactgtgctcctgctaaactccccgaggtactaataacggttgcacctcagtgagcttccttcctgtgtgttactcttaaaaaccacagaggctcttggactcagtagtcacaaaacccccattgcttgcagggctagcaggttctatcccttaagctcagac

SEQ ID NO: 423076 - DNA, 347 bp, Homo Sapiens
ccatgtgcagagaacacatggcaagagaggaggcaagagaacacgtggagacactaggctgtttttaacaaccaggtctgctgggaactaataaagggagaactcacccacagcccccaccaagggagggcattaatctattcatgaggggtccgctcctgtgatccaaataccttccattagatgccatctccaacactggggatcaaatttcagcatagggtttagaggggacacacatcaaaactgtagcagccaacattcccacttagatgttcataaatgctaccaactgatatctcacaccgctcttctcctgactccactttttaaaatacctttaatta

SEQ ID NO: 423077 - DNA, 137 bp, Homo Sapiens
aaggtctgagctggcccgggtagagacaatacagcagcggagttgcactgctttcttacagttcgctctagcacactgtttgaaggcttttagcaaacaatggcagcattatctccaggatagttaagctcagacct

SEQ ID NO: 423078 - DNA, 226 bp, Homo Sapiens
aagggctaggatacagttgtgaatgatgtaagaacaagagaaaggtggagtctcaataaggcagccgtacaatatgtttatcaagccttcaataggtttagtatatactcctttggcgcatgcttacaagtttactgaactataaccaaacatcccactgggaaatgttttgaattgatgtgagaatttgacattaagtagcaacttgggacatcagagaggcctc

SEQ ID NO: 423079 - DNA, 210 bp, Homo Sapiens
atcttagtatttcacctcatgctaactctgaagttagctcttctaccgctgcccttgaacttagtcaatatttgcaaactgcggggaccaaaagaggatacagatcagcaagaggggtaaaagtaagatattctggaataactttttttggttgtctgtgagttcatcattccctgtttgttgatcttgcagaaccgaactccagagagg

SEQ ID NO: 423080 - DNA, 579 bp, Homo Sapiens
ggggctcccagaggcccctgctttgttgcagtggcggatgctgacggtgagaagctgatgactcggagcacaagtacagctccacgccgctggactgggtcacgctggagaccaacatcgcctactggctgcacccccggaccagtgtaagcagagcgcttgtgcgcgcagagctgtcccgtgccccagactcccgtgaccttaggagcagccgtcgcatgtgaccgaggcccagccttgcgacgtctttcctaacaaaagccttggccttgcttcctccgagtgcttcggtggcgtggggccacagctcccacacagccagggcgtcaggtcgcagcgcctctgcagatcacggggaaccgagcttcactgcagacgcgggagcacgtggttccgcttctctggcaaatgtggtttggttttgttgttcggggcggggtgtattgttttgttttgttttgtctctttagggccgcacctgcagcatatggaacttcccaggctaggggactgcatcggagctgcagctgccggcctacaccagagccacagctacaccagatccgagctgcagttttg

SEQ ID NO: 423081 - DNA, 198 bp, Homo Sapiens
ggtctgagcttaaaatgaacatcatcaatcatggcatccacaaactaagccaccaggtctgagcttgatgcaaactattatcttggaatggataagcgatgagatcctgctgtatagcactgggaactgtatctagtcacttatgatggagcatgataatatgagaaaaaacaatgtatacataaacatcaaaactgg

SEQ ID NO: 423082 - DNA, 313 bp, Homo Sapiens
ccccgagatgttactgagcttgaatcgtagtacgctgactcacactgtaatacctgccacgtctggacacgagggcgcggccaccgcgctggttttgcattttcaagagacgctccgaaccctcgcgcttctcctcggccaattcgcgaaaaacatgactcacgccctccagagccacatcgtcgcggttgaaatagaagccctgcgggaacagagaaggcgtgaacaatggttagccggagccaaggccgggcttgtggattctgccttccaactacacagttgggacaatagaaaggccaggcgcgtgcgc

SEQ ID NO: 423083 - DNA, 196 bp, Homo Sapiens
ctgagcttgtttcccacagtcactgcatttatagggtttctctccggaatgaattctctggtggattataaggtgtgagtagtaaatgaaggctttaccacattcaaggcattcgtgatctttcttccctgggggaggtgtcttatgggtgacgaccatctgcccgaagctcttcccccgggcggggaagctcaga

SEQ ID NO: 423084 - DNA, 232 bp, Homo Sapiens
ggaaggttgagcttacacacatcctccgctggcatcttgtatttatctacatggtatgtgacacaacgtgaacatgggtcagaaaatgtctagctgcacgaaaacatttcagccgattctaacacagagggagcatacacatggaggggccggaggtaaggcaggtggatgaccaggcttccctgctcacggctcgtgtttcatgcccgctagcagcgggtgctctgggtgg

SEQ ID NO: 423085 - DNA, 413 bp, Homo Sapiens
acatggagggttgcactttgccactgctacatgttcccagaggttggcacagcatgacctggacctcacctaacccaggcaaactctgctcatcttcgagctctcgggaacacacattctcttggtacacaaatatgcctagcacaaggatagcaggtaattttctttgcatgctctgttaagtgaggagagttaatcacaatttcatgaggtcatgtcagtgatgtaataacacaaattctaagacccataatatgtaaaaacaagaaaatcttacaagtggtagcagaatctggtagcattcatggtccacaaatgctctagcaccgttacatgtcatttccaaaattaccctacacaaattcaggccttaaagaaagaaatctcgagtaccaaaggccaaaaaacttcat

SEQ ID NO: 423086 - DNA, 176 bp, Homo Sapiens
aaggtctgacttgttcccgtcacggcccagtggttaacgaacctgactaggatccatgaggatgcaggtttgatccctggccttacttggtgggttaaggatccggcgttgccatgagctgcggtgtagattgaagattcggctcggatccagcgttgctgtggctgtggtgtagg

SEQ ID NO: 423087 - DNA, 304 bp, Homo Sapiens
gagtggtgcattagaattcacattccatctgaataatattaaatctccctcttggcatcctgtttatgctaatctttttcgggacttaatgatgtttatcaggacttccatttcctcttctttagaaatgtgctcagctaatgaaggaaggttggttttcttgagaaagaaagattcataagaagagtatgcagcagattcttattctgagcattgcaggttcagcctctcactgcggtgacttcatattcatcaggaataggtataatctattctgtgcacagttgatttagggcagaaataa

SEQ ID NO: 423088 - DNA, 253 bp, Homo Sapiens
acatatgctgagtatgagtaagtagtgggttaccaactgttttgatgaaatatctgcatttcaccaaatgccatataccagtctcaaaatatcctgaaccttctgaaataccttcctaagtgagctcactaacacctacttttctgtgtcctttgcggagaaggctgatttggactgagaaagccctgtgtgcactggccctagcaacccaccgttaggcagctagggagggacccacctagggcctagctcc

SEQ ID NO: 423089 - DNA, 396 bp, Homo Sapiens
gtttaatgactatactcaagatggtaaagacttgaagtgagtaaattacagttgggcaaatcagtaactgtcaaaagaaggaacgtacctgacctcggcccaagggtatcgctgtgctctggtttgtattagcttcagcaccgctgcaatctcactgaaggtcaagttccctttaaataatgctttatatatccaagtctatctgcagttataaaaatgcttcctaagaggcatttaagagtaaaatggtccagttctgaaccattccctagcacctaccgaaggagctcagtggctcctctgtgtactcagcggtcagggataggatgcaggaaagagcaatggggccaggcaggcacgcttcaggagtaagcaccgtgtgcatggcacgctgtc

SEQ ID NO: 423090 - DNA, 404 bp, Homo Sapiens
aaggtctgagcttccaattccgagctggtttccacagaggagccagttataggattcactctcagccctctgggaacaaagctcaccttttatttttggaatttcctgaaatgaagtggaatggagggactgactgccttcattttcagcttatgcttttaactacagtggtagttggcagtttttgtcaaggatgtgctttgagaaaagccaaggagccttcattcactcctgggacacaattcaatgctgatactagccatctacagccaaggagcccagaagttgtcatgtagagttccctaatgctgactagttttgacaaacacatggacaaactgcattatggattaagatttacctgtgagatcactttagtctgtccgagagaccttccgggtacc

SEQ ID NO: 423091 - DNA, 350 bp, Homo Sapiens
attgcaccgttttgccatttataaggtgggcaagtgaaatgatccagaaaatattaccttcaacaacataatcatagagtgactatgctaacagagtcttcagaccacgaggaaaatttttagaccataaagcagaagtagagggaaaggtagtggtgagaaatggggaaagaggatactggagagaataataatagtggtttaaaatagtggtagttcactcagtttctatttggtgactgaaatattgaaaaatttccatagatttcagtcacagaacaggtggtattatgatactggcaacagaatgtagtgattacaaagcacatgcttttgagtcacgcatactg

SEQ ID NO: 423092 - DNA, 282 bp, Homo Sapiens
cctgttaccctaaacactgccaaccttgacctacctctgaaagccagtgggatgaggtctagggccaggtgggaaccttgggaaaggcatgccctactgtttgaccaaggggatgaggaggctgggtactccagtgatggagaccctttccccaccttttctctcacctctcctccacccagtgccctttcacctttcctttccagccccacacccatccttccgccccacttccccatttatttctctctgctctttcatttccgtggccagccgcctccc

SEQ ID NO: 423093 - DNA, 555 bp, Homo Sapiens
ggaaggttgagcttcattgttcacatttgccttttaccaccgcgttgaggtttcggcccccttgggcctgaccgcagggcagtgtgaaggggcgaggtttcacctttcccctgaggatattcaagcgaccccccgccctgcagtgctgcctccgtcctgagtccagaagggcaggcctcccggtctttctggggtgcgattccagtggtctgttgctcccatgggtgagacactgccgtctctgagaggcacgctccccatgggcagagcctgagctgacctgtggcctggcctcaggtctggttctcctaactcctaggaacctgtcggagacccagccccaagctaatgggaataacaagactcccccttcttgatggggcctgaccccacctcttgtccctgcaatctcacaaggcttgcaaaaagccctgctcggctaccagcttctcggccaccccttccagaatcggcagccacaggaaaaggcggtttccccattccccacggctgctttgcacgctctctgcaggccttcgagatgccctgagggga

SEQ ID NO: 423094 - DNA, 426 bp, Homo Sapiens
aagttgagcttactgatctgtaaataaggagggtgaggcccatcgcctctagctgtccatcctcgtgtccatggggctcctgcagggtgcctgcaaaacctgaacccttccgacaaagatcagcccaggcaggtgaggaatcccaaatatagctgcagaggccggggtgaccagccaaggggagggaagggaagactcagggtgaaaaagcagccttccagtgtctgcagggctcttagtggaaagaggggtgaaccttgtggaatgggggtaagtggggacgtgcgggccaagggtcaagactggaccgagcaatgcagttacagagattccagatgaaaacagcggtcagcttcgagcaaagtcgtactacaataaaataggcatccatacaaggtaatgagctcactgtccccacaggtaacc

SEQ ID NO: 423095 - DNA, 182 bp, Homo Sapiens
cagagatctaaacagggtccgcctcccccatgcttggctctgatggacatctttgatgtccaaattatgtgctgaattctaaggatggaaaaagggctgagattctatgttaggcagataatgaacatggaagacatcaatttccccggcccacgctttttctgtgccgttgcattcttctt

SEQ ID NO: 423096 - DNA, 118 bp, Homo Sapiens
tagaggatctccgatcgcctagtcagcagcaagtctgcttggaaggagtagtcatggaaaataggaaaagcgggaatattcctggaggtcaagtaaatacagcgtttcaaagagtaag

SEQ ID NO: 423097 - DNA, 429 bp, Homo Sapiens
cgccacccgacccgcattggatgctttgaggatagagtgagaaacaaatgttaaaaatctataaatgttcaaagggttggcaaactatgagaaattatttagcccaaaaaactcactgccttcaagattcaaattcaagggagaaataacactaagaacaaagactgcagagtcctgccatcagctccatcacttaccaactatgtgtggcccgaacagtgatgatgataccccgcttttgcttagctgagaccaccaagcagcctcctggcccttggtatggttgctgcagctagctggcggaaaaggggccagcaggggagtttgctagaagagggtcaggagaggcagtgggtatccctaaaagttaatatattgagaacttagcttgagtctggtccttcccaattccaaaagtaggaggagtaa

SEQ ID NO: 423098 - DNA, 463 bp, Homo Sapiens
cgacccgctctggaatcagcctggagatgtctcctcagttccttgtctttgctgcttttaggtggtacttgctgttcttcacagcgaccactgacaacccagcatcacaaagtatgtgatgtgagcaaaaggaaatgtagagggatctaatgtggagactgtgagcctctggagctggtagtttgtgtgatgcatgatgatatagaatattgctgtggttcctttccatcgaaaatatagctattcctctgccgacatttgcagctgtgagaacagaacagcaggaatgcagtaggtgttcattggaggggtcgagtggaggagctcacctggttgccaggcattgctcagtgtccttggagatgagttgccatggaaacagtgaggggcagagaggaggggccgttcctttctagccaagtgagctgcagagacgaaggaaagtgaggcgggtcgggtggcg

SEQ ID NO: 423099 - DNA, 189 bp, Homo Sapiens
atctttactgagcaactgttagctcgggtcccttatgaaacagacatattgcctgtgtcgtgcattactctcagtctccctcccagagactggacttctactctgagccctagtctgatgacaaatgctttgttattcaaagagagacctctgcgctgacagaaccctaagcatctcccacaccgggta

SEQ ID NO: 423100 - DNA, 208 bp, Homo Sapiens
cagccctagtgctccttggctcacagatgcaatgctccagtcctcacaggtgcagtgctccagtcttcacagatgcagtctctagtcctcacaggtgcagtgctccagtcctcacagatgcaatgctccagtcctcacaggtgcagtgctccagtcctcacaatgcagtctctagtcctcatagctgcagtactccagtcctcacagg

SEQ ID NO: 423101 - DNA, 601 bp, Homo Sapiens
  misc_feature (131)..(187): n is a, c, g, or t
tgccggtgctctactgcctcagactcccgagtagctgggatctaccggcgcccgacactgacgccgcggctaatttctgtatttttagtaggagatggggtgtcatccggtaagccaggattgtcttgatnnnnnnnnnnnnnnnnnnnnnnnnnnnnnnnnnnnnnnnnnnnnnnnnnnnnnnnnntgagccaccgggcccggcctctatgtcttcttcccacacatatgagtaggcaaccatagttgggccaataataatgatgatgctgataagaactgtaatttatgaagttattcttcttatgtgccagagactaaggtaagcattttacatacatgatttctcatgctcacaacaatttcatgaggtagatagttattcccatttttattttacaaaagagaaaaatgaggcccagagaggtttgagtatcttacttaagatcctactgccaattaagtagaagagcaggacttgactccagtgcctggactctggacagtagacagtatactatcaaaggaatagccatcataatgataagcatggaaatgataatgtaacttcctggttctgatacggataagatctggctta

SEQ ID NO: 423102 - DNA, 183 bp, Homo Sapiens
  misc_feature (108)..(143): n is a, c, g, or t
gctcaatcgagctcgtcccttattggagtagtaggggtggaaggcaggttgcagcgggtagcacatgaatgggaagtgaagaagtttggctgaaaaaggaagacgaannnnnnnnnnnnnnnnnnnnnnnnnnnnnnnnnnnntggcagagttgagcatgcttatattttgagtgaaagggac

SEQ ID NO: 423103 - DNA, 168 bp, Homo Sapiens
ctgcgttgcctctactgggaattcaagacatgagatagaagaaaacattaaccctaactctccaattatataggaaataatggataattcaaataacaggactccaaaatgctcagtacaaatgtgcaactgattttaacctcgtccaaataaagacgaatgaaacaa

SEQ ID NO: 423104 - DNA, 279 bp, Homo Sapiens
taaggcctggcgacccattcacacccacacacccaaacagggagacgcatcccaaaagaaagctccatcttctcagtgtgtgtccccagcccatttcactaggagttctctctgcttcccattcttaggaatgaactgtctctcctgaatccctcctagagtcccccaatttggcctaggctggatgaggctaccatcagctgccctggagatggaatagggatctcctcagaccccagagcggctcccagcacctgctaaggctggaaggcctcctgt

SEQ ID NO: 423105 - DNA, 136 bp, Homo Sapiens
cggctgcgctcgtatggtaggcacacgctgatccagtcagtgtagcgcgcgtgtcgatgcccggacatctaagggcactcacatgacctgtaattgctcaatctcgtggtggttgaaacgccacttgtccctctaa

SEQ ID NO: 423106 - DNA, 335 bp, Homo Sapiens
tggtcctatgcggtgctctacttactccggttgcctctactcctctacgacgaatggatgactgggtgaatgactgccttagaaaagctaacaggcaaggaagaaagccctgaatgagcatgtgcttggaccctgactgtcttgctgagtgccaggccaggataccggccccaaatcaattgagccttactcttggtcttggatgtaggctagtctgaaggggaaaagccaccgggagggaattagttgtcagctaatacctcatgggacaaagggctagggaagtagtagttctaactttgggtatggcagagaaaaccttccaatggccaggc

SEQ ID NO: 423107 - DNA, 131 bp, Homo Sapiens
ggtcggtaccggccgatggcgggtcgatctggtcaccaaaagagacgatgaggcagggtcgccctggggctggatgcgccaggcggtttcggccggagaagatatgtctgatatagcgttcaacggcacga

SEQ ID NO: 423108 - DNA, 261 bp, Homo Sapiens
tacgatcgcgacagcgcgacatcgtgcctctgcagatcaaagtgcagcgcgagcagagccagcgccagagcgacaaggaacaaccggacacgctctggaagatcgaactggctttcgatatccagcctctgggccccttgcaggtccaggcacagctgctgcgcggcagcctgtccagccagctgtgggccgaacgcggcgaaaccgccgagctgatcgccggcgaactcgaacatctgcgcgaacgcctgcaggccgccg

SEQ ID NO: 423109 - DNA, 123 bp, Homo Sapiens
ggtcggtacctactgcggttgctctactgaaaggacagacatataaacaaataataatatcatgtggggggggtttctgcttcccgtatatttgagaacagcatcaaacattcccatgaccat

SEQ ID NO: 423110 - DNA, 127 bp, Homo Sapiens
tcctgtccccaggcagagcacggtagagggcgcgcaaatatgcagcgccgccagcattgcgttgctgtgctgcccagtctgcgcaggtgagatcgcatgatcatgccgcgtgtggcagcaactgctg

SEQ ID NO: 423111 - DNA, 497 bp, Homo Sapiens
taggtcggtacctactgcggttgctctactcagactcagcttgaggaggggacctgtgaagctgagagtgaggcttgtgtgcccccttaaggggcttgctctcctcccaagagctagtggggagtcacaggattgcaggcaggggagtgatgcagtcctgtgtgtcttagatcactcaggctgaggcaagactgagacaggaagatcaatcttttgcagtgatccagatgagaaatgatgtgagcctggaccgtgagaaagacgagacagtgtatgcatagggtatagacttgagagagggatttgagatggaatcaagagttgtgttaattcattggactatcaaacagagaagaaattggagtcaagagtgactcatgggcagctgggtggcagcagtcattgagatagagaactaagagaactgatttcccaaagaaaatgagctgctagatttgatattcccaatggactccggcgagagatgtctactaggc

SEQ ID NO: 423112 - DNA, 417 bp, Homo Sapiens
  misc_feature (244)..(305): n is a, c, g, or t
ctgccgcgcctctactggtgtggacgggtcaaaggacagataccaatatgcagcctagtacacgctaatagggaagggcagggcaagagatgcactgagagatcggatctgcaaacttattgactttgctctaaggttcattacaaagtctcgactgtctaaacactctctcaagaggttggtataagccaagtcagatgattctgtagattctctttggagtatggggtttctcctaagggcnnnnnnnnnnnnnnnnnnnnnnnnnnnnnnnnnnnnnnnnnnnnnnnnnnnnnnnnnnnnnntcttaggtgccgcgtcagattaattacatccaactcttcatgggcagggctgagaaatctgcacttaaacatgtttgcagggtgaacctcctgcagtcactttggtgtttgg

SEQ ID NO: 423113 - DNA, 120 bp, Homo Sapiens
gacttgtcgcagttgcatacatcaccttttttccgacagttgttgcgaaagtcaggtgattatcatcgcttttttgggtgattgaaaatagatccatcgataaagtagattgtttatgca

SEQ ID NO: 423114 - DNA, 115 bp, Homo Sapiens
caacgtcggacagtctgctgcaagtgatcccccacaatatcgctcactacgccctggctgctatgggtgcccaacgacgccatcccctacatcgccgccggtgacaaagtctatg

SEQ ID NO: 423115 - DNA, 457 bp, Homo Sapiens
acatatcacatctttcccctgtctcagtacatgctcttctctcagtctgaaattcccatcctcttctctgacttctgaatcctactaatccctcaaggcccagatcctccaggaagaaagggtcagtctccccacctgggatcctgagcccttgccctaacccccacccaagtatccagtcacatgaacactcccaataatcttatgattacaataacacccctcccaccattagacagagagcatggtggtctgtgaacaacattgctcttcttgataccagccttgccactgtcccatcccagggctggtctggcacggggcaggagcctaaagagaatctgataaattgtgatagctggcaagaacagaggcaggggaaatgaggaaggaatactttttaactgtgtaataccagcctgtgtatccttgaaccagagcccagcccacatccaaa

SEQ ID NO: 423116 - DNA, 104 bp, Homo Sapiens
ttaagaccagctcaggcctagttcaggataggcactcaattcacgtgcacggcaagccaactatgagataagttaatgcatttcaacgaagaagatgctgggcc

SEQ ID NO: 423117 - DNA, 119 bp, Homo Sapiens
ctgttgtagccaatagcttgaacgatagctaaagggcactgaatgtttactgtatgtgaacgcatgggagagacacttgaggataccatctcatagagtcctcccagtgattctaagag

SEQ ID NO: 423118 - DNA, 548 bp, Homo Sapiens
tcctatctcaccatgaggacaaaactctgtctctgagattatttccagctctcacacactgtgattctgagatcctaaacccagttgctgtgagctctggtgagagccgcccctgcctgatgggagccccgccctttccaccccctcctcaccttaccctccagtggctgtgggaaagcacgcacatattctggaaaacagacccacacgcacaagcctgcccctgtatgacagcccattcttctgggcctggcaacagctcttgtggccagcgccagggagatgaaggccctgtctcagcaaaggcaccttcaggaggctggcatccctcctcccccagccagcagtggagaaagcccctgggtctccctcaggggtcgagattgggctggagccagagagcaggtcccagagtgaaagtcatcacggctgagaggggcccaaagggcagcccctgcctggtgacagtaaatagcgactgtgatgatgatgactgtgataaagggacacgtgggaggtgccaatcctccaggctgtgtcgcggcact

SEQ ID NO: 423119 - DNA, 112 bp, Homo Sapiens
cctccttggcctcaggataacatcatgttcttagctccacttatgaagtcctctgtgaccaggcctcactcacatcctgacctcttctcttctctcatcccctggccacccc

SEQ ID NO: 423120 - DNA, 476 bp, Homo Sapiens
cagtgccacaggatacgggcagaaaacgagggccagagaggaaccgtgactcggccacatagctagtaaagtgagttgtgcccaagcaggcagacagactggtgaactttgatgctatcctgtttcaagaaagcgttcattgagcacctacttcatacacaacagtggcctggctgctgaaggctgagtgagaagaaagggtaacagaaataaatgggaaacggatcctcatccgtgaagcgttcacatgggaaatgagggtcctcctcaacttatgtgtcacacacatagtgacaacttgagaaggtttaggtccaaccaacatgtactgagctccaacagtaagtactcgtggccagaggacagagctgaatcagaagcggccccagctgtcaagccatgtgtgaccatcaaagcccaaacctgagtatccaagggccacaggggtgagagggtgttggggaaatcaaggaggt

SEQ ID NO: 423121 - DNA, 498 bp, Homo Sapiens
atatggaaggtagagcatggtcacaagggaagaaagtatgtcaagaagtagggcgatataaaatgttagaattgctgcagaaaagtcaagtaagatgaggctagaggaaggacatggagcttggcaacctaaaagtcatcagaatcctttcaagaattgtctcagtgtaatgacagggctagaagccagattggagtaggctgaggagtgagcaggagtcttacccgttactatcaaccctctgtactctaatagaacttatctcactacgctgaatccatatccttttcaacttttcaaatgaagtgtgagttcattaggaccataaattatttatttttgcattctagtcttatcacaatagtcagagtcgtcctcccaaatcagatcagctctctactctgcctaaaatcctccagtgactctcaagaatcctcatatgaccttccatatcagccattccctttatctctctggcttaatctactacctctcgcc

SEQ ID NO: 423122 - DNA, 218 bp, Homo Sapiens
cgtcgtgtcgtcctaggatcacgagcgcacgtgttaggaccagacggatggtaactattcctggtccggctgaagccatgaggacactctggtggagtgtcgtagctgtgtcctgacgtgcaacttcggtcgtgcgatctgggtatgggggggcagactaatcgacgcagtctagtactggttgctccgaagtatcccacggtaggtgctgagcggtt

SEQ ID NO: 423123 - DNA, 385 bp, Homo Sapiens
agaatcgagctcgtacacgtcagcactcctgggggagggtgttagtataatattgtgtcagtaggaaggcagtaagaagattggagtaagacaggatggggttacatgtatataaatgaataaaataagtactgctaaaacttgagtctgataaacttttttgccccgaagataatcatcccactgaaaagaaaactctggggaaaatatgccagatactaggaccaagcacggagacaaaccagatacagtgctttcaaagaaaacatgcttgctgtcctttgttaccagtgtaattgtaattattgtttattctgtgttaagtgactgaatttcaatttttaccttttaaaaataaagagaacctctttttacttctgtattg

SEQ ID NO: 423124 - DNA, 571 bp, Homo Sapiens
tgtagttgatgattccagatcagtcagactgcttccttagttccgtgggtgaccccggagcccgcactcagtctggaggtgtggagcctgggggcccagggagatgctgggcgtgcaaattcagcaggcaagagcctgctagaggaacctcactggtgcccctgggtaaggaggttgacgcggttggtctcgtgatgttctgaagagacaacgcggcccgccaggttgctgaggactaacttagcaggagccaggggggctctgcttggtggggcaggagtccggtgtgagtctctgactcaggctactgacccggtgttggggcagagtgggggcgggtgtgatttggaaacgctagacagcctttgatctggtccttaccatggctcccttcaggctgtgtagatggcagagatggtacatgggatctgggcaggagggtcccttgcaaaggcaggtgcaagggttctcacccccggcagagcctgtctccatagctgagtagaattcctgccctgatttcgggctgcccagctcgaggtccttcccaggagacgcctgtagccctccg

SEQ ID NO: 423125 - DNA, 390 bp, Homo Sapiens
ccaacagcgggggtgggagtctgggtctcgctcaggccagagcttctcaacctggagtccctgggggtggctgccaaaggtgtgtatgacaagcacgtatccctggacatttccggggagaggtctggggctttggtcacattctccaagggctgctgggcttcggagcagtccccccccatgtctcagccactacagggtccctctctctccttgcaccccagaccctccgctgccctggtaatgagcagaaggaaagtcttggggtgtgctcaaagtcaggagagcaaaatatgccaggcaaaagctcccgggaaaagccggaggagtctggggtggccaccgggatgtggagcagcgagggcaaagacggtgaacacagccctccag

SEQ ID NO: 423126 - DNA, 100 bp, Homo Sapiens
tcggttttactaactgtcttgatgtggggatccccttgcgtcacagcttgtggtactcgcaagcttgtggcttcccgctggttataccccgtgatgagtg

SEQ ID NO: 423127 - DNA, 334 bp, Homo Sapiens
gtactcgttgcaattctggactcattcagctgcaagaagaggagaaacataaaagtagtgtcaggtcaatctgtttcctttcccatttaatgaattcatgcccaggagtgagtgagaaatgggaggactgaatctgctgttctccaagactagcttaggagtttctgacatcatgggcatcccagcaagccaacggtcacattagtcaccacgtatttttcatatcacgtgatccctctatcagtgtatcagcctttgctgtataatgaacaatcctgaacatcaatggcttaaaacaaaatcacttattagcacataatttggtaggttcata

SEQ ID NO: 423128 - DNA, 434 bp, Homo Sapiens
ctatgtgttccagcagaggttggttgttctatttttgcctcctcctattatgctttttctatctcctcctgctaggtctcagtgtatttgagggcttgtgtaattcgtcttctctccttcggggattctctacattcctgctgcttccctgcaagctggtgctcgtggacgctcttgtacagtgtcgtctgtcggcatttgttcgtcgtagtttcatttgggacacaagatcctggcgcgccaacaatgtcaacttcctgctttgctattgtccgctttgcgccccggaagcaggtctctagctcagtttctgatctaatgaatatacaagtacggtgcttattttgcagttaattatgcgtaaacaatgtaaacacattaagcacaggtgctttacttagtaatgtgtcttttactaaatgttgtttaaattt

SEQ ID NO: 423129 - DNA, 505 bp, Homo Sapiens
tctgcgattctccccccagtctgtgtctgtgcgtgtcccactagccccccaagactcgagaatctgtctccctgcctcaatccagcacttgcagtgcttcccttcctccttggcttctctggagtcgggctctttctgtaggagccttgcctctggagcggttcgcacacacaaggatgttgaccattccctgaaattcgccatatcccagttgatgtcagagtcctcttttcctcaaatccatttccaaaccattactccactttcatgtaaaagctctcatccctttgaagataaggcataatgtcaccctacccctcctcattcaggttatttcctagcctccaccattcactgatattttcgaatcgggttagtcttccttactgcagtgttggcttgttttcatcataggagacctcactgtccttgagtaccacccacatacccactgctttgaccactacaactgaggtgacctttgtcccaacagacaacggtcata

SEQ ID NO: 423130 - DNA, 157 bp, Homo Sapiens
acgtatgtcctgtcattgtattgtctctttctctggctgcttttcacactttccttctgattcttgatgttctactcttacacacagcatgtgtcaggtatgaatttactacttttcgttctcgtgttgtctcttgagatggagctctcactctgtg

SEQ ID NO: 423131 - DNA, 120 bp, Homo Sapiens
cattcctactgcatgcttctttcattattcaggttttccctctatcctttcaacatttatcctgagtgctactttgctcttgaatctagaatcacttgacaatttgcctaaatttgtgtg

SEQ ID NO: 423132 - DNA, 509 bp, Homo Sapiens
  misc_feature (110)..(406): n is a, c, g, or t
ttcttgctttactttcaataacatgaggacatagaaacacactaaatgagggcggtcgtggtggtggtgtttggtcatattcaactgcagtcttaaagagaatgcgtccnnnnnnnnnnnnnnnnnnnnnnnnnnnnnnnnnnnnnnnnnnnnnnnnnnnnnnnnnnnnnnnnnnnnnnnnnnnnnnnnnnnnnnnnnnnnnnnnnnnnnnnnnnnnnnnnnnnnnnnnnnnnnnnnnnnnnnnnnnnnnnnnnnnnnnnnnnnnnnnnnnnnnnnnnnnnnnnnnnnnnnnnnnnnnnnnnnnnnnnnnnnnnnnnnnnnnnnnnnnnnnnnnnnnnnnnnnnnnnnnnnnnnnnnnnnnnnnnnnnnnnnnnnnnnnnnnnnnnnnnnnnnnnnnnnnnnnnnncaaacagaatgctcttcactcctgagatgtttttacaaatcctggaagataagcgtaatttctgaaggctcaataaccactactggatgatcacgtcaactat

SEQ ID NO: 423133 - DNA, 129 bp, Homo Sapiens
cccgctcggctgccagtaggccagcggctgcgggtgctcggcgccaggaaggtcatgccgacattgcggcgcgcttccgggtgcacggccagcacgtctgtccagcagatactgcgcatcatccagggt

SEQ ID NO: 423134 - DNA, 139 bp, Homo Sapiens
tgtgactggacaccttactgacatcttcagtacttatcactgtcctccaagctactgtctccagacactgggcatgtcaatccctggtaatgacgtacaaccaacaaaaatcttacctgatctaacaagttcaatattc

SEQ ID NO: 423135 - DNA, 221 bp, Homo Sapiens
taacccacttgtagttagtctgtttcacactgcttataaagacctactcaagactgggtatttatacagaaaagaggtttaattgacttacagtttcacaagactgggaggcctcatgaaactttagtcatggcagaaggggaagcaacatgaccttcttcacatgtgcggcgaggagaagagaaatgagagcctaacaaaggggggcaaatcccttataa

SEQ ID NO: 423136 - DNA, 300 bp, Homo Sapiens
ttgacagatgttgggtgtggttccatggaatgaaaaacagaaaggttaataaattagttttctgattcaagaagtttagctgatgaacccaggtatacctggaaaactcgtttcttactatgcaaaaccacacagcagccttcctaaaattattactgatataatcttttcttaagctcatccagtgcagtataatatgggtaaaaaaggtcaaagaaactgacttactgctaaaaatatgtgaactttgtgaataattgctatgtcaattctagtgagagtcatcataggcctttccat

SEQ ID NO: 423137 - DNA, 249 bp, Homo Sapiens
  misc_feature (239)..(239): n is a, c, g, or t
ctgagccaccatacccagcctctatgtagctttgtaaaaaatccttgtagctgtctcttttaggaataaaatgggaggcaggtttgtctgacacagttcccagcctgacttttctctttggcttagtaatttttaagcttctttcacaaccttctgacagacataatgctttgacacactgatattggtttatatagattttccaaaacagtaaagtccaagggtctatcctgaactgngttagcggag

SEQ ID NO: 423138 - DNA, 476 bp, Homo Sapiens
taaacttcgtccggctgtcttgaactgctggtcattcaaggtcagtagatccacccgggtgacaaaagggaggtatatttgatctttttcatgtatttgtttcctaagacagagtttaattcttgtttcttaccattctcaaatttgctctttattctcttgtcccaatgctattgccctatgataagcatttttcagctcattccaaaagttgttctcactctgttccatgggaattttcagatacataaaccaaattgagcctaaatatgcctccttcctttctctgacttgtaattgatgcccaatatagcaatgtccttcccgaagaccttgccatcatcacaaaatcctttacatacccatactcgccctgcatgtgtctccccaggctctccgattcctctttcatctctcagttggaaaaaaatagcgctatttcaagaaatgcaatccaccagtagggagtaggaaaa

SEQ ID NO: 423139 - DNA, 323 bp, Homo Sapiens
aatcctgtgcggaaggctctgttaaaagagaaccatcctccatgagacaagacctgtcctttccatgggagaggcagtcattgacaagtgtcctccaacacattctcccagtttatcatattggcactgaaggaacactcaggtaagtattaattgccttgagattaacaaaggaattcagccattaaccactcttaacattttgttgtattcactgcccattttatataaccacttaaaactggaatcatatcgtgtaaagattttttgtcacttgttttctttacttcgtgtttatattatctttacatcttcttactaat

SEQ ID NO: 423140 - DNA, 155 bp, Homo Sapiens
tcagctcgtactggctgctgcttgcgttcgccgttgaccgccagccagattctgccttccttgtagtggcctggtctgggccaccggattgatctgggccgatcggcgccgcgtggtcgaagctcttgccgatctcccacggcttcttctggtcg

SEQ ID NO: 423141 - DNA, 486 bp, Homo Sapiens
aaggactacagtgacggcctggtgcgaccctctccacagggtctctcctttgtagttctggaaggtcggctgctccccgcgacagcgtgcaccatgcccagagtcctactctctgatgctgaatgaaccatagttcacacgacagactctcttcagggtgctcttccagaagttatctggaagagcagcagtcctgtccatcatggaaatactagaaatgttaagaatgcaacagtaaggagattctcttccctgaaggcctttctttccttaggtttaacctcatgctgaggaaaagcatccactagctgcagcccttaggctcttggcctttgctttcacgagcatgagaatgtgtgctttcgaatattttgctaaattccccgaaatcctttaaagcaaggagcaacagtgagggcagagtagtatactacatcagacttgggtatgctccatgccagctccttctcattaaatgctctaggg

SEQ ID NO: 423142 - DNA, 584 bp, Homo Sapiens
gctaggtcgtcgaccccataggcgagagaaggcaacagggcaccggctgcatttgatttaagctacttaaaagcagagggttgtgcaagttcaagtatattgattttaccagtgggacttaaatcttttataataagtgtacacagctgcagtgctctcccaccactacgctgtgaaggctaatccgcagattccttctgacaataacatgacaggtcccacacatccctgcctgtgccctaaccccggtgacagtgccagagtgcattaaggcgaagccttgcagtggcttgccaagaaaccagtgtgccaacagcccccccgctaagactgaagagtgagcgtgaaagaattaatgtggccagaagcatggtgcaaagggctccccattcaaaatattcaggctgttacacggatgggcagatggggaagggtggagacgggggagacttagggcacgctgattcttgcaatgggccaaatatgaccttaccaaatgagggagagaattaaagtgataggagtgcccatcaacttagatgggactctcctgtgatgagtaccagttgctctgattcagcgac

SEQ ID NO: 423143 - DNA, 153 bp, Homo Sapiens
ccggggtgtcttcttcaacaaggttacatttaagcttcaaaaggttacatttaaacataaaagaggaaccaagcataagagccaggtagacaaaaagacggtccaggcagaaagaaaagcacttccaagaggccctgaggcaggacagcatgt

SEQ ID NO: 423144 - DNA, 188 bp, Homo Sapiens
taacatctatggggatccaaacagagtctagccatttcgggctgagatcagcgatctggaagagttggcagtgagaaattgtgggaaaaaatagaagagagaaggtagatgcaccaagagaaagaatcagaatgccctgggacactgagtgctgatatgcactgcatgggagggaaatatctaagacg

SEQ ID NO: 423145 - DNA, 549 bp, Homo Sapiens
gcggtacctgtaacatctatggaaggctgatgtagaatagctccaaatcatacttaagaatacataactaaggtttattaagtactaacgaggtctcaggaactgttctaagaactttacacatagtaattaaaagaaggcccacagaagtaatgaaaaacatctaccaaatgggtatgtgcatacaggctctcgggaggggacctaggtatcagctcaatggacaggacatttatggagaatgaaacaaatattctcatgtcctaagaaataagaatgcatttcacagaagaaagcagaaacacccactcgcctcgaccttgacttaaacaggcaacagcaattcattcctcctcccgctcggaccccttttcttaaagaatcgggcaggactggctaataagggaaccaggcttttcttgcagcccagcctcgcatagggcacaatgcccccaccgtccacccacacataaccagagtaacataagagagatggtgttgttaactcttcccagtatcaaagaaagggcaggctcatgcatagattgt

SEQ ID NO: 423146 - DNA, 527 bp, Homo Sapiens
taacatctatgaagaagatcacagaccagaaggcaagtagagctggcacggatctaatgaataggtgatcagaagaccgtcccaatactcttgaaagtactgagaactgattccctattctctcacctatgaccagccggagagaaccatattttctggtcttccagatgaatcctattcaaaatattattcactgtgaggctataattattagtccttaacttactacttaacagtagccctcttctaagctgttatctctctgcctgttgtttggcttaggaaagttcctgcaggacctgccttgactttgaaccttttttatctcaccttatttgtcttattcccactacattagttaaaacaaaattcccctttcctgtccagacacatcagacagataccaccaataagaccctccctgcttactggcaagagcatatcaaaaacacctagacagttttcctaaaaggagaccattaaaaaataaattcagaacctaaagcaaacttctaggtgtaattcat

SEQ ID NO: 423147 - DNA, 509 bp, Homo Sapiens
taggtgcgtagcaaaatgtattctatatttaaataattcttacatattactaacaacagttagcatttatgtagcctcagaagactggaactcactttgaatgaatgttgcctcataacacctctttgatgtagtcaggaagtatatgattctctcaatgagaaattctggttagaagagttccccaaattatataacaaatcaatagaggagagatacaagtttgcacatttttacttcacgttatgattgtatagttcttgaagttggaaccaagaagccatttgttataaaggtataatggaaagcaacttgttctttggaggcagaaagacctgagttcaggatatttcttatttaagattttccttatatgtaacaagaagatacaaatttaggttgaaggctatgggatataggtgatcaataaataggagccattattcctgatgccctggtatagcattagtgagacagtcccacttgagaaatgtgatggagcactcagt

SEQ ID NO: 423148 - DNA, 395 bp, Homo Sapiens
ctgcttcttgaaaaaaattgcttagcactagttccaaactgttttcacagttgttacatcctcagcctcaaaatagccttgtgagccaggtagcgagcagatacccttgggagcccaatttagaagacaaattaaccctaacaaggtaccaggtgacttccccaaaaaacacttgaatggactagatggaagagaagcaggcagcagggacagaagaccagagggcaggtagaggaaggtgttgagctggccgtaggagcaaaggctgtggagaccagagaatacctgtcccaacagatgcagccagcctggagccctgccaattgttatcaaacaggaaggtgggctactactgctgcttctggtatttcaagaagcaggaactggggggatcc

SEQ ID NO: 423149 - DNA, 462 bp, Homo Sapiens
tgctcggacccagtttctgcttcttgaaagagtccactttcccacagttatattaacacctttttttaaaaaaaccctcacaatactatattaatttggtgttattatgcgttcatttgacagacaggaaaattgagactcaggttaaatatgcacaaatagagttgaagtttgcatgtaggtctgtccgacttgaaaactgttctctgcattacattaccaaaatgtgctcttctcaaacttaaaattggcactttggaattgaagagttaggacatctccatggctgcttaaatgctgatcaattagaattcttaatgtattaagaaacaatcaggagatgttttgaggtgaacataactttgagtaatgatatcctgatgatgagcacagtgtagaagagtgctagtctcatcagcagttctgggtttggcctgccattaagaagctctgtgtttctga

SEQ ID NO: 423150 - DNA, 210 bp, Homo Sapiens
gctacttgcaacagtggctggaaatattatagtctccacgtcagaataccaagagacgttcctatattacagttttaatattatatttaatggggtacattcttttactatagtttaaatctcctgaacacagagactactctagtatagttcacctgtgctccctgtgtctaagacctaaaccggtgtacagtgggagattgataaata

SEQ ID NO: 423151 - DNA, 267 bp, Homo Sapiens
atcgagccggacccagttctgcttctgaaaactgatgcagaattagagaatacttaactctctcaaatttgggtacaatttctaagaatctatagtttagtgactcattggcgacgctaatgactactattccccccccacccactgccacccaagattcacatgtgaaagaatgcaaattcaattcctcctgacaaagaaatctaaattcatggattttcccagctgtacccttgagcgagaactttcccaaagtgaagagcatgg

SEQ ID NO: 423152 - DNA, 182 bp, Homo Sapiens
tagaaatgcgatcgttctattccttctatattcttgcccaatcttaagccacagagtaaatagattctcgggtatggatacacattgggctactttgtctcaagtggagtatcacaaagagatgctttctcacagattagaaagagcttcctctgggcttgggaatgggagtgaggtcagga

SEQ ID NO: 423153 - DNA, 280 bp, Homo Sapiens
cagctctagatacctttaagcatacttatttctattcaagtttttctattgtctcagcagaatttagtttacctgctagttactccattatccccagaagcagaacatcccatggtagcctctaagtactttttatatacattaattgttttgatcattaccaggcttatctcccctgccagtaaaggagctgttcatgccactgccattaaaggagctgttcatgccactgccattaaaggagctgttcatgccactgccattaaaggagctgttcatg

SEQ ID NO: 423154 - DNA, 346 bp, Homo Sapiens
ggacccttatgtctcacccaccttcaaatctgaccttcatggttagttttactctatctctaaattatttaaaaatatcaagaccctctataatctcactggaactaaccttatttgcccttcatgtctactctacttaacgtctcacaaatatgttttctgtattccttccactgccttttcttggtcctccagtctgaagattttctttaaaggctcccgtcgagttccacttcctccatttttgactgtgccagccttcacggatctctattcctctgactgacatagcctaacccaacatatgatatagtactaaagtttatatggtgggtcagaacataag

SEQ ID NO: 423155 - DNA, 428 bp, Homo Sapiens
ggctcggtacccttatgctctgacccacctgggaatactgaactacacatatctcacttaggatcttatgatcttaggggcatatgcttcaggcagcttgtcataggatctctttacacacacacacagcatcccatgaggcagtgctatggagaaaacttcactggattgaaaattaggaagcctgagttctagtcctaaatcttacgtcaattatgcaatttcaagcaagtcaactctctggccttttcaggcttggttcttcatctctacagagaaatgagctttatggtacttttgagccctgactgctcagtgataagaagtcacctggagccagccagctgcacacatactcactcattcatgtctccaccacagccaagttggtcctcctttacatcttgcctggtgggtcagaacctaag

SEQ ID NO: 423156 - DNA, 170 bp, Homo Sapiens
ccgtttgtcgtgaccaccttccatccaccaaaacctcacaagaagaacaacaagccaaagaagcagttagatccaaaagagatggttctaacgctggctgccttacactctctcagaagtctggccccgtgctttaattcgtatactagttgtgtgggctcgggaaaatt

SEQ ID NO: 423157 - DNA, 482 bp, Homo Sapiens
ccccactggcagcaataaaaaaacatacaaacgtactggtgctttcctgtctaagtcgcctttgtgtgttcttttatgaggcccccaccatccacccctctgtgcacaaggcggctcccggcccctggaatgtgatgtttttggtcatctccaaaggctgcagttttatactgggaggctgatgacaccttttattataattattcttatggttctggttataattatgtttgttttaagattttctttaagaaaacaaaaacccaacacccttccctttaggtttcaaaccaaggtgcgggagcagggtgcttctgagttagcggtggctctggtgccctggctcccacccctcgggccaggtgggccactgggcatagtgacagctgggcggccagggagtccccaaggtctgccttctgggcttgtcactcttctcttctacttcccctcctcttgagtcgggtgggtcagaacataag

SEQ ID NO: 423158 - DNA, 463 bp, Homo Sapiens
gtttgtcgtgacccactaatgcactgggagggtgctgatgtagctcaattgtaattaaatacatcacctatagtcatggcatactcctctaccattgggaggcagtataagatcgcagcttaaagcacaggccttctcaccaattttcaccatctaggaatttaatacacagtgaacagctgtctgagagtgtgcatggcagtatggcttagaacagcaagaggctggaaagaacccgactgtccacccatgaatgggtgattaaactgtgttataaacagtgcaaaactatgagttatcaaaaagattgttatcaagacttctatgtgctgatggaaagacattcgaattgtttttaatgaaaaagtcagggtggtttagtatgtttccatctgtttcaaaaagacatgctgacagaaagcagacagcaattgttagggtcagtggtgggtcagaacatgag

SEQ ID NO: 423159 - DNA, 317 bp, Homo Sapiens
tctgaccacatggttcacagcacttatatttctgcctttatgcatttatctatgcggagcatttcctgtagatgaaatcgaggttcatccacactgcagcatgtgtctttcatcctgctgcaaacatctgcgtgcgaatttctgtgcagatgtctagtgtgcactgctagcccacatgggactaaccagtatcttctgaattagagtgcagcctggttttcattcccttcacaggttctgattcttccttccccaggacactttcaaaatgcctaaccacatcctctacatcctggtatggtgggtcagaacataag

SEQ ID NO: 423160 - DNA, 268 bp, Homo Sapiens
  misc_feature (42)..(42): n is a, c, g, or t
  misc_feature (50)..(50): n is a, c, g, or t
gagctcggccccttatgtctgacccacccaacaaaagcatcnagtccaantcaggctttgacaccactccccgacacagtgctaaggagttccacaccgctaatccaatggccaattttcacttctctccagggccaatagcagatacccatgtaatctgtgtccaagcaccactagcctggtccatcagaaggaaggggagcctagaatcctgacataaaacttctggatgtatggtggggcctaaagtgtatattcctattccaag

SEQ ID NO: 423161 - DNA, 130 bp, Homo Sapiens
cgtttatctgaccaccctcaccgcaatacttgatgtaaaatcaccaggcaccctcttttcatcgggcccaaactcagacacccacagaactaaacacggaaaacacatgcatgaagcccagttgagtatt

SEQ ID NO: 423162 - DNA, 177 bp, Homo Sapiens
tttggcggagttctttgccgtccccttaactgcctaaaagcagggcataaattatgctttgtgaaggtgttctccatactctgtggaccaggaagaggagtgacttatcaccggagatggagagtcaagaccgagatgagtttgcacaaacagacctaactaaaataacccttatac

SEQ ID NO: 423163 - DNA, 289 bp, Homo Sapiens
  misc_feature (99)..(160): n is a, c, g, or t
  misc_feature (163)..(213): n is a, c, g, or t
cgtctgtgaagcaacaggaagtcaatatcattgccggagaaaattagtgatttggactgttggatgacatgagataaacagagataggcagtaatcagnnnnnnnnnnnnnnnnnnnnnnnnnnnnnnnnnnnnnnnnnnnnnnnnnnnnnnnnnnnnnngtnnnnnnnnnnnnnnnnnnnnnnnnnnnnnnnnnnnnnnnnnnnnnnnnnnnatttcaagcattttaaaaactaagaagagaaagatcacatataaattccatttattgaactgccatcacctgacag

SEQ ID NO: 423164 - DNA, 147 bp, Homo Sapiens
acacgattaagtggctataacctgacacccatttatatatctcacagtacaaaatctcacggacagaagcacagtgggcatggttggattcactgcttcaaatctcaccaggttaaaaacaaatgttgtcccaaaggcactatcact

SEQ ID NO: 423165 - DNA, 343 bp, Homo Sapiens
tcgacccaccaggtagtgggtattctgggttaggcctctctattttagagggcctttatgctctgctgcactctcgaactattcagccttaaattatcttaatctcactagtcaagataataaggactagggttagtaaaaactgtccaaagcaaactgtgtatttttaattgacattaacttggatatctttatatctatgttttcagaaatgctgagatccttgcaattgaggtttggtttaccctaatcagtttacactaatgagtactgttttgatttatgcaatggaaacaacagtaagaaaagcagatgcatcttgtgaggtgggtcagaacataag

SEQ ID NO: 423166 - DNA, 168 bp, Homo Sapiens
tgagctgccccactaataatacaatcgtgagagcacacttcagtgttcagcaatcagctctaagcatcgcctgccccaataataatacaatccgagagcacagcttcactgtacagcaatcagctctaaacatcagctgcccccgtaaatacatacgatccgagagca

SEQ ID NO: 423167 - DNA, 433 bp, Homo Sapiens
agctgtaactctattgactgtaaaagaccttctcttcaatcttctctgtagaaacaggcacgtgtcaggttgcagcttcaagcaacatgaaaccacaggaatgtaactagggacaggaatgttggtaggccagatgatacatcagatcatctttgtccttccgcagtcccatccattgagaaccattgaatcagacctaccaagtgctaaaatgttaagggattgtaataataatcattctgtaaacaaacaaagtagaaacacagttactctaaacagtgaataattagaaaataattcataatgtatccttatggactacagagtgctgcatcacccattgcatttctgttacacccttcaattgataaagaaggaccataaaaacctgaccataaataatcctgaatgcacaggtgggtcagaacataag

SEQ ID NO: 423168 - DNA, 438 bp, Homo Sapiens
tatgtctgacccacctgtgggcttcggacagcagggagaggatgctgaaggattttgctctcaagtacctttgcttctagttggaaagaatgagagataggatggaatgaagtctgactgctgcatgggagctggggggaaatgctttgcgggagcagtatttatggcaagttcagaagacatcttcttaccttgaacaagtcattagagctggaactgtatactgatgacaaaagataaaatataacaagataaatggtcccaggcagtcttgtgtgctccgtcctcccagctatactccactggaatccagtatctgcctttggtggtagatgttcctgtttctccatcccttggctagatatatattatccattgataggcagctaagtttgcagccaattctcaatcatttcttgtggtgggtcagaacataag

SEQ ID NO: 423169 - DNA, 240 bp, Homo Sapiens
cctttgtctgaccacctgcagattattacttgagtcacatcccaaaagagaacaaagatcttccatgtttctgttatcaccatcaaatctatttacatccatccagcttccccatctgaatctcaaggagaaaaatacaacggcttccattggaatgactactgggtgacgttgtattcatcctttacacacattgtccaacaggatcctatgaagcatcatgtccattctaacttccca

SEQ ID NO: 423170 - DNA, 440 bp, Homo Sapiens
gaccgggcgcatttgctctgggtggtaaatccccttttaagcatttgtagcttgcctctagtctagccttcttcatcgttttttacctgcttccaaatacctatgtatttagggcaatgtggttggtggcctttcttctttcttcaaccagtttcttgagatcccaagcatgaagcttagtgtaggaggagaactaggaagtgaaaagtgtttgcatccatttcctgtgttggttccaaattcagtgagcatccaacctaaatcctttggatggtggtagggccagggaaaggtgctttacattgctggttctcacacactctaggtttaatgatagaaggacctttctggagaggcatctagtgcttttcacaaggactataacaaaaggtggggcagatttcttcactggttcaaggaagatttgaattgaaatttgg

SEQ ID NO: 423171 - DNA, 133 bp, Homo Sapiens
tgacccacaagtcaagtcattaagatgccatccccgaggtgcagccccagcgtcacctctggatatccatatcctcaagcccgccggcagaaaggatgaatggtgagcacagagctggtgaaagcaagctctt

SEQ ID NO: 423172 - DNA, 315 bp, Homo Sapiens
agccggcccctttgtctgacccacctaccaagagagttgtttactggcagtgtctctcaatacacactacagtcaactgaaacatttttatccaaacaactcaaaattaatttctttgccatccatgactaatagccaaatgctatttctgtggcataaaagataagactttctaaaagtaaagttcatgatgtgcagcctaacagataacttgctgtttacactaaatgatgactttgacatcaaactgaaggcatgtgtgaaaagttagagtaacaatggcacctgttacatatgggtgggtcagaacatcag

SEQ ID NO: 423173 - DNA, 138 bp, Homo Sapiens
tcaatcagctgcacgattgctgagctgagaatagattggagagggcaagtgccaatacacggctgacattgtagtgctgttgcagcatcccggctggaataagtgtagaagcagtgaaggtgggtcatgaacataagt

SEQ ID NO: 423174 - DNA, 335 bp, Homo Sapiens
ggtcccttatgtctgaccaccatggaatactccagtttaaacatgtactcttgactgccaaaaatatcgagatatgttaagcaagataaagcagcagaacacgctttaaaatatgttgatctctttctgtaatctacatgttaatattaaatgttcttatccttggcattgtttcctcagaatcatccagggctcaaattcagatttaagtttaaaaaattctatctggaattgtctggtgatctctgacccaactactgaaacaaagcaaatctgcttcatagccagtcacattctgtatagaataaaacagttggggtgggtcagaacataag

SEQ ID NO: 423175 - DNA, 125 bp, Homo Sapiens
aaccgtccatccaccaaaaccacaagaagaacaggaagccaaaaaccagtgagagtcacaagagatggttctaacgctgctgccttacactctctcagtaatctggcgccgtgctttagattcgt

SEQ ID NO: 423176 - DNA, 553 bp, Homo Sapiens
ttcgaggagaggttagaacatctgcctggcatataatcacagtttctcagccacgtcccacgactcaagtcagaggagaggtgcctgcagggatccagcaccaagacccaagggagacaagggtggctcatactgttgccagcccaggacaggccaggatccactgagtgaaagccatgttggcttctgtgggacccatcccgagagagcctgataaggagaaagggtcctctcagctccaaaaggtatctgtgaggagccaaggacagtcaagagctgggctgatctttggatacaggcatccagtctgattcaagggagcaaacatcaaaactatctgcttaagggtgtcctaaggccacaagagaggagacagggtgccccatggcacaggtctcttcaaaaaagctatgctggccatgaggaccttgagggagcccgtaaaccctttgcagacgtctggtcaaagcagtccatgtgtgagttaagctggggtcaataacagaatatcaattctcaaggcagaactggagaacagcattggttaagcaac

SEQ ID NO: 423177 - DNA, 344 bp, Homo Sapiens
acaccgctgttagagttctatgacgctagaccggtctcgtgtcccgtgtgctctgggtcggcgtgctggaacttcagctgcatgggaaagactgagagaactgggttacctacctggtaagcagtattagatgccagctctccaacctttcaagccctccccactgggggtgaggtggagcggttctttatttctttgcctccacccaccgaaaatttgtccccagtttcccattctctccattgtgtctgtttctattattgtcctcaacacccacccaaacccagactctacagctgcactgtccaatgtggacaggagccacaggtgggtcagaacataag

SEQ ID NO: 423178 - DNA, 566 bp, Homo Sapiens
  misc_feature (465)..(465): n is a, c, g, or t
  misc_feature (468)..(468): n is a, c, g, or t
cttatgtctgaccacatctgccatttttttctgcctcttgttttcttggcctagtgaggttgtcagaaggattgttcagtggggtccctgcgaaggacaaggaggggaaagagacaggtgatgggggtactctctccaaagcagtttagcctatcatgtatcacttgttatatcaaggttttcctaatggcctagtccttgtgttagcacacttccctcacatgattcccacacagaatctaagcccttgattactctattaagggctgtgatttcggggtgggccctgagctgaactataaattcctcacggggaaggtcctgtcctgtggcctcccccagatatttaacatggattgaaaccctgagttatggaagggcacggcagagccagggagaggccacaggaaagaggatggcgccatgggattgtccctgtgccgaggatgtacctccttcccccancanccctgtcagtagtgctggtggggagtgttatccctgcatgccagaaagggaaaggccatccaggccgtacagacagtaccttcaggagcagagctggt

SEQ ID NO: 423179 - DNA, 352 bp, Homo Sapiens
ctcctagtttgaccacgtaagtgccttcacatgtagcgttcatgtatcctcatgagtgacctgcaagacaagctacttcagacaggagtctgagaggctgtggccttgctaaagtccaaaaccagttaggtgtgaatggagactcaaatccagatttcctattgccaaatactgtgttcttcctattacaggactctgcttaatacatcatcctcaaaaagttgcttctcagttattttctaaaactcctcacaacccggagaagtcaaaggcttgtcgtagtccggtttgcaatgtcagagccttcatatgtcatgaaatatttggagtgctgggtgggtcagaacataag

SEQ ID NO: 423180 - DNA, 143 bp, Homo Sapiens
actaccttgttttcaccttgtcttttcacaatgcagtcatcattcaatttttgcttgtcaaaacactatgttgagttacagggaaaagtatacttgcataaagccatttttaatcccctttaactgaatacattacctccctc

SEQ ID NO: 423181 - DNA, 483 bp, Homo Sapiens
taccttatgtctgaccaccttcttcagctaggctttgtgacacccaatattgaaacgatttcctctgcctctgaattcctacagcaacatttagttaagcattcatttggcaatttaatcaagcggtgacttatgatagctttttaagtgagcccagataataactatttatccctcatattgagtactgtccagtgctgcacaaagaagtcactcataaatatttttggatggctgatttactgattgaaattatatccttccatggagatttgctttgcaagggaaacatgaaaagagggcatctgggtgatactaggctgtcatcaacctatcatcaatgcttcctttacatgaccaaaatcaggccaagacaaagaagtcagtctcatctccatcatttgaatcgaaagaaaataatcccggtaatcacaaattccatttcactttagaataaccattcctggtgggtcagaacataag

SEQ ID NO: 423182 - DNA, 366 bp, Homo Sapiens
gcggtcggcagagaagccaggctcatgctgagccaggctaagctctgaacatttatcagggagacttgatctacttcaatgtgatgtaagaaaatcaaatgtgctttcagcagaagatccagggtaggaaaccaacaatagagagaaatggtggcttctgctgccttacagagtgggagctgtgcctgagccttctgcctctcagcccagagcctggcatttcttgaaccatgagacgtaaagtttattgttgagagcctgagaaactgtggatgctggggacgggtctgtcttccccttcatttcctggtgaagagcccaggctggggcatccacggttctgggcatggtgggtcagaacataag

SEQ ID NO: 423183 - DNA, 127 bp, Homo Sapiens
ggtccccttatgttctgaccacctttagtgagaacccagtgctgcccctcgaagggcacagagaaacagggagcgtcacagtcagctcgttctctctgtggatttttgagtctccatcctgaagcct

SEQ ID NO: 423184 - DNA, 365 bp, Homo Sapiens
  misc_feature (66)..(66): n is a, c, g, or t
tctgacccacctctgcctttgccagggactgcaggacgtgatctacgtacaaagaaaagcccaggnatgggggtttcaaggggagccaggggaagagttccaggcaggaagcctctccttgacccaggaatacaaaccgggttggaactgctgccttcaggtcaaagctgccaaaacaaagttaaaggtgtaaaaacaaagtgagaaggtcacacagctattggcctctctctctggaacccagtggtgggggtgaggcgtgtgtgtgagaaagacttgactaaaaagcacttttcaaccattttaaccgcagatgtccctccactgcgatgaaagagcgtgagaagggtgggtcagaacataag

SEQ ID NO: 423185 - DNA, 211 bp, Homo Sapiens
atcggccggtaccttatgttctgacccaccaacaaaaagattagaaaacaaatggatgaactgttaacaatgacagtaatatacagcgagctataaagtcacagtatggatgtcattaatgctcacagaaatatgttttgaagttaatcaggaaatgatcccagcctgtggaggagctgtatagaaagtagctgtttgctggtacatatca

SEQ ID NO: 423186 - DNA, 305 bp, Homo Sapiens
taccgttatgtctgaccaccccggtagatgcaatgcatgctggggagtggctggaattcaaagccagtgggtcttatcctgtgaagctctatgaaagtggggtccacagactgatgctgctcagccccatggattcagctttcttcctaggggtgtttacagaggtccaaattcttgcattttctgagtagctttcacctttgccagagatcccggagccagagtatctagggctcctgagattctgtttgtgcctgagtagttgctctgccaagaccatgcagctcggtgggtcagaacataag

SEQ ID NO: 423187 - DNA, 414 bp, Homo Sapiens
agtattactttgtcatgtgtctggcttacttagcaatacttctgagattcatccatgttgctgcatatatgattagttcttttattcctgagtatttcattgtatggacataccacaatttgtatatccattcagttaatggacacttggtttgtttccagctttcgactattataaataatgctgctacaaacagtcacatacaaatttacgtgggcattttttaatctcttgggtaaatatctaaaaatggaattactaggtcatatgttaagcatatgtttaacttaaaaagacattgccaaaactcttttctcttttgcacccttatcagcaatgcatgagagttaccattgctccacagtcagtgtttttaattgtagccattttagtgtgtgtgcagtggtatctcac

SEQ ID NO: 423188 - DNA, 114 bp, Homo Sapiens
tgacccacaaacctcccacatcagtcaacattgtaactgatgtaccacccttcttaaacaatacaagggtgacccaacttccatttagatcataaagctttagttaactagagg

SEQ ID NO: 423189 - DNA, 131 bp, Homo Sapiens
attgcagcctgttcagtgacacagccgtacccatgggatactgctaagtgctacaactgaactatcaaacaatagctacttgtgaatggaacattaagtgcattctcccagaacacttatctaaagtgcat

SEQ ID NO: 423190 - DNA, 455 bp, Homo Sapiens
  misc_feature (191)..(299): n is a, c, g, or t
cttatgttcgaccacctttccccacagttgctgcttctcctcctcaggtgtcagctcatatggtgtttcctcataaacaggcctttcttgcctgccctacctacgggcccttctcatctcacgtcatcgtggaacttccttcaaggcacttgctccaccggtgatgactggtgagttgtttactctgtttnnnnnnnnnnnnnnnnnnnnnnnnnnnnnnnnnnnnnnnnnnnnnnnnnnnnnnnnnnnnnnnnnnnnnnnnnnnnnnnnnnnnnnnnnnnnnnnnnnnnnnnnnnnnngtactgaatgactggagctggaactatcctgagcctgtaagtccaaaatgctgtcccaaagtagaactcacgcccagtctctggctgcaaccctgactattagcaatttggactgctggtccttatgcatcatgcagaaatgctttgctgctcctc

SEQ ID NO: 423191 - DNA, 439 bp, Homo Sapiens
ttatgtctgacccaccctctgctccctcctaggctataaactcgggaatgaatgaatggacagatgaaccctgccagtataattgtgaaccatctaatcagaaactcaaagggcagcagataggaggccactagctcagggtgttccaaaggcccagcccaggtcgtgactgaggggtgtggtagtcaagggggtgaccttaaaacctggcgtctgtctttgtcattttagtcattccatccgcagcgcctgttgagcacagccgtgtgttaccaggcgggtgctgagcgcacacactgagagaccgtggtcttggcacacgcgtagtttatagtatgagtggggtatgccgcaagcccatgtctgttccctgctagcctgggtggacagtgatggctgtcactgcagacatgggatgagaagcttcagtggtgaggtg

SEQ ID NO: 423192 - DNA, 432 bp, Homo Sapiens
cgttatgttctaccatcgtggggtttggagcatataatttgtacgaatactggcgtagaatagtcgataagatgggatctattctgtattaggccagcattttctgtatgccaggaacttatcctctgtacacttgttccttctttccttcctggagtttatacattagggatgaagacttgcattcacggagtctggtgtgatcagcattgtatttgggaagtacgtatattgtgggactgaacagtgagaacctaacccagtagttatcctcgttggctgtctttgaggaattgtgtctgattttgggatctcacagatagagataggattagtaaaaatgagcccaggctagaaaggagactgtgtgaggccaggtatatcctgttctgggaacctgtgagtgctgtctgactggtagaatagccaaaa

SEQ ID NO: 423193 - DNA, 325 bp, Homo Sapiens
ttatgttcgaccaccctactgaagaaggctcccagaaaccagctttgctgagcccagaacggcctggctctggcagatttgcccccaggctgcaagtgggcggcagcactccccctacatgtccctttctatttcctgcccctccccctgagtcttcctttcattcttgcagccagctcccagccctgcttccctgccaggaccccaattccctaactccctggcatcaagacctgcatggatgtcccctgcacttgttttgtccccggatgtggctccttggactgtccagccccacacctggcctggtgggtcagaacataag

SEQ ID NO: 423194 - DNA, 258 bp, Homo Sapiens
ggacctgttatgtctgacccaccatgtgccagagagtagggtgctaaaaatacatgaggcactgataaaatggcctgtgacttatgtcacctcagactacaggccaccctatatggtgtattatattttcaagtagattatacactccctgtggacgggaatctagatcttctaattattttgagccaggcaacacggacgctggacacacaccaggacgactacctcacgtccctgacctgacgtagacataccatt

SEQ ID NO: 423195 - DNA, 117 bp, Homo Sapiens
taccaacaccatgcccatttgtaacaccatgcaaactgaggttcagatagatgcaatatataggtctcaatcaatccaagggataaacagagctagaggtttaagttcaaacacaat

SEQ ID NO: 423196 - DNA, 517 bp, Homo Sapiens
ggatgcaaggtcattaaaaatagtggaatctatgcaattcagcattaccagtcaaactaaatgactgtaagtactgagaaaaactttacaacttcatttcaagcctaattttaataaaaatatttccttagctacaaatagctttatgaggtataaaaaaagaagaagtatatgtaggaaatattatctttgataagtcagtaaatctgactcttccataatcaatgatatataacctgatatccttgtttcggtttatacatatgctttatatttgttcatctacaaatcatgataatgtttttaagctaactagcacacaaagaactacaaaagttcaaatttacaaggactcacaaataactgtaagtacatactgaggagaacaggtttctattgaggaaaactgtctttagtattcagaaagtgtaccttgaagggaaaaccctccacgatcagaccagctaaaacaacaatgacaattaagcatatagtagaaaaatatcaaatatcaaca

SEQ ID NO: 423197 - DNA, 338 bp, Homo Sapiens
tttgtctgagctcaactcagttatacgtgccggtcgcagattcgctgagctctgctccagcgctgtgtcagggtaccgcattcgtcgcacatacgttatactggtcataggagatatctgttgtgaaaagcagagtgtgtggcgtattggggagatggcctatgtagttcacaaagaactccctgtatggctgtgattcactctgagtgatgtcccttctggaggaggattcttgtctggcagaaaagatcctgggtggagggctgaaggtcctgggtataaagctccactgtaggatgcctgggtcaccatgggcaagtttcttctctgctctaggc

SEQ ID NO: 423198 - DNA, 115 bp, Homo Sapiens
cgcctggggccacctgtccgttacttctaggttccctcaccagtttctcctctgctttagagactgccttgagaatattcttgtcctgctgttgtgtttcggctttggaatgatg

SEQ ID NO: 423199 - DNA, 233 bp, Homo Sapiens
tgtcaatggttaatctctttatagagttatcttcctttctgactatttagtacataattcttttgaatactctcagaagaccagatgaactcaaactacagtgccacaagagacattggaaattctgtgtgtcataccggacattaattatatttcaaataacaggaattcctttaaacaggctgaaacaataaacatacaaagagtttactcagccatttattgctgtgttg

SEQ ID NO: 423200 - DNA, 540 bp, Homo Sapiens
gccctctggatgcaagtgtcattctttattcttctctccgaagctgcaggtaacactcagccattaaattcgtcttataaccgtgcccaaagtcatttcctctggtattcatttcacatgaagggacagggactgtggggtcttctttgtaatttgcagctttgtttggcagcaacaggccttgaagaaaaccctcccggctcggtgtctgttcagccgtgatctgggctgtccctgggggtgtctggcctcagccgcctccctatccagggttctgatgtcccagcccacgtggaccttctctcctggggctcctgcctcctggccgtgatttgccgtggctctgaccttccatctgatgtgttccctgtctgccgctgttccacctgccctctggttcctggcctccatctccaccctccctagagccagggccggtcccccggggacctggtgagtgcttggctctcctgaccaatcctgcttgttctgcatcagtgccatgctccgctggtggcactgctgtcccaccgtcacttg

SEQ ID NO: 423201 - DNA, 475 bp, Homo Sapiens
  misc_feature (443)..(443): n is a, c, g, or t
gtagtttaggcatcattgattgacctgctgcaatgagagttggttagctctgctatttttcattcccccatcttccagttttgttgcttgcattattttttcatcttcagggtttaaaatatttacgttatattctgcaaccagtatccacactgttttaccttacttctgcatttaaattgattcaaactcactatgaatctcttcatcagggtttctccattcctggattactcatttaaattaatttttttgttgttggcaggcttctaccagtaagtttctcaagaaaaatcctgagttcatgtttgagaatgtctgcttattgttttttgcttgagtaatataatacttttgaatcatacattctttcttccagctccactgtctcctgtagtggaatgtttttgtaaagctggttggattctctcctcccctgagancaccatctttttggtgactgcttttcctgctt

SEQ ID NO: 423202 - DNA, 449 bp, Homo Sapiens
ccgtgagagtagagaacactagtgacgggaaacgaaaaagatgatctgcaaactcatgaaaaagcagccggtacatctgggattttcttctaaactgcagagtgggatatttgcactttccttcaggcaactttggaaagtggatcatagttctggtagctcttgctagaggacgaattgtactcaccactccataaggctttgatcctaacagtgttcaatcagtagcagtcatcattgtatacttaaagccttggacgtggggcagagagataaggaagaatgaggaagcaaagcagttacagaggacggcagaaagaaggctgccatcctgccctttctcccactccagctggggatgagcaaccagctcttttcatttaacccctttgctactctgacagtcatcagggaacactgaactaaaagggctggctgtgaaactacta

SEQ ID NO: 423203 - DNA, 430 bp, Homo Sapiens
cccacgacactcgcttacaacaccttttggatctgctatgccctgccaaacaatctccaatggatccccactcagctattgggtcaagtttaaacttaggctagtattcagagtcctccacaatctgagcccgcactatttcctctctgcaatcctacatgaacattttactcaagcccgatttgtcgacactagtgtttctctaacagaactcagggcttgttgtttaaggatagagccttgattttgccgggaggctagtggtatgatggtgggggtgctgatagcatttcaaacaggggagggcaggatcagagaaaaaccatgtttctcttttctctctctccctctgtcccatgaagtatgcctagattgtcttagccagaaagtgtttctttaaaagaccaattactgttcctgcgtgtttggg

SEQ ID NO: 423204 - DNA, 567 bp, Homo Sapiens
gtctattgaaaggatctgtacaggaagagggaaggaacggacaattctcaagaaggctgagaaacaggtgggttagcaggaggagcataatctagatacttaaggggcagctttaagatgacagatgtggtggaaggaaagactgcaaatcggaaacagctctagtgtggcagatacactgtgggctgattgcaagcaccagaggggggcaaaggctaactccagagtggtagcagtggagcaaaaaaacaagcagcaggacgagtgggcaatgagcagtgggattaatgagcagcagcagccaacacggatcagggtggaagtgatggctttggtcttgggagacgggggccagagggaaaggacgtcagacacggaacaggggattggggaaacaaggagggctgagacctaagaatcctgccccggtgaaaatgcagggggaaaagctggagaccaaaagccgcctcggctccccaattaaagaaattctcgaaggagagtcgctgcttgccgacgcgctgacttctgaaccgctcccttttcctggacactttgcatccagag

SEQ ID NO: 423205 - DNA, 338 bp, Homo Sapiens
cttattctgacccacccacaaggtttccagaaatataaaaatgaaagcaggatataaataaaggaataagttttagggaggcatctagacttctcatcaataacacagtatgaaaaagcagatgggccaatagctatacattactgtaggaaaccgatttaggggcctagcatcttgatactcaccaatttaggatttaagttttttggattataaaaatttagtatccagagacatttcttgccagatttgctcaaagagtaaaaggcacaatctgctaagaagatgtaacattctgtaatatatgtgattatgtaagttggtatttttactgttct

SEQ ID NO: 423206 - DNA, 304 bp, Homo Sapiens
ttctctcgcttcttcattgattggggaattttgaaagagtaattagcttgattcttgccctgggtccaagcgtgtgtgtgcctggtcagaacttgagtctcaggagcagtctcccactaggatgctgtccagatgtaatcagccactgcttagcacatgctcctcgtcccagacttacggcatcatggcccttccgggctggagagggtccagtccagagcacgagactcactgtctctttctcccaaggactcgactcatgcagggtgtttccttctcctgctattttccaccttgttgcagc

SEQ ID NO: 423207 - DNA, 337 bp, Homo Sapiens
ttattctgaactttctaggcaggtacgtgttggagatactgctgtggctagctgaggtgaatgttcaaatggaatatggcactatcaagcatctggcgacagaaacctaaagccctggttgcctcagtgtcatgagtgaagcatagaatgcagaggggcccggttgccccaatgtcaaaatcgtgttttcgagtacttaagcacaagacaagcaatcagtgaatatctcaaatctgaactagattgtccaactccatctctgtggcaccttcatagatggtgcccacctgccttggcagtgatgaccgacactgcgaacgctgtgctggcagtgtgt

SEQ ID NO: 423208 - DNA, 210 bp, Homo Sapiens
tttattctgagccatctcatctctctttggcttattagttgctgatcctatgctctagattccccttatatgaatctcacttgtcctttcatgcttaaattaacattcaattttggcatcgagacccttttttcattcctattctaaaatgcctacagaatcaaatgaaagaaagcaaaccaaataaatacttcaaagtaaatgaatgac

SEQ ID NO: 423209 - DNA, 109 bp, Homo Sapiens
ttatgttctgacctaccaggactccatttgtcaaatatcacgcctttacaatgtgtcagtcacgatacagcggactacgctagagcacggtgaaatctttgggatcaag

SEQ ID NO: 423210 - DNA, 323 bp, Homo Sapiens
ttcttcacctgacacatatctggtaccctggcctccagtcccctcccacactgggctgaccctgacgagatgcttctcacagctgtgtttgaatgcaacttcagcaccatgcataacattctcccggccccctttaccctcaggaccaagtccgagtttctcagcctagaatatgaggccctttgtgaggtggaccagccacttcctcacctcacttctcattcctgtgctccaagcacacacgggatctcacaggcccctggccagaccttgaatttaacagctccacacgcaaaggcttatgtggtgggtcagaacataag

SEQ ID NO: 423211 - DNA, 370 bp, Homo Sapiens
gggtgggggggcaatcagatgaaacgtaaggttgggaaagcttgtctggcagtctacctcgcccttcaaggggaatgagaaaaacatagccctaataagtcattaaggctatagtctgaattgtaagtcataacactatagcatgaatgcctctcccaggagcatttacttttgaaagagcttgacattgggtggacagatcaaaggaatgcatttttagtagcagaatgttggagtccttggtaattatttggggaaataattgggtgtgatgtccttccagtccttcagataacgcacccggtgagtgaccgtgaggctcacgtaggcggccctcagtgcctgcacttaggcgggagctccgccccag

SEQ ID NO: 423212 - DNA, 570 bp, Homo Sapiens
tgtcggggtggcaatgggaattagatttggggagggttctcacccttcccagaattaacaagaatggctcactctgcctgaaatgcttgtacaaacaacatagtttatgctgaacacctgctttctgtctgggagtctgcaattttggtagtactaggcaaagggcacctatatgaacagctcccaataaaaaacctgggcactgagtctctaaccagcttcccttgtaggcaacacttcatatgtgttgacagctcactgctggaggagttaagtatgtcccgtgtgactcctttcagagacatacctggaagcttatgcctggattctgccagcctttaccccatgtgccgtttccctttgttcaatgtgttctgaatttttttgctgaaatacatcttagccatgagccccactatgcactgagcctgttagtcccccgcatgcccgttcatagccgtgccatcaactctgctgtcctctgagcaggtgccgtgacgggcacatgccactgatgtgtgcacgaggcacgacaggatggacaggtctcccaaggtcaggttgggccct

SEQ ID NO: 423213 - DNA, 230 bp, Homo Sapiens
gaaatgggggtggaatggatcacagccaagttagagcagagagatggtagataagacgtgagtgacagcacggtccagcctactcagcgaagaccgtgggtgaattagcatggcacttcgctagatgtctttatccaagtcaggaggaaagaagtggagtgggccacgatgtatgtctcccagggggtcggtacaccatggtgttttcaaggctgttttcaaggcacatt

SEQ ID NO: 423214 - DNA, 418 bp, Homo Sapiens
gttgatcaggtttttttaagctgtgaatgcaaggggttttgaaatgcaaaatacttaagctgtgaaatgcagaagcctgactcctactctgattctatggttcatagagtagagtgtgtggtccagcaagaggctgaaataagagtggaaaatgctgcttatgtgtccccttctgggagattcatagcgctcatgagcagattgaaaacttagccaagagaacttgggaaacttcgtttaacttttaaccaagtattgtagagaggaaaatcacttctcaagagttttcacaaaagtgttttgttgattcatcaaaggcccgacctgaaataagacaaaaacgcttcatttctgtcaagtaagccttctttattctgctggccaggaaggtaatgattctaacaaatttgtgttggga

SEQ ID NO: 423215 - DNA, 589 bp, Homo Sapiens
tgcctgtgtcggggttggcggctgcgtgtgcgcctggcaggtggctacgcaggctgcagcccagcaccacgctgttcgttcttggcctggatcccttttagttctccctctgccagggaagtggatctgaacctccccctcctcagaaatgctcaagttttaatgtcacaatttattctcagcatgtggaatgagatggttattagctggttgagtccggacaggtgtgggtggccccaggcaggtcccctaacctctctgagtgcatttatctcgagggtgtggctgtcccccgggcttgccgttggcttgaggcaggatacagtgaggagagcattttgaaagaacggaggctgctgtcgcccgaggtgtttggcaaggtcgtgctcccctgggagaggatgctggcaccagccctggagccacagcgcctgcctccatctgcgcacctggatctgctctgcttggcctcgtgcaaagaacgggcctggaatgagcagagccaaaggcgttcttggtgccggccgcgcccagctctggctctcgtgctgtccttcctggttttcatccttggttatttttctctgta

SEQ ID NO: 423216 - DNA, 305 bp, Homo Sapiens
cccgtgccgacctgatcacacactgtgcttacttcatcaggttgcccaatgctcaagggttaaaggtgatcattcctatggaggtaacatttcccttccagatctaagacagtggatacaattaaggtttgtaactcaagcttgtaaccactttttggtgcccgaaaccatccaagtagatagtttggtttataagacattctgttgaatctggaaaacgtggtggattaagaaaccctctctgcatcacgaagcctggagtgtttgctactaattgtgcaactttagttctggttccttctagt

SEQ ID NO: 423217 - DNA, 149 bp, Homo Sapiens
cttatgtgtctgacccacccagggactacaggtctaatggaggtggagcatagagactatgaggtcaatggaggtgtgagtcacagcggactacagagtcaatggacggtgggtggcacagggaactgcatgagtcagtggaggtggag

SEQ ID NO: 423218 - DNA, 462 bp, Homo Sapiens
cgttatagttcgacccatcctcagtggagaagcgagccatcttttaccacagtaatcctatgagagacaagaaaattggagcccagagatcctcttaagacagattgaagaatcagctcagtagtggttagatctcatattatggttatccactttttagtagcttttctatatttaggtttatctcaatttatgggtattgcttccttaatccaaactctaattctcagcttcccctatagctagactacagtcaagcaatctggttgtgccaaccacgcacacacataattttaattcaggtgtgagctgaggaaagaagatctgtgtgtgtttctatttttgaaggagagagctctcaggatttttgtggaagcaattggcaagtgcttctaaggttacatttctcatacagaattgtcattggtgatggtgctggtcagcaccgtgataatctacttt

SEQ ID NO: 423219 - DNA, 195 bp, Homo Sapiens
ttatgtctgacccacctggggaacctacgccaagtccgggcagcggttcccgaaagcagccccagtgacattgcacccggcgccgggctggtgatctcctccgctggggccgcccgtggttgaggagacctcgctgggtggccgggctcaggcgctctcgagcggatttggggtcacaggctgggacaccgcgga

SEQ ID NO: 423220 - DNA, 171 bp, Homo Sapiens
cgagcggccgtgggacagtatccggatcgagtcccccaatccgctgcaagcaggcgcagatccgggaggtggctatcggtcccggggacgccgtcagagcgcgctgctccggatctgggggtgaagttgacatccgggacaagagagctgaacgcggcgtggcggacagtg

SEQ ID NO: 423221 - DNA, 115 bp, Homo Sapiens
ttatgttcgacccacccatgctagcccctgctcagcaccctctcctggtgctattttgaggtgatatccatcttggcctacgggtctactaaatctggctgtccactacctctga

SEQ ID NO: 423222 - DNA, 398 bp, Homo Sapiens
ttatgttctgaccacctccatatcttacaatatatacttaaatactatgcttgtattagtccacttttgcattgctataaagaaatgcctgagactgggcaatttataaagaaaacgggttttattgtttcacagttctgcaggctgtacaggaagcatgatgctggaatctacttggcttctgggaaggcctcatgaaacttacaatcatggtgaaagcagaagcaaaagagaacttttaaatgaccaggtctcgtgagaattcactctctatcatgaggtgagtgccaagaggactgtactaaactattcatgagaaatatgcccttatgatccaatcacttcccaccaggccccatctccatccacattgctgcaaaggccatgatctcgtcttc

SEQ ID NO: 423223 - DNA, 422 bp, Homo Sapiens
cttatgttctgaacccaccattatctacgttaacaaaaagatgaaatggtttttctagtagagggtatggccaggacaggagcagttatgagtctttccttttactccccaacctgatcaacctcttcagaagtccatatgaagagatcaggttctcctttaattagcttctcatatggaagtttactttttaatgcatatgagtcaatccataaatggcagtatccaactaaccctaaaaatttcctgagttcttgcttggtttgaggcaagggcaaagacacaattcctttgacccatttgggtcctattcttcctttgtctgcatttattaaatggcctaagtatttaacttcaggttctacatattgaagctttctctttgagacccatacccttcaaactgtaggtgggtcagaaca

SEQ ID NO: 423224 - DNA, 448 bp, Homo Sapiens
tctggatgcaagtgtctaagacattttgggaaaatccctagagcctggatcttcaatcctggtaagccagagagcctggagacacacccaaattatgtccctcttagttcagggaacatgtccattttcgtcagcattaaaattttggcaccaaatgtgctaactgcaattccaccatacaatgcataactggaaatagaggcaacatctcatatcctgaacaattcatgtgagaatctaggagacacaccgcttatttttgccttttcccactgaaacaatggctagtattaacaatgttatgctatccttggtttcactccccacttttaaatctctcggatatttacttcttgagacagggcgtcactgccgtcacccacgcttttctacggtgtaatttttgttgttcgcttttgtcaaatttagaaattttcatttcatctct

SEQ ID NO: 423225 - DNA, 481 bp, Homo Sapiens
  misc_feature (99)..(251): n is a, c, g, or t
agtgcactgattcgaggtgattagaggatcccggttaaggctcgagtcgtcatactggctcgttggtgttactgctgtgagaccagcgtacgaagaagnnnnnnnnnnnnnnnnnnnnnnnnnnnnnnnnnnnnnnnnnnnnnnnnnnnnnnnnnnnnnnnnnnnnnnnnnnnnnnnnnnnnnnnnnnnnnnnnnnnnnnnnnnnnnnnnnnnnnnnnnnnnnnnnnnnnnnnnnnnnnnnnnnnnnnnnngaaggtaaggaagatacatttgaaataatgaataatacaagttaggaggaacaagtgctctttaattatccttattaaaaaataatattttctactgttaagcaatatttgtgaaattattaaattacaaaatcagcaggcttcccagacaactgaggttttctcacttttgatagagaagaaaagtgacggcttaatcattgagagtacagacatagatcataccctgg

SEQ ID NO: 423226 - DNA, 232 bp, Homo Sapiens
ctctgtgatgcaaggtgtcgacgaagagggtgtcagtttaagttaccggacgatttcagtaatctttgttcacgaggccagatcagctacgcgtgaaagcagcagtgactcagaatgtagcttcatgtgtgatcttggcacacatccgtgttcaaaaatacactattgtttctcgttggtcttgtcagttgttcctgttcggaacacatgcgttaatgattcttgtgacatc

SEQ ID NO: 423227 - DNA, 172 bp, Homo Sapiens
cttagtgttctgacccaccagaatgattgaagcccaacacacctccctctctcagacagggtctgcctgttcagagaacacaagttctcgcttctcgccttacacacaggggcaagaatagattcactcttgcagagagcacatccctttctgttactgaaaatcactttcc

SEQ ID NO: 423228 - DNA, 388 bp, Homo Sapiens
aagtatgatatggagtgcacgtggatgaggaactgatgctggctttgaactaatgcatgtgtcaggaagcactgggaaaatgtggcatggtgttagagagaggccaggaagagagagacagtgcactctatagccttggtgcgtgtataagtgccagtgagatcaaggacgaagtgtggacactgcagattagtgggcacatgccttctccctgcagattcaacacccacgtaggatgaaacacggtgcacaggcaaaggtgacaacgcagtccatctgcggaatgtcttggctccctgagctggagctgttgctctcgcgtgtaggatataacgcttgccaccccacctaccagtgcctgtcatcctgtctagcgcctgttctgtcc

SEQ ID NO: 423229 - DNA, 466 bp, Homo Sapiens
tgtatgcaagtgtcacatgcagaaagagtgaacacaatcagtgactaatggggcatgcaggatcaggaagagctaaaagtcaaatgacattcatatcctggagaatgaggtgcccccatcaagttaatccattaattaatcaaacattcaggacctggagccattcactctctaacatattctttggctgtattaatatggctattaattcctgaacaacaagcagaaggaaacagtacttaaaaccatggttgagagcacttagtttttcttctctgacgatgtgcaaatcggcagttgcacttttaaaaaaagcctttcatataaatctgggcaccatcctgaatgcatcagtcctattaacagcatgctagttttggagaattgctacaaacccagcctgaggtgaatggcagctgctcttctctggtcagggctacttaaagaagtggcaagtccaaagcca

SEQ ID NO: 423230 - DNA, 119 bp, Homo Sapiens
ggatccccctctgtgatgcaagtgtcaccaggactatagagaaagagaaaggtgaaccatcctaaggagctttggatacttttcttagaaggataaatatttatgcttagctgatggag

SEQ ID NO: 423231 - DNA, 354 bp, Homo Sapiens
tgctcgtcacctctgtttccaccgccgacacactgcacacctacatcccttggacccaaaacccactgctgctgctggtgtggacttctagcgtatgggcaatgccagagaacactccttagagtggcttgaattcccctgcctgttcctcataaaatcagcaacaactggagccaaggaccaccttccctcaagaaacaaaaacaaaggcaacaataaaaactgcgctctaggtaaaacaggcagttaccactcccaagggatttgtgggctgtctataaagcagaagaaagtgtcacttcctccaccttcaggaggaacactgtccaagtaggaccagccatgcaggtcagg

SEQ ID NO: 423232 - DNA, 420 bp, Homo Sapiens
acagcgggaaaatgtccccagttctgaacaccaccagcattagcccactggtcccataggtgccatcctagccgtggcctgaggtggtccaggtcctgccacgagccacccgcctctggcctggccccaccagctctggcagcgtctccctccagtccgggcattcactcttcacccactgacgcatcgtggggttggccttgcccctcctacacctcaccgtcctggggttactaatccctccactgcaaaccacaagcctcaaaagggcagggcctgcctcagcacacagcaggcacctactaagtgctcccagacagtgtgccatggtccagcccccgtcaggaccaaggggacactccctgggccccagaaggaaggaacggagcctgcctctcagggccccttaactcttccaag

SEQ ID NO: 423233 - DNA, 319 bp, Homo Sapiens
cagtatggcggaacgtgagtgtcctactgtggtaagtggaatttctgaaatggtccccaaacatgccacacccttgtctctaaagcctgtgaaggtgatgagacaccattcctgtgacgatgttgttatatgccagttatataactttaagatggtgaggttaccgcatgaactggatctaatcacatcactccatacataacagagctttgtgtggctggttggagaagatgaagtcggagaaggtgggagcttgagaaggactccatgagttgttattggttgaaagatgaaacagacaggtaaggaggaacccacg

SEQ ID NO: 423234 - DNA, 284 bp, Homo Sapiens
  misc_feature (147)..(224): n is a, c, g, or t
ggtcttgcagagcaggaggaaaacacagaactttgttctctcctctctggatatggtggccaggatagaagttcatgggcaatgagaagcctgggccctcctgcacaaggttggcatcaagcaaaattgcattagctaataaaatannnnnnnnnnnnnnnnnnnnnnnnnnnnnnnnnnnnnnnnnnnnnnnnnnnnnnnnnnnnnnnnnnnnnnnnnnnnnnctcctgatgcccttatttattcctgtcttcaggtcctttttatttaccatcttctggccc

SEQ ID NO: 423235 - DNA, 251 bp, Homo Sapiens
ccacatgtgggaagtttctttcagcagaggcactggtgcagtgctgagggcagcaagaaaagtctgcagctctcccccaacagtcaggcagcccgggtgctcatgaaagatctttgagatggaaacttctcccccttgctcgccactgcagacacagttgaggcttctcccatgggagcttagcatgagtgtacctgtagacaccctttctggaacatttcagggtgactgcttttccacagaaggagcat

SEQ ID NO: 423236 - DNA, 217 bp, Homo Sapiens
catgaaatacaacaatatacagatataacgattgaacctatcaaggataataatgggagagagatcaaagcgaaaatcattccctccagtggaaagattttcctattgaatcttctccatttcctcttgggtttcacatgttttcattgacttaggatttctcccctgatttattaaactttgtgtcatagtaattttagttgttgtctgcaaggaa

SEQ ID NO: 423237 - DNA, 430 bp, Homo Sapiens
ctattttctctgaatgtccgttttatcttgcagctatgtgaatgcaccgcctagtcattataaagaagaaagagaatgcagagtgcccctttcctggatgctggattggctatggccctgggcacacctggagttgttgaggatgtccgtttccatggcgaggctatagaacagtgggcgcccttccaacaggctagagcctccatgtctcagtgagggccatcttcttgctcccttgaagcttgggctgtcctctgatgccatgttgtcagcccagacaggcagtgtgatcagggctcctggcaagggtcttttgagacacagccactgcccctgcttggtggtcgtgacttgggacgccgcctgcctgtgactggagctgggggtgacgggtaagatgagtggagatgttgggccagtggggcctgat

SEQ ID NO: 423238 - DNA, 157 bp, Homo Sapiens
  misc_feature (62)..(70): n is a, c, g, or t
tcctcggaagtcgttgtgcttcctccagctgtgagaataacgtcctaatctccagagaaatnnnnnnnnnatggaggaggcttattgcttcccgagcattctggggggaacatgatccatacccctgtgcctcctgtccaccgcatctgcccttgct

SEQ ID NO: 423239 - DNA, 253 bp, Homo Sapiens
  misc_feature (53)..(107): n is a, c, g, or t
cttaccaccatttaacccccttattttttttcaagataagctcccgctgtgtnnnnnnnnnnnnnnnnnnnnnnnnnnnnnnnnnnnnnnnnnnnnnnnnnnnnnnntgggctcaagcaatcctcctacctcagcaccctcccacccctcaagcagctgggactataggcatgtgccaccatacccagatagtttttgaattttttggtagagacagagtctcgccatgttgcccaggctgctcttgaactcc

SEQ ID NO: 423240 - DNA, 400 bp, Homo Sapiens
ggaaccaatgagcttggcactacaagtgccaccacagaaatagctggcattattattgcctcctcagcttaccacagcctgtctcaggaacttgactcagaacaatagaaaccactgctcctaactctgaagttacagcagcaatttgattctctcatggttgtagttctcctaaattgtagaattcttgatacactggctgcagctcacaaaggaatttgccttattttaggagaaaaatgctgtgtctgggttaacagcttagggaaagtccagaattaagttagagatcttataaactaagccatcctaaacacgccactgagagctagttctcccagggtgccacctggttccaattctcatggcatctcattttcttgggatctctggccttttc

SEQ ID NO: 423241 - DNA, 151 bp, Homo Sapiens
gaaatcttgcacagaaaacaatcctataattagaacgttatcttgaagcctctgaaattgtttcaactgagttgggaaaatcaaccatcgctagtattcagtgtccaattatccacctcctcaacttttctttggagacagattttcactc

SEQ ID NO: 423242 - DNA, 125 bp, Homo Sapiens
ttaaagccaatgagcatacgtggacgctgtgtgtgctgtggtaccccgacaacaaccacagccgtcacagtgtcctcctgacgtttggggcaccctgcgctcagctaccaaaatgtgccccgact

SEQ ID NO: 423243 - DNA, 433 bp, Homo Sapiens
ctgagcagatgcagtccacaactatactgatccacaacaagaagcttacatcagaatgtaaatcagctctatcactaagcaaaccgcaggtcagctgatgttttggggaagactttcttgatgaaagaagcgttgagcagacagattctggagtaagcttcctatctccttatggacctataaaaatagtttgcagaccagccactttgaataacgtgagtagagtacgagtcaagagaggaaagaaaaaggaatttgtggttatatatgcagaacaaggttgaaacggggaagttttaatactgtttaggtcaataaggattaaacacaaaaggaaggaaaaacgtgagatgatgtccttgcaaaaaacatttgtgaagtattgacaaagaagtttcccttcataattttgttgcacacgcacctctggccc

SEQ ID NO: 423244 - DNA, 443 bp, Homo Sapiens
cttcaggaaacgagtacttctgcttttgaggggtgaaacccctttcacactgtctttgctcacgctacagcttgctacgtcatacatgcaaccagctagctctgtcgtcaccatcacaggcttggagagcttggctatttggaccccagtattttgtgttctactaaattgtattttgctagcttcaccctaccattctgactgtcgagatatatttagatcctaagcttgtctacgaagcactctcacggggtccttccagctccctgtcatcctcggatttaataactctgccacctgcgccccatccgagacatcagcagccacaaggaacagggagaaggtgctgatagagccctatggcacatctctagagacctccctctatgtttcttctacttgttaatcagctttcatttgttattcaaccaattacgaatgat

SEQ ID NO: 423245 - DNA, 386 bp, Homo Sapiens
agcactacccttacagactagaaacgtcctagaggagaaaagcagaaacaacatttaaggttttaggtatgtaaatgctccaccggggcatagtgtagttgtactgttaacagtatatattctgaaaaccaagtccaattgccttaccactcaaacccaaactcagttatttcccaaaatacaaagtcccatgtaaatagtgaagtatctaaaatagagtcctttttaacatagttacctgactgaaaacaaacctttctcataccttgagctacttaggagacctgcactgcctactgaacaatcttacgcatgactacattctaacatactcccaggacaaactactgtacagtgaataatctcatacacacacacacggcctc

SEQ ID NO: 423246 - DNA, 424 bp, Homo Sapiens
  misc_feature (134)..(143): n is a, c, g, or t
cgagacaaacatcaatatgaccccactatgtgcctagagaaggaaaagggtcaagtcctatactaggttccttacttagggtagaacctactagtcccttgttaatcctttgtgggattatacctgtgactaannnnnnnnnnaaactatgtcttacgacaaagcacagtcctgggaaaccagtcaacttaattattgcttgtctttgagcattagagacatgttcatattgacttgctacattacactgtagcatgtttcttcctgaaaatatcaagttggttgaatggaaagctcagcaaagtatgttctgtgtgcccactgtcccagcctgggactgacgggcatcagaggctttgctttaaaatatgggtaaccagttctggaacacttccaacgcaagcaagcttggtgtcatagggtg

SEQ ID NO: 423247 - DNA, 227 bp, Homo Sapiens
tggttaatacagcctctctgtgaatgtagccttactatcctttcatgcgaaggattctgttttgagtatatgaaatgcgaccctacagtgttcataaaaccaacagatgtgtaattgcagtcctggagcattggtcagttcaccttatccttctttaaaagactgatttttgtcaatgcaacattttgtttctactgcggtggatcctttcttccttcttcttcttc

SEQ ID NO: 423248 - DNA, 346 bp, Homo Sapiens
  misc_feature (180)..(256): n is a, c, g, or t
ttgaaccaatgagcattctattgaaatgatcctgtgattttgtttttaattctagtcatgtggtgtatcacatttactgtcttttggatgttaaactatccaagcatcccttctttgaagcccagttgatcacgctggattatctttttgatatgctgttggaattcagttagctagtannnnnnnnnnnnnnnnnnnnnnnnnnnnnnnnnnnnnnnnnnnnnnnnnnnnnnnnnnnnnnnnnnnnnnnnnnnnnccttgtaagcccttttcctgttttgggaatatagggtgatactggctcttcatagattgtattaaggaagatattctctcttttactatc

SEQ ID NO: 423249 - DNA, 448 bp, Homo Sapiens
atgaaccaatgagccaggtgtatctttatagcaactgtgagaatggacgctaactacacaggtctcagaaaagttccttgcatttggcaattgagagaataatgggatgatagacttctgtcagcaaaagtttgtgatcaggaggtgggggtggaattctgacttgggtgggccagagaaactctatgttggaccaataagtggtgacattataaattgacacctgttagagatggcggatgaactgaataaagctgtaggtgtatttagcttgtcctgatctgtcccccctatatacaggttgcaggaatgcttactttgccttgaaataattttattagttatccatttaattcctttaacattgatttctttagttcccctatcagagacaagctcaaaatacacacaatgaatacatcacggacttctccttctctttatttcg

SEQ ID NO: 423250 - DNA, 244 bp, Homo Sapiens
acttgtttcttacgtggatctttcctcttggctctgcaggtttctgttaacatgatacagccttcacaaaattgtaaggtataaagtaacagatttttagagctaacagtgacttttcggatcacctagtcaaacacctccattctacatttaacccaaatgccgctcaagccttctatccatcctgtcgcctctttagtattcttcatgtcctcagggattatatgctcattgggttccgatg

SEQ ID NO: 423251 - DNA, 267 bp, Homo Sapiens
tcagagccaatgagcatgatttagaaaaaagtagataagagcagttacttcccaaggtacctccactttattaaaataagtgaaaagagactcagaattgcctgggtgtatttctgtatcctcactcacattcttgaaaattaacacccaatatggttgactgctgctgggcaagacctaagaatgatagagaaaccatttgattttgaaaaacatccacttcagcaggttattatataattacatgtgcacagttaatttataagt

SEQ ID NO: 423252 - DNA, 407 bp, Homo Sapiens
acgcttaagtgcttcatggttattaaattactgtttaatatgacttaatggcaagtttgtgtgcacgttgtttacatacattctgtgctccaagagttgagaatgtgttttgggaaagataaagtctttccatgggtaataatcaggtcatcatgagtgatggatggaatgggatgaggttccattctggacgtggtttctagctcatctgagggttcttttcccattgctcaaagtgaccttccatagaagaaccttccatggaacctgtgatgaccaaagacactcaagcaatgactttttggaaacttcttataagctgctctcctcagaggagaaaatcatcagatcggaagagaacctagtctgttgaaatatcctacctgaaagttggttcatccttgaca

SEQ ID NO: 423253 - DNA, 452 bp, Homo Sapiens
cactgattcccgacgagtatattataatgcagcaccatgttatttacatagggtaaaagtaaaattactcaattgcggcatatgtccttaggactagttataagaaactgagtctcttgctgaaagcaaggatacattaactttcaggttccatcttggtttttccatgaagtacaacagaaaaaggaagaaatcaccttcaatgaaatttgaccaaatacatttctgtgctccaattaggagccctaaaattgatctcacaccagggcctgacctggaaagaaaacaggctcattccccaagtggtgtgaacctcagttgacacacacgtgtcttcagcctgtgctagaagagttgactgccctggggcaccagatccaaatttacagggcagacagcatctaagtgtgtactcaaggggcactcattagcaaaaaccatctcatgtttcc

SEQ ID NO: 423254 - DNA, 126 bp, Homo Sapiens
ggaattagatattgccattagcagagtcacaaatagaatttactaacttctttgattactgcaaattgtaagttttctgacctaagaaaattctctgattgctaattggcagcaaaacttctgttt

SEQ ID NO: 423255 - DNA, 380 bp, Homo Sapiens
tggtgacacccctgaaggatttttcacgaggaacaccgtgatagagatctagggaacgtagacactaccagagagtctagatacgcactactcatctgcctcaacaaggaagaatagtatgctactggttgtaaagaacaaaggaaccaaaggtccagaaatagacaagagtttacctttataataaaggtggcatcacagatcattggtaaaaagataggcaggtacagggctaagtaatagggaccactgggtacccaccaggaaaaaattattagattcgtaacctcatactgtaccctaacacaaactccgactgaatcggaaattttaacaaactccttatttggtcaaaatctattttgcttctggaatgctag

SEQ ID NO: 423256 - DNA, 450 bp, Homo Sapiens
ggaacctggcgactttacacaggaaagactctgaggttctgcttggcaaactcgagcgtcattccctgatacgtgaagatggtaccatatcttgctctgcataccttgtggggaggaatgagaggtggacttgctactcagagtgcaggatgcttatgctgtgaataggctcctctccccacccaccctgtccctgtctctgcacagcccccagcctcagaacaggcctggaacagagaaagcggcctggctctcccaggcatcctcttcctccggattatttctcccaatcacacttaatagctgcctggcttttggctgcagccggtatataataacctgcaattattgtccacttaagctgtccccagagccttgtctgttgcgctgcccaggcccgcatcgccggcctgctgatttccctgtcagagtcatggccaatgggaagaa

SEQ ID NO: 423257 - DNA, 118 bp, Homo Sapiens
agcagaaaatgtaggaacttttaacaaagaacaaacggcagaaactggtcagattggatataaagcaaggcccaggtttttgctatctacaaaaattttcactttaggccaaagttgg

SEQ ID NO: 423258 - DNA, 169 bp, Homo Sapiens
ataagagctcaggccagttctattaggtaagttcatatcactgacatttccttcccatgaaacacattgaacttaagatatagctataaatattattggtgctggattactactgatattcatttgtaaaatctgagtgctattattacccacgtttcatatttttcat

SEQ ID NO: 423259 - DNA, 436 bp, Homo Sapiens
cgggaccgggtgcattctggactcatggcacctgtcactggcctgcgtctgtgctgtgccctgatgctgtcccaggagtgaccttcctgtctcgggggtctgagcgaagacggggcatacaatacaatctcaatgccatccgcgctggccgcttccctgaccctgggcgcttaccttctcctatgatcgtgccctgctggcctctgcactcaatgcctggcgagagcaaagcgacaatagcgtggggctgccactgacgagggtcaatcaagcgaggctgaggtgaatgggcttgcagcccaagggcaaagtataaaggacatgggaaaaaatagtggagaagcagcacagtaactcaacattgacaaccatgcctactgagtattcactccataccacagcccttggggccaggccatctgcacccactttagct

SEQ ID NO: 423260 - DNA, 183 bp, Homo Sapiens
cggccacaataattttttaaaatgtgaagaagtgaaggttaatcttgggacagatcaggtcccctctcgctccccctgcagacttccagcgttgccagtaaggttaagcctctacaatacctagctttcaaaacataaacaaaagaaagtaatatctcatatcaggggtatgcggggaagaga

SEQ ID NO: 423261 - DNA, 211 bp, Homo Sapiens
cgtatctgcctcttacacaaacacacattcaccctgtctctcacacacatacctatctaaatagcaaatagttcaggctcacttcatctaacctgtgggtgtctgttagtcaggggaggcaactgctgttgcaaataattgccataatgtaaagcctcaagcagaatcaaatttgatttctcactttcctaacagtccagaattgccccga

SEQ ID NO: 423262 - DNA, 420 bp, Homo Sapiens
gacacggtgtactctggactgtacacttcactgagtagttaatgtatgttatctgaattttgcctcaaagaaattaaatcctacgaattaatctaaccatatgcttgaaaatattatttctgagctaaaatagagttattctgagttattcttcccaactagcctccaagctccttaggggctaactaattttgagaaatgtgtgcaaattccgtcttcccaacctaacaaacagcaccagtctccacccaactgcccaacctgcataactagagaaacgctggtacctctttcattcctcactttccctcggccggtctggcatcacacccttcctgatccctcaaatctgtcttctcactaactctacttctaccaccagagtccaagctactttcttgtttattttagatggagttc

SEQ ID NO: 423263 - DNA, 146 bp, Homo Sapiens
ggggaggtgtgctgttgtgcttgtctaaaccaaagcaattcccactgtccctgtgaaatttcaaacctctcccatatattcagtgacattaatctgaatggcatctttttggcttaatcatattttgccttgtttctttgttaact

SEQ ID NO: 423264 - DNA, 446 bp, Homo Sapiens
  misc_feature (157)..(157): n is a, c, g, or t
  misc_feature (305)..(371): n is a, c, g, or t
gacgagacatcgagacatagtggcatctccaagcctgcgctgtttatgtattccaccaataggcacgcaattatcatggcctgtgatttatactcattcgcgagtccggtagcaagcccgaatccagtttactttcatcattctatcctctattganaaagaaagtacagaaatttccagattcactaaaagtcattgaacaggaatcagtggggtgtatttggcaagccaactccttatattccatttcaagatcagatctaatcctataatagttttaagcctaacctttaaatgactgctcnnnnnnnnnnnnnnnnnnnnnnnnnnnnnnnnnnnnnnnnnnnnnnnnnnnnnnnnnnnnnnnnnnngtagtgtgctgccttccaatgagcatggccaaggactcagtttcatctaatggaacaccttcaaactgtcacagg

SEQ ID NO: 423265 - DNA, 280 bp, Homo Sapiens
tacaagacagggactcatgaagatactcactgatgatcatccctgggtatacctatgaacaaaacgaattttttaatcttggtgcttattattagcttcagcttgcctctctaataatcccaacaccttgtgctctcatcctgctctcagcttattactttgccccgtttttcactgagaagacagaagcagttagaatagagcttccacaagctcctactttgatatctgccctcctagcactggggccactgtttcctgctttccctctatgtgaact

SEQ ID NO: 423266 - DNA, 282 bp, Homo Sapiens
tagaatgagccgggaccggggcaatctggactgtgatttgtcataactgggtcttggattgaaagacaagtaactcattccacttaggctataactgatgcaaatcagttattatttagagtagttggtttattttgcattttattttcgatcatcctgtctcccacacatagccttactgccaacttaatttaatggatattcccctaatttcctaataccaagtatacaaaattacttatatctgttactacagagaaactgccccgaagtccagaattg

SEQ ID NO: 423267 - DNA, 275 bp, Homo Sapiens
agtagcccatcagaagaatcgtcgttccaggtacatttaaaagtaacaagctgtcctgatcttgagtctcagaggtacagtccaaaacagtcccagatctatgaacattcactttagggacagtgaccaatatcgctattttcaggggccttccctatacatccactcggactaatggcaaacaggcttacctccagttgcaaaggataatattaaactgtagtgacttaactaaggttggatttattctctgacctattccagaattgccccga

SEQ ID NO: 423268 - DNA, 244 bp, Homo Sapiens
gtaaacactaatacattctgtgaccatggtacgacaaatgttttgtgtttattattatgcaataaattattgaccggaagagtaggcttacttctaaaacagagaaaatatatctttgaataaggtgataatagtgtagaaggaatttgattaaatgcatacaaccaatatgatttctagcattaaattgcaatgtatattgtgttagtgaaaaaatcattagtaaaaatatagtccagaattg

SEQ ID NO: 423269 - DNA, 223 bp, Homo Sapiens
cccctattagttcatgttcttcagcttgattggtatggctcagcaactccatgttggcgcattgaggaggtatctgctctgggcgaggcctgcgcccgaggcacagacacagatttctccagctttggagaaccattgctctgcaatgacatctgctacccaggcactccctattcttcgatggagagtttctaaacgaaggattttccaagtatttataaag

SEQ ID NO: 423270 - DNA, 333 bp, Homo Sapiens
  misc_feature (129)..(198): n is a, c, g, or t
  misc_feature (225)..(234): n is a, c, g, or t
ggaacctggcgccttctacagagaaaaaggtcaagctgttagctgggaactccttggactgttatcgccactgatactccatcatagtgtacaaagcaagaccttgctttcagaacgacaacaacaacnnnnnnnnnnnnnnnnnnnnnnnnnnnnnnnnnnnnnnnnnnnnnnnnnnnnnnnnnnnnnnnnnnnnnnttttaaaagacaataagaatactaaannnnnnnnnncagttcaccccaaaagaggaacagagaaggcagcaaacagatgagacaaatgcaaaacactaaaatggccagtccagaattgccccgagtccagaattg

SEQ ID NO: 423271 - DNA, 361 bp, Homo Sapiens
tatcacgtgcgtctcgtcctatgcctcggcgctccttactaacttagtcagacgagaaacattaccgtgaggcgtctaaactctctcatggttgaggtgttaaatttctataagcttaaagtaataacttcaagaactcaatagatgaggtaatgtgctatgagaaatggaagtataaaattacttctaaataatcttagcatactgtgaaggatactgacttaggtatataattacatggtaaaatatagccttgtttttaaatatgagagagaaaagaataaaaggaaaacctaaaagttacagaacacgtactgacacacatatatatacaaatgcatgtgtctattcatggctgtca

SEQ ID NO: 423272 - DNA, 445 bp, Homo Sapiens
gcagtgggaacgtgtatgatataatgccttacgttgatactcagaataagatataggatatcatcattaagtctgattatctaagcttatctgtgagccttacagaaaacaaaaacgaaagatcaggaccacaggttctttgactaccatttccctatttttttcatttgtcctgaacagggcctaacacaaagataggcacttgaggcagggtagtacaaatgagtttttcccccgtatgaagtgacaatcacatggattatatgtgacctttacattgttgagtttctaaagactttttaatggatgccatacccacccccaatagatcacaacctatttctctcattctaatgttggtcatttgattacatagtccttagtggctctgtgtgcttgagactgctaaataaacaaaatgtttgcaagtccagaattgccccga

SEQ ID NO: 423273 - DNA, 321 bp, Homo Sapiens
cttgttacatataaatcacccttctaatttattcgtcgctggtactgatgattactgagaggggtgtatgttaaaattcccacagtcatggttgttagatttatgtattgtttccttgatttcttcttaactgcctttccccttccttaccctccctcttgtgtctgtctctctctccactccctgatattttattagatgtataccgacatccagcttttttataactcaagttattttatatttgatgttcctctttatctccggcaatacttttttttctctaaaagtctgtttcatttgaatattaatgaaacctac

SEQ ID NO: 423274 - DNA, 114 bp, Homo Sapiens
aggctgccgatcgggactggtaacagcgtgggagccccttggtgtgctttaccaagcaaacctgggtcaggcccagaacaggacacctaataccatacggtgatctcacctcca

SEQ ID NO: 423275 - DNA, 210 bp, Homo Sapiens
ctccacccgacggggtgtattttgattgtaaagccaaggctttgttggggaattggctgggcctagggttcaagggaaataagaatcaagaaacaaggagaaagcgggagctgccatatctgaatcagaaaagaccacagaggggctcatggagggcaactgtcagcagtcgggttttgggtctgctgagtacacgattcccaggggaat

SEQ ID NO: 423276 - DNA, 277 bp, Homo Sapiens
  misc_feature (67)..(126): n is a, c, g, or t
caagcatgtaatcccagcacatccagctaattaatagtattttaaatgaggacggagtctcgcatcnnnnnnnnnnnnnnnnnnnnnnnnnnnnnnnnnnnnnnnnnnnnnnnnnnnnnnnnnnnngttcaagcgattcgcctgccttgctgggatgacagacgtgcaccacaatgtccggccaattttgtatttttagtagagacatggcctcaccatactggccaggccggtctcgaacttccgacctcaggcgatcccaccccgtcaggtggag

SEQ ID NO: 423277 - DNA, 255 bp, Homo Sapiens
ccaagtcctggccctggctctgtctggatcctgatgggaggcacgcttcagccagcctgccctgacacagagtttgcaagcacagctcattctctgtttggtctagttccctaaatgaggtgtaggtcaagtgcacacaacaggctttgaccaggtgtgttcccacgacattaaggcttctcttcctggggctggaagtggcttggagaatgaggcctgaagccttcttatacctgcccaccccgtcgggtggag

SEQ ID NO: 423278 - DNA, 324 bp, Homo Sapiens
  misc_feature (141)..(157): n is a, c, g, or t
ggtggtgagatcgttagctttatcagatcttgggagctatggaggtttgaggcagaggtgtgggctgctgggagagtgaggactcaccatccagagaggaaggcgaagctttcaactctaaatgccgttttattttcgtgnnnnnnnnnnnnnnnnnggacatggagtttcattctcgtggcccaggggggagtgcaaaagcaggatctcagctcagggacacctcggcctccggggttcacagcagatctccgtggtgaaccctcccaagtagcgggaataataggtgcgtgcacccatgcctcgctgataaggtatattaat

SEQ ID NO: 423279 - DNA, 126 bp, Homo Sapiens
ccgtctctgaacttaggagaatcttgcaaattgtgtttctattgtttttctctttttagccacaacatattttgctgttaatgagttgggtgaagtatttggttcccctctacccttcctattggg

SEQ ID NO: 423280 - DNA, 351 bp, Homo Sapiens
acttagggataggcctcatctaaaaaggatatttccaaaaagctgtctagcgagtttcagttaaaagtttaaaaatcttctcagttttgcctcaggctgtggtgatcaacaaacacacagtagaaagagaagtggggcctgggatatagacccatctaggccaacaactcacaaagttgcttaacttctcaagctcttgggaggaacccaggtaactgatgcaaggctactctgatagaaaattttattgttctgcaaacaaaggcagaaggcaaaaaacagaacttgtgctatacagctgtcttcaagcaagatacacatgaaccatgactgcctaagttcagagccagg

SEQ ID NO: 423281 - DNA, 201 bp, Homo Sapiens
gcctcagaatttaaaattagtccaaaacaggaaacagctggaaacagagttcagagaaaagagaggaagaaatacactggtatttattttttcatctgtctttcaatcagagctagtttggtcacggttaatattgaaagtgtcttttcctcctagacatttcctgatgaaggcccaggataagtaagtcctgtgtgtgct

SEQ ID NO: 423282 - DNA, 440 bp, Homo Sapiens
gaacttaggcgggatcccacatgggcagatataagtaagtctggacaaaatctggctcacgtccggctctctctgtaggggaggggtccttacgttcctttgattgattgaagcccgagaaagcctgagagctctaatctctgggacaatctgccttgtttgcagcgtcagtaactgaggcattgggagaccagggggttgcacagtccccagacctgcagacagaccagccatctgatcatcggaagccattacacattaaagcagaaaagactttccaaaaggacactaagagttagaataaagagacctccagcaggctgtatctgaggctttaagcattagggcaaatattgtgaagcacataactccaaaaaagcctcccttgtaaagaatattcaatatctgtaaatcatcacttagaaatgcagcccagattt

SEQ ID NO: 423283 - DNA, 236 bp, Homo Sapiens
tgaacttagggaagtcctttcccgtgctgcagaggaggtggagaacccttacatcatggccaggcattgcagcaggtaagggagagagagacaggtagacacagacaagcatcgcagccgggtaagggagagaaaggcaggtagacacagccaggcatcgcagcaggtaagggagagagaagcaggtagatgcagcaggtaagggagagagagccaggcctaagttcagagccagg

SEQ ID NO: 423284 - DNA, 172 bp, Homo Sapiens
taccagataaaaagtcagtgaagtagtaggaacgatgacagatgacacgggttgaagactgaggagagagaagtgtaagagtggaagcagagggcagaccactcttctgagacactgaagaggcatagttagaaaaaaagacagttccctttgtcctaagttcagagccagg

SEQ ID NO: 423285 - DNA, 452 bp, Homo Sapiens
tctctgaacttaggctgtcactaactatgcagtaacatttgcctacagtggggagcctggacatcattggaggacatcataaatcatgctggctgtacgcacttcagatcatgccagacaatcatactacatactcttcctgccgaattccctctccccctctctgagatgactattccacagcgcttcctgccctcaaaccttccactcactcccacactgttgcacacttcacagagacagatgaggcagtgactcatcttcccaccagtgtttaccaacttctctgtatctgtgcccatgtcctctgcccccttccggtctcagtggaagcagcgtgcccttccccttgtccccgtcaacaccgccacttgtttcctagatcacatctctctttacctactcgaaagcttccttcccgcagttactccctttctcttctgcagcctcca

SEQ ID NO: 423286 - DNA, 212 bp, Homo Sapiens
tctggtctcgaacttaggtgggctggtgaagcagtgttccaggaggggaactgccgctcacagggactgtcctgagtcgccctcggtgatacagccagacattgatccagagtggctcccggggctgaactggggaccgccggagtgcatatcccagagaggcagccttcagcatcagtggggaaacgcagtttccaaaccttagagctgcc

SEQ ID NO: 423287 - DNA, 143 bp, Homo Sapiens
ctgtatattagaggaaaaaacatccagtagaggatgaataggaaaggagtggcgtggggtggagtttcacaccttttaggaagggaaatgacacgaacataaaatcagaaatccaagcctcctgacctaagttcagagccagg

SEQ ID NO: 423288 - DNA, 403 bp, Homo Sapiens
gggatcccccctgttctgaacttaggagagaattggagaaaagccatcacagttgattaaacgaaattcatgaagcaataaacaacaagaagcaatacactattattgcatgggaaaatggacaggaaatcttaatacatctgtagtaaggacagtgactaattattcttccactcttcttaagatggtgaaagaactaacagactaaaactacggagttcatacgaagaattccctaagaatgaggtctgttaaaaggtggtggattattctttgatcaatttttcaaaaagaatcctatgacgtgtgtctaagggttgctttacgaagtgcttgatctaaaccacctgagtcctctaccatcatatgaaaatgtcttcctcagaaactttgataactctat

SEQ ID NO: 423289 - DNA, 425 bp, Homo Sapiens
gcgtacaacttcaaaggtgagatttgggtgaagacacagagacaaaccatatcattctgccctttgcccctccgaatctcacatcctcatattacacaatcaatcctgccttctcaagcatcccccaaagtcttaactcatttcagcattaacccagaagtccacagtccaaagtcacatctgaaacaaggtaagtcgcttgcacatatgagcccataaaatcaaaagcaagctagttatttcctagatacaatgggggtacaggtattgaaaaaatacagccataccacatgggagaaattgtccataacaaaggggttacaaggcccatgcaagtctgaaatcctgtggggcagtcaaatttgaaagttcgagaatgatctcatatgactccatgtctcacatccaggtcaagctgatgacag

SEQ ID NO: 423290 - DNA, 404 bp, Homo Sapiens
cctggctctgatgtaggacctttatatatctcagtcacccatcaatgggggaaaatactgtcagcaggtaaataattgtgaaattttctagctctctttattgcactttaacaatatctggtagatctcttaacttctgtttggtgttccacagattgtcacaccttgaaaattccaccttcttaagtcttgtatccctgatatgcctctgttgtattttcaaccagaaacgtatttctacaacttataaatgggaataattacatgcaccatctttcaaagtcagggctctagtcttggtgcatgaaataagcaaatttggagaaatacacattaatcaatagctctctgcatgggttttaatggtagtacaagaagagaggctggagagcctccaaacaatc

SEQ ID NO: 423291 - DNA, 343 bp, Homo Sapiens
  misc_feature (113)..(168): n is a, c, g, or t
cctggctctgacgttaggatgcgttgttcatcttctcagtggggcactattcctccaagttcctaacaaaatgcactttaaactgtacttgagtcactacatacattccctcnnnnnnnnnnnnnnnnnnnnnnnnnnnnnnnnnnnnnnnnnnnnnnnnnnnnnnnncagcatccacagggactccctcaattgcaatttctatgaagaggcctccctgacctccagaccaacatcgccacctatatgaagaatgtttccaatcataggtaggtctggcacttaaaactcatgtagccaaagtaacagtacttctgctccaaacctattattgacctcttca

SEQ ID NO: 423292 - DNA, 156 bp, Homo Sapiens
tgcagtatcaggcgaagtgctatataatgtgtgctggatatgttacaggatattagaacagcttattagcgaacaaaggcagagaaaggctcgagggtcatgctctcccatctatagtgtgaagactctctgccttacctaatttcacgagccagg

SEQ ID NO: 423293 - DNA, 400 bp, Homo Sapiens
cgctggctctgacttagggtgtctagcaacttgcaaatatgtttctaagcctaaatgaccaagcctacagaaacacaaacaaaagtaatttaaataagaacatgtccataagaatggaaatgaataaaaccataaaatcagaaggagagaagtatagaagcacctgaagaagggtttggcagttccctggaaatgccacataccctttatgcttttctatgcattactctgcctgtaacatgttttctccagcttctccatccaccacgctaattcaattcttgaagaatttcaagagcctaccactaactctcccagggcagtttattaatcctcttctgtctcacagtatctgtgtgtacaatcccagttgtggcaagaggggcaggggtcctaagtt

SEQ ID NO: 423294 - DNA, 304 bp, Homo Sapiens
agagccaggcctggctctgaacttaggacacttccattaatactttgagtgtgaatcaatagtaatatcaacaataatgtgtagcagaggtaccattacataaataatagtatattaattactagcatttatttgacactacgtaccagacattaatgtccattttcccccatagcagccacagtgatttttcaaaagtataaatcagatcatgccatccctttaaaaatcctcatggacttactttgcacttaaaatgaaacctgaacttttcaccatgtgctaaaggccttgcctaagttca

SEQ ID NO: 423295 - DNA, 350 bp, Homo Sapiens
ttctgaacttaggaggagacgacagcagaggcttcttccttggaatagagaaagctaaaggtcctaagaagtctaggtggacaggtaagttttaggatcacatgtgatgaaactggaacttctctgtgggctgcccatccctgaggaagcccaatcctgttatccatacctcccaagccccagagaactccacatctgtaaacatccttgaaaaggctacagaatcctaataatcagacaggatggtcacaatgggcatcatttattcagtgtctactgagaggtactgaacgtggcactttgtattcacagtgtcgtttaattctcattacagaattacatctagaaat

SEQ ID NO: 423296 - DNA, 142 bp, Homo Sapiens
cctggctctgaacttagtgcatcagatttttatcagcttaaaatggcttgtcgtaactgtgaaatctgttggtaagcctcattttaaccacggagcaaagtcctacagtagttaacacaaaagataaaaagtggggaatcgg

SEQ ID NO: 423297 - DNA, 290 bp, Homo Sapiens
cctggctctgaacttagggggggtttccacatttcttacttgagcaacaggatgggttggagtactagctactgaatggtgagggaaaggttttaaacacagaaagcttgtgttgcctatgaaatttaaagtggaggtgggaaataggcagttgagaatctggaacccagaaaagaggtctgatcaagcaaagcaactgtgggaattgctagcatggcatttatatttacagtcatctctctgatcagattaactagatatagagaagagtgcctaagttcagagccagg

SEQ ID NO: 423298 - DNA, 127 bp, Homo Sapiens
ccggctctgaacttagggattcggctagtcactatttagctgtgaatccagcagccaaaaacgattgctatgtgttcagtcaacaagtgaaacaaagtacacaagctttctttatattagtgaagcc

SEQ ID NO: 423299 - DNA, 256 bp, Homo Sapiens
ggcaatattactttctagtatcagaaagttctctttaaaatatatgaatttttgagaaaaagatgctttttatcttgggtaacccccaataagggaattaatctcctcttccgccattcttcctgagtccaataattctttgttcccttctcccaggcccttttcttgtagtctttcagtcccatctatcttcactctcttttctattaattagactccatttcccatcatgtcaaccactctccgtgctattagc

SEQ ID NO: 423300 - DNA, 131 bp, Homo Sapiens
cctggctctgaacttaggcctggctctgttgccgaggctagagtacagcggtgccattagggctcactgcaactgctgcctcctgggctgaagcgatctccccagcagcgcacaccacgacgcttggctaa

SEQ ID NO: 423301 - DNA, 435 bp, Homo Sapiens
gaaacaagggagtagcaggcacatggaaatggcgggagagaaccagagcaatttgccccaccacacactggacacagaagcagaggcaggcgccgctgtctcagcatgcacatggcagggactggggcagtgcatgccagcgtgctggggactgggagaagccacagggacatatgctaaatagagggcctggggtggggatgcggagttttgttagcactgttcctctaactacagcatacatgattgcgaagcataaataaccaattccttgttcctgaacaaacagaagtggcagcaggtagaggaggaatctttaaatagcaatactgaactgtactaacactttcctcaggaaaaaaggctgggaattggcaaactgtgaatagacctggcctacttaacacttgccaatcagccacagtgcccagatca

SEQ ID NO: 423302 - DNA, 435 bp, Homo Sapiens
ccgtctcgaacttaggtgatccacccgccccagcctccaagtgctggcattacaggcgtgagccactgcgcctggccgaagctatgtttttatctgagtatttggtgacttacacaagcagtccccaaccttttagggggtggtttcggagatgaaactgttccacctcagatgatcaggcattagttagattcccataaggagtgcagcaacctagatctctcacatgcacagttcacaatagagtttgtgctcctatgagaatctaatgccaccgctgatctgacaggaggcagagctcaggtagtaatgctcacttgcccaccgctcacctcctgctgtgcagcccagttcccaacaggtcaggtccaagttccaggggttagggatccctgacttacacaaatgggtggaaatacaatgtttagtttagta

SEQ ID NO: 423303 - DNA, 391 bp, Homo Sapiens
  misc_feature (44)..(52): n is a, c, g, or t
gctcgggcccctggttctgaacttaggacatatggtcctaagcnnnnnnnnnggttggccaggctacttattactgattcagttttgaagctaattataggtctgttcagggaatcaatttctttctgattcagtcttagaagggtgagtgtgtccaggaatttgtccatcttttctaggttttctatttagtgtgcatagagatgttcgtagtagtttctaattgttatttttatttctgaggggtcagtggtagcattccttttttcatttctaattatgttatttggatcttctctcttctttattagtatagcttatgttaagttgaggaattagtcttcaaattcttctcatttggcttcaaatcttccctaagttcagagccagg

SEQ ID NO: 423304 - DNA, 252 bp, Homo Sapiens
ctctgaacttaggccgtttagcacatttgtactaagtggctgacctttgataagcaccactccttccccacctgacctgtgattccatttttctttggtgcaaatagttctgaaggtttaatgtttattttttactacgatgcagtagactttcttctctcgtgtagaaactgctcgaatgactgtggatgactcctagaatataggaataacagaattggtttctcctgtactctcaacacaaaagacttc

SEQ ID NO: 423305 - DNA, 245 bp, Homo Sapiens
  misc_feature (166)..(177): n is a, c, g, or t
tgcagcggactcggcagagactgtgtggaacccctgtcaaatcaggtctcttttctaagagctctggcctgagccttgtagcagatgtcacatcctgaaagtcagtgaaggtgggggctcctacattaaaggaaactaaggagacataataacctccttaattcannnnnnnnnnnnaaaaaacagctttttaaagacataatacacataccatgaagtttatccttttaaagtgtatagtccta

SEQ ID NO: 423306 - DNA, 450 bp, Homo Sapiens
tgtgatacagcacacagaaagacaggcatggtgttttatgaaactaacaatgaaggaaccctattatatgctttatatctcctattactatgcctatattaatcacacacttatgctggatataataacataaaagtaaaggtagagatagggccacccataattccttttcttctcagtccttccctactcatcagtaagcagcaaggtcagaatgttggtagcaatcatgtattcatccaagaagtgaaatacaaaccactgagttcgtttgtacagagtttctactgttctagcaaaaacacactacacatgcaagtgcaactacaaaatgactgtataatttcagtttccacaaatgaggtacatattcttatctttgcattttaaatggacactacacaacatatagggatgaacagtaaaatacaggctaatgatttacaattc

SEQ ID NO: 423307 - DNA, 169 bp, Homo Sapiens
gtcacctataggaacctgagcactcgtatacagagcttcgggagatcaggccatagatcccatgcatcgtggtggctatataaattgatgcagactaacgtgacccaataaaagcttctaatttgccaacgaagtctccctggccctgtttttcgtctcggctgctgat

SEQ ID NO: 423308 - DNA, 243 bp, Homo Sapiens
ttcataacaggacgacgggttctcatgtgagatctatgctcctccacatgcctgttcacgctctacgcgattctcacatgttaccatttattacaggttactacaccttttgaaggtcatgttctggtcagctcttgtgatctgtgtagtggctgtgtagattcatgcttgacttttaaaatcctgggcattgtttgtgctgagcctcgtatgtttgtcagttcatgccgagtccgctgcatt

SEQ ID NO: 423309 - DNA, 159 bp, Homo Sapiens
agtcgacggcgagagataggctatctcccactccacctactccccatatatcccgtttgacagcttagcctctagtgccctctcactttggcatccaggcacatcagattctcctccactggagccctagcttccttgtccctcttccccataaactct

SEQ ID NO: 423310 - DNA, 298 bp, Homo Sapiens
ctggctgagaaactaaaagagtgagaactcactcactaatgcaaggaggatgcaatgcatgtatgcagatatctagcccccatgacccaatatgcctccaatcaggctccatctccaacattgcggatcagatttcaacttgaggtttggaggggacgtatatccgaaccatatcacatagctatctgtgccctcccaactgtacccttgaatcctctctgctccggagtgtgccttttacgacaggatcgagacacctagaccaaggccgaggagagaaagctggtcatgccactac

SEQ ID NO: 423311 - DNA, 271 bp, Homo Sapiens
agtgctgtatcacacccggtccatattgggagtcccatagggcagcgcacatttgtggccagcgtcattcgggtttggccatgcagaggccgtccttgtacataacaatttgttgcttaacagacttgccaggttaaatcatggtcatatcaatatacattagtgacaccagtcgaagatgcatctaaatatctacaccatggcttgagtagaggcctagcaaatagtggcaaaaccatcagcattgtctagagctatgagtaggggccta

SEQ ID NO: 423312 - DNA, 176 bp, Homo Sapiens
ctgcacagtgtccccatcgctgacaaagggatggttatacaccagcgatcttcccaaatggcttcctactgccttgttcttcagactcctcaagatagactccaccaccatgcaccgtctgcttcaatgccatgaaccgatgaggagacctgaaagccacagtaatacagtgacat

SEQ ID NO: 423313 - DNA, 323 bp, Homo Sapiens
aacacaatctaaatggaccttacacgatgactgactttcttgatgtttctcatgaacagtgtcattaccgagtgggtggtgatagaggagaataccttacccctgagtacctaaaagaactgtttgatgactcactacccagcagtcagtttctggttgttatgaattacctgcgatacagcttgaagggagaacgatcttgacagcaccatgcccagttccgacaggtctcacactcttagccatgcctcctacctgagggacagtgccttgatttatgactcatttgttattcccagtcaccagttgttcaactctagcca

SEQ ID NO: 423314 - DNA, 148 bp, Homo Sapiens
actctagagcataaacggctctgccaaagaatacactctttagagaaatgcacttagaaaagtaccatcataagcattctatcaatatttgagaattccctgctggtccagtggttgggatttggcactttcacttccggggcatagg

SEQ ID NO: 423315 - DNA, 118 bp, Homo Sapiens
cctatcaatcacaggggtgctataaataaaagagacccagtcggttagtgaggtagcagcgaaaggagatgccagcgggtgttaggaaggatatggtcaggagagctgtttgtctcgt

SEQ ID NO: 423316 - DNA, 195 bp, Homo Sapiens
tcgtaggagctgagcagcaagcatcagcgggacctacgtgaggctcatgcccagaaggaggacatgccagagcccatactacactggtgaagcgctacctggctgctaagcgggaggcatcatctcgtcatgacctcaatgacaagctggagaatgagctggccaacaagtagtcccttcaccaacagtgtgagg

SEQ ID NO: 423317 - DNA, 165 bp, Homo Sapiens
ctctcacttcagctttgagggcgtcatcacccctgtgcaaggtcaggggggggagcacaccagcagtgctccccagtgtggaccagtgctggcgcatcacggttcagggctcatggtccagtgggaggggatgcggagagcagcctgtgaccacagaagaaaggg

SEQ ID NO: 423318 - DNA, 452 bp, Homo Sapiens
ggccatagctgactctagaggatacacgttgggccaacgcaccgtacaaccagaagaccatctatcagcaaagacagcattccagctgtctctgctctctacaatcagcctgacatctaagggtaataaaatcctggaaagggcactctaggcagaagaaacaacatgtgtgaatgcatggagctgagcaataacaaattattgagcacttagtaaatgccaggcagtgcactaaatactgaacatgcattatccagttaatcatcctaaccttataagacagaggtatagaaggctacgtgccctatccaaggtcatacaactaggtaagtggtgtaagcagactttgaagtaagcaactgattactaatttaagttgctcctaaccttggggtcaaggtgagaggagtgagacagagagagaattctagatggcttccaaatgttttggc

SEQ ID NO: 423319 - DNA, 204 bp, Homo Sapiens
cggcggtgaatggccggaggcgttgaatggccgtggtgaccatagggggcagcacagtccgctggcgccctcctctgggtcactggagctgcatcgtctcattcggcctctaagcagcctgtgcggttggtgctttgatccccagtttacagatgtgggccctgatgcccagacgctttgtaacttggccattcaacgcctccg

SEQ ID NO: 423320 - DNA, 303 bp, Homo Sapiens
aacagaagcctacaccttattatctccagagattcttctagggcatctgtacttttgaaaaagacccctagttggataggaaaatggtctagaactagaagactttatcatctctagatcttttttaaaaattatctcatgagtctgacactttcaagtcctatacagaatggtagtcgcgccagtaatattcccttcaagcttaatatctgtcctccaaggtgtcagaatattataatgcattcgaaaatgaatcttgaggcatcttttatgtatttccctgagcagttcaagtgggatcaa

SEQ ID NO: 423321 - DNA, 437 bp, Homo Sapiens
actcttgaggatcaacgtagggccaacgcaccgtacaggatgaaaatatagagctgcattaagctactctaagaaataagctaaaatgtactaatatttaataggtgagggaaactgggaaccttgctcatgtcatctgtcagatgacaagtgtcctattttgaatgcagctatcctgggattatgtggaacttccatagtgcaaagggtcctgcattcccttgtttgctttcagcctgttgtgacatgctacatttactcatcagacttacagattatgttaaccagttttaattaaagcaacagctgcaaaattgacacttggcttataaagattcctacagagaattatgggttgaaggtaacgtagataatgcaaataaaaatgagccgtaaatagttgtcagagctgagacttctcccagtacaagctatga

SEQ ID NO: 423322 - DNA, 414 bp, Homo Sapiens
tagctgactctagaggatacacgtagggccaacgcaccgtcagggagcatgtcgcgaaggataggggaggacagggggtctgcttccccagccgccctccagacccccagggctggggggggccggcaaccctatgccccaacctggcctgctgcaggtgaggggggcgcaccagggtaacacaggagcaggagggggagaaagcctggctagagcatccacctcataggcaccttccttgtgtccagggtgcagatgccagggctctgaggccctgaggtcctgtctggggcgagggggcttcctccatccactgcatccactgcccgggtgagtctggaggccactgagcaagcagaccctccaaagccaggcacactcaggccctcacatggtcacggtgcgttggcccaa

SEQ ID NO: 423323 - DNA, 450 bp, Homo Sapiens
ggtcatagctgactcctgagggtaaaaggagggccagcgaatcggataacattttcgtcgtgcccgctatgatcaaaaaccaccgcgcccagtatcgccacagttccaccgtgcccggggtgggcacagatccaccatgtaccgtatcacaattccaccgtgcactatatcacaattccagctgcactggctttgaatattttctgtactaaagccgtgaaactcacctgatcagaaaagctacgccccaagcctatgtaacctctgattgtcgctggtgtgtggcttctgttctgtaccaagaaaaagatgcagaaccacgttacaacaagacactccctgaatacacacaactccacgtgcacgcagacttcccaaaagcacacaaaagcatgatgctcatcgcagctctctggagaaatcggactcaggtggacaaaacatctgggt

SEQ ID NO: 423324 - DNA, 176 bp, Homo Sapiens
tgttcatagctgactctagaggataaacgccaacccaccgagttggaagagtgctcgtacgctgtgaagctctgtgaaaatgttatatacacagtactcccaatgccgtcctcagagggggggcgaggacagctgatgaataccagctctcagaagatgttaaagaggatgctggt

SEQ ID NO: 423325 - DNA, 405 bp, Homo Sapiens
gtggacatatgcttttagctttttcatactataaaaactcctttcttctactatgaagaattataatttattcggggggggaatccacttgttcccctagagttctacgcttaatctgtagaaccaaataaaggaatggatttagcttttaggagcctgaatgaaataaaaaccatttctgaatctggcctattctgttaagttcacaactattagaggttatcagtgctagaatttccaatagataataatcattctttattcattcctgagaatttgattttacaaggacgtttctgtatttcattctctggagactgtattttcatgtttagatgtgtttgtacaaggatttaagtaagaacagttgtagttttaggggattgtggtgactcccagtattga

SEQ ID NO: 423326 - DNA, 449 bp, Homo Sapiens
  misc_feature (179)..(246): n is a, c, g, or t
ggcagagctgactctagaggataaacgaagggccaacgcaccgtaggaggtggcagtggtccattcgacctgccaagagacctgcaggtaggtacagagcctcacctgcaaaaacgggatgaggtaggaagaaagaatgcctgctctctcttaaggccttcaagagggctgaattagannnnnnnnnnnnnnnnnnnnnnnnnnnnnnnnnnnnnnnnnnnnnnnnnnnnnnnnnnnnnnnnnnnnccaaccagtgagcaagccaactttctcctgtgtcccccccaacacgatggggactaaggaaaagaggctgggagctgggaagccctgtcattgcaacaggaagtagtaacggcatttagcaaaggtggaggggaaaataaaggaagatgctcctctctcccacacatcggaaaaatgaactaatcagcagcaagcagttaatg

SEQ ID NO: 423327 - DNA, 399 bp, Homo Sapiens
tccgggagaaaaagacttgccagataaaacgggagcctcttggaagattgttccggggttaaacccccacatcaatatgccatagctttgtgcagccagtatgccgggacctgaatctcatttttccaccagccagatgggttccaggccattagaggagctattattctattcatgtggaagaaaacagccttgtgaacatacttggaaatttattcttccatactctatataagaaagtacaccaggaaagaaattctgtgaggtgagaccccaagttgagaaagtcagttctcccacagaagggagaactgggggacagatatcctctggttatatacaagacatttccaggagatctctctctatatgacaccctcgaggagcatttgtgagata

SEQ ID NO: 423328 - DNA, 107 bp, Homo Sapiens
taagtctgtggaccaggttgttaaaatcactgaatcagtttgacagttatgaagataaggaagaaatgagcggagaatggcacgtgttagagccgatgattaactct

SEQ ID NO: 423329 - DNA, 204 bp, Homo Sapiens
agaccacgcatatgacagtaggtcccattagattataatggaggtgaaaaagggctatcagcgcatgatatcactgctgtcctaacatcacagcgcaatgtgttactcaagtgactgcagtgatgctgcaataaacaaacctactgtgctggaagctgtataaaagtctagtacataccattatatacagtacataattcttga

SEQ ID NO: 423330 - DNA, 270 bp, Homo Sapiens
ctcagggcgagctgcaggcgttagatagaatatggtgacgagagttacgaggatgacgagagtaaatacttcatactcagtacgtgccaagcactgctataagcgctctgtatgtgtgaagtcatttaatcctcacagcatcccacggtgtaattattttcattatccccatgagggaacagaaactcagaacggttcaacacatatgcgagaagtcgcagccggtcagtgagagagcaggttcccgtccaagcagctcgcccctgagtt

SEQ ID NO: 423331 - DNA, 208 bp, Homo Sapiens
acaactcaggggcgagctgctggcaagagcaggagggggttagagggggacggcacaaagagcaggaagcccaggccatgctgaaccacctgtcacttgttattgtcatcattgtcaagccttgagtgttgcttcctctgatggccatgaagccatcgcagggctctgtgaagagtgatgtgatgagactgggcagctcgcccctgag

SEQ ID NO: 423332 - DNA, 135 bp, Homo Sapiens
tcgctattcatcggcacctagacagcaaatctcccagtggagatgacagacatgctatggccagtatattcttgttttcttgtcatgctcattctgaaaaggcacgtgagatactactggtgtgccgatgaatag

SEQ ID NO: 423333 - DNA, 309 bp, Homo Sapiens
aactcaggggcgagctgctgtggtgccagctgctgcctcttcgggagcctccaatacgcctgccgagtctgagcccactggcgatccacgtgggcccagtctacatcgccaaagcccttttgctgaacagcatgttcaatttcagatcttctacttcatcatcatcacttggcaaatcaccacctatcaaactgctcgccctttagttgctcacccctctggaattcaccatcatcgacatagctgtcctctgcggagctaacccctgccgagaaaaccccggccacggtgatggttgtttccgggggg

SEQ ID NO: 423334 - DNA, 152 bp, Homo Sapiens
accgagctgctgataaagacaaaaccaagtctgggtaatttacaaaaagatagaggtttattggacttacagtgtgcacatggcgtagggagacttcacaatcatgatggaggttgaaaagcatgtctcacatggcagctcgcccctgagtt

SEQ ID NO: 423335 - DNA, 574 bp, Homo Sapiens
  misc_feature (531)..(531): n is a, c, g, or t
  misc_feature (558)..(558): n is a, c, g, or t
atcggcacctatagatgagccaagcatatcattgcatctgagaccacatgtgaatgctagctatgtatatgctctaaaaagcagggggtagacaaagaggagcgccgcccagcctcccaacaccagagtctcacttcctctcctcagctggcgctctggggccggactccagtaataacagcctcctggggagattaaagccctggcaagcacagtttatcttggtgaatgtatactttagctttgtgtgtatctacacatatacatacactgcagtatttatagctggtatacatgtgaggtagcgctggagacaaggcctggaatgggtgtacaacacctatgaggttggaaccaagatcttttaaacgcaaacctggtttccctgaactgtcctccacccgtgtggaccaaacacacactcaggtgtttcgggaagaacatcctccctccctgcaaataggggcagcagtctttcttctgtttccagaaagagttgagtattttgtggaggcttctttcatctctggngactttgcttattagaaaaatacacangatcaccgctctcccg

SEQ ID NO: 423336 - DNA, 138 bp, Homo Sapiens
cctctagaggatacacacccgtccccagccccttcacacatggaccactcctcaaatgggggttgaggggcaatgacactgggtatgagtgaagcagaagagatttagaggcagtcatggaatttgtggcgaaaataa

SEQ ID NO: 423337 - DNA, 531 bp, Homo Sapiens
actcgctattcatcggcaccactaacttctttttgtctctgaaattcacttaaatacctttttgaccataattagcaatgctgaggggtgttatatattatagcatatttaagtccaagggaatggtttgcttcttggactcaaatctcttatttatatccttggataaaataggaagtcaagaaaggcaactatcttttctccttttcccggccttctggtgtaaacaaaacccataaacccattcttcccctatctgattatttcatgggaggctttgagtataaaacacgatgaatgaggtatgagtcacccttggccattcagtttggcagacattagggagtacctaaattgtatcaggtactgttctaggatttacagatcaaaacataattaaccttggttcctgcctttgaggagcttatcgtctggtttgattaggctgaaatgtaatttgaatttcaatacaatgtatttcttagggtttttagatcttttgtagtctaacgagatgagccttaaaattac

SEQ ID NO: 423338 - DNA, 453 bp, Homo Sapiens
accgagctgcagtgatgatgctgtaagccctgtaggaggcagaacagtacgtccttgagaaagtggaaagttcttctgatgaagaacgattactcagaagttttgtgagttcaggtggagaagcttcttagtggtgtcattggtcttccttccctggagggtgattgaaagggcttccggaattctcagaacccaattttggagagctgccagcattatgattagtacaatgccagcattatgattagtacaatgccagctatatttgtctgcaggagcttttaacctgggattcatggactgttgaagtcaaggattggtgaacttgggtgggaaaaaatacatttttgtttttactaacctctatgtgaaatgaaacattttcttcaataacaactgtaagtaaaaccagagtagaattggcagtacctgtgactttgttactaaaataaa

SEQ ID NO: 423339 - DNA, 179 bp, Homo Sapiens
aactcaggggcgagctgcgttggaaagcacaggcctcctgaggaggcggcgggatgaatttgggctgatgctactcctggtgattgcgcagacaggactgagggcacctgagagcacagaaggggctctgcagggcagtaggcacaggctcgttgttggtccttgggagagagtggtag

SEQ ID NO: 423340 - DNA, 292 bp, Homo Sapiens
acatcggcaccagagagaggccagcatttctcccctcagaaagatgcattacctctcacgcatgctaactagggggtgtggtgtaggtgacgatacggagggctgaaggtgggaagagaacttatcctgaggccccttctcagtttcagagtggggccgctgtgtgtcatgccactgacaggtgtcactgccacacattagccttttaaatgtgaagggactcttagcacagcaccagaacatgggaccccagccccggttacgtagtccccactggtgccgatgaatagcg

SEQ ID NO: 423341 - DNA, 217 bp, Homo Sapiens
  misc_feature (62)..(115): n is a, c, g, or t
aactcaggggcgagctgcccccaaacagaagctccctgagatcaggatcctcgtcagcagtnnnnnnnnnnnnnnnnnnnnnnnnnnnnnnnnnnnnnnnnnnnnnnnnnnnnnnagctaatctttatatatgcttatgatgcattaatatcagataccgttctaagcactttaccctcattaactcattgaatcctctcagcagctcgcccctgag

SEQ ID NO: 423342 - DNA, 189 bp, Homo Sapiens
  misc_feature (99)..(99): n is a, c, g, or t
gctgctcaacgcagggacgagctgctcaactcaggggcgagctgctcaactcaggtgcgagctgctaactcaggggcgagctgcagagaggagcctgtncagcaggtggtaccctcactccccacggtgtcctcgctccggctcagtctacttctcaggccctcccacgtcctctgtatcttctgcatg

SEQ ID NO: 423343 - DNA, 445 bp, Homo Sapiens
tgccagagacaggtgaacggcactgtgcctttggctattgctccttctatgatctctagccttgccagctacttcttgggtttaccctggaaggtgacatctaccaggcagccctgacatttggcgtggaggagttgctggtggcatagaagagttagaaagttccattgtctagggtagccagcattttatgttaacaagtatggccgggttgaattgggaagggtcaagcaaatcctcttccctcaacttgtatctagaccacagttttgtggaactgaacctgtgaggagggactagcagggctgtggtgggcctccagggacatgggttacctatgtgagaggtcatccctgcactgtgctctagagggcgacattcgtgctggactccaggtgaatgcagttcctgtaggcatgcgtggtggccctggtctggtgcctgg

SEQ ID NO: 423344 - DNA, 125 bp, Homo Sapiens
tcgctattcatcggcaccaggattcggctacgcccgcaagcgcggcgagaagtccatggctctgcgtctggctggtgagctgctggatgctgctgaaggcaaaggcgctgctgtcaagaagcgtg

SEQ ID NO: 423345 - DNA, 373 bp, Homo Sapiens
cgtcagggcgagctgctaactcaggggcgagctgcggtgattgaaaaaggaagcatgattcctggagcatagcatacctcattccaggtattagtcatagacttgtgcatccaaagagccacatagtctgacatccttcagtttctccagttcctttctccagaatcagtgagacccaaattctacttaagaacaaaatggatttgcatatacaatagggtcactcaacaggtaatgaaataatgggattgtaaaataattcagaaggaccacctggtcaccttttctctcttgtattttatcctctcctcttacagctctgtgtccagatgtggtaggcagctcgcccctgagttagcagctcgcctctgag

SEQ ID NO: 423346 - DNA, 150 bp, Homo Sapiens
aaaaacggccagcgaatccttaatattggccttggctgtttcttgagggaaaaaaacggttagggcattctttagcattgccctggggggtttttgggggaaaaaagaccttaaagaattcctttgggttttccgggggggttttttgag

SEQ ID NO: 423347 - DNA, 102 bp, Homo Sapiens
agcgtaaaaaaacgttcggggaatccgtagctatggccttgcctgatttttgagaaaaaaataaattaggtcagacctcactttttcttttgcaggattttt

SEQ ID NO: 423348 - DNA, 389 bp, Homo Sapiens
ctcatagctgattctagaggatccacctaggaaacctagcccaatctagctctgcctgtcactgaacgggggagactgggaaggccgtgctctgctgagctacacaggtaactgagcttggactagggggctggcatagtgatgaagaatatagtcagagatgtgatttattatggaaaaagaatcaacaggactcaataaatagatgtatcactggcatccagctcaaatgccacgttctcagaccctccctgaccaacctaaggtaggactcccctacacctacaagttcactctttatctcatttcatatccattcaaatcctggtttcgtgttactgacggctcttatttgaaagactccaatttatttccttacatgtttgttc

SEQ ID NO: 423349 - DNA, 326 bp, Homo Sapiens
atacagagaaaacgcacccattttaagcacatggtttgatgagttgtgacagatgcaccagccccctccaaatccatcagcctagaacactcccgcctcccgtttgtggcccatctttcctcagcacccccaggcccaggcaatcactgacccgctctgtcactgcagatttgcgcagtctcgtccagagcgttagggaggtggaatcaggcaggaggagctccttcgcgtctggccgcctttgctcagcccagcggtttaggcttcgggtggcagttgcgtgcatcagtggttggttcctctcggttgcgtggacgtactgcagc

SEQ ID NO: 423350 - DNA, 518 bp, Homo Sapiens
acaactgaggggcgagctgcccggtgacccttttgcggttctctggacaagcagcagcaggcagtggaggaggcggagctggtcgaggagtggtgatcggtggttccctggagtggcgatggaaggcagccctcgctgcatgcttcacattacagagggtgggagggataccgcctgcccgtccctcggccaaagactgatgcgaaggacctgcaaatggggagatggcgtatctcactgacaggacctccaccttggaccaaatgaaagagatctacattccaaaggaaactggctagggagacctttaagccgtgcctactctttggaggagggactctcaactgaagcttctgcggatggttagctgggtggacgtcttcccgcttccttggccgtgattttatcaacttgttactagacagccagcgcactaataatggcacgtaatatgcgcgcctcggatgggggcgattcgtaaaggttggcttgtctttgaatctttggggtgatcggat

SEQ ID NO: 423351 - DNA, 202 bp, Homo Sapiens
aactcaggggcgagctgcaaggcagatagatctccacaccattaccccccacccccagacccagggattatgggtttgttccaggaccggcccctccggaagggctggtcttaggagaacccaagtggctcctccacttccactgatccctttactccaaacatggcgcaaggggatgggagctgcagctcgcccctgagtt

SEQ ID NO: 423352 - DNA, 535 bp, Homo Sapiens
  misc_feature (323)..(384): n is a, c, g, or t
agctgccctcacacaccaccacacgcgtgcgcacaggagtgcccggctcacccactcctgacacacgccatgaccccgtcactcacgctcggagcgtgcccacgtgaatcgggacttgcccacgtgccccgcagcacccgccctgcctgcaacacccacaccaggcacccgggcccgctcacgctcacctgcacacctccatggcggctccctggcacctccaccaagcaggggcccctcaccgcggcccagggcttcagtgtgcagactccaggctgagaggggacggggatcagaccccaatggcaccactctccagccgnnnnnnnnnnnnnnnnnnnnnnnnnnnnnnnnnnnnnnnnnnnnnnnnnnnnnnnnnnnnnncccccacagggctcctgggtggaattggtgaggaacacacgtgaacaccaaggacaggcctgggtcacacggaacatgcctaataccagattctcaccacagtgacagcccctgaccgtcccgtgctgcagctcgcccctgagttacctgc

SEQ ID NO: 423353 - DNA, 205 bp, Homo Sapiens
atttcagacaacagatgttttgagtttagatcatttgaacaaacttgcagtgagaactctgtcagtagagaataaactgggacagggggaccttcaggtaatctcctcgagagctcaaggggttccaggagacacctgaattacaccaaaccagagctgtctcacagatgtgataaaagctctaaacagtctgggtattgtcgct

SEQ ID NO: 423354 - DNA, 272 bp, Homo Sapiens
tcaactcaggggcgagctgcagctagaggggctgtctgagcaaagaagacctagtctggtggcataggaagacaagagtgccgacaccaggcccagtgaatagaaaacgagttccctttccagactggagttgtgagctctgctctgttttatgagcagaaggcacctgcaatgtcagaagtggaaaccatgggaagtcccccaacacccactcaatcagagctctgagctcatctcctgtaaccttcccagccccatctcctgtaaccttc

SEQ ID NO: 423355 - DNA, 158 bp, Homo Sapiens
atttcaaataaatagaatcatacaatatgtgaccctttgtgtccggcttcttcacttagcattttttttaaggttcatccatgttccagcatgtatcagtactttctccctttaatggtggaatactttattgtatagataagcaacattttgtttat

SEQ ID NO: 423356 - DNA, 279 bp, Homo Sapiens
cgcgactctagagtatcccggcaggcactgaagtcatgagcgcgacttcttcccagttactaaaacaacgagatcacatttccatttctcgctttcgattaccactctctaccttgaatgcctcgcctttgggctggtccctctcaaaaagagctcatctctcaccttgacccaccctctccttctctccagggttcagtctccaggcttcttcccagacacaatgcccgatactataggtctcccctcagtgcaagctcgtacacaaccgtggcccac

SEQ ID NO: 423357 - DNA, 134 bp, Homo Sapiens
ggtcgggctgaagcctttcagtgacatttcccctgaagctccaggagcttcccctacagtagggtgcctgggccactgcaggtctaaaacccagttagtgctacatcccattaaagggaggcttcattgcctca

SEQ ID NO: 423358 - DNA, 322 bp, Homo Sapiens
tctgtctagaaaaacaccaagaattcaattgtatcaagtccaatggtaagcttccaatggacataagaagtaagcagtgtgctttgggttgtgttttaagagggtcactgtggccttcctacgaggaatggatgggaggagggcagatcagaaataggaagcccgttcagagacgttgtagcggtcagagtgcagacagcccggtctgagggtggccatcgctagagttggcgagagatgatggatgggttaaaatatattttagcagctaggcttcagtgtgaccaggcttcagtgcctgaacaggcttcagttgctgacc

SEQ ID NO: 423359 - DNA, 341 bp, Homo Sapiens
gcttggttgtctctggagtggggatgtacactggggatgatatacatagggaaaggacataaggggattctccagtgatcacagctgtcctctatctagactgtgctgtagaaatatggagatatacacttgagatctgtgtactctatgtatgagaaccctttccgctgttcaatggctccatccaatctatctcacttatgtcaacagattggtatcaaataaaagagcacctgttattatatgattaaatgctttacagttcaggagcctcctctccaacttattttgggcaagactttccctggacctgatgttccagctgcactgggctccctgaa

SEQ ID NO: 423360 - DNA, 164 bp, Homo Sapiens
catggcggtttgtcaattttaaattgtgtcttacatcagtgatgactgaagcagtaaggagtgagcttgcagcaaacagtggggattgtgcagcatcagcacttcagccagctctgcaggtttccttggagacacgtggatttctctttctagaccttcagcta

SEQ ID NO: 423361 - DNA, 451 bp, Homo Sapiens
acataagatatgtaatctagcacctgtaagggcttcttctattactgcaaaatgaagagataagaaatagaagtgatatcaagaagaaatgaaacaaaaaaaggtgatgatgaccaaataagtataaagctcagcttcttgcatccactccatagccagatgaagaaaatactcatgttaatcatttttcttactgtaacacagagatggtgtgaaaatcatttcaaaacactaatatttgaaaatacatttgagaaccctatttgtgccaagaaatacattctagcaactttctgcagctagcaaaaagttagaggagcagagcctataaaataatcttaaaataagtaggacattatcttgtcattaaatacttttcagatagaattgtaaaatgtctgagcttaaatagcttccacacactatgtcatcctctaggatgcagatcctc

SEQ ID NO: 423362 - DNA, 192 bp, Homo Sapiens
attatagaggatcccctgtagatcgctcggattgtcgtttcacccgagacttatgagattttccggttgaagcctcatcatcagtatgtaaactgaagctgctccagaggcaagaggggagaagcagctctaggtggcaatggaactgaaaatactcaggcagagaaaccaatctggtggtggcatgagaga

SEQ ID NO: 423363 - DNA, 136 bp, Homo Sapiens
actgagaatcctgcactggtagatcgttccccacccagcacagcaactccatactaacaagaaactcagcccacaaggtggcagtctggagggtgtatggccatgcagcttgctgtaagaatgaggaggaaggaga

SEQ ID NO: 423364 - DNA, 209 bp, Homo Sapiens
cactggtagatcgctcgtggtttcgtgtaattatacaagttcttcacatgtcagcagataagtcttttctacttcaaaatcatgtcccatttcaaatggcaagaaacccagtcttggattaggaagaccctgattctctgtattaatgtagtaatacaggagatttatcaaggtgctaactaagcattggtttcagaaatgtaattctg

SEQ ID NO: 423365 - DNA, 611 bp, Homo Sapiens
tgtagatcgttccacacaagtcgatgtttatgacaaatacagataaacattctattaaatgcaaagaggagaagataaaacagcacttaagtgcaagcttactcatgtaaaaaacccagtcataaaaggtcacacccagggaatggcctgactggcacgttccaagctcactcccaggctgactcctaaccctggcggctcctgctcctgctcctgcgggtgagccacccggggcacacccagggctggctagaacaccacctgcaaatgcgggtagagcaacctccaggaggagggacaccaaaatgccagaactaattctgggaggtggaattttaggggcactttcaatgtcttctttgaattttcctgtatcttccaaatttttttactggaggcatttttcagtattgttctcccaaacaagagcagtttccctagattctcttttgttttttggagacagggtctcacccgtgtcactaaggctgcaatgcaacggtgcaatcatagctcacttgcagacttgagctcccgggcccaagcgatcctcccaactcagactcctgagcagctaggaccacaggggcgagccataatgctcaagtatc

SEQ ID NO: 423366 - DNA, 262 bp, Homo Sapiens
  misc_feature (72)..(199): n is a, c, g, or t
cttcgaatagtcaacaatccataatacttgaagatgcaataagggcaagagcacgaaaacaagatatgcctnnnnnnnnnnnnnnnnnnnnnnnnnnnnnnnnnnnnnnnnnnnnnnnnnnnnnnnnnnnnnnnnnnnnnnnnnnnnnnnnnnnnnnnnnnnnnnnnnnnnnnnnnnnnnnnnnnnnnnnnnnnnnnnnacacatatcagtatatatcccatacaagggcaatcattcattcaagccccataaaaaggtact

SEQ ID NO: 423367 - DNA, 253 bp, Homo Sapiens
aatcgctctctggagcatgagttaactgctcatgaccctgtgccactgcattgctcaaccagtgcaacgatgaggcggcgctcttctcggttgagggcaagtgtgtcactggcaatgacagatactacctgctgagccccctccccctgacctcagcttcctgcctgtgccccacaaggagctgccagaggagtgctcccatgccagcttcccctgcacccacaggcacaggttctgtcgcttgtgccaggag

SEQ ID NO: 423368 - DNA, 351 bp, Homo Sapiens
cttaacacagatattatcagtcaatctgcaccttcaaaagtgctttgggtttgcccctgacaaccaccctgccgtgcagcgagtgagtaaaagagctgggcctaatgcatccctcgagggctttcttctgcatttctagactgtcatgcacaagatcatgcaaacaccaagtgctcaataagggctggtggagttaaacccaggacttctggttttcagccctattctctgtccacagcaggtcctactcctcaccccctccttcatggcctccggcttcttggtaggtgaggctgagcaacttttttaaaaggctgtttcatagtccaggccaaaggctgagccggggag

SEQ ID NO: 423369 - DNA, 156 bp, Homo Sapiens
  misc_feature (145)..(145): n is a, c, g, or t
cggcgtgactagaggatccccgcactgtagatcgctcatagatcagttggggggaacatttttttaaaagctaattagtctttgccgagtggaattactaagtgccgttttacacttagcacttagcggtgcttttcatcttcanaagtgcttgga

SEQ ID NO: 423370 - DNA, 186 bp, Homo Sapiens
gctgagccatgtatcactggggcatgtacttttctcaccgtcccccgattagaataccccaatacttcctttctcctcttttcttttacctggggtcccacactcttatttggcgttctttctcaattttctggcatgtgtccccttcccactatttcctggaggttgccgagcaaccctcatggg

SEQ ID NO: 423371 - DNA, 347 bp, Homo Sapiens
  misc_feature (162)..(162): n is a, c, g, or t
ccaggaggtgctgacctttgggtctgtggtttactgtgatgtactgatgacaaagactgtcacagcatcttagaacgggggaggcacagcttccaagaaatgatgcaaaactggtggcgcaaacagaggccaccaagtggcaacaatgggcagggcatttcnctttgttggctggtggtcacggacaacttcgtggtctcaagtttcccgaatgagctatgctaagacaatttaccgagaaagcaaaataatgccatgcaaaacagcgatgacaaatgcacttgtgggtatccgatgcaaagtgtgcagttcccgccttgtccagctaatttgtgtggagccaaata

SEQ ID NO: 423372 - DNA, 295 bp, Homo Sapiens
cttgaggatccctgcactggtagatcgctctatcaaaagatagtgtgacacagctgtggaagtcagatcaagaggcctcctaaggaaccatgcctgcgggtactcacacccttgtacagagccctctccttgatcctgaacctctcaggttcacaaaagcaactctcagacttgcttttgtccaacagaatgcgtggatgtgatggtgctgacttcaagaccagctcacgagaagccttgcagcttgggccaggtctctaaaatgcactatctgggggacactagctaatacgta

SEQ ID NO: 423373 - DNA, 253 bp, Homo Sapiens
  misc_feature (182)..(205): n is a, c, g, or t
tgcactgtagatcgctctgtagctcagtttctcagttgaaaaactgaaataatacatatctctaaatgtaaagttaaatatatgtcaaatagcttgatgtctggtccattataggtgctatataattagtacttggcccctgtaagaattaaataaagaaagaggttactgtgaattgggannnnnnnnnnnnnnnnnnnnnnnnagtaagtacctcatctctagaccttaaagaaggggcagttttttgggg

SEQ ID NO: 423374 - DNA, 217 bp, Homo Sapiens
ataaggggaacccaactatctttcccccaaatgttagtcggaaacccatgtctccataaggcctacaggttgtcatgggagacgacttgcccaccaagaagggcatctgggaatgctggcggacactgggaactcttcgctcatcgggcctctgcaaaaatacacagcactaagagaaaaggatgacccctatgaagagaaaggagcgatctacagg

SEQ ID NO: 423375 - DNA, 550 bp, Homo Sapiens
tgcactggtagatcgctccatcacgtacatcactgtaacactttaaatccagctactctaccacctctccctgctaatgaagagcttcactccatttctcatcattgccttaacactgtagaaatggtctcaaagccacgagcaaacctcttagctaccccttgggacaacccagacttacttctgtttggtgatggctcttgtagatgaaatggccaaggaaacataacaactggctagttttcccacatgaaacacttgaggtgtgctctttgctcatggtaagatcagcccaagctgctgaaccgatagctgtcactcaagtttgcacactggcaaaagaaaaaatggccactctttacaccaactccagatatgccttgggagtctgccatactgttggcataatctggaaatgccttgaatttttaacttctgctggtgcttctatggccaatgggcatataattgttgatctattacaggctattttcctccctactaaaattactgttgcttatggttcagcccatactaaggagtctggtat

SEQ ID NO: 423376 - DNA, 138 bp, Homo Sapiens
catgaacagatggacacgttctgcctccatccactcaagcgccaactaggcaccattcctccactgacaactgctcaagtgcacagggtctacccacacagacccaccaatgacgccgagcaatatagaggtgcggga

SEQ ID NO: 423377 - DNA, 380 bp, Homo Sapiens
gaccctgtcaggtcttatgacttaaatgggcacacttctctccacaaagtgaggagatcacagggccaaaggaacatggcacctgcctaaatcttccttgacttctgggccatgccctggattcctagggtcctagattcctccctaaatgctctgagctctcttctagagcctatagcagtctcctcctgggatctgttctcccaataggaaatacatagagcctaggcctgaagagtggccaaggggcagtgttagcacagggacttaagttttaaagtgtgaggtcagatatccacctaatgggacagagcaaaaggggaaaaggaaaaggggtgaaccacaggctagggacttccacctatactcctagcttgaaa

SEQ ID NO: 423378 - DNA, 128 bp, Homo Sapiens
gggtcagtagagaactgggattcctttatctgtctggtctaccatcctcaggaggggactttcattctcagggtcattcatggtgcaactggtcctaaatcttcaccgaagggaccaggggcggaagg

SEQ ID NO: 423379 - DNA, 525 bp, Homo Sapiens
  misc_feature (87)..(415): n is a, c, g, or t
tgcaacctggtagatcgctctcaggcagataaaaagaactaattacgacatgggcaccactgggatgaatccagagaatgtgctgannnnnnnnnnnnnnnnnnnnnnnnnnnnnnnnnnnnnnnnnnnnnnnnnnnnnnnnnnnnnnnnnnnnnnnnnnnnnnnnnnnnnnnnnnnnnnnnnnnnnnnnnnnnnnnnnnnnnnnnnnnnnnnnnnnnnnnnnnnnnnnnnnnnnnnnnnnnnnnnnnnnnnnnnnnnnnnnnnnnnnnnnnnnnnnnnnnnnnnnnnnnnnnnnnnnnnnnnnnnnnnnnnnnnnnnnnnnnnnnnnnnnnnnnnnnnnnnnnnnnnnnnnnnnnnnnnnnnnnnnnnnnnnnnnnnnnnnnnnnnnnnnnnnnnnnnnnnnnnnnnnnnnnnnacaactatctcagaatctacaattatctctgagtaaaaagcttaacataaaccagatttagggcttagcttaataaagcatttatactctctctcttactaagtccctaa

SEQ ID NO: 423380 - DNA, 114 bp, Homo Sapiens
ttatcgcttcttactcctacctaaccaccatacacattacaagtgatgatatgaaaatccaagatacattacttagaataagatatgaatataaatatagtcattcttatgttc

SEQ ID NO: 423381 - DNA, 581 bp, Homo Sapiens
atcgctcacaggaagatgcagagcactcccacccccaataaacaaccccaaatgccaggacaatatgccaaagggcccccactccccccgcgaactacggtctccatatctagacactcaagcccaacaggacaccccccatcgtggacaggatccccgtgcagtgtggtcaaggacatagcagggtcttcactaacgatgcggacatcttggtcacaggcaccatggaaaagcacatttctcaagtccacagagcaagggttaaagactaaaaccagcaacagaggcaggcgatcatggcttccaatcctcaaccgggaaggaggattctacaagaacatgcaacgtgggccacacacacgtgccaaggagagagaggagcccacagatcatttttcctgttacctaacaggacctactgtctatggaatcccaactttatgcatagcagggcagaggtggaccgcaaaacacattctagaatgttcatagcacccctaaactggaacaagccagatcctatcaacaggacactggctgaatcatcacaatgatagacgaatcagagccctcatgcattg

SEQ ID NO: 423382 - DNA, 541 bp, Homo Sapiens
  misc_feature (82)..(153): n is a, c, g, or t
atatctagaggatccctgcacggtagatcgtcatcatcattagctaataggagctatgtattcagcacctacttactagccnnnnnnnnnnnnnnnnnnnnnnnnnnnnnnnnnnnnnnnnnnnnnnnnnnnnnnnnnnnnnnnnnnnnnnnnacagagatttaacttcttaaaagagcttagaaaaggaaactggaacgaaacagaagttaactggaaactcacaggaaactgaaacagaagttaaccgggcaaaaaaaggggaagaacataccagagtggacattttagagaatggcaatgtataccaaagcatacaagtgaaaaaaagcacagtgcattcatggaagtgcaagtcatctggcatggctagagagcagacaacaaatatagacagagcaggaaatgagggtaaaaaggcaggcaggtcttggtatacaaagaaagatgcttagagtttatcctgtgactgagagaagccaaggaaaacttttaaacagggaagagaacacaattaggtgagtgtgtcaggatgatcaat

SEQ ID NO: 423383 - DNA, 461 bp, Homo Sapiens
tacagctgaggaaacggacacttgggaaaggactcttcagtattgccagcaagtgaagaggcacgactagtgaggggtctccaatcgcgctggccatgaacaattttggatatccatggcccttgtctgaacaacaaggcatgttgacggacatgaaagtaacttgctaaattgctacctagggtcttatccaagtcagcagtgatccaaattaagacttcctgacctgtatgtagtcctatcttctgtcctgagccagactgtgtccctaaacacactgtgttattggcattttggccaattaagtgacctaaatatctggggtgggcctcatttatggagattgaaggacctgggatcaggagaactctgggcaagaaattgctcctggggaaaagagaggaagcttttgcaaatgtctgaacaggtttcagaacatggggccaaagatcaccttgtga

SEQ ID NO: 423384 - DNA, 602 bp, Homo Sapiens
gtgggggggctggaaaatgcagacaccaaagacccttcagtatgaggccaagaaaggaaggttcagaacaggaaaaaggaaggcttccatgatcctggccacaatcctgtgaattaggttttagtattctcagtctgaagataaggaattattgatacaattcagaaaggtagagcaacttgctttaggtcacacagtgaatgagtagtgcagacaggattcaagtctgcccccttgattctgaagccaaagctctttttcctgcttggtgcaggtgagtgggaggcatggggtggatgagaagcctaggcagaggcttttcctgcatccctcctcagtttccctattcacagatgccggcctccctgtctacctgtatgaatttgagcaccacgctcgtggaataatcgtcaaaccccgcactgatggggcagaccatggggatgagatgtacttcctctttgggagccccttcgccacaggtgcaaaggtcccacctgataccccaactgggtgtccagtctcccacctctggatgcagacccacccctccattggctggccacagggagctcaccagttcctaatctgttatgctctcc

SEQ ID NO: 423385 - DNA, 443 bp, Homo Sapiens
atgcctcatccagtggtgaagcgtaagtgaatgtgtagccagaggcattgccttactggctgtatttgtgtccaggaaatactcaaaatatgtaaccactggtaggttaagagtactgaccaatcagaatggatttctagaggcctcctgttgtgccaggcattaaccttttggtcactgagtcacagagaggttctagaaggcacagggaagggtcagggtagctgtcggagttgggactagaacagctgttctttaccaaaggtacatagtattgtaatagtttaacaaccagtaaagatatactggtgcctgttggctgcatatcaattttgtttatgtttagatcgtcatcttagtgactacaggggcaaaaatcttgtgccacatctttttttgcttatcccagcaggtcacctgaccaaagcccttacctctaaagc

SEQ ID NO: 423386 - DNA, 509 bp, Homo Sapiens
atgcctcatccagtggcaggtccactgaaaagtggttaagtgttactaatatggacaatgttgactgggcactttctaggtacccagcactgtgctagagttccacatagattgtctcactgactcctcactgatgcggtaagaaccctctgttcccattttacagagtaagaaactgaggctcacacaggttaagtcacttgcccaaggtcacatggctagcaagtggctgaaccaggatttgaacccaggaccatctgagctccagagtgtatctgaccccatagactactgtctcccacacctcagtttcccttctcaagaaggaggaatggggtggatgctctgcgatgtctcttctgctgtgactctggttctgtgatgctgagtgtctgcaaggtgcctggacccatgttcaccacccacttcctcctgcttcaggcttttccatgttgtgaccaagcctcagtggctctgacgcctctggatggcacctgtggtcagagctc

SEQ ID NO: 423387 - DNA, 166 bp, Homo Sapiens
  misc_feature (45)..(45): n is a, c, g, or t
  misc_feature (71)..(71): n is a, c, g, or t
  misc_feature (96)..(96): n is a, c, g, or t
tagaggatccccatgcctcatccagtggcagtgtcagatatgaantgttaaggacagaggaaatgctccangattaaaggaaggttaagagaacantgaaatttctgtatttggtaattgtaactggtggaattaatttgcaaagaggaagattttggtattttaa

SEQ ID NO: 423388 - DNA, 373 bp, Homo Sapiens
ctctatgggggcatcagcattgccaattcccagatcagcagactgagtctcgggcgggagacctcactagtccactcacactgcaggtaggtggcggagccaggatcacactccagcctgtctggctctgaagctcgtggtctgcacaccgccaggctgactcctgttcccaggcagtgggtgtgtgtggtgttcgcagggcactggctacaggcctaggttggatgcagagtcggtgtacaggagcttggtgccgagctgggctgggagccgtcagccatggcctgggcgctccgcactgcttccttcatctccgctgagacacgggggctgtggggcaggtagacagactgggattcggatgcctgtgtca

SEQ ID NO: 423389 - DNA, 110 bp, Homo Sapiens
ctcggtcactctaaggatcctcatgtcatcagtggaagcgaaaggcagtctctgtgcgaaatcacagtggaagagaaggcagtctctgtgtcaaatcaccagtggaagag

SEQ ID NO: 423390 - DNA, 156 bp, Homo Sapiens
ctctagaggatccgttgtggtggggctgaaattgtggccgaggctgtgaagaacctgactaaggttcctgatgagcgcttttatctgagctcatccccgcagtttgatttagtcatgggaatgataaaaatgaaaggtggtgtgactaatgagtga

SEQ ID NO: 423391 - DNA, 141 bp, Homo Sapiens
  misc_feature (113)..(113): n is a, c, g, or t
gtctatataaacaaagtaaacaaattaacgtgggtgtggacagtgcattacttctcagtcccaagtccactggcagaggctacggacagccacgtggcgaggctatggacagnccactgtgcgacggctaggacgggtact

SEQ ID NO: 423392 - DNA, 135 bp, Homo Sapiens
tagaagcttgagaatggcatgtcttctgaaaaacaaagtttattaaaatattagtttgtgacttagataactcattcttaagaaagcaggaatgtggcagcaagggtagaaacaaacatagaagacaatgcttaa

SEQ ID NO: 423393 - DNA, 137 bp, Homo Sapiens
gggtatcagaggatcccgtctagctacgcaagcatattcactcttatcactctctggaccaattattgatttgcaagttcctgtgaaatgttttatcacccagtgtgttttgtctgtgtacagggaagcactggata

SEQ ID NO: 423394 - DNA, 354 bp, Homo Sapiens
  misc_feature (44)..(173): n is a, c, g, or t
  misc_feature (300)..(300): n is a, c, g, or t
actctagaagatcccgtctagctcgccagtggatgggatacagnnnnnnnnnnnnnnnnnnnnnnnnnnnnnnnnnnnnnnnnnnnnnnnnnnnnnnnnnnnnnnnnnnnnnnnnnnnnnnnnnnnnnnnnnnnnnnnnnnnnnnnnnnnnnnnnnnnnnnnnnnnnnnnnnntttagccaccgcctggccctggcttacatttttatcacagatttcctgatttctaatctggagtcattggctttgaaccagattggaatgctcaagattctgattgtttcacactgtatttcacaangaggacttggctttctgattttaacggaaaacttagggcggagtagcagcattt

SEQ ID NO: 423395 - DNA, 302 bp, Homo Sapiens
  misc_feature (74)..(101): n is a, c, g, or t
tgggtatctagaggatctctgtgggaaggagctgggaggcaggtggagtcagaatggagagatggttggcaatnnnnnnnnnnnnnnnnnnnnnnnnnnnnttacgagtggcttgaggtgtcacttaccagacatttgggggatgggggatagccgtgattgttgagcaactggtttgggaagagctagcattgatccctgctgttctgtgctagcagaacctatcagcatcttctgggcaggaaactggctccatgagactagcttaatgcaaaggctcgtgagtcgtctaatctgcccac

SEQ ID NO: 423396 - DNA, 400 bp, Homo Sapiens
accagaggatcccggtctagcctcgccaagtgaattacatgccagagagaattcaaatctctgtcagcctgccttgtaaattacatgccagtgagaattcaaatctctctcagcatgagaacaccagtggggttggctggaggccccgcttgggaggtccctcactgggcaggacctcaagacctccacactagggagaattcaaatctctgtcagccccagaacactggcgagggtggctgcaggcaccccagttggaaggtccctcactgggcatgacctctgatatctcgatgccagggagaattgaaatctctgtcagccccagaatattggcgagggtgggaggagtagggtgctggactgagtagtaaggaccctcactgggcacggaaccgaa

SEQ ID NO: 423397 - DNA, 203 bp, Homo Sapiens
gacaagacataaagggcatccaaaatggaaagaagtcaaactgtcattgttcgtagacaacataatcttatatttagaaaaacctgaagactctatcaaaaacacctgttagaactgataaatgaattcagtaaagttgcaggatacaaaagtcagcatatcaaaatcagtagcatttctatatgccaacagtgaacaatctg

SEQ ID NO: 423398 - DNA, 474 bp, Homo Sapiens
  misc_feature (300)..(340): n is a, c, g, or t
cgtgtgagccactgcgccttaaccactttcaggcatttgaacttgcagttcccactgcctcaccttgtttcctccaagacatccacatggtatactccttcctcgactactttatctcaaatagcggccccatcactgtcttgctccacgccctcatactcatcacatgtatgggtcattgtacttcatatcaatgtgtttatgtgtcagtgtcctgtctcctgtactgaaaggcactccccatgcagttgagaaattcatcttgttatatgccagcacagtgaatttcacctgcgtgannnnnnnnnnnnnnnnnnnnnnnnnnnnnnnnnnnnnnnnnggatgaacattccttaaagtgggaatgtctttccatgtttcagaattctcatctgccatctctcttcccatgcatgaagataagcagtagactatccactcctgcacctgttcatatacatatagaaacacggc

SEQ ID NO: 423399 - DNA, 396 bp, Homo Sapiens
tctagctcgccagtgtaaaggatgcaagaaacaggaagcccctggtatggggacacagtttaatcagaactcagagcgcacctttccagctgtctgcctggactgcagagagaccttggctgaatatctcatcctcttgaaatatactgctgcgacctgactgaacattttcacacaggggctttaaattagaagagagtctgtgatattctcattcgtaaaaccataacaaactgtttcatttgatcagctgcagcaaaccaagatagcctggtatataccaagagtttgtctattttttttcttctcttaaagcaatgatattaatcataccttgcatattcactatattataggagataaaaatagaggtaaaaagaaaatgatcaattcttt

SEQ ID NO: 423400 - DNA, 571 bp, Homo Sapiens
gagagtgatgagtgctatggaaaaagaagaagtagagcaagagagggacttcaggccccggaggcacagtggggctgagcatgcagatgtctcggggagagcctcccagaagagaactgtccccgaggtgggaatcgccctggtgtgcttgaggaccagccgggggtagatgtggctggagatgggtgagggagagtagtaggaggtgacaccgggaggtgagggtagatcacacagaccttacagcatgccaggcttttcctcacttgagctcagaaaacttgcacttggagactcccgcagcctgccctgcaaagacctgactgcaaggcggctgttgcgtagcccaggagagctctaatggctatcgtggaggcttaccagtggagatggtaagagcggattacatgggcactgttcggatctcaagcctgcatggtgcctgtcagtcaccccagccctggtccccagtcctgcctcaaggtggcccgcaggagcttgcccctgggcaggatacgcgaaccctggcctgacctctctttctctccacagaggtgtcaagaagggcagg

SEQ ID NO: 423401 - DNA, 389 bp, Homo Sapiens
acctcgccagttgagctgggcactatgttgcccgaaaaagggtgctctggtgcttgcttgagacgggacgcgtggaaatgccctgccgaatataatggggcgatggcctcgcgggacggagcagcccaggaaagctgaccgtgggctgggttgtggagcggagccccagggcctcggttgacttagcggccagtcgtacatagttggtatgcggcgggcccgacgccagtcgttgtggaccactgacttgtaatctttacgacctcagtgagggtcagaagtgtccgcgagccctgtaggcgaggagaggccctggctgagggcgcacagcctgaaaggggagaaactagagctggactctgcttgagccacagaccctccgccaggtt

SEQ ID NO: 423402 - DNA, 607 bp, Homo Sapiens
  misc_feature (161)..(441): n is a, c, g, or t
ttgcttctatcagtctcaatgccacagaaactgagcgaaaacccaagtattcatggcctactgaacgcaaagtctgagtctgaccctggtattctattccttggtttttagaatgcccccagacaaagatgagggctgaaggctcagaaaggccgggtcannnnnnnnnnnnnnnnnnnnnnnnnnnnnnnnnnnnnnnnnnnnnnnnnnnnnnnnnnnnnnnnnnnnnnnnnnnnnnnnnnnnnnnnnnnnnnnnnnnnnnnnnnnnnnnnnnnnnnnnnnnnnnnnnnnnnnnnnnnnnnnnnnnnnnnnnnnnnnnnnnnnnnnnnnnnnnnnnnnnnnnnnnnnnnnnnnnnnnnnnnnnnnnnnnnnnnnnnnnnnnnnnnnnnnnnnnnnnnnnnnnnnnnnnnnnnnnnnnnnnnnnnnnnnnnnnnnnnnnnnaacaagaaaggtagggtgacctgcctgggaatatgtggtaggaacagcagagtggagagagagcgcttgataaggtgtcttgtagggagacattccccgcaccatggtgccatgggaatcacataagcaggtcaagtgtgcctcactcaagcactcaagaaccaag

SEQ ID NO: 423403 - DNA, 226 bp, Homo Sapiens
tcgccagtgaatatgatcggtattacctcccggctactgtaaggtatggaaacacaatgtatgaacacagaggcttccctcaacatcagaaaactagaggcagggtactgttctgaagtgttggtgttacttccacccccttcagaatgaggatatggccctgcagatgccaagtttggctcaaggagaaaaggaatatttctctgtattcagaaatattccctag

SEQ ID NO: 423404 - DNA, 344 bp, Homo Sapiens
gtgtagctccagctcaccaccactggactttcttccccgtatgtaagctgccaatcaaaccccacctctcatttgctggctctgggtcccttcttcagccccttgaacctggtgccttccctattgaggtgaataggagtacggcacaatagcactccagaacaactctgctgctccatacagcttcacaatggaaaggaaatccagaaatcagtgcattgcgtctttccagtgtgctatggtcaaagagcactacagcaggaatagagaggagagacattacgtctgtggctcacatttatgtttaatcttcatttaatctttgcaacaaccctagtaagaga

SEQ ID NO: 423405 - DNA, 597 bp, Homo Sapiens
tatcctagccgcgcagtggtcctggtctataagagagtcgggggtgaaggctggtgagcaggcgcaggcaggtgcagctggaggagcagggagggctgcgtgtgggaggggaccaggacttccaggcctcagcctcagcctctcctgtggggcacccgggtccttttgagacagaggtggctgagctgccccggcaggccctgggcacaagtctcccttcagcccccaggcaggatgccaggctgggtggaggaggcaccgtggccttgacatggacttctaggctcacttccttctccaccagctgctgtcttgagaatgtgtgtttgtccatggctgaacatggtgagattcctatgcatttgcctgtcagagggccagtggggccagaagcctcctgcagaggctaaccccggtgctcccagtctcccccagtcgctggctgggcagggcagggtgctggttcccccgtgtttgtttgtggtgagagaagggccccaccaaggtggggtcagaacccccaggtgtgagtctgccgccctggcctgcggatggagttgccgccctgcctgcggatgggagctctcactccgtgaa

SEQ ID NO: 423406 - DNA, 557 bp, Homo Sapiens
gagtggcgatggacttaaggaaagaaagctgcgaggtgtttctgaaactgaatcaacagcagccaagacacttatggaagtatgggagtgggtgaagagagatgactcaattaccaagtctaagggacatggaaagagcagaaacccctgctggaggagaaagtgactcagggtcagaggaggccgagtgaatacggaagacagtgtggctaccctggcaaggtggctaggataggacccggagaatgttccaacccaaagccttgctccaagcacctctcaaaccttccccaactcatgatcacctcctcagaagctacttgataaggaaatacctgaaaagaacaggcaagcattgagccaatctacccttgagaagctccactggctacccaaagtgaccctccgtgaaggctgaggctgttgcagggttagagaaacgcccgctccaccttgaggtcccccagtaggggatatgaagagctaccttcctgccctgagcctgccactcactccccctgaaaccttaaaagatgatcctctctcactttggaagg

SEQ ID NO: 423407 - DNA, 181 bp, Homo Sapiens
accctcgccagtggtcctagcctgtacagtgggattacagttccttggcctatagtgattggttcaggattgagggcaagactcaatccattgagaggcagaacttttgtttgtactgtaggaaaatcaaaagctctcttatttctgctagcttggatgaatttaaaggatacatgctgga

SEQ ID NO: 423408 - DNA, 305 bp, Homo Sapiens
ggttatgcagtactggatgtgagcagtggagattagacacctggtgacagcacacacagggcagggcaagcaccagaaacatggaacaaagagcctgatggcccggcaagcacatgcatgcctgaaacagtctggagcacctctgggccccaaggtggccagaacctgagcccagactggtggcagcaacagtgacagcatcagcaaccacaggaaagagaaggggctacatgagatatcagtgctggaaccctgcttgggaagcctgcttgtctgtccctggcggtataaaaaataactcatag

SEQ ID NO: 423409 - DNA, 146 bp, Homo Sapiens
caaggtgtagcatgagactaagtgtgaaccaatgaaatctgaggatcattcgggcttcccaggcattcacctccaagcttacccccaccagccagcttgatgcagacaaacatgccgactgtgggaagtattaaagatggcaggaa

SEQ ID NO: 423410 - DNA, 472 bp, Homo Sapiens
cagtgctccagtagtggtaagtggtgaaactggaatttgaatccaatctgcctgccttcagatcatctgctgttccagagaaagcactaaggatacatttattgaatatttagatctaaataaattgctttgtttttattggggttctgacacttagaaatgggaaggagtaattagaagaaatgaggcagattggactgatattctttagtgggagtggctgatgatttaggagctatgggaacagggaatatcacctttgttgggccatgtctaattttacatatgaatgcgggggcttgagtttttctccagtaggcatatgactccagcacttcccatttggatcagtcatgattagacttttatattttcccctcacaaatggaaataaaagagaacaaatgtaattttcctgaggtgactagggagtcttaacgagaagaggaaaagcaggaaaaaatagagttga

SEQ ID NO: 423411 - DNA, 235 bp, Homo Sapiens
tgccgattaaaatgccatttttgtctttcaaaatgacagtgattaaaacattttaatgctttgaatttgtgcccataaaaatactttctcaccagcacatacatttcttgtataagctaaaagtggtattccctttctaaaaaatgccagcaatgttctttctatttggcccagtaaataaattaataatggtcatattctttggtccagtaaattaaacttcagaacacttatt

SEQ ID NO: 423412 - DNA, 248 bp, Homo Sapiens
agcatgagccactgcacccggcctactttatcagttctaatagtttacttgtggagtctttagatttttccaaatataagatcatatcatcttccaataagaataatttgacttcttcctttccaatttggagtgccctttatatctttctctcgcatgattgctcgcgctaggagttccagtactatattgtataacactggcggagctagaacggggtacgcgctcgcatttcgtatcatggtcct

SEQ ID NO: 423413 - DNA, 126 bp, Homo Sapiens
tagcctcgccagtgtgcagcgtccgcaggtggaggaagaactaaaatccttttatttcatagctcggaggtgggtaccatggggcaagttctcaggtctgcttgcccactgcctggaaacagactc

SEQ ID NO: 423414 - DNA, 222 bp, Homo Sapiens
cagtgctaccttactgtatgcttagaacacttacatcagcctacagttgggcaaatcatctaacacaaaatctattttacaataaagtgtagaataatctcatgcaatttattgaacaccgtactgaaagtgagaaacagaaaggttgtatgggtacttgtagtttttaatgaaagctgtttctcatacattgtttcagatgtttcagaatatcagatgtat

SEQ ID NO: 423415 - DNA, 192 bp, Homo Sapiens
caggaccttgtctagccccgccagtgcctggaatacatggcatgtgccactacgcccggctggttttgtatctttggtggagatggggttctcatgctggtcaggctggttcaaatctcccgacctcaggtggtccgtccgcccagtcctcccaacagttgctgcgattacaggcattagcaagtgcagcca

SEQ ID NO: 423416 - DNA, 540 bp, Homo Sapiens
caagtgagctccctctctgtcaaaaactctgcaagcacttttttcctttccttctaatattaaattgtttctgagtttgtcaaatactcacaagggaagttttctacttcattgatgtgggtcaacagcaagtccatgtccctgggttctgtttgcagaggaggattcctttcccatctgtcagggcaatgctgtggaattccaaagcccactgtctacggaacagccagcccattactggacatcaaaatgcctggacttctgagctccaaagggcatcaggagatgggggagccgcagagaccacaaagccccagctctcagctcccacgtcctcaccgcaccccaaagacagggaatgtcatgcgccgggttgggtcagaataaggaaaggttagaaactcttattttcaaaatagtctagccgcagttttcttaatgaatgcctttatcagatttcatttgaagaaaaggtcttctgcctcaaaaaggctgctcttgttcagtccattcgcttttcaaacaacaaaaactgaggcc

SEQ ID NO: 423417 - DNA, 531 bp, Homo Sapiens
  misc_feature (36)..(36): n is a, c, g, or t
  misc_feature (47)..(59): n is a, c, g, or t
ctgttatagctcgcaagtgctgagacacaggtgtancgatcgcatcnnnnnnnnnnnnnaaattaatatctatggctgctgaacaatttacagtttttgtacatatgcatgtactggctgggaaaaatctgtatgatggagtgggtgatgcagtcaggtaccaagaaaggcccctcacgtggtgtgtaggtccccctttcccagcaggcaggggctcctgcaagagggggctctgtcagcttctgtgtaacatcacaggcctcgtgctctgctgtggatgtcaggaaagagtaagtggggctacaggacccatctaggtctcccgtccttgggtatagaggtcacagtgattccccaaaattacctctgcctgtggcatcccccatgagaatccatcatgaagagctgactgtgtgtgcggccatggtgggtgcctctcctggagcacatgggtaggacgcagtgtgcagtgcgcaattctgggcccctcttgcccctgaagctcctaagccatccctaacggggattctc

SEQ ID NO: 423418 - DNA, 161 bp, Homo Sapiens
tgactatctccctatattctcaaggccaacgcttcatcccttcagggtcaccaaccgctataaggcatggatttgaagttcattgaatggttgccaatggactttgactttaccaagcacttttagtccatttccccgttgcatctcacattaacagtcca

SEQ ID NO: 423419 - DNA, 111 bp, Homo Sapiens
gtgctaactaactctatgatgatacacgttcgagacaccggcaagaagctcatgactgtgcgcatcgtgtatcatgccttctagatcatacacctgctcactggcgagcta

SEQ ID NO: 423420 - DNA, 220 bp, Homo Sapiens
catgcatcagcagcaatcatccacagcagcatcagttctccctctgcagcaatgcaatttctttggcacttgggtatgtaatggtgtgagatacacccattataactctctctaagtaataacctataaacaaaggaccatggagtttgggaaaacgtgacactccaaatgatcactagtgcccctagtcaagcacaggcaaaatgtcattaatcaaaca

SEQ ID NO: 423421 - DNA, 160 bp, Homo Sapiens
ctgagtaatgagcatgaagaggacttccagaggctgagaaagaggtcttctctcggggagtccctctgcctgagatctcgttccagctcctgtgggtcgggtggctgtcacttacgatgtcatagataacatacgcatctctgtctatgttcatttctgc

SEQ ID NO: 423422 - DNA, 622 bp, Homo Sapiens
agaatcgcctgtgccgtacgttaacatcgctgcaaagattcacaactgtcaccacaggacaaaccaggctcctattcagcagaggctcccgcacgaagacacctggcactctcacccccgcagtactgaccagacgactctgaccagtctgtgcacttcaactacctcgctcacgctctcccctgagctaaacagtggacacagggttcgtaccaacccttcttgggagtactgcatggcaaagggggagggtgcacaattgcttggtagagtgtagacagacattgcgggatttgactgtggtactatccctttgatgtcctagtgatatatacacctgccttctgcttagggcaccggccacagttttccattagtgcctactccacctgctgtcgtcgttgggtcagcgaacatcgacctcctgtaacaaccagtacaataaatgggcggtcctggaggacctcacccgacgctacaccccctcccaaactcgcggccatcgcctcctgtcgcctcttccgaaggcctacgacgcatgttagttgcgaattatgtgacgaggtcagttgaccgcctgtgtcactgacacgtgtgcgcaaataaagcacgactggatggc

SEQ ID NO: 423423 - DNA, 132 bp, Homo Sapiens
tgccccgactcgagcatagcccctgtttgcacagacaaagtgtgataaaggaatggcctaacaaaggcagaattcacttatattctgtgttcatggtgtcctttgaagaagacaaggagtcaacaatagagg

SEQ ID NO: 423424 - DNA, 152 bp, Homo Sapiens
tctgtagtagtgagattcattaatagtcacgggactatcagtgatgaaatacacagggtataaaccttcacatggctatcaaaggcaaacgagcagatcttctctaatctagtctgacgataattacctaagtgtacaccacactctggatt

SEQ ID NO: 423425 - DNA, 364 bp, Homo Sapiens
  misc_feature (210)..(210): n is a, c, g, or t
ggccaatctggtcaggtacttttatgtatgtaaatgatgttagagtatgaatgaaaaacagtaacatgttaatattaaagtcagtgtggacatggaagacatacttgcatatgaataggttaaaattgtgtggttaaccttatcattaaaagagttttattctgataggtagaaatttaaaacataggttacagtgaaattgaagactgnccagatgaatgtgtaagactccccatgttttctactttggtaatggatgaaaatgttattctggtaggccaaaacatttaatatatacttactctattatgcctgcctttttcactgtgactaataaaaaacaccagaagggggtaccgagctc

SEQ ID NO: 423426 - DNA, 277 bp, Homo Sapiens
  misc_feature (157)..(158): n is a, c, g, or t
cacctctggcctggaaagtttggcttaactttattgatctctttatacatttacaacaaaacaaacatattttgttgtagaaatatgtcatttgttgctctttgtttgagctcagctggcgaatgggatgagaaaccgaattttaacgaaaaggaanncaacagtgacccatttgaacagctgcaggaatggatctctgaagcaaacagctgggccacattaatatgtctcagactgagctcctttggcctcaaattggggcctgaaaataaaagag

SEQ ID NO: 423427 - DNA, 123 bp, Homo Sapiens
cagacagaactatctcgcagtggactgtcttgatagggaataaacctctgtttcctctttatactttccctgagggcttagaacaagttaattcatggctttggagtagcatgtggcctgata

SEQ ID NO: 423428 - DNA, 475 bp, Homo Sapiens
tagtgacatacacctctaggtgcacagagtgtttcttggattctggtatggggggactcttcttggttagccgtgaaggggactggctttgcaatcaacctcatcgtgggttctgcgtcctcttcccataggtcctcactacaggactcacaacagttcagtgacctctttaagcctctctttcccctgccatgagaagtggggtaacagtagtgccttctgcagggtcgttgtggagcctcaggtctttttactgttgtcatgatccttgttactgccatcagcattcgtactagactccctgagatcccctttaagtgaccaggagaggtctgtggtgtggtagaaagatcacgacactgagaggcttgcctgggccgtcttcttcccacgggacgctctgcagcagtgtcgggtataattattcattcagacccttgtggcctcagcatctttatctgtgagagagggcagc

SEQ ID NO: 423429 - DNA, 109 bp, Homo Sapiens
acatgccggattatcacgacccatgacggtgcgatatactatacttgtacaaacacccgaagtccttcgacataatcctcataggtgacctggtcatatgaaactaggc

SEQ ID NO: 423430 - DNA, 372 bp, Homo Sapiens
tgggtggtaaagtggtaatttgtaattctagctggtcttagtatctcagttctgctccctatagtcatggttctttctagtggctgtattgaggccccatgggtgttatccctccattggttctagtttggaacagaaaaatctgttgtattcatggctttcacctggctaataactgagctaagttaccaccaggttgcaaactccaggacattattgtcctgagctgcctattcccttgctggtgcgttgtggaccctgtattattagtaccagtctggaggcctcctcctgagttcccagctagttgggacaggcccaatatccttcttcctgtacccaaacagtctgtatttgtatggcggtgatggg

SEQ ID NO: 423431 - DNA, 400 bp, Homo Sapiens
  misc_feature (296)..(312): n is a, c, g, or t
ggaaagggagttttgggctctgttgcccaaatgggaaagcaggggtgcaatctcagggcattgaaacctccgcctctgggatccaagcaatttcccggcctcagcctcccaagtagctggaataacagatgcctgtccaccacacccagctaattttggtattttaagtaaaggcgaggttccaccagtgttgcgctccaaagtgactctcaaactctggacctcgaggtgacccgtctgcctcgtgcctccgtgaagtactaggaatccaggcgtgagccaccacgcggggcctnnnnnnnnnnnnnnnnnacttggattttccaaggctaagtgggccatcccttgaatagggttacagccaagttccacttaagacttctaagtagctcaaaataga

SEQ ID NO: 423432 - DNA, 460 bp, Homo Sapiens
cggtatgagccactgtgcctggccaataattcattttaataccttcaagggatagtgagtttgggaataagcaaagggagtagcaaattattgctgtaaaatatatgaactatatatgaactattttgccatagagaatgtattggtctggtttttgtgttgctgtaaaggaatgcctgagactgagtaatttataaagaaaagaggtttaattggcacagggttctgtaggatgtagaagcatggtaccagcatctgcttctggtgagggcctcaggaagcttactgtcatagtgaaaggcaaagggagagaggttgtcgtcacatggtgagagtggcagcaagagaaaaaggagggaagtgccacactcttttaaacaaccggatttcttgtgaactcagagcgagcactcactcatttgtgggggtggcaccaagccattcatgagggatctgcctg

SEQ ID NO: 423433 - DNA, 340 bp, Homo Sapiens
gcctggaggtggcctggggacatggaactggcctctgtctgcaattatgaaccttcggaaaggcgtgagatggagttacctgcaaaaggtccgcatggggacccccacgccctgtggactgcctgaataatcaagttcttaactcattccaatcaacaatttttgcctcttgatatcaaaacaagcccactggctaaggttctcatctggacgggttgtttctatgcaggatttccactgcccaggccccaagccaggaggcccatcatgctcggcaagcacaggctaggcagagtgtgtgaatccatccaggcacacctggccaaggccccatacccct

SEQ ID NO: 423434 - DNA, 203 bp, Homo Sapiens
ctgggaggactccagcttagaccagagacggtggtggcctggcctgaggggaggcccagcccagtcacaggccggctctcttctgggctttctgcctcctgtcatcgtgtccgggagttgattagtctggacgtgcagagtggagccctgctggtctggcggcggaggagtctgcgagagttgcttcaaagagtgctgctctg

SEQ ID NO: 423435 - DNA, 280 bp, Homo Sapiens
ctaaggaagtcgagatttcatagctgtattcggtgctgatattggtagtccgcatatacttgaagtttcccagacagaagcagacagagaaagaagccctctctggtttgtagaattgaattaacctcgacaagcagcatctctgaaaatatgtctgagttatgtctgctctatcagaactcaccatatactcacaagttaacaaatgctgagctgccattaattacatgggaatttaaacaactgcatctcgctctgtcccgacacagccactgctagg

SEQ ID NO: 423436 - DNA, 168 bp, Homo Sapiens
cacgactcgcactataaattaataccactcttaaagatataattatgtaattgctaataaatgttttctcttctgaataatttaccgctagtaattttcttcaacctgacaggatttcatggagaattcgaaccatgagtatatgcaaatgataaggtcaggattcat

SEQ ID NO: 423437 - DNA, 294 bp, Homo Sapiens
tagaccggtataataaaataataacctagcagcccagaataatttttaacaaggatattggcttaaagttattacagtattctcttaaacagccaaaacaggagattatatctaaatttgagaatagtaaaaggtttgatttttatcaccaatgagtataaccataagacccccaactcctaagaaaatttcaaaacctacctttagtaaacaacacttccaaaattccatacaggactgttagcaaaagaacaaataaacaaaaagaccccaccaaccatgttatccccgtag

SEQ ID NO: 423438 - DNA, 288 bp, Homo Sapiens
tatgctgtctcagtacacgatgggtagttgagtcaacataggagtcaaacataccatgtgcttgagatgaatgtcagtgctggtctctccagcaacacaatagacccaacgttaggctaagatctaagatgggctcttctctgaaaaaggcacacagtgttaccacgtagagagttctagggctcactgtgagattcttagaaagcaaggccatcagtgacccggctcattgtgtcctgtgagttccgctcccattcacctgaatggcaagataaatgcgagacacaa

SEQ ID NO: 423439 - DNA, 426 bp, Homo Sapiens
ccgaccacattctttgaatgaccgccactgtgagggggtagggtgtgcctgaagtatgaggctccccaggaatcaggagaccagctgccaggacccctggctggcccctgcctcagtaagagagctgtgttgctgttcagtggctctcagaaaccatgcttctcccccaacagcagctccctagtctgctggatcattttgcaactggccctttaagaaggctactatcttcccactctctccacccacctgcttctagctgcagccctttagcaaatgctgggccaaaatttcctccagcctgaactgattccactgccgcccccacactacccctccaccatctctgggcggtggactggggtagggggatggtatggaagcttttttggggaaaggggcaagtgacacttccagaggctcctg

SEQ ID NO: 423440 - DNA, 117 bp, Homo Sapiens
ctgccacgactcgggcaaatgacatattaatttatacctatagaatctgcctgttcacagggagtgccttaaacctaattgagacaggagtggtaatatttggaactctgaaactaa

SEQ ID NO: 423441 - DNA, 143 bp, Homo Sapiens
atcaacctgagagtgatccataaagttgcttctaaactgcaacctcccattgcaagaaagcactcatgctaagctgccaagagcactgacgcatataacaggcattaagcctcttaataagttggtgtattaggacatatttg

SEQ ID NO: 423442 - DNA, 200 bp, Homo Sapiens
tcagactcggtgaaagtgcgtgggcacgtgttggataatgtgcaccgtaagaggtcagtcccactgcggtgccctagcaaagtgggacgcttcgggaaaataaggcaggaagaggagttgaggtcacgtgatgaatattcttggataccatgttgagataaagatattttagaagatgtcccacattctggaactgattc

SEQ ID NO: 423443 - DNA, 247 bp, Homo Sapiens
gtatatgctgtctcactgctttctcagacccctaatatgtctatttcttccccactcccatctgggtctagtctttatgttattttaataaggtcacaaatagcaagagcaggtgggtagcaacaagcacagcatgaatcaaagtcaggaagagacactttagtcaaagttcacttttaggcattaaagttgttagcgacccactgcctattagggcacaacacaatcagcgaacatacacccagcc

SEQ ID NO: 423444 - DNA, 591 bp, Homo Sapiens
acggatagatttgtgttatgccaaaactttagacttttaggaatttggacactctggttttacatctagatatttgacttggaagagtgcagtctttaatggtctatttaaagtaattagctaacatttgtgggtaggaggtgacacaattggatgtactaatcctagaattatttggtagcatttttatgcctggcataacagttttatgaaaactttatatgtgaaaagccagtgtgtctgcttcagggtgagatgatttatgttgcagtagttgtaattataccatgagacatgtgaaagaagcaaagcaaaatagagaaacagctggagaacacaattctgcttttccaaggaaactgaactgagcaatctgttgagcagcctctgacccttggacccaccgtgggcctaagtgcagactcatgcaaatcagaaggatcagggaaatgacatcttcagggtaccctccttagagaatccctccgtgaaagtgtaggagccagccaagaccctcaagatgctggggtcttgtgtggaatccttcttcaggctctgagtagaatgtctggtgaggcctctgggaaatag

SEQ ID NO: 423445 - DNA, 241 bp, Homo Sapiens
gatcggttatatgctgtctcataggatacccagtatcaactagttttccacaggttgtgtcacttgatacttttgtagcatttatatgtgggaattttaatacctataaatttttattatgccagatatttctataaaacttaaggcttcaattctaagaacgttcttatgctttgattactctgtattagagtaaataagccactctaatgcttcaccttctgtttttagatatggctcg

SEQ ID NO: 423446 - DNA, 225 bp, Homo Sapiens
cacattgactataacctatcaggaaaacaggtagatcaagctgatcttttacagttttatgggattagaaagaccctgaacaaaaatacttaaatctgtttggatactaggaaaaatgacacaaataaccctgggtccaattcgggttagtagaaggattactttacatacagattttaaagaagttgacatgtattctcaagtggtagagacagcatatcaggg

SEQ ID NO: 423447 - DNA, 207 bp, Homo Sapiens
ggggtcatggctgtagagggtgtatgcctgtggcctcgaaggtctaggtagtttgggacccagtatatgctaatgagggcagagtggaggaaggacctgagggtatctaacggaggaaggactgtggaatacctgagcctggcctaaaggagatgagaattgcgtgtctgtctgggcccaggaaggagtggtggggaagtgtcttag

SEQ ID NO: 423448 - DNA, 258 bp, Homo Sapiens
aggtcccttcttgcccgatcgtgaaataagtggctgagctggaactttgctgccaatttgctccagcagtctgaggtcagccttttttccccatactctcatccctatgtactgtgcccctacctctgcgtgaccctagcaaagggacgttgggtgcagagctggcccctgctctgtcttcacaaaccctcaataatgcattagaacacgggattcagaatgttaagataagaagaagagctgctaaaagtcacgacc

SEQ ID NO: 423449 - DNA, 401 bp, Homo Sapiens
gaaattgataaatctcgacaactaccggtatagggataggagggtatcccatactctatgtcttttacctagagttaacaatgacttggattttccctcagccatgcacccattaaaacgcactaaggaaagacccttgagtcagagatttttgaatccaatgaaattagaaccgtctaccaataaggagactactgggtgctagacttaactgtcgaaacaccgttccacatgacagaaatcaacacttgtctgtttacattaaccgagcagagcttagtcacccatcactggattcgaactcgagcagacagctctacctgactacagggtcggaagagtgatacaaggtgtgcaacatatgaagaacctaatgcacatcactacacaagagacacgga

SEQ ID NO: 423450 - DNA, 231 bp, Homo Sapiens
agaggactcgccacggtagatttccttattataataggaaatcatgggtcattgcacagttataagtgtcttagtaaagagagaatgtggcttgaggctaagaagcctaaaatcttaatgagattatttgtgggctgctatttatgcataatttttaaactcttagaaaatatgttttctatctgtctttagtatgtcatcttaagtttccactgctttacgtaattttga

SEQ ID NO: 423451 - DNA, 146 bp, Homo Sapiens
tgagtgtatatcctttgcccttttcctaatgagtttttccttactgctttgtaggaactctatatactaattagttcattttttagctgtctctcagatgaaactatatgtaaacagcctgtctggcaacacaactgcatttaata

SEQ ID NO: 423452 - DNA, 152 bp, Homo Sapiens
gtgactctagaggatacctaagctaagggtcagtgcattgcaggtgataagaagacatgcaaagattcaccataagggtggaagaattcaaacagaacagcaactatagtgtgatcaatctgcaaagctttactgaaaaggaagattaccag

SEQ ID NO: 423453 - DNA, 185 bp, Homo Sapiens
  misc_feature (100)..(140): n is a, c, g, or t
aaggatccgtatatgctgtctcacgtccatgtactactcccagatgactggtctctcattttcactggatgatgtttatctcaatgttttaaaaagtggnnnnnnnnnnnnnnnnnnnnnnnnnnnnnnnnnnnnnnnnngcatgcttactaaaagaattatagccactgtgtttcccctggaac

SEQ ID NO: 423454 - DNA, 469 bp, Homo Sapiens
catatactatacactgacagcagcttcgaataggtttactatgtgtattacaagcatagtaaaaataaatgccctggtcctgaaagttcaattatttcaaaatgtatcaatacttactctctatgtatgtttaaagctggcctggtgtcactcccatatccctttgagtgtattaagccaaataagaatgtcaggcttccccaagcacactttggtctctaaccacaacccttaacagcatatccattatgtccttcaatatctttcagctctagtaaatccttgcctgctcaggtgaacattagtcttactttgaaagaatctgcagccctcataatgtggtcgttcctaaatgccatcacttcacaattaggattccctggttacaaaatgccaatcaaaacatcagtgggctttagtatctgatacaggctaggtttgtaataactccaggaggttttatatctac

SEQ ID NO: 423455 - DNA, 223 bp, Homo Sapiens
gtatatgctgtctcaggctaaattttagtttgatttcagaattccacctgtttggtcgtgctctcagttttgagagattaacctaaattcttgagcatgggcaccactctcattacagttgtaaattgactcctttgttctgagtatgggattcaccgattaccatgtgaaactagctgaataatactttcttacttacctagttgaagggagacaggctatt

SEQ ID NO: 423456 - DNA, 150 bp, Homo Sapiens
acgaagtagtacagcaaaaatcaaaaagtgacaaaagcatctacccaatgagggggtcagtcccatctaagtaatgcaaaaatgggattggcttgaggaagtaggaatgggaacccagtactgaagttataggccaaatcaaaagatggg

SEQ ID NO: 423457 - DNA, 228 bp, Homo Sapiens
gcaggtgcctacaggactcacgtatatgtacagtctaaataggaataaggcatctggaaagacgaggagcgcatgattgaagcaatatacatataggaaaatagcgagaaatgaagtcagtgaggtacagtgttagcaaattacaaggttaaagaatttggattttatcctgctatagtaggattttatttatggaggttcatgaacggtgttgacaacgatagtgag

SEQ ID NO: 423458 - DNA, 216 bp, Homo Sapiens
ttctacctgccagtggacactatgatataggccaggtgagtgcacactgggacactatgatgaggcaggtgaggggacactggggcactattatgaggctaaggttagcgcacaactgggacactatgatgagggtaggtgagcacacactgggacactaataaatgaggctcggtgtgtgcacacggggacacctaatgattgaggctaagtgag

SEQ ID NO: 423459 - DNA, 160 bp, Homo Sapiens
catattagtccatagagtgtgaaaatttcatgtgaggtccttgttacaatgactatatgatggagttgtgttgggcaggggggcaggtcactggatttcactgagcttacagaattggtcttctgactctttttcgtgccagcttactaataaacatttg

SEQ ID NO: 423460 - DNA, 313 bp, Homo Sapiens
  misc_feature (152)..(152): n is a, c, g, or t
  misc_feature (226)..(226): n is a, c, g, or t
tcgcagtggaggatcatgaggttcagaagcaggtggtattaagccttgaggatggagatatgcagatatgatgagtaatatcactggtgaggaacatagaaaacaggacagagcaggaaatccagagcatgttggagaaatagtaatcattntgcaagcaaaggttatgtgcagtgaagtcatgggaacaaagggtggggcgcattcaggccaggctaaagagtcntggctttagctcctgtacacagaaaatggtagctgttactcagatgtcatcgagcagaggtgaatgtggccctcctgtgtggggaga

SEQ ID NO: 423461 - DNA, 163 bp, Homo Sapiens
  misc_feature (98)..(98): n is a, c, g, or t
ggggagctagaggccagggaggtcgggtagaaggcagcctgatacaacctcctgggagggtaacttagcagttatcaaccaagatttcacaggagagngcactgaccatatatatttctcttgtaaattactgttccattttctgtcccttcttctaatgaag

SEQ ID NO: 423462 - DNA, 236 bp, Homo Sapiens
cgagagggaggggtgatagaggatcccgaatagtaacacacaagtcgagagagaaagttcagcgccccatttattctttctctttgtagtcaggccttcaaacctaaatactggaaaaactaatctggtttcctttcctatagtttgggctttttcaatgtcatataaatggagggatacagggtgtagccttttgactcatgtctttttttacttcggatgttacatattacggg

SEQ ID NO: 423463 - DNA, 234 bp, Homo Sapiens
tttctagcccacgatcgtatcttgcccacgatcggtaagagactttatgtagctctctgagcgactatcaccacacaagtccaactgggagaataatttatgaggttccaaatgaagggtcattatgaatgctgtctttcccggaatgaatacatacactctcttgttcatggatgacaggactttaaactaaactccctggacgatagactgcttttaaactgaacgtactta

SEQ ID NO: 423464 - DNA, 126 bp, Homo Sapiens
agtattgagatccaggaaggttgaggaaggttggttattcaggtggctggcatgtagtatcagacctggagcgtgattggctcacgtatggagagctgtcgttaattggtggagtattgagcagag

SEQ ID NO: 423465 - DNA, 143 bp, Homo Sapiens
ctgcctagccttgcaaagggatttcagaaagaaaacagatagtctgaaatcagagccagtgctttctcatccctgagtgggcacttggggaaaaatcacggtttatgtgcgaatcgttctgggcaatccagctctgccaccct

SEQ ID NO: 423466 - DNA, 265 bp, Homo Sapiens
ataacagtgaaccactgggcctggccttgcttatctctgtcatactggttactattaccctggcctcaaactgtctgtcagtcacttctccccactagactgagtttttgaggcaagcgtaatctcataatccccaatccttgatgtagtacctggtacatagtcatctcttagtcaatattcatcttaaaagtaccatagccaatatctgggacctgattgactctgttccgctaccatacactgtaacactaatccctgaaaa

SEQ ID NO: 423467 - DNA, 169 bp, Homo Sapiens
ggtgatctaaggatctgtatatgctgtctcagcatgataattgggtttgggcaccatcaggaactggagaagcagtcagaacttctgagttgacacgaaaatactaactcttcattgagcaagtgacatctatgagaaagtctgatttccataagatagccaccagttt

SEQ ID NO: 423468 - DNA, 457 bp, Homo Sapiens
acccaaatgtatcattctagttccaaacttttcctctcaactccaggtctataaattgaattgcctacccctcattgggtgaggatttacgtcatcttcaaatttaccatgtcccaagataaattcttgatttatgcttctactaattctacttctcccagtgctctttcccaagtttaataaaagctcaggccaaaagctatggaataattaccaaatcctttttctctcacacccatagccagtacacatgagtaaaagctgtcacttccatattcaaaatatattcaaaatctgattactgtccaccaccccaatactacaagaaccattacctttcacctggatcactccaacagtctcttcccttagtatcttatagtatactctcaaaacaaaagtcattgttatattttaaaaatgtaaattcacaacatgtcttgtattgcctcaaaat

SEQ ID NO: 423469 - DNA, 186 bp, Homo Sapiens
gcggcccaattacaccgtaaggggcggcggaggtggggtggcaggcctctcttggtctggggctattcaagtctgggattcatccactcttcaacgtataaaacacactggagtcactcaacaaatagtcggctactttcatctggagaggtcttcaaatttctatacaacatatccttgaagggg

SEQ ID NO: 423470 - DNA, 201 bp, Homo Sapiens
aagaagacaggataagaggagatacatcccagatttcagaggtgcagtaaaaatatccttctcaggtaaaaacagcccagtaagcggtcttcaaaaaggccacggtgtaaaacatgcaaatttccactataaaaggacaatgcagccaaggttacccaattactcacctaaaacaatagaatacttattatggggttttgg

SEQ ID NO: 423471 - DNA, 220 bp, Homo Sapiens
  misc_feature (139)..(175): n is a, c, g, or t
gatggtgtctcagagtttctgggatagcccggggcaggctagcaccctatcccaaagttctagacaaaaaagaggtttaacaataggatatattcacgtagaacagaggcttcctccatccagcatctcattgcctttnnnnnnnnnnnnnnnnnnnnnnnnnnnnnnnnnnnnntcatctgctgctgtctcccaggcaaaccagacgcagaggagaact

SEQ ID NO: 423472 - DNA, 519 bp, Homo Sapiens
tcagaggatcccgttctgctctagaaaaagttggacaattgaccggggacgtataaagctggttcccagtggggctcgggccttctttccgggtctggggccccacctctatataccaaatcatgattttaccacttcctaaatacagcatgctcttccacgtggcgaatataggggaaatcttttttgcctgggaaaggctgttaactttttctcccggtcagactcctagtaatccttcaagactcaggtttggtgggtggaactgaagctcatgcaaatgatcacttaagaggtgctgagatgggcatacttctccagagtgcctggcttaagggtagtggaaattctcttcagccacgagcgtcccacaagggagcctagttggttcatgtctttactggctctgttaaattatgttaaattaatgtgtgtgctggtactgtggctcaggctactgtgctaatgactgataattgccttaatgagctattcgtaagaaatacagcaataccagta

SEQ ID NO: 423473 - DNA, 154 bp, Homo Sapiens
gtgagtatgagtatgtacatatcttcgaagggtatgagactatatggaaaatggactcatatgccttaaacaaagaataagaaagatcgagaaaaagaagctaaatgggaggattataaggatatgctagaaaagaggagagcatgttaatcca

SEQ ID NO: 423474 - DNA, 213 bp, Homo Sapiens
ccgatgcttttctggccaacgactcgagccaggaggtcatctgggtttcactctcactggggactacaggcccccgcgaccatgcctggctaattttttggtattttaaagtaagagacggggcttcatcatggtgggccaggctgatcttacagtttccggttggataaaatgctttgggtttggtgggtttggtgtctgtgagttcacgat

SEQ ID NO: 423475 - DNA, 120 bp, Homo Sapiens
ctagaggatcctgatatgtgttcactggcatttttttgaatggattggtgacattttttacatggatatgttaaattttatatatgggttaaagtatattaaagttaattttacctggtt

SEQ ID NO: 423476 - DNA, 275 bp, Homo Sapiens
tagaggatcctacgtaatatgtaactattaacctaggtgaagattatgagcccacaggatgtgaatttcttaaagtaatacttgaatagttagaggaaaattggcatgtactttatctggtctggaatgtgtacaggacatgggtaaaggccagtatttgaactgggtgtattcttagctggccatgcctgcattccttagaagaggtatcttgggaataaatccaaatccctagggcacaaaagattatagcctttgtggtcgggccaaaggca

SEQ ID NO: 423477 - DNA, 168 bp, Homo Sapiens
tcgtatttctgccaacgactcgtttcttccccacgaccgtatctaagtcccgcagccacgaaacattttttgaacatcagtaccaccctcccatgggtattggcctcatccttttacagggcaagtctagggcgaaaagtagaaaggatgaaaatccctgagagaggt

SEQ ID NO: 423478 - DNA, 589 bp, Homo Sapiens
  misc_feature (66)..(156): n is a, c, g, or t
cggtcgatctagagatcctttttctgccacgactcgaccaggaggtctgctggcttcacctctcannnnnnnnnnnnnnnnnnnnnnnnnnnnnnnnnnnnnnnnnnnnnnnnnnnnnnnnnnnnnnnnnnnnnnnnnnnnnnnnnnnnnnnnnnntacagttttcgttggatcaaatgcttttggttggttggtttgtttcttgagttcagattcagtagcctggtataatgacaaactagaaatcacagtatgggaaaaatataggagatgatgcttggatttcaggaatatggtggattatcaaactaaaattagcagattctatttagcctcttagaatttcaaaaatttttagacattagtatacatccccaccttcacgatatcagaaataaagggtagtgaagatagcagagtgaaatatgagaattgtctccatttcagaaggtattgggctgaaatgagacatttcacaattgggtcttctggtctgctcatcactggaagtcccagcttcttcctggatacgaagttgtacttggcttatattattataatcacattgtaattatcattgtggacacac

SEQ ID NO: 423479 - DNA, 215 bp, Homo Sapiens
ggcttggttgttccattcatagaccacaggcagagcatatttagtataatacttaagggctctaggatttcaaaatggtaaataaccatcggctttaaatttaaagtcaccagctgtattagcccctaacaagagagctgacttgtcctttgaagctttgaagccaggcattgatttctctccagttacgtttatttatttatttattattcttt

SEQ ID NO: 423480 - DNA, 115 bp, Homo Sapiens
ctggcattacagagccggacagaggctgggaaagggagaggctgggaactgggccccagcaggtgaccctccctggaagcagaagcagaaagcctcggtatctgcaaacaccaac

SEQ ID NO: 423481 - DNA, 133 bp, Homo Sapiens
tacggcagtgtgaggtgagagtgtatgtcgacagctcagacagcatgttcccatcatcatcacacttgaagtcaggtctcatgtatttctggctttattgcttccgagcgtgttctgctgtctgtagatcagt

SEQ ID NO: 423482 - DNA, 156 bp, Homo Sapiens
aagtaagctatgggaacaaatcaactcatttaagtttacagccactggcaaagtgacaagtagagaggtgattccactacgtaccaaacagtatatgttaccatcttttaagtacacccttgattaaggtgggataggttaaagttagtggcataa

SEQ ID NO: 423483 - DNA, 283 bp, Homo Sapiens
aattcataatcacgagtatagttctaacaaacatctgagaaacagagcatgactcagttagtgtttacattctaggtacgcgccctacctccccagtgctcacagtaactaggtttttgcctatataaaactaaacagtctcctaaaagatgcagttactttgaaggtttgttatataaggtttagtgagcccacggaagatctagattggatgacttgccccatccagtctatatctacattgtgctcataaaaccttatataacaaaccgggtaccgagct

SEQ ID NO: 423484 - DNA, 295 bp, Homo Sapiens
gtcgttagggattagagttggcgtaaacgcgaaactggtgatctaaacctgtccaggatgaagctgtggtaagacacagtggaggtcctaacccaccgccgttgaaaagttgggggatgaggtaggtttaggggtgaaaagccaatcgaaccaggagatagctcgttctctccgaaatgcatctaggtgcagccttgagtgttcaattatgggggtagagcactgaatgatctagggggcatattgcttactgaaatcaatcaaactccgaataccataatttatagctcaggag

SEQ ID NO: 423485 - DNA, 281 bp, Homo Sapiens
  misc_feature (188)..(200): n is a, c, g, or t
  misc_feature (236)..(236): n is a, c, g, or t
ccagttaacagaacagcagaaaaaattaggatctagttgacagagatggaaagctcaccttataatctggaaatacacattcttttaaaacacacatagaatagtggatgaaaatctgcacaaactaaaactagcctcaacacatttcaaagaatcaaaatcgcattagaccacattttattaacacnnnnnnnnnnnnncaaagaaccagcgtctaactctgtcatctaggcggnagtacaggggtgcaatcatagcttactactgcagcctcgaactcc

SEQ ID NO: 423486 - DNA, 149 bp, Homo Sapiens
gacgtaacacaatcaacaaagcaaaaaccacaccaaaagatcgctgccacattatgactgacaccagcatgacaggactgcatctccggtacaccattctaagccgaggctcagtcgtatgagattctgtgcgattgtccgccaccagg

SEQ ID NO: 423487 - DNA, 156 bp, Homo Sapiens
gatcgtgattatgggtgagcatactagctcaagttctcttctcttcttaaaaagcactagagccattcccttgataacccataaatctatgagtggattaactccatttatgagggcagagacctcatgcaccaatcaccttttacaaggccctcc

SEQ ID NO: 423488 - DNA, 334 bp, Homo Sapiens
gctaatgagaacttcgctacctttgcctggtaatctgggattcttaaactgttctgcagagactgtcccaggcctgaaacgatgtatagcatcctgttgtctcttagccatcaagagctaactatccagacatctttctacaagcaatttgtgctaccctttccaaaggtctggatttcagttcctctagaagccatggacatctgccctccacaactgcaaatactccaaagagtacagaacctactcccaagttgttttattcgtaggaagagacacttgacaggggctttccttttgatttcaatccttaataaatgccattttaaattct

SEQ ID NO: 423489 - DNA, 102 bp, Homo Sapiens
ttgacacggaccgtcctctaactctcactcacgatctcactcacgatgaagcgccatctatctgcccggcctcctctcactctcactcacgatctcactcac

SEQ ID NO: 423490 - DNA, 455 bp, Homo Sapiens
atgtcatttgactattcaggacatcggttttggaccagcaatggtctcccataccagcagagggtggccagtctgtgcaagctcttccttctgtgacaccttgtggcaatgaagagctattgcggacctcagtgccatctgttcaccaggactgcacctgcttttaattccatcatctcctcagagttctttgcagaatttgagagtaaagatgtttaggaagagacacaatgctttcagttaatatggcctgtgaaacttcaaactagaacatgggcaaaataagagatgtaacagtgtatgtgtctttagtttataaagtaatgcccatcatatttctgtagctttatatgctacggtacaacaattgtgtcacaaactatacaagtactcagagataatgacaaaagtatgactgaacagttctctcacatgggacaagtgccactgcaaag

SEQ ID NO: 423491 - DNA, 454 bp, Homo Sapiens
ataaggcagtttgcccccacttccaggatgtctaccaggactgaaacaaggatcgatgagcaccgtatatagatgcaacttctcttcagtcttccctcagcctttctttgctttcacggccttgacggttttgaagagcacaggctgtggaacaccctctctaaagtgtttctaaagtcacttcttacacagccattgctgttagaacctaggaggggtgcgtggttgggttgtgagtggtacgggccaaagttgcgaatgtctgcattggcgaacgagatttgatggaaaaggaggttgctggagtgtagacagctacatcgatccatacttgggttcagcaatcctaggagggtcccatttgtagagagagggatattttctccacatcattcccatgtgtttcccatcatcagtgaaatgatatttcatcctgtttttaccattaaccgtg

SEQ ID NO: 423492 - DNA, 128 bp, Homo Sapiens
cacgagggacacagtcatattagtacagatgagaaaagagtgaaagaacgaataaatgacttgactgaagttcattcaagcgttcatgaatatattctgtagctccctgggacgtattaatagatcaa

SEQ ID NO: 423493 - DNA, 489 bp, Homo Sapiens
gtccgcgtgctcatcaggaacagtgatattcgaggtaactgaaaaactcgaaggataagatatagccgtggaacaattgaacactagtttaattgttcataacgctacctcccaccttttccacccacagccacccaatcccatccaggctgagtaaccagttagctcccttcaccaacaccactaccgacctgaccctcaaatgtaacacgtgaaactgccacagagttaagcattcatctcctattaactttatgcctcctgttttttaattcttacaaacagttgttattcatcatttatcatatttctgtgtactcaaagtacatgaatgtgccttctgtcttcgtaggtccaagggggcgccttcttgatatcgtcatgtatagagctatggccaaatgctgtgacatagggtatgcccctccagactcttgacgaggctgttctttctatgtaaacagtaccagtctctgagctaaaacactt

SEQ ID NO: 423494 - DNA, 154 bp, Homo Sapiens
tttttgtaccctagtgatgtaagtgatgctttctagtacagaaagtcaatttgttttgactacatacaataaatactacatatctgaaaaaagctaccaagttgggggaaaagggactgtttttcgtcatgtgaataacaacaagcgaactgac

SEQ ID NO: 423495 - DNA, 500 bp, Homo Sapiens
ggacggcgactaaacgaggaaatcagaatatgacagagagtagttctaaaacatcatactttagtaacttgtgacgttaactactacatagtagaattctttggaacatagatttttaaacttgaatttctccctttgtaatgagatttatattcaaatatagaactgtttatagtattttcatttcacttctgcaacagatgggctgtcatttcagcttggtacagaacctctgaagttggaaatgtggttacaggtaaatggggatgggaaatagaatacagattgactttagatgcagagtagctttggtattaatttcataattgtgtatttctgtcctgtttggagctttcagaggataaaataaacacagccaagggaggatgcccaaagcagcagtagtgggctctgagggagcggcctcatggagttggaggtagtcctgccctgacagatgttaatctcctcgcactccaggtggcagccatacagaggga

SEQ ID NO: 423496 - DNA, 383 bp, Homo Sapiens
ctcttttacaagaagaaacattatgatacatagatgctgaagtttattgatacacccatccatctgaacatattaaaattttactgtatgtataaaatggaacatcatctaggccactgctgaagactaagttcccaggaagaacatacctgtaaaacatatcctctaagtcattgagggtctttgtgattctctatgcttacagctatgtcctgttagatcttacaagacttatttacagcaagaatcacaaacagcaagggataaaagtacctgtcgagtcaaagcgcaccaagagctgaggtcctctgccatgcagcttcttccactctcgagcccccagcacctgcactgcctggcagtgcatctgagggggacaaagg

SEQ ID NO: 423497 - DNA, 264 bp, Homo Sapiens
tgggaggcagattgagcagggctagtgtttgaaggggaattcttgtgttgatgggagtctacttgatttgtgagtggatcacacacgccgagaataactaagtatcagagatggattaaatccagagagtgaagcctttgcttgggctgctcaaggactctcattgaccttgaagaattctttctatgtcaaagcaaagaggaccctctgtgtcagctttaggaatcattttctgatgagtgctccttctgtgggtgtccattt

SEQ ID NO: 423498 - DNA, 312 bp, Homo Sapiens
  misc_feature (76)..(224): n is a, c, g, or t
cagtagagataaaagggagaaacagaatcatctagaaggtcaggaactatagaggattaaagaagcatcgggccannnnnnnnnnnnnnnnnnnnnnnnnnnnnnnnnnnnnnnnnnnnnnnnnnnnnnnnnnnnnnnnnnnnnnnnnnnnnnnnnnnnnnnnnnnnnnnnnnnnnnnnnnnnnnnnnnnnnnnnnnnnnnnnnnnnnnnnnnnnnnnnnnnnnaggaacaaagatcattgaggagtatgttgaaatccaaaccaaggaagcctaagaatcacaatgaaacaatgcgggagctgatagacaa

SEQ ID NO: 423499 - DNA, 135 bp, Homo Sapiens
ggtgttagagttgtatatctctatggaagtgatgatgttatctagtgtaaacagattgagtggcatggagtaagtcacagtgtaacaagctacagaagcaccatacccatctatcaataaacaaggaggtgtcgg

SEQ ID NO: 423500 - DNA, 271 bp, Homo Sapiens
  misc_feature (54)..(166): n is a, c, g, or t
caattgtgctccaaaacctcactaaaaaggaaacaaaaggtaaacaaaatatannnnnnnnnnnnnnnnnnnnnnnnnnnnnnnnnnnnnnnnnnnnnnnnnnnnnnnnnnnnnnnnnnnnnnnnnnnnnnnnnnnnnnnnnnnnnnnnnnnnnnnnnnnnnnnnnactatgcccagcctggaattttttccttacacaggaatacaccacatggacaaaaagaaacgtagagagatgagaaactaccagccccctcttgctacacactgg

SEQ ID NO: 423501 - DNA, 443 bp, Homo Sapiens
gagtggtgttgttggggggatgtggctctttggggtgtcaggccacggggtgagcccaagccacgaggtgagctggaacaagaagggcaagaaggtcaactctcagacgctttgagacgacttgagtttgatgtagagtgcatggggcagtgctagaggatccacgccgctgtaggacaccgcggggatgaaaatcgtgtacgatgtgtgtggcccacgaactcggattgggagagatcactagtccgatgccaacgctatactgtcctccgcagaggacctagctgcctctcctggcttccccgaacatcaacgatgggcccactagttgacaggtggtcggacgcggatcacggacagccacccatgctctgtgcagccatgcggcaacccctgaccctgacgatcacctgtgttcaacggacttccctgcctgtggatcc

SEQ ID NO: 423502 - DNA, 159 bp, Homo Sapiens
gggtgcgagcagtctcacaccagagtgaccaagatacgccggggtgacaaatagtattatgtgaactcaactcttggataccacaaaggacacagcagcagggaagagacaactgtagaaaggaagaacacacttgcacactatccatccaacaagtga

SEQ ID NO: 423503 - DNA, 259 bp, Homo Sapiens
gttgtagtttttccatctgtttttaatctttatttcctgtctttgggtttattttgcatgcttacagaacttcctgggtgattgtgtgggatggcctggacggaagggaccagggcttcaggaggaggatgagccccaccctttctgtggtgggaatgcctgagctctgttgggctgcacatggctcctactttggcagtcattcaacaagcctgaggaatgtggcttactggtaaaatagaaaagtatgttgccagag

SEQ ID NO: 423504 - DNA, 436 bp, Homo Sapiens
gtgcttggtgaagctaagaaggaataaacattgagaagccacaaaatgtaaggtcgtcatgaaggtggttatgaagttaagaatgatgcagtgatgcttacagggtaatatttcactttcttcactgaggtctagtttttgagtaggtctgggtttttattaaaattctaagacaaatgcatatactgttgaacttgctgactcagacgggtcttaaggaccggtatcattttaacttaccaggcaatctagccctggagctggaacatgtggcacgaacagattgccttgtcggaaatgagggtagcttggccacagaggtctctcaactcacctgttcctatgaaactgtctgtggcacactctatggaaagccaagaagcttggtcctaagaaacatgcagcagactacccttccactggaggactgaggggt

SEQ ID NO: 423505 - DNA, 345 bp, Homo Sapiens
tctgcaggggagaattaagaatgtgaggcaagttaaatagctaatttgattcatgtaagttcgcatgaatgtcttatagtgtgggttaccacacacagaattttatactcacaaatggtctcagaggaataaccacttgagccatgttgagattacgggctcgcgtgatgcgtataaactcctccaatgcatacatgcaaacacacacatactcacccaactctatcactccctcctctaagacaggggtaatgtctttgactaatggtctaagtactcgatctgtgtccccaggttggatccaggtgaacagagatcactgtcaggggagcgatcccagaacat

SEQ ID NO: 423506 - DNA, 466 bp, Homo Sapiens
  misc_feature (258)..(374): n is a, c, g, or t
agtagtgggtcgaaattactcgagtacttgctagtataatagaaacttatttgagttcctaaaggaggattcttcaacctattcaggtgtgacatgtcatctaagttaataagtggagcaaaaaaataagaataacagcatcaagcacaaaaattcagtctctggagactgagagatttggatttggattctaagtccagttcctctgcctgcgggtctggttaccacaggcaagtaactaatcctttactgtgcttnnnnnnnnnnnnnnnnnnnnnnnnnnnnnnnnnnnnnnnnnnnnnnnnnnnnnnnnnnnnnnnnnnnnnnnnnnnnnnnnnnnnnnnnnnnnnnnnnnnnnnnnnnnnnnnnnnnnnaatgctgctggactctaaaattcataaggctctacaacatgtaaactagcattacacatatcacaacaatggatttttcatttatctatata

SEQ ID NO: 423507 - DNA, 181 bp, Homo Sapiens
gttatggaaagagataagataagccctgtatggagcacttgtgcatggggcgcagtgttctcgtatacacccggggctgcccggctgccaggctctgcggcctcaccttgtgaactacatgggcaagcagcttcttccagtgggctgaggttgtcgtgtgcagaccaccatccctgcggta

SEQ ID NO: 423508 - DNA, 498 bp, Homo Sapiens
ctgaagtagtcgggacgcttagggggtgatgagccttcagattccatgacattctctccctctctcctgactcacagggcaaccaactgcctggccgggttagctgggactggggggaccatagaaacagactttcagtgtgaaggttgttacaatcctgggcaaactggggtggttagacaacctccaactgagacttctttgtgctttatggctccaaaagaaagcaaatgtatttgtagaggggcaaacataattgagggacattatcagtaactccgctgaggagagcagctttaggcctgtcccctaagtgcagccccaaagagccaggtcacacaatcaacaaaacctctgtgtcccagctctaagctaagactgagggtagccagtctgggttgaactgggaatttcgggaggtggacagagaaaggaagtcatctgtaactgaagccaaatgggccagattccttaaaaacactgagccatgaaatgctg

SEQ ID NO: 423509 - DNA, 448 bp, Homo Sapiens
  misc_feature (98)..(159): n is a, c, g, or t
  misc_feature (252)..(307): n is a, c, g, or t
atattcaataatgatatacataccgagtctaatagaaactcacgggtgagcaatgaggcctgtctcgtcagacacagtattttacgattggcttaaannnnnnnnnnnnnnnnnnnnnnnnnnnnnnnnnnnnnnnnnnnnnnnnnnnnnnnnnnnnnngaaccaaaaaaacatctgggaatggaaaatccatgggcacagtgggccaacttttcgtttacacagatgtgggacttcagtatcgcgcagggnnnnnnnnnnnnnnnnnnnnnnnnnnnnnnnnnnnnnnnnnnnnnnnnnnnnnnnntaattaacatggtggtgaagagtttatgcctgtttttaaaaaatgcatatctgattaggaacactggacttttctaacaggtctacctaacccaaatagcacagtaataaagtataaccatcactggtagaatagacttac

SEQ ID NO: 423510 - DNA, 242 bp, Homo Sapiens
ggaggacacctaatcagtaaaggcaaacggaaaatagtacctgaacgaattgaaggtgtcacatctctacctttgcctgaaacaaagcaggaacttagaaaattcttgggattagttggatactgtcgtctatggattgactcttatgcctgaaaaacaaaatctctacatcaaaaactcacccaagaaggaccagacccccttctttggaccctatcagaagtccaacaagtagaagagtt

SEQ ID NO: 423511 - DNA, 387 bp, Homo Sapiens
tcatcaggacggaatccaaagacaatttcacaggatctacaatatgcagctataggttctcctttgaccgaatccttgaatttgcttaaaaaacaatgaagagtagacaagatgggccactggacaatgaaaagagcatcggcacttcacgttcattaaaacgtgaagagatgaccaactaatgctgcttccataccctggatagtgctgagtacctaacagctctttaggtcacaacgtaaaattcggcttccagctggtccagttttcccatctgtcatatccacggaatgtccaaatgtaagggaaaaatgtggagtgtccagccgcccaccagtccacccagcaccacagcctaacctcaccgaggcctcccagcactcacac

SEQ ID NO: 423512 - DNA, 421 bp, Homo Sapiens
agagatgcctaaaggggagttggcaagagttaacatctgttaaatgtcagtggctcctggcctggtggaggtgggagtcggggataggatgttctattatattctgggcatttgaaatgtatcacaattcaaaacattaaaaaggaacaggcctgcaacaaagtggccaggaaaggacaacagcaggaaatggcactatagaaaccaagggggatggcaggtgtcttccagcgctgcaggatcagctgcttctcaccccatcctctaggcccaggagaaatgcgggaggaagccagcctgctatggccatggtttggccagctctgagaagtttggcaatgccttgtcactagcaggagggaaatgcgtatatggtatggggagggcgagactgaagtcacagggaatgggcaggagggtt

SEQ ID NO: 423513 - DNA, 403 bp, Homo Sapiens
atgagtaccgccgggctgcagctagtaacgcagactctcaggtctgcggagcccctgggaagatgatcgcaccttccaagggaagagctagagggataggacattcctgggatggcaggtaagctcaggacaagcactgtcagtgccttccctcagagctctgggcctccgcagatgaagatgctgtaggcatattctgcacacctcctccttggctggtgcgctgccagatgctttcagaacggcgatgaaagtacaggagatggaattgggctttgttcttcctgacaggggcccactcagcctccccagtccttattcccctaatgagcacttaagctcacaactggaatcctcggccctggactcctcctctagaaagcgcagatggtgacacctgtct

SEQ ID NO: 423514 - DNA, 175 bp, Homo Sapiens
aacgacggcgggggatgcctcacacttaagagagcactgtgtcatagaaagacagctgaatccacctttggagggtgcttgcggcgttcccatcacctacttgcagctgaaagcttcagcatctaagcaaagctgtaggggcctttgaggaccaaaggagtcaaaccaaatatgt

SEQ ID NO: 423515 - DNA, 390 bp, Homo Sapiens
ccccgaaggcgtgggctgaaattgagttccttcctcagggacctgaactcagtcagggatgtggtcattgagggacccctatcgggggcagtggttgtggaaggaggaaccctccttgagctgaggactccgctgtcccacatggtagtgtttctctccagaatgtcgggggagaggagcccaaattctagtccagaattctgtgaaattgagcagatgagaactcccaccattgaagcagatcctatccagaccatgcaccttccacccaagggacaatgaaatgcatgggtcccacgggtcagcaaacatctgttgggtgcctgcctgcatgggaatggatctggctcagggcatcagagacagcggggaccaaggggacccagacca

SEQ ID NO: 423516 - DNA, 266 bp, Homo Sapiens
ggaaccacgaaggcgggggctggcgccatgattggcagagctagaacaaggaccctgtcaaagctgatgttgatccccctggactcagggttagcattagttagagaagcaggaacagcacagggttgcttacactcagcactcttgtcacaacctaatatttctggtacaaataaggacaatgcatgtccatcctagagttttatattctttgctggctctttaaagtttacagagaaaacagagggcagcaatgtctcaataat

SEQ ID NO: 423517 - DNA, 213 bp, Homo Sapiens
tatacagggcagaatgacccccacaattaatgaacatgtctatcacctcccatagatactgtgggaggagggactgaggtcaggattttatacctggaggcagaatcaggcctgtctgaaggcgtctgaatgtcacaggtgtagtgggagcccctggagaaagtatgaaacgggcaaaatttgtcttttttgtcctggcccctctttttagct

SEQ ID NO: 423518 - DNA, 211 bp, Homo Sapiens
gcacaggactcgtccctttaaatgacttaatcttcacctgaatataaaaaaaggaggaaggcatacacatagctgagaagcaatgttttcagggaaaagaaacagcgagtacagcgagtgcaaagtgtgctgacgaactgtgcagagtctagtgatcttgcgaaagaagggcaggagggagaggctgcaaagagaccatgcaggcccctgg

SEQ ID NO: 423519 - DNA, 394 bp, Homo Sapiens
  misc_feature (155)..(334): n is a, c, g, or t
cagctgggaacttaggagggtagaagggaaaggatgtttttcttcccttacagtatccctcactacttcctctggcttcacttccttcttaaccagagcactcccccaaatcctacccttagttctcttctctcactacacgttccctaggctgnnnnnnnnnnnnnnnnnnnnnnnnnnnnnnnnnnnnnnnnnnnnnnnnnnnnnnnnnnnnnnnnnnnnnnnnnnnnnnnnnnnnnnnnnnnnnnnnnnnnnnnnnnnnnnnnnnnnnnnnnnnnnnnnnnnnnnnnnnnnnnnnnnnnnnnnnnnnnnnnnnnnnnnnnnnnnnnnnnnnagccttcatgcagtcccatccgcctccaagacgtcagtccttatagacctacaactactc

SEQ ID NO: 423520 - DNA, 445 bp, Homo Sapiens
  misc_feature (425)..(425): n is a, c, g, or t
ccgagatagagggggcactcaagatggcgaggggtctggaaatgctgtctaatgagaaacacaggaaaatgaaaggatggtcttcctgtgcgtgaggggaagtagaccagtttcatgggctccagagggcagaacttgggagctgtagaacaaccggtttcagttccattccatgcaggggagtcatttcaacggagtctccccatccagcaataaatacctccgtgcaggtcatgagcttcctaccgctaaaggtgtgcgagcagggcctggatgccccttggtcagggaagcagaggggaaaagattgattgaggtgctcttgaaggtctcttctagtgatcagcttctgatttttattatgattatgatattactctaattatagaaccatagcggctatgactctacgtgtctgcatacanttttaaaaccagacctcccc

SEQ ID NO: 423521 - DNA, 356 bp, Homo Sapiens
agagatagagggggcacgcatgtgctatgccgaggaacttgcacccacgcttttatcggtgatggctggaatgcttttcttaactggagcgtgggttgaagagcctggtgcttttgtggcagtgctaacctggggagcccatggtaaaacccaagcaacaaaaccaccacccaatcacctgtgctgttgcagagaatggtcctttgccctttcttcttgccttgttcctttccctgttttctctgccctttttcggggctggtcttcctaccacctttcctgctagggctcccaaagtgtggcccttctggggtttacatggtgtgcccagggaatagctcggcttttttattcag

SEQ ID NO: 423522 - DNA, 288 bp, Homo Sapiens
gaggggcacaccctgcagtgcattaaaagccaccatcaaatgtggacctggactcagtttccctctgttccctcccaccctcgagtgtggacgtggactcagtttcgctgtgctctcgcacaatctaaagtggggacggggacagagtccctctgtggtctctcacactcaaaagtggacgcggacacagagttcctctgtgctcgctcacaatcaaaagtggacgcggactcagagtccctctgtgctctcgcacactcaaatgtggacgcgggctcagagtccctc

SEQ ID NO: 423523 - DNA, 263 bp, Homo Sapiens
ttattacggattcactgtgagtttattaagacctttatagcaggaagcaatatatgaacacattaagtcctatttatttgcgataggggatcccctatgcacctgcaggaatcaaaaggtgaaatggtgtttgagttcctattaccaagggattacatagtggtatcaaagctgattcctcaaggaaaacttctaggaagctgaatgtccaaattgttgaaagtttagaatcatgaatgctggatacttattcagtggatgag

SEQ ID NO: 423524 - DNA, 309 bp, Homo Sapiens
gcgcaccctaagaaattatctttgtgaggaacatgtaaaatgtcctgttgtccatattgatcttccttcctccacaacgagaaaataacaaaagtaaatatttggcgccacgtttattttggtaagataagttccagtctggtttctaaaattagggattctgtggaatgcacgtggtttggggcatcctgccggagaactttgtctcagggatatgtagtttcttatgtgttgttgcttgcttggaaatgtgcatctaaaccttccctcacgtctgctcatctgtgcagacccagtgccgatggtagg

SEQ ID NO: 423525 - DNA, 451 bp, Homo Sapiens
tcacgccatgtcacaagttaccgtctgatcccaggttcagatgccacacattaaacccctgaggtcataatatgatactaaagctccttttactgtattctagatttcacttagtcagctttctctggatggtggtgatacagcagattgcttttattattattgcttttcgtaaatacagacagagttgcactggtgttgcccagacgggtctcgaactccagggctcaagcagtactctagcctcaacctcccaaagtgctggattacaggcataagccaccaggcctggccagactttatggttcttgaacaaaaaccttaatttggtagaaatgttatattattcctcaaagttattatacatttaagtaaatcctttttccttggctttcctttcattttatatcctctatcatagaatcactatttattttctccactgccgctc

SEQ ID NO: 423526 - DNA, 217 bp, Homo Sapiens
aactgaagccatgagggcatagcctcctcacacacaggctcaccaaagcacttcaagcaggtacgtaactttaaagagagtaaagtttaaggccacataaccacaagggaaaacaaccccacaaggtactaagtctctcaccagctctgactctcatcgtgggtgccacggtgctctatatgtccagcctatgcatccacaggctcccttccatgtt

SEQ ID NO: 423527 - DNA, 122 bp, Homo Sapiens
cgatagtattgccatgtaaatgtgagctgccatgatatctggtatctgatcatggttgtgatgactggtggtgactgctggtgactgtaagactggtgctagactgactaggtcgagactga

SEQ ID NO: 423528 - DNA, 189 bp, Homo Sapiens
gttctagaggagccctcacgccgtgtcagaacaagcaacacacacggcgtggacatacgcacctcccctgccatacgaacctccccgcgtgaggcttcgcggcgtgcctcactcccacccccggcgggccaaggcctcacgagcaggagcatggtggaccagtccaggccatgttaatgccccgcagca

SEQ ID NO: 423529 - DNA, 224 bp, Homo Sapiens
ggtggtctagaggatccctcagccagtcacaacagatttgatgctaaccaaacattatactggtaatacttggaaaaactggaaccccacatatataaccattcttggaaacggatcacttgctcaaccaggatacccaggtgacttcctgaatgcgccatgaacagtcaactgtgcaaaaggaaaaatatctaatgcagtcaagagctgccatgagcaaaatg

SEQ ID NO: 423530 - DNA, 539 bp, Homo Sapiens
gatggcgttcagaggatccctgcaggccatgtccacaataaatactggcagaatgaacttttgccaatagtgctggattgctctgagccaaccaaattctcacttttaatgtattttggaaagacagaggacgacaagatgaagaatgcagttggagactcagaagagcaaacataatcggcccagtatggatatgatcatttgatgcactgtcctcgggcatgctcatttacagaagcctaaaaacaaattttatccctcattggtgggtttctggtgtggtggaggggtttcgcagaggtttagaagcaatatattgttatagaattctgtaataaacgtggtttaaatcttttataaagctctctgtagcatataagtacatattaaagacagaaatgggggagcatcaaggcccttataatcgcattcattccttaaccacatactacgcatctacggtgtggcattctaggcgggggccgtaacaccagtgcagaaaaacacaacctcttgtcctcttagagcttacatggcac

SEQ ID NO: 423531 - DNA, 515 bp, Homo Sapiens
ggtggcagaggatccctcacgccatgtccacaagccgtaaatccgggagggcccccaaagcccagtcctggtccctttctcctctccatccacactcacttcctaggcgatctcatccgggaggtggaatattttctgtaaatgctctctccaggctgacaaccccgacactgatttttccagcctgggcccgggccatgaactccagacttatccatccagcggtttactacttgatgtctctgcgtggaggtctcacagacatctctaacttagcatgcccaaatatggactcctgacttcacatcccctcaccccacacttcccaaccttccagtctttcctcatggcagtaaaagatgaccacatcatccttgattgcgctctctcttacaccccacattcaattggttaactgtcaactctcccattaaatggtattcagaatctgttgacttcaccccacccaagtccaaaccagcgtggtctctggcctgctgcagtggtctcctcgc

SEQ ID NO: 423532 - DNA, 424 bp, Homo Sapiens
agggaaaaaagagacaataacccctaaagggaagtgaaagatagatgggagaatttttcaagatgggagagatttaggtacatttattcctaattttattagagtcataaagctgtaactgatgcattgaagtcctggagaggatggcaagggatgatatccacagcacaggtggaagaaaagctaggggtggaaagataagagatttccagatatgagacaagaggttgagggaattcacattgggtgaccatgaatccttacctggaaggaagcccattggtgggcaggggagttggggacagtgggaaatgttcagagctgcagatatgaacagtgagtgagcttgatataccatacgatatttgctagatgacgctgaagttgaggataataaaattatactggcattctttggtatggc

SEQ ID NO: 423533 - DNA, 227 bp, Homo Sapiens
atgccagacataactggttctctaattatatttgacttttcctgtatgatctgtacagaatgccagatcccctttggaaggggcaagcacaaaggcagggacaggttggcaagacggagaagcaaattgagcagagccctacaatccttcctcttttggtggggaaacaggcacagggcaggcttctgcccagagaattgtactcatctgagggtcattgtccacgg

SEQ ID NO: 423534 - DNA, 221 bp, Homo Sapiens
tttactacctgtagtagtgtgaatggtgacctggtgaccctacaaaaaggtatgtcgtgtatctgtgaacaccgtgtgtactatgcaccttattgtggaaaatagtgtctttgtgcagactgtaattcagagcatctataagaccaagcatcatctatagtattatccgagggtggattctcaacttccaaggctctcgtgtcctttatcaagacacaaaa

SEQ ID NO: 423535 - DNA, 382 bp, Homo Sapiens
ggtgatctagaggatccctcagccatgtcacaagtacatgtttttctttgcaaattatttgttgaaaaaacagttctttatcttacaaagtttcttaccatttgaattttactaattggtgtagttttaataactcgtcagccctctgtatatagtcagcaagaaccccttcaagttggctgctaggtccttttaacatggtcctagaaaccagtgacagcttccttgttacctggtacgaggctcattttgttcacctcttgtcaaagagtcagaattagccatttctccaaaaagccttggctctttattgagaaaggctgcttgaaaaccataacctgggcactaagtttggttattactaaaatggtcacagtggagg

SEQ ID NO: 423536 - DNA, 341 bp, Homo Sapiens
gatccctcacgccatgccacaacactggaacagagcccagattctaggattatgtcctgtagttcacttgaccttgaagaacggctaacatttcagcagcataggtgatgggaagggattgcagagaagctaagagaactccaggtagagggatcaacagaagaaatttcacagagtctggctctgaaactgagagactaatgattgtgttcaaggagtgtcagagtaaggaggctggaaggcaactgaagatgaggctttgtgatgggagaagagatagtcttagactcttgtaacacaaaagatcagaatagagggttagaggttttgggggtttgttt

SEQ ID NO: 423537 - DNA, 354 bp, Homo Sapiens
ctgtctagagatccctcacgccatgtcacaaatcctcagtggcctaggtgtgaggatttgtggatggatgatgacacagcttcttcagcgagtgggcttgctgaagtgtttctcaggctagggtgtatgcatgaacacagtggatcagccaacttgagggctggttcactaaggtttgtgccaccaggatgttttttggactttgggtgcaggtgctcaggatgagtcagctggcttggggactggctcaccggggtcagggtctctgggttattactccaactggagacatgagtcatgcctgtttggctggcttggagttggtctgccagggttgggtctactcagctattt

SEQ ID NO: 423538 - DNA, 132 bp, Homo Sapiens
agcgttcagaggtcacctgcagcccatgtacaccagggtctatagtcatatcgtttcgtactctgatatctaataacgtcactacttagctgtaccaatggatctcttatgcaactttcagagatggagtct

SEQ ID NO: 423539 - DNA, 385 bp, Homo Sapiens
gggcgttctagaggatccctcagcccatgtcacaacatggtactgcacaataagcgacagtcaccatcatcagtgttttgcttaatctgatgtgaaaaaaagtcatatcacttagcatggatctacaggctttaggactaaactgaagaagtctgttcctaaagggatcttggaagggaatgcaagtgtgttaagcaccattactccaggtcccacagcatgtgctttacatgtgttatctcacacaacaaacctgtgcactacttctgatgctctacactctggggctcagggaaatagcggagtagcttactcagctagcaaggggcaaagggagcttaaagcacaaatctacttatttccaaagcctgggcctcttagggag

SEQ ID NO: 423540 - DNA, 278 bp, Homo Sapiens
  misc_feature (97)..(159): n is a, c, g, or t
gcgggtgatctagaggatccagaccggtattacccgggctaccttaacaaagcttcctccagcccagacagaagattatgtgtctcaaatagatgcnnnnnnnnnnnnnnnnnnnnnnnnnnnnnnnnnnnnnnnnnnnnnnnnnnnnnnnnnnnnnnntccacagaagcatctggagcctgcagggcgccctgctccgccctcatccctcccctgcaggccccgccccgcttccctacacagcgttcctgcagtctggctgggctggggagatttat

SEQ ID NO: 423541 - DNA, 341 bp, Homo Sapiens
tcacgccatgtcacaaggtgggcaaagacttgtttaactgctggattcctagctagcacctggaatacttgaagcccctttcaccttctccctctttgcaaactatggctcagctgcatctgtgccctcagttctggtccccagcttcccctgaatccccttcgtgctgttatttgggctttgtattggtacctaaccacattctacctgtagtgaaagctgaaggtcttggttcccactctaggtggtaagtttcttgagtggaggcaccagctgcatatactttaaagcatattcttttctgtatttccagcaatgccaggcacaggacctctgagttg

SEQ ID NO: 423542 - DNA, 362 bp, Homo Sapiens
gcgggtgatctagaggatccctcacgccatgtcacaagtatttagaatcagtctggcaaaatcatagtctgtctttccctctccgttcctcctaaggtacctcttttcctgaatctcccactctgatcatcctttagttctttgcatccaggcccttctaggtctcatccgaagatggctatgctttgctaactaagctgtaataagttgtgaggcctgaaaacccatctaaggtgtgagctttatttgcattttgagcaaaattatcatgtagtggttagcactttgcttattaatatggaggctgtgaggcataacatagcacgaagcttgcctgtaggaagctattttcggttgtggac

SEQ ID NO: 423543 - DNA, 273 bp, Homo Sapiens
agaaaggtccagtgagagttgcggggtgaatctgggaagagagaagaacatgctttaagtgaggagtgatggtctctgttatatgctgctgtgaagtaaagtcaggccagagaatcgatctctggctttgacagtatgaaggtcattaatgaccttaatctggagagttggggaggcagaaccctcattgtatggggaagtgatagcctgagctgaagaagtggagagggcaagtatggacagctttttaaagggtttcactttgaaagggga

SEQ ID NO: 423544 - DNA, 501 bp, Homo Sapiens
attctagaggatccctcacgccatgtcacaaatatcatgtctgccatgactatatagctaacattttgatagcacattcatcggttctcatatcgccagaagatggttatcaaatgagaaaactaaagctgtgtaaacaaacgaacctgtttgagtgaacaaatacttattgagacacactatatatcaagctctgtgtaaggcatgaatcatgcatgatctctggaacagagagctcacatcctggcggaaagacacataaacagctgaagttaacaaaatgtgtcaatgacaaaacagagtaatgaaagggctacaagaggaggcaagagaagtgtacccagctcctggaggtgacgtggggctgagtttgaaggatgatgtgtatcagccagacacagaagcagagtgaagggtagtctctggagcaccagaaagagtgctcaagttcaaaggaagacaactgggtctcattcaattcatgttgcctgttccttacat

SEQ ID NO: 423545 - DNA, 470 bp, Homo Sapiens
tcacgcccatgtcacaattcccacatgacatttccaggccagccagttcagttaaaggctgtcctgtgtcataacaaagccataactaggtcactcctgtctccaggcccctgtcccatgggctgtttcctcagctgagaagaatgggtagtcttctcctgcctgcttcctcccaggtctagctcaaggatcatctcttttggaaagaacatttctgatctcccaagcccacagtattcttggccatttctgaacatcctgtggacagagatggcctaaggatttacgtcctagcagtacagcagtcgctcccgaggggactacttccaagcaaataagacatctttgtaggtgttaatcatggaatgattattaaacttcaattagacaagtttgctaagcatccattagttttatagttatttctcatttaactgttatttctacattacaaatgaatcttattgcta

SEQ ID NO: 423546 - DNA, 198 bp, Homo Sapiens
  misc_feature (47)..(91): n is a, c, g, or t
tcacgccatgtcacaacatagtaatttccatgtaaatgtgagctgcnnnnnnnnnnnnnnnnnnnnnnnnnnnnnnnnnnnnnnnnnnnnntgtggatgttcattagtgtctgtgcattgaatggttagatgtttattgtagtcttcacagtctgggcttctttgtacctgtccttcttgggaaggctttccaagtat

SEQ ID NO: 423547 - DNA, 178 bp, Homo Sapiens
  misc_feature (109)..(127): n is a, c, g, or t
gtgagcgatctagaggatccctcacgccatgtcacaaacccttgagtcatccttctactccctttctcttataaccgacacccaatccataaagaatccagctggttcnnnnnnnnnnnnnnnnnnnggaaacggcttctccctctgttggcccaggttgggagtccatggggcacaa

SEQ ID NO: 423548 - DNA, 440 bp, Homo Sapiens
tgagagccagccaagtggggttagggttacatgggcaggagatccagagttcatgggatattctagagcttggtccagaggggcaggaattgtgagctccaggtgggcacctccacgtagaaccctggaactctttatcccaagaggagggccaggtcaggagcagggacttttaaaacacagggaccggggcagtgccctcttgtccaggtctaacggtgataatgaatggtggactgagggctggagtccagccttcagcctcagcatcctcccacccatgcctggttttgaggctcactgaccctccctcctgggatagccaaagctcccaggagggaagaaggtaaatagtctttgtatcccagtatctgacaccaagaaagtggccaccagtgtctaatgagtgtgtgaaagactggatggggtggcctagcgaa

SEQ ID NO: 423549 - DNA, 219 bp, Homo Sapiens
tggggcgatacgtcgcctctcctctggcggaaagcaccagcattcccacgggtctctgcttttcctcaaacgcatctctgtgtaaatctcccctcaggatcactctgtggcccccacgtgctctgggtggaaccttctttccagtggtgtttcagtcccctgggtctgcctcactcctcaccaccgtcttgtgcttctgcactgagctccagccagacc

SEQ ID NO: 423550 - DNA, 200 bp, Homo Sapiens
ggagatccgtttgtctgaggcactacacttactctaagagtgcagctcggtttggctcatttctaatcatttccttccaccctaagcaacttgagggcaaggcatgtggcttcttccagatgtccatagcttgctggcatgcaggagatactctgtaatgaattattaactctctttttattttgagacaaagggaaaca

SEQ ID NO: 423551 - DNA, 261 bp, Homo Sapiens
gggcgtcgtgtaattcggaatgaggcattactgaggtatacagtgcatcagtgccctgaatgacttctaaggtactgcctatcagctccgttatctcacattcacttgcttctcgctctagactccatagctcattcatttcaatacactactagtaacatcccatttctcttgaccactcccatatgcctggaactggatcaattcaaatgtctgctttctccaggcctacaacagactactccattgccaaaggggagt

SEQ ID NO: 423552 - DNA, 413 bp, Homo Sapiens
attagcgtggctcaagatcagacgggaggctggaagcatcttgggagggaggaacctcaagatgttacttatcttatgtccctgtctgtatagccccccaaaccagcagagctacagcaggtcatagaagctgctgaacaaagacttcttagtgaacaaaggcagaaagaagtgcctatggttagaaaagttaatgcaagctctggcacacccaggaaatggctctggcagagtcatacccagagctatacattggaattccttcctgtactagaaagactgcagaccagggacagatgcccaggaacgtggccagagcaacgtgtgtaaacattctagttccacatgggtcctttgtattccttccttcttactgctcctcctctcatctcgttctcttcccttttcctccc

SEQ ID NO: 423553 - DNA, 224 bp, Homo Sapiens
agcatgtgatggtactcatgacctttaaccaggtaatctcattctctgaaccatattttctaaccactcttataaatattgtgtaagccatctttaacacagctccagaatcaattgcaagccaatacattctgaaatcatcagccacaaatttgcttttaaaataaataaccttttgacttagtcatgtcgtataatgatgtaacacattaaaaaacacatgg

SEQ ID NO: 423554 - DNA, 289 bp, Homo Sapiens
cattattactcatttattaccacctttctgcgtaactatctcctgagacaaaatgtcttgttagttaaattttcacttatatcaaattaatacctgcacagagctttaaagtgaaatcattttttcaggcctataacataagacagcagtgtcctgcttcatccctactcccgattttcacaggccagagctcactgctccaacgctttcaggtgtttcatctgtattcatacttcaaaaatatctaaataacatgcttactgtgctatgttttgatttctcagcttta

SEQ ID NO: 423555 - DNA, 250 bp, Homo Sapiens
  misc_feature (73)..(195): n is a, c, g, or t
gatccgttgatttaggactcaactgaaaggcttaggccactggatttgcactagaactacgccattggctttnnnnnnnnnnnnnnnnnnnnnnnnnnnnnnnnnnnnnnnnnnnnnnnnnnnnnnnnnnnnnnnnnnnnnnnnnnnnnnnnnnnnnnnnnnnnnnnnnnnnnnnnnnnnnnnnnnnnnnnnnnnttctcttactaatgttttatattcttcagtaaaatgtcttgcctatctttaatta

SEQ ID NO: 423556 - DNA, 349 bp, Homo Sapiens
agcagttgtgactaattcatcttactatttattattttattcggatgaaaaatttacaattgtaacattatggcataaaaacagaactctgacgtgttagacaacatactttagacatcttcaggaatggctagctccaggtgctcagcaagggcaacaagaaatctatctttctcttggatttgctattttatctctgttgtccttactctccagcagactctactcatgcagtggtaaagatggcttacatcccctcagctttgcaaccccagtggagacagggtgcctctttcagcagaagtcctaatgctgactctcatcggctcactctagacaaagggaaaca

SEQ ID NO: 423557 - DNA, 442 bp, Homo Sapiens
gtacaataaatagtataggcaggcatatttctcccttcaggcactcgtcattgatccggggcatatctttcggctgcctgatatttgattgcatatatttataatagttatatcttcatggtagaatagatgcttatttcattatataactatactttaatgtctcttgtgcacagtttttgacttaaagtcgattttgtctagatataaatagagccactcttgctctctttgggtagacatctgcatggactgcctcgttccatccctgacaggagccatcatagttctgctcttctaacagggcaatgattctaatgtttctctgtgggtcgggagaccaggaaacgacagaccaatcacagaaaatgtgacatagtgcactgccttaagaattcttttctgtccttgtagacaacgggaaaccccgggcatcctctag

SEQ ID NO: 423558 - DNA, 273 bp, Homo Sapiens
ttgtcttacacaaagtgatctctcaacaaataaagcaatgtggtgttgtttagaaagttcacaaggatattaaaagaacgtttgttctacatctccaggaaatcacgtatttagcatttattgtcacaatactgaccctgtcaaaaatgtaatgcattatttggctttgcttctttttagagagctcatgacaactcccagagatcttctatcaaagctcaccatctgtttaataatgtacccccccttttctttttgggagacaaagggaac

SEQ ID NO: 423559 - DNA, 434 bp, Homo Sapiens
  misc_feature (209)..(217): n is a, c, g, or t
attgctgaaacaatcttacaatataaaacgtgaacatttggtataattaatatgttgtgctgcaggcataggaatgggatactgaatagaaactgagtgggaaactgaaaaatgacccaatgtactattttaacattaaagatgatgttctcaaagcagtgggtgaaaggagaggttactgaatacatgacatttgaacccttctttannnnnnnnnaaagtttcctactaaacactatatagcaaaataaaataaattctaggtggattgaaaacttaagggtaggaacgagccctctagaaggattgaactagcacacggcaatgtttatgcactctcagaagggtcaggcctttccaagtgtcgtccccaaagtggagtcacgaggaaaggacacaagagtggctcagcctcccagacaaagggaaacacc

SEQ ID NO: 423560 - DNA, 468 bp, Homo Sapiens
cgtacaataatattcaataatgcatgttttaaaaccgtgtaaaatgatttcaggctgagtgctcttctgggacttgcttatttcctaagacattgtggctctagcgattcatccacgtgacttctcttcttttttttacttctgtgtcataatctatcgtaagattgtatcacagtttattctctaatatatttggttaagtgctgttttccgctgttgtgactgtacaaatttctttgcctgtctcccaatggcacaggtgcaagagcttcttcagcatgtacttaccagcgtgtgtcattctttaaatggctgtattgactggcattcccacccgcgctatgtaactgttcctgatgagccatattctctccaagagtggttattcttaaatttggtcttaaagtagtctagacttcttttatatttaggatattacctgtgctgtccctgacaccctctcccaga

SEQ ID NO: 423561 - DNA, 128 bp, Homo Sapiens
cagcctgaaacccagattcataatatgaaatcaaagtcttcagaccttgtaggtgtcctaaaaagcacgcctgagtgacccactagttagcaactgccaatctacaatatcatacacaaagggaaaca

SEQ ID NO: 423562 - DNA, 205 bp, Homo Sapiens
ggcggtccatgtcacatggcagctgaaggaatgtagataggaaacaattggctactgtatttaaggtggtaactggggtcagaggacagtcagtgcactagaccagttcccttgcattgactcatggttaaatatagtacagactccacctgcatggttgcagacttgcctggcagctttttgctcaagctgagcctaagccacc

SEQ ID NO: 423563 - DNA, 316 bp, Homo Sapiens
caccagatgctcccaccaatcactgtgtgggtatcagctgttgttactattgtcattgttgttattagtgatgaagaaggcagctctggagtcaggaggaaccaggcttcaggcccagctcagctatctactggctgggaggtgtggggcagcttgcctagcctcggtctcttcctctttgaaatgggctgagtagtccagcctaagactattgtgagggtcatgaggcggttggcagagcctggctttggaggaggtaatggcagtgcagggaactgcccaaggtctcagagcaaggtggtgggagcatctggtg

SEQ ID NO: 423564 - DNA, 447 bp, Homo Sapiens
caccagatgctcccaccacaataaaaagcactgatttgtatcatttgccaatttgtatcaattgtatcggttcccaccaatgaacatggagttgggacaaaatgcatacaattggctcttgagagccagtgcaattgagacccaggacaccactggaatttacccagttactgaaaccagaaccctgggaaacatccttgattcttaaacctttcctacccctcgctatagacagacccacatcctcacacctctaccagttcctacttactcatacatggagagacccagatcctaacacctgtaccacagcctaccttctaagacactgacagactcagatcctcataatcctaatgggtcagatcctaccttctcagacaaggacagacccagatacccataccagggcaagatcctatctcctcagggtgggagcatctggtg

SEQ ID NO: 423565 - DNA, 624 bp, Homo Sapiens
caccagatgctcccaccctaaagtcagggacaaggcaaatatgtgtatctctctgctgtttcttttgagggtattaaccactttaagacagaggggtaggaagaaagttagaggcataagaattgaaaagtatatgtgggagaaacaagtcaattaagaaaaattgaatttacaaaaaattcagtgaggtaggatgtaaaatttacaaagttagtagcttttcatataagcttttgataagtagcttttcatgtgggcaatcagaagatacaatagaaaggaacacccatttattatagcaacagaaagacaacataggagtaaatgtaacaagaaatgttacagtggtgaccttgtattgcagtgttgtgtagtgtaaggtaagattacagttttctgttgttccaaatttatgggagacaaaatttaaaatacttgaagatacaaaaatgtacttgaacaagcagagagatattcatgtccttggatgggataactccacatcataaagtttttggttctcttcaggttacttttatgctaaactaattataacaatattaagtttttttccagaaactagactaattgacttaagtatattagggttgagagtgagcatgt

SEQ ID NO: 423566 - DNA, 448 bp, Homo Sapiens
caccagatgctcccaccagcatccctctaacactggtattatcaccatcgtattgttgaaggaaataaccttagaagacagtgccaaagccaaaatgagatatctagaatttacaacgttcagattcaatactcagtccacacgcacagtggcatgagcataaatttcaaccctagtattaatgtttatcaaacatttaattcactaaaaaattttcaattttcacaaggaatctacaacccaataagacccacccaaacatgtctcaaatgacatgtcaaagtgaattcactgacttactccccaaatggttccttttcccaacatccctacacctgcttatggtaatgctcttttctggataacctaaactcaaaaccttgataatctctttgcatctaattagctgctaaactttaagggctctgatcatggcactgtccataac

SEQ ID NO: 423567 - DNA, 568 bp, Homo Sapiens
caccagatgctcccaccattagcccacactagagcaattctttaggcattcaataatcagaacccacatagaatgttaattgcctcacatctggtaaccagagagttattctgtcctctggatagtgtaccctatgtttttattagcttttagtgcccacgatatttgcacttattctacttacagcagctacaaccctaagatgtgatttttcattcatcctgttcccctgaaatgattttggtttggccacgaacagaggacttcacatatatcatttatttatttgtttcatgaatacttttaagaatgcagtctgcataatggaaacagttcctgcctttaagagacttggaagttaataagaggactgaccaaggtcaccaagacatccaatatgaggcagtggtgtgagataggtggcactcgagggcagacttggtgcttatttgattttgggggactgggaacttcttcatgaaggaagtaacttttgagttgagccaaacaggatgaataggatgttcagaaacaggtgggagacaggccggtaccatcttagcctgtc

SEQ ID NO: 423568 - DNA, 585 bp, Homo Sapiens
ttacaccagatgctcccaccacagcagtggcgctggcctggactggtttcagcacatgaacagtgctcctgagtttgtggggaacagaacctcaggctgtgtctcactcagtccctccagaggacacggcacctagtccaggctcaagactccagcctccaggccacaactactgcaccatggccagcaagctccttggatgccttgtactctccatagactggtcccctgtccacaggcagctccctccttgacagatgtcaaggcctctgggtatccacctcccaacagagctggcaggcactagcagatcagttgactctacaatgcacccctttccaaagagaaggcagagcagcctccagcccgcaggactccctatgcctccccagttgcctgcaccatccttctagtggtctctctcaccttggccccccatggcactggcccttcctggtgccctccagtatccttctcccaccccaactcctgtgggtctctacaggcttcactttccactcacattctgcagcctgggatctttctctgcagagtcaggacctccatccattacttccagcagtc

SEQ ID NO: 423569 - DNA, 533 bp, Homo Sapiens
caccagatgctcccacctgaggcattgcagcttcttgggaaaagaagtcacatctttggacccttatcctgagaaatgatgcctagaccctgtgtatctagcacaatcttcacttgcacagaaccccatctctccctgacagcacacttgcaaagacacggggacagcaatccaggcaaacaacagtgaatacaatgaccctggggcataaaacaaagtggtagtttgaggaacagaaaggaaaccaatgtggctggagcaaagtgagtgatgaagagagtagtataagatgaggctagagaatcaggcaaagttagatcattgctggacctgactttgaaggtgtaccagagaaaatagaccggttgggagactactatagcagtccagagaactagggtgtaggcagagaagaaagaagatggactcagaatccataggtctttctgaaggattgagtgtagagaaagaactaaataggactccccagtttctgacttgagcaactgggtagagggtggtagcatctggtg

SEQ ID NO: 423570 - DNA, 576 bp, Homo Sapiens
  misc_feature (112)..(112): n is a, c, g, or t
  misc_feature (350)..(350): n is a, c, g, or t
caccagatgctcccaccctggaaaggggattctgacatcatcctgagaatctttggggaatacatatagcctgtagacccattcctctttgaccctataaagattctttaanagagtaataccctcgagtggttttcgtggccagacttgccgtgctcatttactctttgacggagaatggaacggagacaactatgcctcgctggagactccacatggccctagaaggtgtatgagattgtgcatttgagaagtgcgtgaagcttgagagactgggtctacttggtggacccacaatgggatactgctttgtcctctacgtcattgtcccgtacacaagcttttcctgngcagccggcattgctagtttagcatgggttgttctgttgcctgtttaacgttgtttcggcagtggtgtgtcaggatgcgggttttcttaatactttcccagctggttacttgagtggtggttacggaggggctgtcctggggctgctctggagctgttgaggtcgggtgtctgtctggatactcacagctggtctgtcgaggagaacgctgttctcgttctgctgc

SEQ ID NO: 423571 - DNA, 553 bp, Homo Sapiens
  misc_feature (92)..(112): n is a, c, g, or t
  misc_feature (120)..(367): n is a, c, g, or t
caccagatgctcccaccagctttctacccttcactatacctaggcctcaactcagctggctctctaggagttacttgtgctggccttaatcnnnnnnnnnnnnnnnnnnnnngaatcggnnnnnnnnnnnnnnnnnnnnnnnnnnnnnnnnnnnnnnnnnnnnnnnnnnnnnnnnnnnnnnnnnnnnnnnnnnnnnnnnnnnnnnnnnnnnnnnnnnnnnnnnnnnnnnnnnnnnnnnnnnnnnnnnnnnnnnnnnnnnnnnnnnnnnnnnnnnnnnnnnnnnnnnnnnnnnnnnnnnnnnnnnnnnnnnnnnnnnnnnnnnnnnnnnnnnnnnnnnnnnnnnnnnnnnnnnnnnnnnnnnnnnnnntgagctaccacgcctggccaggagacttggagtttcaggaggtcaagtccgtccttctcactggccaggctttgggacataatagtgtacctgaactagttgtccccacctcccagtgccctccccgttccaggtgcagcttcttggaaaggtcaggtgctctttcatactgttggctatacggca

SEQ ID NO: 423572 - DNA, 564 bp, Homo Sapiens
  misc_feature (227)..(249): n is a, c, g, or t
caccagatgctcccacccactctgctattacttcctgtaaccagagagaagtcactagaccaatttaaatagaaatctaggaaaatcctcatatgctagcatttcatggttcatgattcttccagaatttgagttattctgtttagtactcattgaggtaagaaaaaaaattagaaaagactgctccttacattatcttagagactaaggaatcacttttaaatccnnnnnnnnnnnnnnnnnnnnnnngcattttgaagctatctatgttcagtgtcagaaaaacaaagtctcctttttttgcagcattcatttgtgaattttggagcaagaaattaatcttagctgtaacattttaatgtcaagtaagcccctttctcataaccccatttgaagttacacatttggctaccatgaaacacacatgctggttaatacaaaccaagtaactctgaactgggaatacacccctaaatgacctattacttctttctccttctcaggagaactttaattttgttggctccaaaagcatttttaaaaacaaaacggttaaggaaggac

SEQ ID NO: 423573 - DNA, 434 bp, Homo Sapiens
  misc_feature (204)..(300): n is a, c, g, or t
caccagatgctcccaccactcctgaaggtgggtgctggtgggagtcaggatgggagctgggcaggtctctgactgcttacgtggacccctcctttcttcctgctgcgtcctgcgcagccctggctttcccacggagccggcacctgctggctgtgttctttttcccatctcttctgtggtcgtgtggttagtttctgtgtcccnnnnnnnnnnnnnnnnnnnnnnnnnnnnnnnnnnnnnnnnnnnnnnnnnnnnnnnnnnnnnnnnnnnnnnnnnnnnnnnnnnnnnnnnnnnnnnnnnctgagtgcggtcagcgctgagacctggtaaggggagaggttagcccgagggaacgtgctctgggcgtcagggtggcatgagctttagaaactgcagatgaggtcatcagggagtgcttggtgagacatctggta

SEQ ID NO: 423574 - DNA, 429 bp, Homo Sapiens
  misc_feature (77)..(197): n is a, c, g, or t
  misc_feature (199)..(233): n is a, c, g, or t
caccagatgctcccatcatggcaggagcagcgtatctggtccaatatagaggactggattaaagaacttaattcagnnnnnnnnnnnnnnnnnnnnnnnnnnnnnnnnnnnnnnnnnnnnnnnnnnnnnnnnnnnnnnnnnnnnnnnnnnnnnnnnnnnnnnnnnnnnnnnnnnnnnnnnnnnnnnnnnnnnnnnnncnnnnnnnnnnnnnnnnnnnnnnnnnnnnnnnnnnnccttgggcttgccttgctctttctaatgccaccagcctcgtctggcaggtgagggagtcatttctttgcactcgtacagttgggttaggccacgctaggaaggtggtaggtagaatagctaaacgttgaccacaaagaaggatgatctggagagccctggcctgtgttttaggggactgggtgggagcatctggtg

SEQ ID NO: 423575 - DNA, 505 bp, Homo Sapiens
caccagatgctcccaccagaggacagtgccccattcccatgccaaagggcagtgccccattcccacccagagccgcggggggtccagagccagtgagagggttctcaatgtagagtcaagatgcccaagcgcaaaccaggcctggccattgcaaaccagcacctgtctcgtatccttccagctgtcaactgctcccttgcctgggcctccatgccctgccttgctcctctctgccaggacttggccagggtacagtgcgtgtgggggtatacctgggcctgagtggcagttagggggccccgcagtgaggaacagcaagcatgggtttggtcccggtgtcccctccccctttgccccagcactctcttgaggctgatgatttggggagacgccagtctgaccacagcgactcaggtgcctgcttccctgcctgctccctgtactcctcaattgcgttgcttggacttcgactcaagacaacccctggggttagagtatactgttc

SEQ ID NO: 423576 - DNA, 586 bp, Homo Sapiens
  misc_feature (137)..(241): n is a, c, g, or t
gcagaattgcttacaccagatgctcccacccctctgctgctgggcaggcttggtgccaggcactgaacacacagctgagtcccagatggatgtcttagtgtcaggagacagagtaaagttctaggcctattgtccannnnnnnnnnnnnnnnnnnnnnnnnnnnnnnnnnnnnnnnnnnnnnnnnnnnnnnnnnnnnnnnnnnnnnnnnnnnnnnnnnnnnnnnnnnnnnnnnnnnnnnnnttacaccattgcacccagctgcctgttgtctgccttgacattcgtcccaaggtgctgtgacccagttcatttgtctgtgtcccctaggagactatgactttccttgcaggcagggttgtaccttctcatctgcaccctcagtgcactcaggcagggtagtgtccagaacatgcttgaagacaagaaaggttccccagtgagtcatgcagagcaaaacggaagcagggcaggaggcaccaagctggcaggcagggtctgtcccagatgtctgttgtcctgacgaatgatgtgctaaccacatgcaggcgactgggatggagaagagcagggagtgagtctacctgc

SEQ ID NO: 423577 - DNA, 602 bp, Homo Sapiens
caccagatgctcccaccacaccagatgctcccaccttacttccttttaaaattatattgaaatcctagtcccagatcctcttgagaatttctctagtatattacatagaattatattttaaagccacacactaaagacagtttaggagtgatttaaaaaatggaatttcactttgattctgttaattcaagaagaggatcttcaaacactgtaatttacaaaaaacagagacttgctacacgacatactttaacgcaagagctaaattcctgaacagtttaactcctcctatcatttttactcagcagaatttcaaatagcagcttgtgtacccaagttatttacatattttcttccttaatcatctccttttcaaaggacatagagttcatttaacaaccagttattatgtcctagttttattgctatttttatttgctttctttaatgaatgactcatttccaaaaccagtttgtaaagtaatactcatttccgctatttcacgtaaaaagcacaggtccaacaattgcactctttaccaccccttcccgtatgtctcaccaccaaatcactataagacatcctaaattacaaacagatt

SEQ ID NO: 423578 - DNA, 571 bp, Homo Sapiens
gagtaaggcttacaccagatgctcccaccgaatttaaaagctgaatttttaaaattcagaatatgtttcgtgatggcacacatatccagttctagagttccctctgttgtcttctatccaggtggtctcactctttacattacttgcctagttcctgtatggacccttgagctcatggaagaagttctgagcatggcataggaagtcttgcataacctgacctgcctgcctttctgtctcatttcatgcttttaactcaaatttgctgatgccaaggctcatgtttatctactacaccgcactaattaatgttacttcttttcttccttgggcttatgaaatgtgagaagccaatgcaaataagacatggaacaacaaactcaaattacaaggtaggagtgtctgtggggtgggtgtgaatgacagagactgggacacaggtgagtaaaagtagtactgtggaaatcccatccagattggataatttattaccccatttatttcagtgtcagggttaaggcagtacaacaattgatttttctactccctgtgtatcattcatttttgtagc

SEQ ID NO: 423579 - DNA, 623 bp, Homo Sapiens
gctggagtatcggcttacaccagatgctcccaccttatgctggtacaagtgttcatctcccagatgaaccaggagagctgcttctgctttacaggtggggaacgcaaactcaaatgatactcaggtgaaattcaccagtgacagaatgcaggcgcacaggtgaagacccagctccccaggtcagagctggtctccatcagactcatggtagcaagcccgggaggaaaagaatcagagggtcccagacacacaacacctgcctcccagcctcgacctcccccggcagctcctgtgcggtgcagcagggcactaggagtcaaggtggcaggggctaagggaggtaaatcaggtggacaagatgaagggaaacgtgttacagggccaaacagggcctggtgcttaggtgtgtcaaatatgttggtcaaactgaagggttaaacactaaaaagctagcggatctcaaaaatacccagaacctcttccacacatcaatgtcactaaggctgtgccatgccccttagactcgctcctggaacgaggagaaaccctggggcagctcttgttcttgggtaaactgaaagacctgagcctctagaacagtacagtcccagacacgcctacga

SEQ ID NO: 423580 - DNA, 560 bp, Homo Sapiens
caccagatgctcccaccccaggttgccggggttttcttgggaataattccgaagttgacatctctgtttccttccaggaaaggttgcatcagtttatgtgatcatgttcaagtccctcgaggttggactcagaaccaagctgaatgctcaggaaacaagtaggctggttctgcagtctgagcctggaccctgtctgtttggaggctttccttctctctttgtgaacattctctttagaagagagctctctttctgcacctgtggggatcatcaccaccatgtcagaactgagtaagttctgtggttagtttttatagctaacagagtttcccatcgttgtccagcaaagggatggagcactggatgggtgaggattggcatccagaagaaagggtggcatgaagggtccacgtatctctgcccaacttctgggctgcctctctgtctcatgagctcatctgcacttggtggtctctgcagccagggtcagaccgtcgagagacaggagcagccttgtgtgtttcctgagtgcctattggagtctaagttctagaatagtg

SEQ ID NO: 423581 - DNA, 129 bp, Homo Sapiens
tgtgatctattttataaagaatatcctacaagttagacattcatataacagatgttgccttttcaattcatacactgttagggtggccagagtgtgcacgcctttatatctagaatatggcagatattc

SEQ ID NO: 423582 - DNA, 346 bp, Homo Sapiens
tcatgtcccataaatacgtaaaattaaaaatctagggttacacagtttcattagatagaaggaaaagaagaacaagttgagttataatttaaaacgtgttgttaacatttattgatctttatcagctaacaactccaaggcagaaataatttacggctaagttggatgaactgcgtattgatctaaatcatgcaacgctttttcagggtcttagtcaaaataaggccttgataattagagcaggttaagaacggcagggtggcaatgcaaattattgctttaaatagaatgaaagagagcagtatcctagcgccctctccacctccaaccctttttaactcacagc

SEQ ID NO: 423583 - DNA, 290 bp, Homo Sapiens
ccagaattcgtccctgtggatcgggatcagcactcttccccagggcatctagtgacagccgtgatgctgagtccctcagcttttccccctaccccaatgctaactcctcagggccttttaaagtgctgacctgagcttccaggaagctatgttttgtttattctcttccccactcttacttccctccttacttaactcttgctttcaagttttggtggcctcacagggttccaccctcctttctttgcgttctgcatagtatctgattccagccaccttcagctcttcac

SEQ ID NO: 423584 - DNA, 325 bp, Homo Sapiens
  misc_feature (14)..(14): n is a, c, g, or t
  misc_feature (63)..(63): n is a, c, g, or t
  misc_feature (260)..(260): n is a, c, g, or t
agctctttccccgncaaaagaacattttcaaaagccctactggcatagcacatttgacactgngtatttctatgccattgctacctgcctgccacctccttagaacatctcctttctccccagtggcacctcccactcaaggcccatggcctgggcagctagaagcagtcaggagcacttcccctcccctcacgactcacactactcttagaaaaccatgggtgagaccacttctcaacttacagagtaccgcccatgtnagcatttgaatcagggcttggacatgtgaagctacaggagaaaaagtggttaaaagcagacctgg

SEQ ID NO: 423585 - DNA, 339 bp, Homo Sapiens
  misc_feature (36)..(36): n is a, c, g, or t
caggagggaagccatgcctctgtaaatgagcccagnctggtaacgggggagccacccaactgcaggggggtgtatgttcaggtgtgaaaaacagaaaactgggtctgaacatgaagagttgcacagcagtagttcgaagaagctggcatctctttggcaaacaccaacctcagcaaatgcaactcctacacttcattcccaaggaccaggtgttgctccttaaggaactctgtatccctctctcctctccagaaccccattcctcccactggctgagcttttccttttccctttccgggtcacccatagaacctctccgtctgttccagtgcgtctgtg

SEQ ID NO: 423586 - DNA, 181 bp, Homo Sapiens
tgttcttcagagactgacgtctgcactccagagaacaaagtaatgaaaatcaacgctatttatactaaaataaaaaggctgttaccactgtgcccatcgttgtttctctactgaatttgtttcacagtcggccttcctatctcaccttctcattttgcctttagttttttttcacctgata

SEQ ID NO: 423587 - DNA, 431 bp, Homo Sapiens
tgtcacaaaaagcattcttttctaataagctgtcattctataattgcccatcacagtctttatgaacacatagaaagcctatacagttttggtcctgaatagtctcttgtgactaggatgattgaggtgttaattcctcttccttataaaaaggcttggaatcaaaaatattttaaaaggccgtggtttcgtttcagacatcaaccatctaaaacgggattttaaagcgatattttacaagaatgaaaggcacaattgttgatctgtattttttacacttcagtttctaaatcatgaatcgttgccttccacaggaaccctcccttatacattacttgagtgttgtgtagtttttcttcagccaggtatttctctgcctagagaggggaagagaaatgtgttctccaggactgatcccctttgtagatttt

SEQ ID NO: 423588 - DNA, 182 bp, Homo Sapiens
  misc_feature (20)..(20): n is a, c, g, or t
ggtcggccctcatgccatgntcacaaggcatataccttgagagttttcaaatcctcagagaaatttagatattctgtggctttggcattcacctaatgtgttaatctacaaaccttttttacagtgtggattttttttcatgatgtgaattcaggtggtttctaatggtctcttcataaagt

SEQ ID NO: 423589 - DNA, 131 bp, Homo Sapiens
acggctcggtccggatgtgtagtatatgctgagaaagttgcgacagaggaaagtggatggagagttttggaaaagtgaaaagggctcagaattaattgagcagaatgggaatcgtttccagcaattctcag

SEQ ID NO: 423590 - DNA, 357 bp, Homo Sapiens
gttatatcttaaagtgagttactttgggtgaggtaatgtaggtggcagtgcctctgtttgagaattattttattttgtcctagattttggaatacagagtacttacgaggtcttttatttactccgtttatttgtattgtctaaaccaagcctttaatactagtgtgtgctttggcttggttataaaatatctgcagcaaaataatgataatttggttgtttggaaacatatttatacagagaggtagagtatttaggccaatggctgtcttagttgatgccccagagggcagtctagaaattagcatatttagcaaacaagctggtctacttttcctttcttacacttattcctcc

SEQ ID NO: 423591 - DNA, 508 bp, Homo Sapiens
  misc_feature (473)..(473): n is a, c, g, or t
tcgagtcggcctcagtccatgtcacagtcccttgtttagttccatatgtcccttggttccccttttcaaatgaacaggatataaattataagtaaaaacctcctgagttacttccttattccacctctctcccactagatgtaaactccttgaaggcaggcagttccctatagatcctgttccacatttaacacaatatccttaacacaacgcagacctaatacatatttgctacctaaggaaggctaagagcaggtaatgattgaggcacaaagggaaagagagaaaacactggtcagaaaactgactggtttatttcccctttattttctcctgtcagtcctgtcagaaccattctagaggccaaggacctagggtggccagtctgcacagccatttgagatcccaaatcagggatctgccctccattggttcacctttggtcaggggagaattaaatgggcacaccaggncaggtccctgagatgtggcagtttaggcagaggga

SEQ ID NO: 423592 - DNA, 464 bp, Homo Sapiens
  misc_feature (335)..(420): n is a, c, g, or t
tcgagtcggtcctcatccatgtcacaaatggagaagaactttctgggggcagagacagcagatgcaaaagcccaaaggcaggaaagagtttgggttgtttaggaagtgccagaccagtaagttggagtgtcacgggcaagggcagagtggcatgtgacgaggctgggaaaggcaccgggtgaacacgaggctcccctcccaattcccctcttcttaggatcacagccttgcattgcctatttctgctgcctagaaacagttggctcataaattatttccagttttatagttgtttacagagacagggcttgtctggatacgtcatggccagaggnnnnnnnnnnnnnnnnnnnnnnnnnnnnnnnnnnnnnnnnnnnnnnnnnnnnnnnnnnnnnnnnnnnnnnnnnnnnnnnnnnnnnnaagcaggaaagatgtcttgaaagaatgagtgtgaaaatgagatg

SEQ ID NO: 423593 - DNA, 169 bp, Homo Sapiens
acgctcatgtcacaaggcatatcctgagagttttcaaattcctcagagaaatttagatttctgtggctttggcattcacctaatgtgttaatctacaaaccttttttacagtgtggattttttttcatgatgtgaattcaggtggtttctaatggtctcttcataaagt

SEQ ID NO: 423594 - DNA, 124 bp, Homo Sapiens
aacgtcatgtcacaagctcagcagaaagggccatgttatgaacacccgcgtcttccttgtgctcccaccagcaactgaatttgaggttctcatccttcaggtcgggcttcctagcccttgtgga

SEQ ID NO: 423595 - DNA, 410 bp, Homo Sapiens
tggactctgtatattatttgcaaatgtatatgaatggtctcatgcagcagataatcttttgagataggccttcttgacccagcacaattcccttgagagccacccagattttttgcatgtatcaatagtttgctcctttttattaatgagcaatattccagtggcatggttgtaccagtttgtttaaccatttatctgttgaaatacatctgggttgtttccaatgtttggctattacgaattgagctgctacgaacattcatgtacaagttcctacacaaaaataagtcttaaattatctgaaatacattgcccaagagtacaattactaggtcatatggtaagtctatttttagtcttaacaggaactgacaaactattttccagagtggctacaccattttacgttc

SEQ ID NO: 423596 - DNA, 452 bp, Homo Sapiens
cgtgcttatttattattaattggcctccataaaccttcactctgaccagaagagcgtgctggcattatcaggtcccccagtattggtgtagtttagaactcaattgtaataggcctcaaaaagtttgggatttccctttccccagtgcagttatccatgctaaacagtccttacatgctgtttcctctgtctgacacatttcattctccctgctttccttaggtattatctgatttccctgactaggtcagatcagccatatgttactgcatgatgtgcatcttttttttcagtacttacaacagtagtagttttatattaattttctgtgtttattttattgatgccagtctctatgtaagttccctgagagtagtgtcattacctgtttgtgcactgccctgtcccttggtgcctgtgtcacatattaggtgattaataactatttgagg

SEQ ID NO: 423597 - DNA, 454 bp, Homo Sapiens
gacggcactcgggacttctgttctctgcagcatagataaacttatctcatccccttcaaaagcttctttagactgagtcagcagatataccaaataatcctatttgcatcacagatccactcctttcctggcacacatgaagatgaacaactttagggtttcagtggggagcagaggggtactgtacactttctggagcagagggatgtgtgtcagcgctctgctatgcccttttcttacccaaggcggggtgagggaagagtgtcctgccatttaaaccataccactcagtgactcactccatgagttcccccacccttgatacatacacatggatgaccaagcacattaagtgctgggtgttcagaatacagctaaactgtctgattacaacccaaagcctgggaaaccttaatctctgttcccttttccttcatgtattccttcaagatat

SEQ ID NO: 423598 - DNA, 388 bp, Homo Sapiens
catctggacttcttctgagtcatgcttttaataaccttcatttctatgatagcaacacaagataaggcaatgcagtcatttagataacacacaaactgcctgccaggatcctgggtttgttccaattctcctcttaggcaaatcttttatctccctttgatatagaccagggttctaggttctatagtgcactaaactaatgaaaagaggttgtctttttctcaaatgttgtgacatagaatttagatttgaaattatagaattacagacagtaaagcatcctatattatgtaatccaactttttaagcaaagtaggaattccaattcagaattcctttctgtctcattcagcctctatgcaaatgcatccagacatatgaaattcac

SEQ ID NO: 423599 - DNA, 272 bp, Homo Sapiens
  misc_feature (182)..(201): n is a, c, g, or t
gtggacttcttagacatacagaaggtccacgctacattacctataaggtcttccgagattatcacaatctggcaagttctcttccccaaacctacaaagctctataaagctttaacaattaacaaaatctttgttacattaattacttttgttttattttcatctttaattaagctgtaaannnnnnnnnnnnnnnnnnnnggagacggagtctctacttctgtcccccgggcgtggagttgcggggccccctctctcagctcagtgcaccc

SEQ ID NO: 423600 - DNA, 226 bp, Homo Sapiens
  misc_feature (146)..(166): n is a, c, g, or t
tggacttctatggttccttctgaaaactggaatatatccgcaccaggaggcagtgctgtgctggagataataaacatatctagtgctcgatctatttatatctgcagttcatgaatttatttgtctaccaacacaagtttctttgnnnnnnnnnnnnnnnnnnnnngggaaggaatccccccttggcccccaaggtggaatgtgaggggccgcacctcgggcacag

SEQ ID NO: 423601 - DNA, 166 bp, Homo Sapiens
accagaacttggcactctttgccagtgagttacttaattccaatcctgtgtatcaaatttctgaattaagctttctgaatatcacgggttactacaactggccttaagccaaaagtctgataacctaggctgggaaccatgtaacccaggccaagaaggtccgttg

SEQ ID NO: 423602 - DNA, 123 bp, Homo Sapiens
ctgagtgagagatttatcgggatgacaattccagtttcccttacattttatttaatcaacattcccctgatgattgtggcctggtatcaaattggacataagtttacagttttcaccttcata
